United States Patent Application Publication US 2023/0235365 A1 - sequence listing, part 4

SEQ ID NO: 9421 - RNA, 1011 nt, synthetic construct
  source 1..1011: mol_type = other RNA
atgagtcaggagctctggaaatattgtaccaaggaacagtgccgggattttcttctgtcattgcggctgacaggctctctgtgccacaccgatgagaaaagggtagccctcttgtatggcctgagcaatcatgtcgatgaacattatcatatccggaaattgcctaagcgcggtgggggatgccggacaatatgtgagcccgatcccctgctgaagtacgtgcaaaagcagatcctctgtagggtactatctcagttttcaccagctccgtgtgcttgcgcatatcgaaaaggtatgtccctgagggacaacgccctgcctcacacggggaaggagaaggtgttgaaactggacatccgggattttttcggcaacattacatactcttccatctatcaacacgtgtttccaggaactatatttcccccttccgtccgcacactcttaaccagcctgtgttgttacgacagcgtgcttccacaaggggctcccacctcaccgtgcattagtaatctggttatgaaaccctttgaccagtacatggagaactggtgcgccaaaagatccatctcctataccagatattgcgacgacttgacattcagcggcagcttcgatcatgtgcaggtgataaggaaggtgagatctttcctgaagcgtatggggttcgaactcaatactgggaaaacgaggattataactcgcggcagccgtcaggaagttactggactgaccgtcaacgactcgcctggagttccaagaccatacaagcgagcccttcgacaagaatggcactacatcaagaaatacggaatttcttcccacctcgaaagaaccagcggtatcagtagtattacattagaggcaaagaagcactacctaattcagttagcgggcaaggccggctacatccttcagatcgatcctcaaaacctcttcttccaggagatgcgccaggagatccttcagctgattcaggagactggttggcaggacgcatcacagaattga

SEQ ID NO: 9422 - RNA, 1065 nt, synthetic construct
  source 1..1065: mol_type = other RNA
atgggagctgtactgatcaatcatgacacccagatagaggagaagcagagtgaggaaactactgatagtccagccggacacggcctgtggaagtattgcacacccgcccaatgcagggatttcatcctctccctcaacctgaccggaagtatgaggctcagctccgaaaagcagttagccttgctttacgggctctctaatcacaccgaggaccactacgcaaagaaaaagattcccaaacgcaacggcggcttcaggacactgtatgcccctgaccctctgctcaaatacgtgcagagacagattctgcggaaggttcttgtgcagttcccggtgagcggttgtgcttgcgcctaccgatcaggggcttctactcgggataatgccctgcctcatgtagggaaggaaaagattcttaagctagatatccacgattttttcggaagcattagctacatctcagtctgccagcacgcgttccccggcactatattccccccacaagtgcagacacttttggctagcctgtgttgctatgattccatgctcccacaaggcgcgccgacatccccctatatctccaatctggtgatgaagccatttgaccgctatatggaggaatggtgtcgtcagagagacatttcttacactcggtactgtgacgatatgaccttttcgggttcattcgacgctcgaaaagtgaccgcaaaagttcgggcgttcctgttgaggctggggtttgagctgaacgaaaagaaaaccagaatcataactcagtctggcaggcaagaagtcacaggtctagtcgtgaatgaccatatccaagttagcaaagcttatcgccgccgcttgagacaggagtggtactatattcggaagtacggcctcaaaggacatcttgcacgaattaactattcaaacacagaggaggcctacttagcctcttttagtgggaaagtcaaccacatcctgcagtgctgtcctgaggacgcatactttcaggaaatcaagttagccctgcagtcccgtaccgacaccagaacggatgcagccacgtatcattga

SEQ ID NO: 9423 - RNA, 987 nt, synthetic construct
  source 1..987: mol_type = other RNA
atgtccggtgacctgtggaaatactcgactaaagagcactgggtgcgcttcctactgtcccttggccttaccgagccactgcaactctctgaatctggtgctttaccgcttctatacgagttaagcaaccatccggaagcccattacacgctgcaccggatccccaaacgcagcggaggcgttcggttgctccacgaaccagataccctcctgaagaccgtccagcggcagattttgaagaatgtgctcaaaccccagagcgttagtgattgtgcaagagcctatcgggatggggtgtccctgaaggacaacgccagtgcgcatactgggaaagctttgattcttaagctcgacattcacgactttttcggctccatatcatacctcaatgtgtttcagcacgccttcccaggcaccttatttcccccagcagtaagaacaatgctcacagcactatgttgctgtgatgacgcacttccccaaggggcgccaacatctccctatatctccaatctggtgatgaaaccttttgacaactacaccgatatatggtgcaggcagcgcggcatcagctatacacgttattgcgatgacttgactttctccggagactttgaccctagggaggtgcagtgcaagaccgaaatgttcctgctgagactgggtttcgagctcaatagaaagaagactaaagtcattcgatctagttcacgacaagaggtaacagggctgactgttaatgagaaggtcagcgtgcctaaggaatataggaggaaactccgtcaggagtggcattatatcgagaagtttggattggaagaacacctgaaacgaacggccggacctgatacagcctcacccgagttgaccaagaagtaccttctgtctctgtcagggaggatcggccatgtgctgcaggctgatcctgaaagtgcttacttccgcgagatggccagcaacgtcaagaccctgctgcagaacggatga

SEQ ID NO: 9424 - RNA, 1002 nt, synthetic construct
  source 1..1002: mol_type = other RNA
atgcaggcagtctgtaggggagagcaagatatctggaagtattgtactaaagaacagtggaaggagatgatctgctccttcggcctgctgggcgatcccgagataccgcaagagattcaaatggcggttttgtacagatttagtcgtcatagtagttgctactatagggagaagaagatccctaagcggtttggcggtgtgcggtgtctgatgattcccgactctggactgaaagccgtccagcgccgaattctgaagcacatcctgtctgaaaggcccgtctctagctgcgcttgcgcatatagaaagggcgtggggattagagataacgcagccgcacacgttggacaggaatcggtgctgaaactggacattgaggactttttcggctctatcaccagctcagccgtgtacgggcttgcattccccggtactttgttcccaccacctatgcgcggactgctaacagctttgtgctgctgtaaggggcgtttaccccaagggagtcctgccagcccggccatatcaaaccttgtgatgaagccattcgacgactccatggacctctggtgtagacagcggggcattagatactcacgctattgtgatgatatgacattctccggtagctttgagccaggggaagttatcaggaaagtgcaatcataccttagcgagctggggatgcgactaaatagacgcaaaacaggcgtatatgcgaaaaactgccggcaggaggtgacgggcatcaccgtaaatcagaaagctcagcttagcaaggattacaggcgaaaactccgccaggaatgctattactgtagaaaatatggcatcgaatcccacatggagcggttaggggccggaggacaggaagccgaagagcaggtcctggctcggttgctcggtaagatagaatacctcctgtccgtggaccctgctaatagggagtttcaggcccagcgcgagtactttaggaagctcatgaagaccctccatacctga

SEQ ID NO: 9425 - RNA, 1014 nt, synthetic construct
  source 1..1014: mol_type = other RNA
atgggagagacaggattgtggaaccactgttcaagcaggcaatgtgtggaaatgattctgtccatgaagttgctcggttacgcaagccttacagaagaacaggagctttcggtcttgtacgaactgtccaatcatgccagcagacattatcgtgaagctgtcatccctaaacgtaccgggggagttaggcacttaatggttccagatagtactctgaaagccgtgcagcgtaggatactgcggaacgtgctgtccggcctggagctatctgaacaggcttatgcttataggaaaggagtaggcatacgagaaaatgccgctgttcatactggccaggagaagattctgaagcttgacatccacgacttctttggtagtatcacctccagctcagtctacgggctggcattccccgggacggtctttcccccacaagtgcggggcctgctgacatcactctgttgtctccgagggcggttgccacaaggaagccctgcaagcccggccatctctaatctggtgatgcgccccttcgatgagcacatgggactctggtgccgggaaaggaatattagatactctcgatattgcgatgacatgaccttttccggtagcttcgacgcaggcaaggtgatccggaaggtgagtggcttcttaagtgagcgcggcatgcgcttgaattggaaaaaaaccggggtttacgggaagaactgccgacaggaggtaacaggcctgaccgtcaacgagaaggtgcagctccccaaagagcttaggcgccagcttagaatggagtgctactattgcagaaggttcggcactgaatcgcatatggagagactcggactcgccgagtctgagtccgaggagcactttctcatgagactactgggcagactggaatatgccctgtcagtgtctcctggtgccaaggaatttgagcaggaacgcgaatactttagagagcagttaaaagcgctacgggagcggcgcgcgcaaaagaaccagaaggggtga

SEQ ID NO: 9426 - RNA, 1053 nt, synthetic construct
  source 1..1053: mol_type = other RNA
atgagtgggaatctctggaagtactgcacaaccgaccagtggcaagattatctcttatctctgcatctcggcggctcgaacctgcctctcaaaaaggaaatggccgtcctgtaccatttttcaaactgccaagaagaacactatcggaaaggtcgaatcccaaaaaagtctggggggtacaggactctgtggatcccggacggtcaactggcgggcatacagcgcagacttctaggccgtgtccttgaaaccatggaggttagtgagtatgcggcagcctataggaaagggatgggattagccgatggagcccgccctcacgtgggcaaaccggttgtagtgaagatggacgtaaaggatttcttcggctcaattggatatttgaccgtgtacagaaaggcttttcccccatggctgttccctgacccagtgagagggcttttcgccagcttgtgttgttttcgtgagacactaccccagggggctcctaccagcccatacatcagcaacttagtaatgcgggattttgactgcagcctgggctcatggtgtcgggaacgcggaattgcctatacgagatactgtgatgacctgactttttccggggactttgatcctggccaggttatccggaaggcaaccgcattcctcgaggctatggacttttccgtgaatagggagaagacacgagtgttcactagaggtgcacgtcaggaagtgacgggactggtggtgaatgagaaactccaggtgcccggcaagacaagaaggcgcctgcgccaggagtggcactattgcaggatgtacggggtcgaggagcacctgaaacaaacaggacttgaggagtccccagagcattacctggaaagactggcaggacgcattcagtacgtcttgtctgttgaccccggtaactccgtgttcggtcggatgaaagaagaagtcgctcgggagttggctgtccgaagggccactggcgccagtgaatccttcaggcccggaagcgagtctgatggcaagatacgaaccaagaatcggcagaaaatggattga

SEQ ID NO: 9427 - RNA, 987 nt, synthetic construct
  source 1..987: mol_type = other RNA
atggacgaacggacaaacatttggaagtactgctcgcgcgagcagtccatggaattcctgttgagtctgagactgacagaagatttccgaggcgcccaagatcacaggttggctcagctatacgaaattagcaatcatccacagcgccattaccggaaagcagttataccaaagaaaactggaggcaaccgtgtcctctggatccccgataccgagctcgccattatccaacgtcgcattctgagaaacgtgctggaggagcgccccgtgagctcttatgcagccgcttatagaaggggccaagggcttaaagatcacgcggagtgtcacaggaaccagaaactgttagtgaaagtggacattcacgacttctttggttccatctcatggatgcaggtttaccagaaggctttcccctggtatctctttccaccgagtgtacgcaatctgttgaccaatctatgctgctttagggaagcactgccacagggagctccgacctcacctgccatctctaatcttgttatggcgtcatttgatgagagcatgggaggatggtgcgaggagagacaaatcagttatacacgctactgtgacgatatgactttctccggggaatttgaccccggcatggtcatacggaaagtgtccgcctatctcgaacaaatgggtatggtcctgaacaggaaaaaaacccgagtctacacccggggttctagacaggaggtgactggcctcacggtaaatgaacgggttcaggtccctagattctatcgaaagaagcttcggcaggagtggtactactgtaagaagtacggggtgaaggagcatatcaaggctctgagccttgaagcagaacctgccgcctatttagccggcctgatggggaaggtgcagtacgtgctccagattgaccctgaaaacagggagtttttgcagtatcgtaaggagatccaggaggagataacaaaaaactacgagaattga

SEQ ID NO: 9428 - RNA, 1020 nt, synthetic construct
  source 1..1020: mol_type = other RNA
atgtccggcgaactgtggaaatactgtggaaaggaacaggagaaagcttttatcctgtctttaaatcttctgcccgcctctatgagagaacgtatgtcaggcgaggcgcagttagccctactttacgttatgtccaaccatgtcgaacagcactaccgcgaaaccagaataccgaagaagggtgggggctcacgcagacttctcgtgccagacggaatgctcaaaggcgtgcagaggaacatccttcatcactgtctggacggtcgatctgtttcacgtcacgcctgtgcctataggagggggctgtcgccggtcgataatgcagccccccatgccgggggagaaagggataagattctcctgaaactggatatacgaaacttcttcgattccatcctgttcccaggcgtgtatggagctgcttttcctgagagtctgtttccccctgccgcggctggattgttgacccacctctgctgctgccacgacagactccctcagggtgcgcccacgagtcctgcaatcagcaatctcgtcatgaagccattcgatgactacattggaaaatggtgtgaagaaagaaaggtgatttatacccgttactgcgatgatctggcatttagtggtcggttcgacgcaaaggaggtttacaggaaagtaagaggctttctcgcagcaatgggcttcgaattgaatgaagggaaaacagtgatcgccgggagaggtcgcaagcagactgtgacaggccttgtcgtgaacgagaggccccggacatctgcccaataccggcgaaagattcgccaagagatgtattactgccggaagttcggggtggaggagcatctacggatggccggattgctgaatggacgcgaagacgctggggagactagcgagaaagctgacgctttcctgcagtccctgagcggcaggatcggctatgtattacagatggagccagagaaccgcgagtttctggagtatcaagagatttgtcggaagatgatggacagccactga

SEQ ID NO: 9429 - RNA, 1029 nt, synthetic construct
  source 1..1029: mol_type = other RNA
atgagttcgaaattgtggaaatactgcggaacccaacaggagaaggagtttctcctgtcattgaacctgctgccttctgggattagagagcgcatgtccggcgaagcccagcttgcattgctctatagcctcagtaatcacacgcaaaggcattaccgtgagacacgcattccaaagaaaggcggcggctctagacgactcctcgttcctgacggactgctgaagggtgttcagcgaaacatcctgcaccactgtcttgatggacgatccatcagcgcccacgcttgtgcttatcggaggggtagatctcccatcgataatgccgccccccatgcaggtggcgaaaaagggaggctgctgttaaagctggacatccgtaatttcttcgactccatcctattcccacgcgtgtacggggcggcatttccggagtccctatttccacctgcggccgctggcctgctgactcatttatgttgctgctacgacagactgccccagggcgctcccacaagtcctgctataagcaacctagtcatgaggccgttcgatgactacatcggtaagtggtgtgaggccagacagattacttatacacgctactgcgacgatctcgccttctcaggcgtgtttgatgccggggaggtatacaggaaggttcgtggaatgctcgaggctatgggattcgcacttaactcacgcaaaaccgtcgtggccaatcagggaatgagacagaccgtgacaggcctggtcgtgaacgaacgggtccgaacttctgcccaatataggcggaagatacggcaggaaatttactattgctgcaggtatggggtgcgcgagcacttaaaggcagtggggagcttgtcaggcaaagaaaccgagggagaggctgccactaaggaacaggcattcctgcagtccctttttggacggattgcgtacgtactgcaaaccgaaccagaaaatcaggaatttctcgaatatcgggatggttgtagaagcatgttgcttgagaaagagcgggggtga

SEQ ID NO: 9430 - RNA, 1050 nt, synthetic construct
  source 1..1050: mol_type = other RNA
atgagtagtcaactctggaaatactgcggtacgcagcaggaaaaagagttcatcctgtcattaaacctgctacccgcgggaatgcgggaacgaatgagcggggaagcccagctgtcactgctgtacgccctgtcaaatcataccgagagacactatcgcagagcaagaatccctaagaagtccggaggttctagaagattgcttgtgcctgatgggcttctgaagagcgtccagaggaacatcttaaggcactgtctggatggccgatctgtgagcgcccatacatgtgcctaccgaaggggattaagcccgatagacaatgctgccccccatgcaggcggcgaaaaagataagattctcctgaagctcgacatccgggactttttcgattccatcttgtttccacgcgtttacggtgccgcgttccctgaaagtctgttcccaccagccgccgcaggactgctgacacacctatgctgttgctatgatagattgccccaaggtgcacccacctcccctgcgatttcgaacctggtaatgaagccgtttgacgagtatatcggcaaatggtgtgaggcccgtcagatttcctacacccgctattgcgacgatctcgccttcagcggggtgtttgacgtcggcgaggtgtacaggaaggttaggggcatgctcgaggctatgggcttcgaactgaaccggaaaaaaactgtggttgctcgccagggaatgcgccagtctgtcacaggcttggtggtgaatgaccgggtcagaacagatgctgcttacagaaggcgcataaggcaggaaatgtactattgcaccaagtttggggtccgggagcaccttaaagtggctgggaagcccgacgggatggaaactgaggctgagagggaagcagaaactgccgcagaggagtacgctttccttcagtctctccgtggccggattggatatgtacttcaaatggagccagagaaccgagaatttttggaatatctggaggagtggaaacgtctctgggaggaactagagaatcgcgagcggaagtga

SEQ ID NO: 9431 - RNA, 1038 nt, synthetic construct
  source 1..1038: mol_type = other RNA
atgagctctaatatttggcatgcttgcacagacagacaggtgcgggagtttattctgagcctgaatctactgcccgacggctcacgggaggaactttcgggcgaaaagcaattagcactgttgtacgcgctgagcaaccaccccgagagacactatcgtaaggtcaggatccctaaacgctctggggggagcagacgactgctagtcccagatgggttacttaagggcgtacagaggaatatcctccaccattgtctggatgggaggagtgtctccgaacacgcgtgtgcctaccgacgcggagtgtcaccaatggcaggtgctgcccctcatgctggaggtggcaaagacaaggtcctgctgcggctcgacatccgggacttctttgacagtatcctgttccccagagtgtatggggctgccttccctgagtccctttacccgccagccgctgcagggcttctgacacacctctgttgcttctatgatagactcccgcagggtgctcccacatccccagcaatctcaaacctggtaatgaagccttttgatgattacatgggcaaatggtgcagggaacgcgagataacttatactcgctattgtgatgatctagccttttccggcgcgttcgacgttggcgaagtgtaccggaaagtcaggggactcttagaggctatgggatttgaactgaacagtggcaaaacagccgtgttgaagcagggtatgcggcaaaccgtgaccggacttgttgtgaacgagcgcgttaggaccagcgcccagtacagaagacgactcaggcaagagatctattactgtcggaggtacggggtgcgagaacatctcaaggcagttggcagactgaccggagccgagacggaggcagacgtgtctgccctggagactgcttacctttgctccttgttgggccgtatagggtacgtgctccagaccgagcccgagaatgcccagttcttggaatatcgcgaaatttgccgttctctgattgagggtgccgacgccgcagaatggggatga

SEQ ID NO: 9432 - RNA, 1086 nt, synthetic construct
  source 1..1086: mol_type = other RNA
atgtccggtagactttggaagtacctgaccccccagcaggaacgggagttcatcctgagtttgaatctgttgcctgctagctgtagaaagcgcatgtcgggagaggcccagctcgccttgctgtacgccatcagtaatcacgtagaaagacattaccggaaagttcgcatacccaaaaaagatggcaagtcacggagattacttgttcctgacggactactaaaaggggtccagcggaatattcttcgtcactgcctcgacggccgttccgtgtctgagtacgcatgcgcctataggagaggattaagcgccgcggataacgctgccccacatgctggaggcgggaaggataaactgttactgaagctggatatccgggacttctttgattccattctgttctggcaggtgtatggggctgcctttcctgggtccctctttccaccggctgcagcgggactgctgacacacctgtgttgttgtggcgaccgccttcctcagggtgccccaacaagccccgccatatctaacctggttatgaagccctttgacgaattcatgggcgcatggtgtcgccagcgccaaattgtgtataccaggtattgcgatgacctcacgttctctggcgcattcgaccccaaggcggtctatcataaagctcgccacctcctggaagccatggggtttgcactgaacgccgaaaagacagcattgcgaaataggggtatgaggcagagcgtgaccggcctggtggtcaacgaacgagtgaggactggcgtaccgtaccggaggcggattcgccaggagatgtactactgtaggaaatatggagtgggcgagcaccttcaagctgtggggagattgaccgggactgagacacaagaggaggcagccgaagcggagcgagcctttctctgcgcccttctgggcaagatcggttatgtcctcctactcgaaccagagaaccgagaattcctggagtaccgggaaatctgcaggggaatgcaagcagaacaggagaaggcttcatgcccacctgcttgcggtgagagagagcagaaacgtagaggagggaaagagaagtga

SEQ ID NO: 9433 - RNA, 987 nt, synthetic construct
  source 1..987: mol_type = other RNA
atgggaaatacccagctctggaagtattgcacgacacgacagtgtcaggatttcattctgtcgcttagactcattccaggtggagagaaaatgtcccgcgaaaaacagctggcctgtctgtacaccttgtcaaatcagggtattaagaattatcggcgggtgacaatcgctaagaagggcggtggcagcaggcaattactggtgccttgcggcctacttaaagcagtgcagcgcaacatactgcatcacgtcctcgacgagaggcccgtttccccctgtgcgttagcatacagaaaggggacggacattcgggctaacgcctcagcccacctcggcaagaataaggtgcttaaactcgacatttcccattttttcgatagcatcctttttccgagggtgtacggagcggcttttcctgacactctttttccgcccgccgctgcaatgctgttaaccagcttgtgctgttgtaaagagaggctgccacaaggatctccagcatcacctgccatctccaatctggttatgaggccatttgacgaatacatggaggggtggtgcagggagcgggagatcacctacacacgctactgcgatgatatgacctttagtggaagtttcgatgctcccgcgctgatcactaaagtgcgttcttacctagaagctatgggcttctctttgaacgaaaagaaaactaaactcctgactgagggggtccggcagagtgtcacaggcatagtcgttaacgagaaactgcaggtaagcagagactacagaaagaagttgagacaagaggtatattattgtcgtaagtatggaatagaggcccacctggcccgaattgaagccgccgaggggatccgctgggataaggaacgttatatcgggtctgtgttgggtcgcctgagattcgtgctccaaatcaaccctcaggacgaagaattcgcacgatattgccgggactggaaggagcagtacctgggctga

SEQ ID NO: 9434 - RNA, 984 nt, synthetic construct
  source 1..984: mol_type = other RNA
atggggaattcgccactctggaaatattgtacccgggagcaatgtcaagacttcatactcagcttgagactcatccccggcggagaaaaaatgtcacgagaaaaacagctgagctgtctgtacacgttgtctaaccgtggcagtcgtaattatcgcagggtcaccatcgacaaaaaggatggaggttcccgaaccctattggtgccatgtgggctcttaaagggcgtgcagcggaatattcttcatcacgtgctggatgagaggccagtctccccttgcgccagggcatatcgcaagggaacagatattcggggtaacgccagctgtcacctgggtaaacgattggtgcttaagctggacatctctcattttttcgatagcattctgttccctagagtgtattcagccgcgtttccggaaacactcttcccaccggctgctgccatgctgctgacgagcctttgctgctgcaatgagagactgcctcagggctctcctgcttcccccgcaatctcaaacctagtgatgcggccctttgacatctacatggacgggtggtgtcgggaaagaggaatcgcatacacccgctattgcgacgatatgacattttcaggagattttgatgccgcagctctctgtagtaaagtcagatcctacctggaagccatgggtttcacccttaacgaaaagaagactaaattgctgacaggggacgttcgccagtccgtaactggcattgtggtcaatgataaactgcaggttagtcgtgagtacaggaagaagttaaggcaggaagtctattactgcaagaagtacggcatcgacgcgcatctcgagagagtggaagctgacactgggatacgctgggagaaagagctgtatatttgctctgttcagggccggttacacttcgtgcttcaagtaaacccccaggatgacgagttcgccggctactgcagggagtggaaggagctgtttatgtga

SEQ ID NO: 9435 - RNA, 987 nt, synthetic construct
  source 1..987: mol_type = other RNA
atgagtaattcccagctttggaaatattgcactaaagagcagtgtcaggacttcattttgtctctcgacctcgtcccacactccgctgggatgtcccgcgagaagcaactggcctgcctttatatgctgagtaatagaggcgcagaaaactaccacaaggaaattctaaccaagaaagatggcgggacccgcacattgatggttccctgtagcctgctcaaggccgtccaacggaacattctccatcatgtgctggagcagaggcctgtgtcagactgcgcaagggcctaccggaaaggcacagacattttggcgaatgccggtcctcacactggcagaaagcaagttcttaaactggatatctctcacttcttcgattctatcctctttccgagggtcatatctgctgcttttcccgacaccctttttccaccggccgctgcagccctgctagcgaatctgtgctgttgtcgcgagaggctgccacagggtagccctgcaagtcccgcaatctcaaacctggtcatgaggcccttcgacgagagcatgcgaagatggtgcgaggctcgtcagatcgtatacacacggtactgtgatgacatgaccttttcgggagacttcgatcctgccgccgtgtatcacaaggtgaagtcctacctggaagccatggggttcagcttaaacgaaaaaaaaacgaaactgctgaaggatggggtacgccagagcgtgacaggaattgtggtcaacgaaaagccacaggtttcacgagactacagaaagaaactgaggcaggagatctactactgcatgaagtatggagtaaccggtcatttagagagattacgagagaagactggcaacgctgtggaggaacagcgttatatctgctccgttttgggaagaatccaatttgtgctccaggtgaatcccgaggatcgggagtttgcggaatattgtcgcatatggaaagaacggttcgtgaagtga

SEQ ID NO: 9436 - RNA, 1089 nt, synthetic construct
  source 1..1089: mol_type = other RNA
atggacataggggaaagtggtggccagggaagtgcctggacggtttcaagaaaagacctgtggcgctattgtactgatgcccattgccaggagatgattttgtccttccgactgctgggcgagaatggctggccaagggaaaaggttatggcctgcctgtacgccttaagcaaccactctgaacgacactatgagagaatctcaattccaaaaaaagacgggagcaggcgtatcctgctggcccctgaccctttgctcaagcatgtgcagaagaacctgctccggcatgtcctcgaggggctgtctatagctggatgcgccactgcgtatcatcgccaagctgggatcatttgtaatgcgagtggacatgtggggaagcccctcgtcatgaagcttgacatcagagattttttcggctctatcaccttccctatggtgctctgtcacgcttttccggtaaagtactttccccctcccgtcggcgtgttgcttaccagcttatgctgttgtggagagtatttaccacagggtgctcccacctcgcctgcagtgagcaatctggtaatgaaaccatttgacgagtacatggccggctggtgtcgggagcgcaagatttcctacagcagatactgcgatgatatggctttttcaggagacttcgatgcttgggaggttcgccagaaagcagagaatttccttcgggccatgggtttcgagctgaaccgtaagaaaacaaaggttctgccacaaaatatgaggcaaacagtgaccggcctagtggtgaacgaacgggtccagacatccgcccaatacagacgcaaacttagacaggaattgtactattgccgaaaatttggggtggaaggccacttgagacagtctggtgaagcaaagcacttcctccttccggacggaagtctagataagcagcggtatttgcaggcactggcaggcaaggtgcggcacgtcctcctgacaaggcccgaagatgcgtggttcctggaggccaaggggtggctcctgactgagaggaaacgtcaggagggacgccagtccaggagggaaatgggcaccgaaaacggtatctga

SEQ ID NO: 9437 - RNA, 1062 nt, synthetic construct
  source 1..1062: mol_type = other RNA
atgaaggaaaccgcaatctcctcatcaaaagacttgtggcactactgtaccgaggaccatgtgcgcacaatgctgctgtccttcagactgctaggcgacaacgattggccagaggagaagatactggcctgcctctactcactcagcaatcatactcaggaccactacaagagaatccagattcagaagaagagtggcggaaccaggacgctgttggccccagatcccctattgaagtacgtccagcgaaatctgttacatcatgtgctcgacggacttagtttggcagattgtgccaccgcctataggaaaaatagggatgacttatacaagcggggagggcaagaggacagggatggcagcgcctacaaggaatgcttcggtattgtgcccaacgctcggatccacgtaggaaaacctctcgtgatgaagctcgacattgttgacttctttgggaatatcacatttcccatggtgctccaccaagttttccctgcccgtatgtttcctccagctgtcgggaacctgcttaccagtctttgttgctgcggagagtacttgccccaaggcgctccgacttctcctgcagtctctaatcgcgtgatgaaacccttcgatgagttcatggaagcttggtgccgcgagaggggcatatcctatagcagatatagcgatgatctgaccttctctggggatttttcgcctaaagaagtcagaggaaaggtgaagggttttctgggcgcgtatggctttgaacttaaccgcaagaaaactcggattctgtctcttgggacacggcagaaagtaactggtttagtggttaacgaaaaagctcagacgtccaaagaataccgacgtaaactgcgacaggagatctattattgtaggcggtttggtgttaaggagcacctgcaattccagaacaagggggaaccggcatgtgaggcggaccaggagcggtatctctaccgcctgctgggcaaagtcaattacgtgagaatgacaagaccagaagacaaatggttcctggaggcccgtcagtggctaaagggcatgctctga

SEQ ID NO: 9438 - RNA, 969 nt, synthetic construct
  source 1..969: mol_type = other RNA
atgcttctgagctttcatctgttaggagaaaatgactggtcggaggacaagattttagcctgcctctacgccctgggtaaccacggcgagaagcactataagaagatcagaatccctaagaagagcggaggctttagaattctgcttgcaccggaccccctcttgaaatacgtccagaagaacattctgcatcacgtattagagggcttctccgtttctgaccaggccacagcctacagaaagaaggggaatccagcgaatgccgtctgcggctgtgtggagaatgcatcccttcataggggcaagcctttgattatgaaactcgatgtcgagaacttcttcggcaacatcacgttccccatggtgctacactccgcatttcccatacagtacttccctcccgaggttgggaaacttctcgctgagctgtgttgctacctagaatatcttccccagggggctccaactagtccagcgatcagcaacctggtgatgaaaccattcgatgaatacatggccgagtggtgtcggaaccgcggaatcgtgtattcacggtattgcgatgatctcactttttctggtgacttcgatccggaggaagtgctcaagaaaagcgaggggtttctgaaagccatgggcttcgagctgaatcgtaagaaaaccagggtgctgtcaaaagctagtagacagaccgtcaccggcttggtggtaaacgaaaaggtccagccttcacgagaatacaggcggaaactgcgacaagagatccattattgtcgcaaatacggagttgaggaacacctgaggagacggggaacacagggaatgctgtttgcaggtaaagaagacgacagggggaagtatttgtattctctcctggggaaaataaattacgtgcggctaacccgccctgatgacacatggtttttggaggctgaaaagtgggtgcgcgaacaactgtccgaacgttga

SEQ ID NO: 9439 - RNA, 1008 nt, synthetic construct
  source 1..1008: mol_type = other RNA
atggcgcgcactgatctgtggaagtactgttcggccgagcagtgcagggagatgatgatttcttttagattgataggcgcgggagactggcctcctgagaagattatggggtgtctgtacgctctttccaaccacgccgaaaaacattatcagagggtgaacatcccaaagagatccggcggctttcgcacgcttctggttcccgatcctttgctgaagaatgtccagcgtaatcttctccatcatgtcctagatggcttcaccgtgagcgatagcgcagccgcttaccggaaaggcgcttccgtagcggccaacgcaggcaagcaccaaggacggaaaatcgtgatgaagatggacattgaagacttttttggatcaatcaccttccccatggtcctacaccatgctttcccgactgcctatttcccccctgcagtgggggttatgctggcatcactgtgctgttgtcacgaccgattacctcagggcgccccaacatccccggccatttcaaacttggttatgaagccctttgatgaatacatggaggcatggtgtggggagcgcgagatcgtgtacagccgctactgcgacgatatgacctttagtggcgtgttcgatggaagcgaagtgaaaggcaaggtgtatggattcctccgtagtatgggtttcgaaccaaatctcaggaagactaggatactgacaagaggtaccagacaagtggtgaccgggttagtagtcaacgagcgggtacgcgttcccgccccatataggaggcggctgcgacaagagatctactattgcatgaagtatggggccaaagaacacctgactagaacaggtcgacaggcctatcttaatgatggtgacgggggcacacggagatacctcgagtctctgctgggaaaaacggcttacgtcctgctcgcttctggtgacggagacgcttggttccgggaagcacaggtgaaattgcgtgagatgctcgggcaggacatgtgcttatga

SEQ ID NO: 9440 - RNA, 999 nt, synthetic construct
  source 1..999: mol_type = other RNA
atggcccaggccgacctgtggaaatactgttcaactgaacactgccgtgagatgctcctgtccttcagactgttaggtacacgcgactggccccctgaaaagataatgggatgcctttatgctctgtctaatcacgcgcagcgccactacagaaaggtccgcatacctaaaaggtccggcggctacaggactttgctggtgcccgactctctgctcaaagaagtccagaggaacttgctgcatcatgtgctcgacggatttgcggtgtctgctagcgccgcagcatacagaaagggcgccagcgctgccgcaaatgcagggatccatcaggggcggaagattgtgatgaaaatggacatcgaggacttcttcggaagtattacattccccatggtattgcaccacgcattcccggccgcttactttcctccacccgtaggcgccatgttagccgccctgtgttgttgccacgataggctacctcaaggcgcaccggctagcccagcagtttccaatttggtcatgaagcccttcgatgagtacatggaggcctggtgtggagaaagagatatcgcttatagtcgatactgcgacgatatgaccttttccggggtgtttgataccgccgaggtgaagggaaaggtgtatggctttctgcggagcatgggatttgaacctaaccagcgaaaaacgaggatcctgacccgaggaactcgccagacagtgaccgggcttgtcgttaacgaccgggtccaggtaccagcgccatacaggcgcagactccggcaagagatctattattgcttaaagtacggtgctgaagagcatctgcggcggacaggccgtgatgcctatctgaaggaaggcgacgcgggggttaaaaggtatctggagtcgctacttggcaaaaccgcttacgttcttctcgccggtgggggggatgcttggttcagagaggcacaagtgcgcctcaagtcaatggtgagacagggtatttga

SEQ ID NO: 9441 - RNA, 981 nt, synthetic construct
  source 1..981: mol_type = other RNA
atgggcgatggcgaaatctggaagtattgcgggaaagagcaagcggtcgagatgattctgagcttacagctgttaccctcgtcaggttggcagagggaacgaattctcgcctgtctgtacgccctttccaatcaccctgaggagcactatcaccccgtgtggatccctaaacgtcgtggagggtaccggcgcctcgatgtgcctgaccctctactgaaacaggtacagcggaacattctccatcacgtgctggaaggcttttcagtgagccctgcagcagcggcctatcgaaagaaccgctgcgcagccgatggtgcagcggtacatattgggaagccccttgtcctcaagctggacatccatgacttcttcggcagtataaccttccccatggtgctggggtatggattccccgccgcctacttcccagaagaggttagggtcctgcttgctagcctgtgctgttgcagacagcgcttgccacaaggagccccaacgtctccggctctgagcaacctggtgatgaagcactttgatgaagccatggctgcctggtgtgggcctcaaaatatagcctacacaagatactgtgatgacatgactttttccggcgatttgaatccaggtgctgtcatcggaagggtcaggggttttctggaaacaatgggcatggaactgaatcattctaaaaccgctgtgtgttcccaattttctcggcagacagttaccggaatcactgtgaaccaggtgtgccaactccccagggaggaccggagaaaactccgacaggaggtatacctttgcttgcgctacggcaccggagagtccagaccagcagacagtgttagaaggctcgaacagatcctaggcaaagtgtcatatcttttacaggttcggccggacgaccgctggttcttggaacagcgggaggctctgaaggagatgttgaagaaggagagagggcaggtgtatgagagttga

SEQ ID NO: 9442 - RNA, 981 nt, synthetic construct
  source 1..981: mol_type = other RNA
atggggaaaggggatgtgtggaaatattgcgagaagaatcagatcaccgagatgatactgtcactggagctgctgccttctagccgatgggagcgggaccaaatcctgagctgtctgtacgcgttgtcgaaccatccagaggagcattaccaccctgtttggatccccaaaagatccggaggcttccggcggttagatgtacctgatcccctgctcaagcaggtgcagaggaacatccttcggcacgtcctcgaaggatttagtgtgagccccgcagccgtggcatatcagaaaaacagatgtgccgccgatggcgctgttattcatagaggaaaacctctagtcctgaagctcgacatcaacgactttttcggatccatcactttcccattcgtcctggggtacgggttcccggctgcatattttccggaagaggtcagggttttgttggcctctttgtgctgttgtcgccagcgtctcccacaaggcgctccaagctcacctgctctctccaatctagtcatgcgaagctttgacgacatcatggtgtcctggtgcgctgcgcaaggcattgtgtacacgcgctactgcgacgatatgaccttcagtggtgactttaatcccgcccttgtgataggccgcgtgcgtggtttattggagcctatgggcatggaactgaatagaaagaagacagaggtttgctcacaggccgacaggcaggtagtcacaggtattactgtgaaccaggtgtgtcaactgccaagggaggacagacgtaagctgcgacaggaggtgtatctttgcctccgacacggcgccgaaggaattgaacccgccgcatctgttcgccggcttgagaggattctggggaaggtaagttacctgcttcaggtgcgccccgacgatcgctggtttttagaacggagggatatgctgaaggatatgctcagaaaggaaagaaaaagggtctatgaatcttga

SEQ ID NO: 9443 - RNA, 972 nt, synthetic construct
  source 1..972: mol_type = other RNA
atgccagaacacttgggtctatggaagtactgcgataaagaacagtgcaaggacatgctgctctccttccgcttggtcgggtccgactcatggactgatgggaaaataattgcttgcttatacgctcttagcaatcatgctaaagagcactaccacaaaacggagctgcccaagaagcgcgggggaagacggatcctgatggtgcccgaccctctcctgaagcaagtccagagaaacttactgcatcacgtcctggagggcttctctgtgtcacctgccgcctgtgcttatagaaagggtgcaagtccacttgcaaacgcatcgttgcataccggcaagcggctggtcctcaaactcgatattcgggacttcttcggcagcataacatttcccatggtactacatcacgtgttccctagcacctattttccgcctgccgtgggaaccctgttagcctctctatgttgttatagggaccgacttcctcagggagcgcccacaagcccagccgtttcaaacctggtgatgaaaccgtttgatgatcatatgttggagtggtgtcgttccaggcgaattacatactcccggtattccgacgacatgacattcagtggagatttcgacccaggtgaggtgatcaggaaaaccgagagctttctcagggccatgggcatggaacttaaccgcgagaagactcgcgtctgtgccgctgggggtaggcagtctgtgaccggaatcgtagttaatgaaaagcccggcctcccccgtgattatagacgggctctgcgccaggagctgcactactgcatgatctacggggtggaagagaagtcagcagcctgcttgcgatctctgctgggcaagactgtttaccttctgagtgtgaatccagaagaccaatggtttcagggggcggaagcatttctgagagaggaactcaaaaaaatcgaggagaagggcgaagagaagtga

SEQ ID NO: 9444 - RNA, 954 nt, synthetic construct
  source 1..954: mol_type = other RNA
atgaacaatatggatatatggaagtacgcctcggccgagcagtataaagacatgctgctcagcttcgccttgctgagtggcccagattggccacctaagaggattatggcttgcttatacgccctgtctaaccacccagaagcccattatcatgccctgagtgtacccaagaagtcagggggagtcaggcggttactcgcacctgatcccctgatgaaacaggtccagcggaatctacttcatcacgttctggaaggctttagtcccagcgaagcagcaatggcctaccgacgaggcgtgtcagcgaaagaccacgcagctagacattgcggccagcgggtggtgctgacgttggatatacaggatttcttcgattctatcacttttccccaagttcttgccagatgcttccccatcatttacttccccagacctgtgggagtgttgcttgcctctctctgttgtgcatatgaacgtctgcctcagggagctccgacctcccctgcagtgagcaacctggtaatgaagccattcgacgagcacatgctagcgtggtgcggcgagcgtgacatcacatactctcgctactgtgacgatatgaccttttcaggagactttgacttcagggaggtcaaggggaaagcggaaggttttctggaggctatgggtatggccctcaaccgcaaaaagactagggtgagctttagagggggacggcaggctgtcacaggcttagttgtgaatgaaagaccgggtgtcccacgtgagtacaagaggagattgcgccaagaaatttaccagtatcggaagtttgggctcccaggcaccgagacagactccgaaaaatatagggctcgactgctcgggaaaatccgctatgtgctgtccgttcaccccgaggacgcctggttcgctcaggctgagcaagagcttaagcgccggaatccttcctga

SEQ ID NO: 9445 - RNA, 987 nt, synthetic construct
  source 1..987: mol_type = other RNA
atgtaccataccgatctctggaagtattgtacaaaggagtactgccgggacatgctgctctcattccgcctcctgggaaatacctcttggcccgaccaaaaagttatggcctgcttgtacgccttttcaaatcacaccgagaggcactatcgcacggtgagaatccccaagcgagatggaagacagcgctccctaatggtgcccgattacatgcttatgcgtatccagcggaatattctacaccatatcctggatggctacgccgttagctcgtctgcgactgcctaccataagggcgcaggggtggtaagcaatgctagggtacacacgggaaaacatgtcgtcgtgaaactggatatcaaagacttctttggctcaatttctttcccaatgatccttaagtccgtgtttcctgttcggtattttcatcctgctgtcgggactatgctgaccgcattgtgctgctgtaacgacttcttaccccagggggcaccaacatcccctgccgttagtaatttagtgatgaagcactttgacgaatcaatcaataaatggtgtgaaaacaaggggattagctatacccgatactgtgacgatatgactttcagtggtgatttcaacccaggcctcgtcattcggaaagtgagtggatttctcaactctatgggtttcgagctgaacgagacaaaaacaaggatactgtacaggaatgggagacaggctgtcactggcatagtagtgaacgaaaaactgcaagtgagccttgactatcgtcggaagttaaggcaggagatcttttattgccaaaaatacggagtcaactcccacctcaagagaattggtaacgcggctggcatcccggaaaatcagtacctgttgagcctgttgggccgcatacagtatattctgctggtgaaccctgaggaccaatggttccaggaggccgaacagaagctcctggcagtgcttggtagaaagtccgagtga

SEQ ID NO: 9446 - RNA, 987 nt, synthetic construct
  source 1..987: mol_type = other RNA
atgtatcaaaccgatctttggaagtattgcacgccagactattgtcgcgacatgttgctttccttcaggctgttgggcaatacaaggtggcccgaccaaaaagtgatggcctgtctgtacgctttttccaaccatgctgagcgccactatggaatcgtactcatacccaagaagaacgggaagagcagaaagctgctggtgcctgactacatgctgatgaagatccagaggaatattctgcatcacatactcgatgggtactccgtttcaggctgtgccactgcataccataagggagccggtgtggtgtctaatgcagcagttcatagagggaagaacgtcgtcgtcaaattggatatcaaagacttctttgggagcatctccttccctatggtcctgagcagtgccttccctgttcagtattttcccacaagtgtggggaccatgctaacagccctctgctgctgtaacgatttcctaccacagggagcgccgacaagtcccgccgtatctaatttagtgatgaaacactttgacgagagcatcaacaagtggtgcgagggaaaaggcataagctatacccgttactgcgacgatatgactttttcgggcgattttaatcctggtctggtgatccgaaaagtgtcaggattcctgaacgcaatgggcttcgagttaaatgaaactaagaccaggattctctaccgaaatggccggcaagctgtgaccggcattgttgttaacgagaagctgcaggtgtcccgggattaccgtagaaaactgcggcaggagatcttctactgtctcaaatatggagtgaagtcacacattgaaaaattggggaatgacgcgcgcatttctgaagaccagtacgtcctgtctctgttaggtaaaattcggtacatcctccttgtgaacccagaagatcactggtttcaggaggccgaagagaaggtcctcgctgtacttggcagaaaggctggttga

SEQ ID NO: 9447 - RNA, 999 nt, synthetic construct
  source 1..999: mol_type = other RNA
atgtacggtaccgagctatggaagtacagcaccccagaacactgccgcgagatgcttctgagtttcaagctgctaggagaagattggcccgaccagaaagcaatcggttgtctttacgccatttcaaatcataccgagaggcactaccacacggtgctcattcccaagtccgatgggacaaaacgaaagctcttggtccctgatgacttgcttaagatgatccagagaaacattaccaagcacgtcctgagcgagtttgaagtttcctcttgcgctgccgcgtacaggaaagggacatctgtgctcactaatgcctctgtgcatacaggcaaaaagttggtcctgaagctcgatatcgaggatttctttgggtctatcacctttccaatggtgttgaatggcgccttctcaggaaggtacttccctccttccgtgggaacgatgctgacagccctgtgctgttatcgcgattatttaccacaaggcgctcctagcagtcccgctatcagcaacctggtgatgaaaccgtttgatgactatatgaaggtctggtgtgagaagcggaacatcagctatactcggtactgcgacgacatgacattctctggggacttccaacccggcccagtgataaggaaagtctcaggttttctcaacgacatgggattcagcctgaatcagggtaaaactcgtattatttcctggggacggagacagactgtgactggcatcgtggtaaacaggaagccgaaggtttcccccgaataccgtagaaaactgcgccaggaggttttctattgcctgaagtatggcgcaaaaagtcatatcatggtaaccgggagagaagagccagacgaagagcgcgagcggagatatctgcgaagtctgttaggcaagatacagtacctcctttttatcaatcctgatgacatttggtttgccaaggcaaaaggaaaaatacagtcgattctcgaaacctcatacgcttgtctgttatga

SEQ ID NO: 9448 - RNA, 981 nt, synthetic construct
  source 1..981: mol_type = other RNA
atgtaccagacggaactctggaaatactccactaaaaagcattgtcaggacatgctactgagcttccagcttctcggcgaggactggcctgaccaaaaagtgattgcttgcttatacggcgtgagtaatcatactgagcggcactatcatactgccatgatccccaagagcgatggaacaaaaagacaactgctggtgcctgatgacctgcttaaaatgatacagcggaacatcgccaggaacgtgctgtccggattcgagttgtctagctgcgcaagcgcttactgtaaggggaccagtgttttgaagaatgcctctatacacaccggtaaacgccttgtcctgaagctcgacatcgaggacttctttggaagtatcacatttcccatggtgctgaatggcgcatttagctccaaatatttcccacctaccgttggtacgttactgactgccctttgctgctatcacgactatctacctcagggggcaccatcgtctcccgtaatctccaacctggtcatgaagccgttcgatgattacatgaaagtctggtgtgaggaaaaaaatatctcatatacccggtactgcgatgacatgaccttctcaggggatttccagccaggtcacgtgattaataaggtgagcggatttttagacgccatgggctttgcgctgaaccgcgagaagacaaagatcctctcttctggccgacgtcagacagtgaccggcattgtcgtgaatgagcgcccacatgtttcacccgattatcggagaaggctgcgacaggaagtatactactgtctcaagtacggggtcaagtcccacattacaatgactggcagggaggaacccaaaccggaaatcgagagacactatctcttcagtctcttgggaaagattaactacctgctgtttattaaccctcaggatttgtggtttaagcaagctgaagggaagataaggtcaattctggaccattga

SEQ ID NO: 9449 - RNA, 1011 nt, synthetic construct
  source 1..1011: mol_type = other RNA
atgcatgaacccgatctgtggaaatattgcactgctgagcactgcagagagatgctgctgtcatttcggctattagaaggtgaggagtggaccgacgacaaagtgataagttgtctatacgccgtcagcaaccacactgagaaacattacaataggcttcggatccccaaaaaaggaggcggtgtccgccaaatccaggccccagatctcctcttaaagaccatccagcggaacatccttcatcacattctggaaggcctggagcttagtccgtgcgcggcagcttatcaccgcggagcaagcattcgagataatgccgctagacacaccgggaaaaatgtggtgctcaagctcgatatcaaagattttttcgggacgatcaccttcagcatggttcagcagagagcctttaacagtagatacttccccgttccagtgggcacactgttgacatcattgtgttgcctcagggatacacttcctcaagggtcgcctgccagcgcagccatatctaatctggtgatgaagccttttgacgaatacatggacggatggtgtcgcgagagggacattgtatactctcgctattgtgacgatatgactttctccggcgattttgccgccgcggaagttataggaaaagtgaagggttttctggacgccatggggttcgagctgaaccggtccaagacgaaggtcttgaccagacacactaggcaaacagtgactggcatcgtcgtcaacgaccgcgtgagcgttccagcggcttaccgacgtgctctgcgacaggacatttattactgcaggaagttcggcgtccgtgagcatattaggtcacggtccgataaaaagtacttggagctcggggaggcaggagaagtgaagtatttaatgtccctgctgggcaagattggattcgtgctctctgtaacccctggcgacgtgtggttcatggaagcagaagaggctgtaaagacactgctgaaggaatatcaggggcaggcatcttga

SEQ ID NO: 9450 - RNA, 1014 nt, synthetic construct
  source 1..1014: mol_type = other RNA
atgcatgaacctgatctctggaaatactgcactgccgaacactgtcgtgaaatgctgctctctttccacctcttagagggcgaagagtggaccgacgaaaaggtgatttcctgtctttatgccgtgtccaatcacacagagaagcactacagcagactgcggatcccaaaaaaaggcggaggcgttcggcaaattcaggcccccgaccctttgctcaaggccattcagagaaacatcctgcatcacatcctggatggcttggagttatctagttgcgccgctgcttacaggcgtggtgcgagcatatgggagaacgcggcctgccataccggcaagatggttgtgctaaagctagatatcaaggattttttcgggtccatcacctttcccgtagttcaccgatccgctttcaattcaaggtatttccctgcttccgtggggacactgctgacgtctctttgttgtctgaatgattgtctgcctcagggatctccggctagcgcggctattagcaacctggttatgaaaccatttgacgagtatatggatgggtggtgcagggagcgctcaatcacctatagtagatactgcgacgacatgacttttagcggcgactttagcgccgcagaagtgatacgaaaagtcaagggattcctcggtgcaatggggttcgaactgaaccggagtaagactaagatcttaacacggcgcaccagacagttggtgacaggaattgtagtgaatgataaagtgtcagtgcccgcatcgtatagaaaagaggtccggcaagacgtgtactactgcatgaaatttggggtccaggcacatctcgagcgcaggggagaagagaagtatctgaagatggggcccgctggagaggtcaggtacttgactagtcttctgggcaaaataggcttcatcctttctgccgccccaggtgacatttggttcacggaggccaaggaggccgtcaagtcactgctccgcgaagcagcagaaccagtaccggagtga

SEQ ID NO: 9451 - RNA, 1002 nt, synthetic construct
  source 1..1002: mol_type = other RNA
atgggagaacctggactatggaaatactgcaccgctggccactgtagagagatgatacttagcctgagactcctggaaggcgaggaatggacagagcggagggtcctgtcctgcctctacgccatttcgaaccacacggagaaacactataacaagcagaagctgatcaagaaaggaggcggcgtccggcatattctggcaccagatcccgtgctcaagacaatccagcgaaatatactccatcatgtcttagaagggttggaagtttccccatgcgccatggcctacagaaagggggccagcgtccgtctcaatgccgcttgccacatggataagcaggttgtgcttaaactcgatatcaaagacttctttggctccatcacctatcccatggtgcatcggggagcattcaatagtaggtatttccctgtcccagttggtactctgctgacctcactttgttgttgccaagaccggcttcctcaaggctcacctgcttctgcggccatttctaatctggtgatgaagccctttgacacttacatggagggctggtgtcgcgatcgggggatcgtttacacccgttactgtgacgatatgacattcagtggcgattttcgcgtgtccgctgtgtacgggaaagtgaatgggtttttaggagccatggggttcgagttgaaccaatctaaaaccaaggtgctgactaggcacgtgaggcagacggtcactggaatggtagttaacgacaaggtacaggtacccctgccatacaggcgcgcactgcgacaggaggtgtattattgtctcaaatatggcgtgaaggaacatcttcgccaccgcggtgaaaccgcatatctagccatgggggaagagggcgagctgcgatacttacagagcttgtgcggtagaatcggttttgtcctgagcgcggacccggaggacaagtggttcagagaggctgcagacctggtgaccggaaacattaagacatacttgaaatga

SEQ ID NO: 9452 - RNA, 996 nt, synthetic construct
  source 1..996: mol_type = other RNA
atgtatgacaccgacctgtggaagcactgtacgccccgccactgcagggaaatgattctctccttttctctgctggaaggggaggagtggactgatgagaggatcataagctgtctctatgccgtgagcaatcatacagaacagcactacacgtgcctcaagattcccaagaagggtggcggagtacgacgggtcatggctcctgacccactgctcaaaacaatccagcgcaacatcctgcatcatattttagaggggtacgaaatcccatgttgcgcaaccgcctaccacaagggtgcaagtatccgcggcaatgccatggtacatctgggccacgaggtagtcctgaaactggatattaaagacttcttcggttcgatcacctttcctatggtgggacaacgagcattcggacgtcagtacttcccggagcctgttggggtgctgctgacatccttgtgctgctataacgatcgcctcccacaaggaagccctgcttcagcggccgtctcaaatttagtgatgaggcccttcgatcggtacatggccgcgtggtgcggccaaagggaagtgatatacagccggtattgtgatgacatgaccttttctggcgatttcgacgtttccgaggtgatgaataaggctaatggattcttgggcgccatgggctttgagttgaaccgttctaagactaaggtgctaactcgacaggaaagacagaccgtcacagggatcgtggttaacgagaaactgcaggtgccatctagttacagaagggaactaaggagagatgttcactattgtttgaagtatggagtccaggagcatctgaaacgccggaacgagcggacctaccttgacatgggcaaggatggggaaactagatatctgatgtccctttcagggaaaattagatttgtgcttagtgtcaacccccaggacaggtggtttagagaggctgacgacagagtgaaacggcttctccgctacatgtga

SEQ ID NO: 9453 - RNA, 1002 nt, synthetic construct
  source 1..1002: mol_type = other RNA
atggacaaccaacggctgtggcagcatcgcagcaaggaggaggacaaggaagcaatactgtccctgaatttactagagagggccaacgtcccaaaggagaagactctcaagtgcatctatgctgtgagtaaccatattgaagagcactaccgagaggtttttattccgaaaaagaaagggggcagacggaaactgttggtccccgattacctccttcacactatgcagaaaaatatcctgagaatcattctcagcgaagagaaggtatctaaatacgctaaagcttattgcccagggagacggatccgggataacgccttcgctcatgtcggtgccgaaactatcctggagcttgacataaaggacttcttcgagaacataacatacatcatggtataccaatgcgtcttttcaggagaatattatcctcccgccgtgcggacccttttaacacaactgtgctgttaccgcgattacctgcctcaaggcgcgccaacatcacccatgatttccaatctggtgatgttcagctttgatcagtacatgggcaagtggtgcgaagagcgtgagatctgttacacccgctattgcgatgacatgacgttttccgggaagttcgacgtgcgagaagtcaaacagaaagtacgatcttatctgcaggtgctgggtttcgagctcaatctcaagaaaaccaaagtgcttaagcagtacaacaggcagtcggtgacgggtatcgttgttaacgagaaggcacaagtgagtaaaacatataggagggacgtgcgtcaggccgtgtattactgtgggaaatacggcgttcaggaacacttgcagagaaccggagcacagatgtggttgcagaaaggagaagagcgctatctacaacacctcatgggcaaggtgaattatattttacaggtgaatcccgaagattgtacctttcaggaagtcaggaagaatttgctgagaattcagcgccagtgtaagggcggaaagccttga

SEQ ID NO: 9454 - RNA, 960 nt, synthetic construct
  source 1..960: mol_type = other RNA
atgtggaaatactgtacagacgaggaagctatccgaagctttcacctaaccgatggactgaggtgcaaggagggtaaggagatccagacactgtttgctgtatccaaccacgttgaagagcattatcacatcgcctacatcccaaagaaaaaggggggccggcgcaagttactggtgcctgatgtgattcttgggcgaattcagaaaaacattctccgcaatatcctggccgaaaggaaggtgtcttcttacgccaaagcctatgtcaaaggtgtggggattgtcgagaacgccttgcctcatagtcacgctgagatcatcctgaagcttgacattgaggactttttcgagaatatcacttatctgatggtgtaccagaaagcattccccgagaaatacttcccccccgctattagaacaatgctgactcatttctgttgttacaatgactatctcccacagggagcgagcacctctccgataatctccaatctcgttatgtattccttcgatgaatacatgggcaaatggtgcgaagaacggaagatttcgtacacgaggtatagtgatgatttaactttttccggcaatttcgacgtgaaggaagtaaaacacaaagcacggagcttccttgagaagatgggcttttcactcaatgagaagaagacaagagtcttgaagccttatcaacggcaaaccgtcaccggtatcgtggtgaacgaaaaaccaaacataagcaaaaactacaagcgtcaactgagacaggagatttactattgcgaaaagtacggagttgccgagcatctgagacagaagggcatatgcgacaaggaagagattacctatttgaaagaactgctaggaaaagttaactacgtgctgcagataaactcagataatatggaatttcgcgaggcaagggagaaaatcaataagatgctccttaaggtcaaggggtga

SEQ ID NO: 9455 - RNA, 1017 nt, synthetic construct
  source 1..1017: mol_type = other RNA
atggctggcaacgatctgtggaaatactgcgaggctaaggaggctgaagacgtcttgaggtccttccatctcttggaagggactggcgtgagcgatgagaaatacctggcttgcttatacgccgtgtcaaatcacacggaggagcactatcacactgccgttattcaaaagaaaaacgggggaatgagaaaactgtccgtccctgatacgttactgaggaccatacaacgcaatattgttaagaacgtactttgcgagcggtccgtaagtcaatatgccaccgcctaccgaaaaaaagcctcggtgatggaaaatgcgcgcccacatgtgggcgcagagatggtgatgaagctggacattaaggatttcttcgactgtatcactttccagatggtctaccagtacgcatttcctgcaatctactaccctcccagtatccggatgctactcacatctctctgttgtaggaacgattgccttccccaaggggctcccagctctccagcaatttcaaatctggccatgagaagctttgacgagtatatgggagcatggtgcggtgaacgccagatgcaatacacccgatattgtgacgacctgaccttcagcggtacatttgaccagaaggaagtgaaacagaaggtgcgtaattttctacacgtgcttggtttcgaattgaaccgaaagaaaaccagggtccaggaccagtcccatcgccagaccgttacagggctggtggtgaacgagaagatgcaggtcagcagagaatatcggaatcagttgcgtgccgaaatctattattgccagaagtatggcgtgacaagtcatctcaacaaaatgggcaacccggcctggatgcgggaggatgagccagatggaaagaggtacctccagtacctgctgggaaaaataaattatgttcttgcggtaaacccccacgacggccacttttgtaagaagcgggaggagctgtctctcatggtcagagaaatctcaacaagatctaatactctgtga

SEQ ID NO: 9456 - RNA, 1020 nt, synthetic construct
  source 1..1020: mol_type = other RNA
atggccgagagggacatttggcgctattgcacagccgagcaggttgaagaggtcctccgaagctttcgcctgttgcaggggactaaagtcaggggcgacagatacatggcgtgtttgtacgctgtgagcaatcatatcgagaaacactatcatatcgccgtgatacccaaaaagaacggaggtaccagaaaattatccgttcccgacattctgctgcggacaatccagcggaacattgtgaaatacgtcctaccggagcgctttgtatcccagttcgctacagcatacaggttaaacgcctctgtcctgatgaacgcatgtccacacgttggcactgagcaggtgttgaagctggacatccgcgatttcttccactcaataactttccaaatggtgtaccagtcagcttttcccgccgtttattatcccccggcaatccgtatgctcctaacctctctgtgctgttttatggactgtctcccacagggtgcgcctagtagccctgctatttctaatctggttatgaagccctttgatgagtatatgggctcttggtgcgaggaacggcagatccagtatacgcggtattgcgacgatatgaccttcagcggaaatttcgatgtgaagaagctgaagctgaaggtgaagaactacctttacaaaatgggtttcgagcttaacgaacagaagacaaaggtccaacgtcagtaccaacgccagattgtgaccggaatagtggtaaatgaaaagccacaggtctgtcgggagtaccgaagacagttgagggccgagatctattattgcggcaagtacggggtggaaagccatctccaacgaatggggatatccggaggaggcagtgaatcgcctcaggacccagaaagatatgcacaacaccttctgggcaaaattaattacgtgcttagtgtggatcctggggacaaatactttctcgagaagagggatgaaatcctgctcctggtaaaagaattcagaggggattccatcatttcaaaatga

SEQ ID NO: 9457 - RNA, 990 nt, synthetic construct
  source 1..990: mol_type = other RNA
atgtcatctggccagctgtggaagtactgcacatcagaccaggtgaaagaagtgttgttatccctgcacctgctcgacggggtgcctatcaaagaagaaaaaagacttgcctgcttgtacgcagtcagcaatcacacagaaaagcactatcattctgccgcgatcccgaaaaaaaacggccaagtccggcgtttatttgtgcccgatcctctgttgatgcgaatccaaaagaacattctcagacatgtgctggctgaggaggcagtatccgagtatgccacagcttatagggctggctctgccgtgatagagaacgtcagaccgcatgttggaaagaagaagattctcaaactggatatccagcgcttctttgaccacatcactttccccctagtgtaccagtatgcgttccctgcagtccagttccctccagctatcaggcggctgctgaccgagctctgctgttacaaggactaccttccacaaggggctcccactagccccgccattagcaatctagttatgaagcctttcgatgaatttataggcgcatggtgcgccaagcggaaaattacctacaccagatattgtgatgaccttacgttttcgggggagtttgacgaaaaagaggtcaaatgcaaggtacggagttatttggaggccatgggattcgatctcaatcgcaagaaaactcgacttgcccgccagtgtagtcgccagaccgtgaccggaatagtggttaacgaaaaaccacaagtaaatcgggagtatcgtaggcagctgagggccgaactgtactattgtagaaaatacggcgtcaagtcccacctcgaaaggatttacggtcagaagcgacagatcgaggatgaggactgtaagacatacctccgccagcagttaggtaaggtgaattacgtgctgcaagtgaacccagctgacccctatttctttcaggaagttgcaaggctgaagaaggagctgaaagagtga

SEQ ID NO: 9458 - RNA, 1092 nt, synthetic construct
  source 1..1092: mol_type = other RNA
atgatcatgggcggaaaggacctctggaagtactgtacagccgaacaagtgagaataacactccggtctttgcacttactcgatggcgtacatatggaagaggaaaagtattttagctgcttatacgccgtgtcaaatcacccagagctgcattatcggcaggcctctgtcccgaaaaagggcggtggcgttcggaatctgctggtcccggaccacctgttgtgcaggatccagaagaacatcctgaggcatgtgctcgcagatttcccaatttccgattatgctatggcgtataagacaggcaccgccatcgtcgaaaacgctaaacctcacgccgggatgaaagaaattctcaagctggatattcggaacttctttgactccatcacttactttcaggtgtaccgtaacgcattccccgccgtgtactatccccctcctatccggaccatgctggcgagcctatgttgctgtagggacagcctgccccaaggagctcctacctctccagccgtttctaatcttgtaatgaagcccttcgacgaatatcttggggcctggtgcgaggagaggggaattagatacacccgttactgtgatgatctgactttttcaggaaaatttgaccggcgcgaggtgcaaaacaaagttaggggctttctggctgcttacgggttcgagcttaatgaaaagaaaacaaggttgcagaaagcccatcagcgccagactgtgaccgggatcgtggtcaatgaaaagcctcaggtgagtcgagaatacagacgcaagttacgagcagaagtgtactattgcagcaagttcggcgtggagtcccacctgcagagatacgggggtgaaggaccccaaaaagaatccgttccacgcgaggcaggtgaggcctgtgtacgttatctccagaagttgcagggcaagattaactatgtcctgcaggttaacccagaggaccccgagttctgcagagcgaaggagctagtcaaggagatgcttgaagctcgagggtgtagtgcagagacggagaaaaaatcaagtgagcgcggagagaatgacgatagaaagtcgaaaaaagtgatatga

SEQ ID NO: 9459 - RNA, 1056 nt, synthetic construct
  source 1..1056: mol_type = other RNA
atgaagggaaaggatctctggaagtattgtacatcggaacaggtgcacgcggtactgcggtccctgcacctgctggatggtgtccgggtagaagaggaaaagtacttctcttgcttgtacgccgtttcaaatcatccagagagacactatcaccctgccagtgtgccgaaaagggggggaggcacccgcaagcttctggttcctgaccatctgctctgccgaatccagaaaaatatactgcgccatgtcctcgccgacttcccagtgagcgactacgccgccgcctacaaacctggaacggcggtgaccgaaaacgcaaaacctcacgtgggtgctaaagagattctgaagctggacattcgtaacttcttcgattctatcacttatttgcaggtgtacaggaacgcttttcccgctgtctactaccccccccccatacgtaccatgcttgcaaatttatgctgttgcagagatagccttccccaaggtgctccaacatccccagcaatctcaaatctggtgatgaggcccttcgatgaatatatgggagcttggtgtagagaaagaggcattcggtacacacgatattgcgacgacatgacttttagcggcgaatttgatcggcgagaggtcaagaacaaggctcgggggttcctggccgcatatgggtttgagctcaacgagacaaagaccagactccagaaagcccaccagcgtcaaacggtaactgggattgtggtgaacgagaagcctcaggtcagtagggaatatcgcagaaaattgcgggccgaagtgtactactgcgggaaatttggcgttgaaagccatctccagcgctgtaggggcgaggaaggcaccaaagagatctcccgcgagatggagggagcgtgtgtcaggtatcttcgacaactattaggcaagatcaattacgtgttacaggttaatccagaggacgccgagttttgtcgcgctaaggagctagccagagagatgctggcagcaaggtcttgcccggctgacttccctgatgcaaaggagttgcagaagaacaaatga

SEQ ID NO: 9460 - RNA, 1014 nt, synthetic construct
  source 1..1014: mol_type = other RNA
atgggaggcaaagatctgtggaaatattgcacccaggaacaggtacgggctgccctacgtagcctgagactgttggatggagtacatatccgcgaggaaaactacttctcttgtttgtatgccgtgtcaaatcatccggagcagcactatcacccagcttccgtgcctaagaagggtggcggggtacgcagacttctcgttccagatccgctgttatgcaggatccaaaagaatattttacgccacgtgttggcggagtttccaatttccgaatatgcggccgcttacaaaccaggcacctccatagttgagaacgcagaaccccatgtcggtgctaaggaactcctcaaactggacattcgacactttttcgactcgataactttcttccaggtgtacggccaggcatttccttctacgtgctatccccccgccatcaggacaatgctggcaaatctgtgttgctgtagggatagtcttccccaaggtgctccaactagccccgccgtctcaaatctagttatgaagccctttgacgagtacatgggaaactggtgtcaggagcgaggcatcggctatacaaggtactgcgatgacatgacattcagcggggagttcgaccggagagaagtgcagaataaggtccgaggattcctcgcggcatacgggtttgagctcaatgagcagaagacaagagtgcagaaagcccatcagcggcagactgttaccggcatcgtggtcaacgagaaacctcaagtgagccgcgcctaccgccgtaaattgcgggcagagattcactattgtagtaagtacggagtcgagtctcatctgcaaagaaggcgggaagggcaggcacctgagaaggagaggctgatggaagccgattgtgtccacttcctgcaacagctgctggggaaaatcaactacgtgctccaggtgaaccctgaagacaccgagttttgcagagccaaggagattgtgaaggaaatgcttgccgaacgggcttccctttga

SEQ ID NO: 9461 - RNA, 1023 nt, synthetic construct
  source 1..1023: mol_type = other RNA
atgactacttacctctcaagatgtgcaagcagagaatatgacctgtggaaatactgcaccaaagagcagattcacgagatgctcttaagcttccggttgttggagggagcccctgtccgggaggagaagaaattagcttgcctctacgccgtaagtaatcatgtgcgccaacattatcacaccgctcagatcgttaagcagagtggaggggtccgtcgactgctgatccccgacgcattgctagggaccatccagcgtaacctactccaccacgtgcttgatgggttttctgtgagcgcctacgccacagcttacaaaaagaaggcgactgtcctggataacgccagagcccacgttggccgggagaggatcatgaagctggatatcgagaactttttttccagcattacctaccccttgatttatcaatccgtgttcccggccatatacttcccccctgccgtccgacgcatgctgacagaattctgctgttatgaggaatatctcccacagggcgcacctacgtctcccgctatctcgaaccttgtaatgaaatccttcgacaattacatgggcgcttggtgtgaagagcgagaaataaactacacgagatactccgacgatatgacattctctggtctgtttgatgagaagaagctgaaacggaaagttcggaattatctgctggcaatgggttttgaactcaatgagaagaaaaccaggttactgggacgtcataccaggcagacagtgactggtatagtggtgaacgagaaacctgatgtcgggcgcgcttatagaaggaaggtgagggcggaagtatactactgtaaaaagtatggagcagtggaacatctccgcaggtgcgagaagaaggagtggatgaatggcggccaaccagacgctgcccgctatctgcagcaccttcttggcaagattcagttcgttctgcaaatctcaccagaagacgcccagtttagagcggcacgggaagacgtgcagtcaatgatgcgcaatatttga

SEQ ID NO: 9462 - RNA, 1014 nt, synthetic construct
  source 1..1014: mol_type = other RNA
atgactacaaccctctcaaattacgataatgacctctggaaatattgcaccaaagaacagatcaaagacatgttgctctctttccgtctcttacaaggagcccccgtgagggaggaaaaagagctggcatgcctgtacgccgtaagcaatcacatcaaaaagcactatcacaccgcccagatacctaaacgcaacggcagtgttaggaggttacttgtccctgacgctctactgaatacaatccagaagaaccttttacaccatgtgttggatggactgtccgtatccgtgtacgcgactgcatacaaaaagaagactacagtgcttgacaacgcattgagtcatgtaggccaggagcaggtcatgaagctggatatcgagaacttcttcgaaaacattacctttcctctggtgtatcaaagcgcgttcccagccatatattttccccccgccgttaggcggattctcgctgagctgtgttgttacgaagactatctgccgcagggggcaccaacatctccaactgtttcaaatctggttatgaaatcgtttgacaactacatgggggcttggtgtgaagaacggggtatccactataccagatattccgacgatatgacctttagcggtgtctttgatgaggtggaactcaagaataaggtcaagaactacctgttgacaatggggtttgtgctgaatgagaagaagacaaaacttttggggaagcatacccgccagaccgtcacgggcattgtggtcaatgagaaggccgacgttggaagagcttacaagcgcgaggtccgggccgaagtgtactactgcaaaaaatacggcgtgatggagcatctgcgacggtgcaacaaaaaggaatggatgactgagggcgagagcgatacggtgcgctatctaagacacctgctgggaaagatccagttcatacttcagatctctcccgaagacgtgcaattcagagaggctcgagaggatattaggcgtctgctcagagatatttga

SEQ ID NO: 9463 - RNA, 999 nt, synthetic construct
  source 1..999: mol_type = other RNA
atgaccgaccagaatctgtggaaatattgtaccagagagcagtcaaatgaaatgttactctccctcggattactggagggcacaggcgttaagcccgaggctgcattagcctgcctctacgctgtgtccaaccataccgggagacactaccgaaccgcccagatccagaaacgcggagggggagttaggcggctcctggttccagacgctctgctgaacaagatacagcggaatcttcttcaccacgtgctagatgggttgcccgtgtctacgtatgccactgcgtaccgtaaaaggatgagtgttgtggataacgcagctccacatgtcggccaggccttgatattgaagttggacattaaggagttcttcgagaacatcacattcctaatggtgtaccagtcagcatttcctgctgtctactttccccctgccgtacggaaactcctggctgagctgtgctgttacgaagattatctgccacaaggcgcgccgacatcccctgcagtatctaacttggtgatgaagccatttgacgaatatatgggaagctggtgtggcgagagagggatctgctacactaggtactgtgacgatctaacgttcagcggcagctttgactggcgggaggtgaagcacaaggtggcaggttaccttcgagtcctgggtttcgaacttaacgagaagaagacaaggattctgaagcctcacgtgcgccaaaccgtgactggtatcgtcgtgaatgaccgactgcaaactgccaggtcttacaggcggcaagttagatcggaagtatattattgcaccaaatatggggtggaagcccatctgcgccatctgggcaataaaggtgaaagttatggggattccagagatgtcatgcactacctgcagcatctgcttggaaaagtccactttattctccaggccagccccgaggacgaagagttccgtcgcgccaaggaggagatcgaacgcctcatgaaagaacaggagtga

SEQ ID NO: 9464 - RNA, 1014 nt, synthetic construct
  source 1..1014: mol_type = other RNA
atgagcggcaatgacttatggaagtattgcactgccgaacaggagaaagagatgctgatctcattccggttactggacgggatccagatgaaagaagagaaataccttgcatgcctgtacgcactgtctaatcacgccgatgaacattatcatgcagccgcggtaaagaagcggggaggcggagtgcgacggttgatggttcctgacgctctattgggcgccgtgcagaggaatatcctgcaccacattctggacggcatcacaccagctaacgcttccaaggcttatcgccgcggcgttacaattgccgataacgcgctgccacatgtgggtgcaaaacagatcgtgaaactcgacatccgggattttttcgaaaacattacgtacctcttagtgtaccaatacgcctttcccgccgtgtatttccctcccgccgtgagaactatgctcaccgctctttgctgttgtcgagaatgtctccctcaaggggctcccacgagcccagctgttagtaatctcgtcatgaagagttttgatcagtacatggagtcatggtgctgtcgcaggggtataagatacacccgttactgcgatgacatgaccttctcgggatccttcgatgcaaaggagcttaagaataaggtcaaaagctacctgcaggtcatgggttttcaactgaatgagaagaagactagagtgttgaaacgccattgtcggcagacagtcactgggatagttgtgaacgaaaagcctcaggtatcccgagattatcgtaggaacctcagatccgagatatactattgcctgcggtatggggccaaagagcacctgagcaggcttggcaactcaaagtggatgaccgaagaggggccggacaccgagaggtacttgcgtcacctgctgggaaagattaatcacgtactccaggtcaaccccgaagacgagtattttctatgggccagagagaaagtgagggaaatctcttctcgcgcaacaaaagacgagattagatga

SEQ ID NO: 9465 - RNA, 1194 nt, synthetic construct
  source 1..1194: mol_type = other RNA
atggccgggcaggacttctggaagtactgcactactgaagagatcgggcgcacactccgaacctttgacctgcttaagggcatggatgtccccgaagaagcttatctgccttgtctctacacagtgagcaatcagattgagactcattaccacccagtggtgatccccaaaaagagtgggggcagacgaaaactccttgtccccgacgccctactgaggactatccagagaaatctgcttcatcacgtgctagaggagttccagatatctgaattcgcctgcgcatataagaagggaacctcaatagtcgataacgcccgaccgcatgtcggcgcaaaactggtgcttaagctcgacatccaggactttttcgatcaaataacatggattctcgtctaccagaatgccttccctggaacccacttccctcccgctattcgtaagatgctgacagagttctgttgcgtgagggatagattgccacaaggcgcccctacgtcccccactgtgtcgaatctggtgatgaggccatttgatgtccacatgggggaatggtgccgggagagggagatccggtataccagatattgtgacgacttgacattttcaggtgcctttgcccccgaggaggtaatccggaaagtgcgcggttttctgcaggtttatggcttcgaattaaaccggaaaaaaacgagagttttgggccggggaaacgcacaatctgtgacagggattgttgtgaacgaaaaagctcaggtgtctcgcgcataccgaaggaagttacggcaggaggtatatctgttcgaccgttatggtatcaaaactgaggaaggcccaaagaacgatgaaaaggagcgtatgcgcctgctgggtaaaatgaggtacgtcttgagcgttaatccagaggacgtttggttcgggaacatgtacaagaaatggaaggtgggcgctgatagtagaaagaggaccgaggaaatgcagagcatttccgaagagggcggagtcgcaatgaaggccagagtgaacgagggatgtatctcctgcggagcgtgtgtagccacctgtccggaggtgtttcgctttgatgaaaatgatctggcagtagcgtacgccgatgtcaccgacgaaaccgaggctcaagctaaagaggcgcgcgatggatgccctgttgacgtgattgacctcgaagcttga

SEQ ID NO: 9466 - RNA, 1002 nt, synthetic construct
  source 1..1002: mol_type = other RNA
atgtcagacctgtggaagtattgcacagccgagcaatgcagagagttcctcctctcactggagctcgtcggagattctggatggcccgacgataaaaaactcgcttgtctgtacgcggttagtaaccatgttgaaaaacactatcacacagccgtgataaaaaagcgctcaggcaacgaaagaaggctgctcgtacctgatcctttgctgaaggggattcagcaaaaaatcctgcataatgtgcttgaggactacgctgtcagtcggtacgctactgcctatcacaagggagcaaaactgaaggataatgcggccccacacgtgggaaaggaaaagattttgaagctcgacatcgagaactttttcgaaaatatcctgttcaagcaggtgttacagagctccttcccaaagaagtactttccacccgccgttggaacgatgcttgcatacttgtgttgctattacgactatttacctcagggcgcccccacctcccctgcaataagtaatcttgtgatgaaaccgttcgatgaaagcatgggagcctggtgtgaggagcggggtatttcgtacagccgctactgcgatgacctgacttttagcggcgactttgacgctgagatggtgaagagaaaagctggtgcctttctaggcgagatggggttccagttaaaccgcaaaaaaacacgtgtgatctcccgtggccaacagcagaacgtcaccggggtggtagtcaattgtaagccacaggtgtctaaagagtatcggagaaagctcagacaggagatttatttctgtcgcaagtacgggatccggggccatctggaacgaattggcgataggaaatatctggaccttggcgaagcagggatcgaacgatacaggctgaggctaatcggtaaggttaattacgtcctgcaagtaaaccaggatgacagggattttatagggtgcttgggtgacctgacctccggggtgaagggcttctctaagaaaccctga

SEQ ID NO: 9467 - RNA, 972 nt, synthetic construct
  source 1..972: mol_type = other RNA
atgtcggatctgtggaaatattgcacagaggagcaatgccgccagtttttactctcattggagttagtgggcaaagatggttggacagacgacaagaaactggcttgcctctacgctgtgtctaaccacgttgaagaacactaccatactgccgtcattaagaagaaaaatggcaaagaacgtctgctgttggttcctgaccccctactgaaaggaattcagcgacagatcctccacaatgtactggaggaacgcccaatatccaagtatgcgatggcgtaccacaagggtgccagcctcaaggataacgctgccccacatgtcggaaaagagaagatactgaagcttgacatggaaaactttttccagaacatcttgttttcacaggtcctgcagtccgcattccctggcaagtacttcccaccttctgtcggcaccctgctgacttatttatgttgttactacgactacctgccgcaaggtgctcctaccagtccagcaatcagtaaccttgtgatgaagcccttcgatgaatctatgggcaaatggtgcgaagagcgcgggattgcatactccaggtattgtgacgatatgacgttcagcggtgacttcgatgcagacatggtgaagaggaaagccggggccttcctgaatcacatggggttttgcctgaatcataagaagaccaggatcatcaccagaaatcgacagcagaacgtgacaggggtggtcgtaaactgtaaaccccaagtgagcaaagagtatcggcggaaactaaaacaggagatttactactgtaagaagtatggcattctcggacatcttgaaagaataggagacaagaagtacttggagcttggggacgccggaatcgagaaatatagactcaggctgatcgggaagatgaattatgtgtttcaagttaatcccgaggataaggagttccggggctatctcaaagattttgtgtga

SEQ ID NO: 9468 - RNA, 987 nt, synthetic construct
  source 1..987: mol_type = other RNA
atggagaacaccggtctgtggaaatattgtacaccagaacagagccgcgaatttcttctgtctcttcggctgctcggaagaaccgaccgtgaagatggagaacaattagcctgcttatatgccgtgagtaaccatattgagaagcactaccaccccgctgagataaggaaacgggacggctcaattaggagactgctggtccctgatcccctcctgaaaaaaattcagcgcaacatcctgcataacatactcgaccagatgcccgtttctccatatgccactgcctaccacaagggtgcaggcatcaggcttaatgctagacctcactcaggtgcgaagttgctgcttaagcttgatattaaggacttcttcgagaatatcctattctcgcaagtataccagcaggccttcccaaccatatacttcccgccatccgtgggaactatcctaacctacctctgctgttacagagattatttgcctcagggagcccctaccagcgccgctattagcaatctggtaatgaagccctttgacacttatatgggcgcatggtgtggggagaaggggatcaggtactccaggtactgtgacgatatgtccttctctggggaattcgacgcggatacagtcatccgcaaagcaggcgggtttctcaaagctatgggttttgagctgaacacgaagaagacaaaggcagtgtcctgccatcagcgacaggaggtgactgggatagtggttaaccagaaaccccagttgagcaaagagtaccggcgacgtttacggcaagaactgcattactgcggcagatttggcctgcgcagtcatctggaagctatccacgatacacgctttctcccgctcggggaggcaggaattcagcggtataggatgtcactgctgggcaagatcaatcacattttgtatgtcaatcctgaggacgcctggttcttgaatgctagacaaatcgtgcggacgctacgatga

SEQ ID NO: 9469 - RNA, 993 nt, synthetic construct
  source 1..993: mol_type = other RNA
atgtcccgcctctggagatattgtaccaaggaacaatgcagagacttactgttgtcattccagctctttggagagacaaattggagcttcgaaaaacaaattgcctgcttgtatactgtctccaatcatatcgaggcgcactaccacagtatcatcatacccaaaaaagacggttcaaaaaggcagcttgatattcccgattacatcctcaaaaagatccagaagaacatcttgcatcatataatcgaaaagttctctgtccctgaatgtgccaccgcttaccaaaaaggcaaagggatcctgaataacgttacaccccacattggcaaaaagactgtcctgaagctggacatcaaagactttttccactccattattttcccaatggtgtacgcccgggcttttcccgaggagtattttcctccttctattagaactctactgacgtatctctgctgttaccgagatcgcttaccgcaaggcgcaccaagtagcgcagccataagcaatctagtgcttaagccatttgatacctatatggaactctggtgcaaggaccgcaatatccaatatacacggtattgtgacgatatgacattttctggcaacttccacaaaaaggaggtgatgaagaaagtgcagcacttcctccatctgtctggttttagcttaaactacaagaagaccaaagagctttcgagcaataggcgacagcaggtaaccgggatcgtggttaacagcaagccgcaggtgagtaaagagtaccgtcggagggttagtcaggagatttattattgccagaagttcggagtactctcacacctgaagtacatagacgacaaagagcatctgcctctggggcagattggagtcagaaaatacgtgtcctccctgcagggcaaggtgcagtacattttgtacatcaacccagaagacaagcttttcaggaagctgctggatgaatctattgctaagatctgggattcactgtga

SEQ ID NO: 9470 - RNA, 999 nt, synthetic construct
  source 1..999: mol_type = other RNA
atgggggaccagaacctctggaaatactgcacaagagaacattgtaggaagctcctgaccgagtttcagcttttcggcgaaatgaattggtcaaaagagcggcagatcgcatgtctctacgccctttccaatcatatcagtgatcactaccatactgcagtcattcccaaacaagatggcacctgtcgtaagctttgtattccggacacactgctaaaactcgtacagcggaacatcctgcatcacatattggatgggttgaccgtgtcgagctacgccacagcctaccgcaagggagttactatcctgaacaacgtgtcctgccacaccggacaggagaaaattttaaagttggacatccacgactttttcggctccattcctttcattctggtgtatcagtctgtttttcacagtgacagattccccccatctgtggggaccttactcactcatctctgttgttataatgggtgcctgcctcaaggtgcacccgcctctgctgcgattagcaatctagtcatgaaaccattcgatgagtacatgggtaattggtgcggagagcgtaaaataacgtatacccggtactgcgacgatatgacattttccggaagctttgaggcctacaaggtgaagaacaaagtaaggagtttcctgaaagtcatcggcttcgagctgaacgaaaagaagacgaagctgctgctcgctggacaacgacaagccgttactggcatagtggtcaacgaaaagcctcaggtgtctaaggaatatagaaagaagttgagacaggaggtttattactgcctgaagttcggtgctgctagccacttagaacacatgaatcacgatgagtcaggctcaaaagaaggggcggagaggtatctgcagcagctgctgggcaagatcaattttgtgttgcaggtgaacccagaggacgaatattttcgcgccgcacgcgaacggcttaggaaaaatcagaacgagcgagtcaaccgctga

SEQ ID NO: 9471 - RNA, 987 nt, synthetic construct
  source 1..987: mol_type = other RNA
atgggtgatcaccgcctgtggaaatattgcaccgccgaacactgtaggcagctgatcatggagattctgttgtttggggagatcaattggcccgaggagcggcagattgcatgtctctacgcgctctctaaccacattccaagccactacagaacggctaagatcccgaagagggacgggacatgtagaaggttgtgcatcccagacacacttctcaagatggttcaacggaacatattgcaccatatactcgaccctatcccggtgagctcgtgtgctaccgcctatagaaaaggtgtttccttaatctcaaacgtgtcaggccatgtaggccaggagaaaatactgaagctggacatccatgacttcttcggaaacatcccatttattctggtgtatcagcgtgtctttcacagttatcgtttccctcctgccgtcggcacattactgacgcacctatgctgttatgaagggtgtctaccccagggcgcgccaactagtgccgcaattagcaatattgtgatgatgccctttgacgagtatatgggggaatggtgcgcaaaacggggtataacctacactaggtactgcgatgatatgaccttctctggttccttcgaggcttacaaagtgaagaataaggtcagagggttccttcaggtcatcggcctggagctcaacgaaaagaagaccaaacttctgctcgccggacagcgccaggctgttactggcatcgtggtgaattgcaaacctcaagtgtctggagaataccgccgaaagctgcggcaagaaatttattactgctgcaagtttggagccgcatcccatcttcagcatgtccaagatcagaagtacggaaccgatgccacagagaatattcgatacttacagaagctcctgggcaaaatcaactttgtgttgcaggttaatcccgaggataaatacttcaagactgctcgcgaaagcctgaaaaacctggtaacatga

SEQ ID NO: 9472 - RNA, 987 nt, synthetic construct
  source 1..987: mol_type = other RNA
atgggtaacaccgacatctggaagtactgcaccggcgaacagtgtcgagacatgctcctggaactgaggcttcttggaaatgttgactggagccgggagaaacagttagcttgcctctactcattgtccaaccatgccgaaaaccactaccatctgaaggagattaccggcaagggcggccggcaaagaacactgcaggtaccagatgccttcttgaaaaaggttcagaaaaatctgctaaggaacgtgttggacggcttgcctgttagttcttatgccacggcatatcggaaagggaagagcatcctgtgtaatgccgtgccccacaccggaaagggcaagatattaaagctagacatgagagacttcttcgggaatattacattctttcaggtgagacaaagtgtattcggaggactgctgttccctggcagcgtgggtacactcctgactcatctctgctgttaccgagactatctgccacagggtgcacccaccagtggagctgtctccaatctggtgctgaaatcgtttgatgaatccatgggaaactggtgccggattcgcgagattacatacacgcgttattgcgatgacatgaccttttctgggtcatttgactctagagaggtcaagaataaggtggagtcttatcttcgcatccttgggttcgagttaaaccccaagaagactaaagtcctcgattcaggtactaggcagatggtgacagggatcgtggtcaacgagaaacctcaggccgatcgcgattatcgcaggcggttgcgtcaagagtgtcactactgtcttaaatacggacccgatcctggccgagtgagcagcaataaatccaaagaggcatacctcgctgggctggtcggcaaagtgaattacgttctccagataaacccggaagatatgtattttaaggaaatcaagaggcagctgactcaactgcagagagaagcgggggagtttccaatgcagtga

SEQ ID NO: 9473 - RNA, 1002 nt, synthetic construct
  source 1..1002: mol_type = other RNA
atgagcggagaagaaatgtggaagtactgcactggggagcaatgtcgggacctcctgaggagcttggacttgctccggggaaccggggtgaagcaggaacaagagattgcatgcttatactccctcgctaatcatgccgaagctcactataggagggccagaatccctaagaaaaacgggggggtcaggaaactccagatccccgatggcatgatgaagaaggtgcagcgaaacctgttacaccacgtcctggacgggctcgaacccagtccctatgcgacagcctaccgaaaaggcgctggcttgaaagagaatgcagccccccataccggtaaaaagcagatcctgaaactggacctggagaatttcttcgagaatattaccttctcacttatcctggagaatgtgtttccgtcgcgcttattcccaccagccgttggcgtgctactcacaaacctctgttgctaccgcgactatttgcctcagggggcaccagtgtcagcagcggtgagcaaccttgtgatgaggccattcgacgattatatgggttcttggtgtggagagcaaggcatagcctatacaaggtattgtgacgatatgacgttttctggcgactttgatgccagaaaggtcaagaataaggcccagaattttctgaaggtaatgggtttctccctgaacgcaggaaagactcgcctatacggtcagggacaccgtcaaagcgttactggagtggtagttaactgccaccctcaggcggctcgtacctaccggaaaaagctgcgccaggatctgtactattgtgagaagtacggggttgcaggtcatcttaaacggcaaggccgggacttgggccaggaagatgcagctggcgcctcctttagataccttcagatgcttgctggcagagctgcctttgtcctgcaggtcaaccctgaggatagttggtgcagagaggccaaaggacgaattgctcgcctgcagtctgaactgtgggtgtga

SEQ ID NO: 9474 - RNA, 987 nt, synthetic construct
  source 1..987: mol_type = other RNA
atgatttggaggtattgcactgcggagcagtgtcgtgaacttctgtactcctaccgcttattcggtgagcggaaatggtcaatggaagagcaggagagatgtctttacactttgtccaatcatgccgagcagtactatcggaatgtgtggatcccaaagaagaacggaaaaaagcgaaaacttatgataccggatcctatactcgcggaagttcaaaggaacatcctaacacagattctagctgacatgccagtgtccgaatatgctaaggcttaccggaagggactgggactgcgcgaaatggtgcaggagcatcaaggtcagaatacagttatgtgtctcgatatccgcgacttcttcggtaatatcaccttttttatggtctaccagcaggtattcagtagtctcaggttcccccctgccattggcactctcctcaccaacctttgctgttttaaagacacattaccacaaggagcaccaaccagccccgctatctctaatctggtcctcaaacctttcgatgagtacatgggccaatggtgccgtaaaagaggaattgtctatacacgctattgcgatgatatggtgttctcgggggagctggaccccaagacggtgaagaataaagtgcgggggtttctgagagttatcggcttttctctgaacgaggagaaatctagcgtgagacgacagagccagcggcagaccgtaaccgggattgtcgtgaatgaaaagatccaagcagccagagagtatcgaaggagagtccaccaggaagtgtactactgcaggaagtttggggtggacgatcacctggccaagattggcaaagacaagaaagagcccatggacaggcagcgctacttactgtccctgttgggcaagctgaactatatactgcaaatgaaccctcaggatgggcaggccaaaagcgacttggcagccctgaaggaaattatcgtttcattgggcgaaaagaactga

SEQ ID NO: 9475 - RNA, 960 nt, synthetic construct
  source 1..960: mol_type = other RNA
atggatgctacccgcatcacactcctggcgctggacctgtttggaagtcctggctggtccgctgataaggagatccaacgactctacgctctaagcaaccacgccgggcggcattatcggcggattatcctgtcaaaacggcacgggggccagagactcgttttggcccctgactatcttcttaagaccgtgcagcgaaatatactcaagaacgtgttatctcagttccccttatccccgtttgccaccgcctacaggccagggtgccccattgtgtccaatgcccagccccactgccagcagcctcaaattctaaagcttgacattgagaacttctttgattctatcagctggttgcaggtatggagagttttccgccaagtacaactgcccaggaacgtggtgactatgctgacttggatctgctgttacaatgacgctctcccacagggtgccccaacaagtccggcaatcagcaacctggtcatgcgttgtttcgatgaacgcataggcgagtggtgtcaggcaagaggcatcacatacacacgctattgtgatgatatgactttttcaggacatttcaacgcaaggcaggttaagaataaagtctgcggtttgctcgcggagctgggcctgagtctgtatcagcggaagagctgcctgattgccgcttgcaaacgacaacaggtgaccggtatagttgtcaatcacaaaccccagctcgctagggaagcacgtcgcgcactgaggcaggaagtgcatttatgtcagaaatacggcgtgatttcgcatctgtcccacagaggggagcttgacccatcaggggacctgcacgcacaggccacggcttatctgtacgccttgcagggaagaatcaattggttgcttcaaattaaccctgaagacgaggcctttcagcaagccagggaatctgtgaagagaatgctagtcgcgggatga

SEQ ID NO: 9476 - RNA, 960 nt, synthetic construct
  source 1..960: mol_type = other RNA
atggatgccacccgtgtctgtctcctggcactagacttgttcagcagccccgggtggtctgctaatgaagagattaggcgcctctacgcattatccaactcaacatcaaagcactaccgtaccatcgtgctgagcaagagagacggaggggagaggcagatcctcgcacccgattatttactcaaaactgtccaacgcaatatcctcagaaatgtgctttcgcattttcccgttagcccattcgcgactgcttaccgacctggctctactgtggtgcataacgctaggccgcacctttcccagcctcaaatactgaaactggacattgaaggtttcttcgaaaatatttctggcctgctggtctggcgggtgtttcggcaaacaaccctgcctaacgccgtcgtgacaatgcttacgcacctgtgctgttaccgtgacgctttgccacagggtgccgcgaccagtccagccatcagtaatctggtgatgcggcgatttgatgagcgaatggggcgctggtgccaggaaagacacattgtctatacgagatactgcgatgatatgacatttagcggcgagttctccgccaggcaagtgagaaataaggcagctgcactcctcgccgagctaggactgcggctgaacaaacgaaagaccgccctcattccagcttacaaacagcagactgttacagggatcgtggttaacgaaaagctgcatatatccagggagcagcggcggcttttacgccaggaggtacactattgtctgaagttcggcgtagccgcccatctgagtcactctggaaagtccactgagtcagctctgtgctatttgcagcgcctacagggtaaaatcgcatggttgcttcaagtgaaccccgacgaccgcgcgtttagaagggccttgagagatgttcagcagatgatccggcagatagccctgcctggcaccaggtga

SEQ ID NO: 9477 - RNA, 1071 nt, synthetic construct
  source 1..1071: mol_type = other RNA
atgcggcgagctaatgcactcagcaccttcagcagattgagagatcgcttgtatagaatagtggccgccgatgccttctttaagcaccagtgggacaaagagcccacgctggatgcaacccgtgcctgcctgctagccctggaattaattggccgctcagactggtcagctgaccgagaaattcgctgcctttacgccctgtcaaatcggagcgaacgccactatcgcaaaatcgtgctgactaaaagagatggcggcagtcgagtcctacatgcacctgggttcctcttaaaaaccgtccagaggaatgtggtgaagaacgtgctgagccattttccagtatccccatttgctacagcttatcgacctggttcctctactctctgtaacgccagtccacatgttgggaggaagcagatcctgaagctcgacattgagaagttctttgacaacattcgcttcacccaggtatacagactgttcaacaaaaccgaacttcccgctggagcggtcaccctccttacacacctgtgctgctacagagatgcactgcctcaaggggctccaacaagccccgcgttaagtaatctcatcatggcacggtttgatgatctcctgggaatatggtgtaaggagagagacattgcctacacacggtattgtgatgacatgacattcagtggcgatttcgacgctcaccaggtcactaataaggttcgtggactgctgaacgacatgggtttcaccctaaactctaggaagtcacggcggatcgctaggggttctcaacaaacagtgacgggcatagtggtgaaccatagaccgcagttgccctcggaatttaggagggcacttcgccaggaggtttacttttgtcagaagttcgggatcgcttcccaccttgagaggatcggaagctctgagactcctctgaggtaccttcaatccctgttggggaaaatcgcctacctcctgcagattaatccggatgacgcggagtttcagcgtgccaaggcagccatcggccagctgctcaaagccgagacttctttgtcctatcgggccgactga

SEQ ID NO: 9478 - RNA, 972 nt, synthetic construct
  source 1..972: mol_type = other RNA
atggacgccgcacgagcttgtctcatcgctctggaactcacgggcaaaactgcctgcccagccgataaggagatccagtgcctttatgccctatctaatcgatctgatcgccattaccgcaagatagtcctgaccaagcggtccggtgggttgcgcaccctgtatgcacccgacatcctgctcaagtccgtgcaacgcaacatcctgcgtaacgtcctgtcactgtttccattgagtccatttgccacagcttacagggagaagtgcagcaccctggataatgcgagcccacatgttgcccaaagtaacgtgttgaagctggacattgaaaacttcttcgacagtatcacattcttccacgtccatagattatttaagaaaaccgagttacctgctgccgtggtaaccctactgacacacctttgttgtcaccgcgatgtgttacctcagggcgcccccacaagcccgactatttccaatctggtgatgaaacgtttcgacgacgtgatcggcctgtggtgtcaggagagagatattgtgtacaccaggtattgcgacgacatgacgttcagcggggacttcgatgctaggcaggtaaaaaataaagtgcggggcttgctgtacgatatgggatttacactaaatgccagaaaatctagactcatcactgcaaatcagcggcagaccgtgactgggatagtcgtcaaccagaagccccagctgacacgggacattcggcggaagctgagacaggaagtttatttttgccagcgttttggagttgcgagccacctcgttcaaactggtgattttaacccccaggagtcccctagggagcagagacttaggtacctccagtcactccaaggaaaaattgcctacctcttgcaaataaatcctgatgacgcagaattccagaacgctcgatctgctgtgaggcagcttcttaaggaagagtcagcgtcggcatga

SEQ ID NO: 9479 - RNA, 945 nt, synthetic construct
  source 1..945: mol_type = other RNA
atgaatgccgcccagctatcactcgtaagcctggaacttacggggcacccgtactggtccccccataagcagctccggtgtctgtatgcgttaagtaatcattcagaacggcactataggactctctcccttccaaaacgtagcggcgggatgcggaacatccaggttccagatcccctcctgcgccaagtgcaaaggcacatacttcgccacgtgctgagtctgctcccgctgagccccttcgctacagcctggaggcccgagtactctctgcgacataacgtcctgcctcaccttggaaaaaaacaggtgctaaaattggacatcgagaactttttccctgggattatattccctcaagtgcagcagctcgcatttgctaagacctgcctgccatatgcagccaccaccctgctgtcacacctgtgttgctatcgcgacagattacctcagggcgcgcccacatctcccatgttaaccaacttggtcatgaggccctttgatgattacattggagattggtgccagcagcaggaaattgcttacacacgatacggggacgacatgacattttccggcgattttgatgcacggagagttcagaataaggtcgccggcttcctaggcgagatgggtatggttctgaatgagggtaagacccgcgtgatgaggaggggtcagcagcagatagtgacgggaatcattgtgaacgaatctactcctagagctccacgggaaatgcgtagagcattgcgccaagccctgtactattatggcaagtacggggcctcggctgtaccagagggattcgacgagcagcagtggctccagagcctgcatggaaaaattactttcatcttgcagatccaccctgaggacgccgccttgcaacatgcacgaggcatcctccaaagacagcttaaggctatcagatcccaaccatga

SEQ ID NO: 9480 - RNA, 936 nt, synthetic construct
  source 1..936: mol_type = other RNA
atgaacgctgctcagctgtcactaatcagcctggagctcactggccatcctcactggagcccagctaagcagctccgatgtctatatgccctcagcaatcattccgatcgtcattaccgggagttgcagctgcccaaaaggtctgggggcattcgcacaatccatgtgcccgcaccactcctgaagtcggtacaacgtaacatcttgagacacgtgctttccctcctgcccttgagtgactacgcgactgcttggcgcccagggtataccttacttaataatgttttgcctcacgttcgccagaagcaggtgctcaaaatggatatcgacaacttctttcagcggattatttttcctcaggtgtggcagcaagccttcgccaagactagattgcctcaggctacaattacgctgctgtcccacctgtgctgctatagggaccggctaccacaaggagccccgacatctcccacgatcgccaaccttgtcttaagggattttgacaactatataggacgatggtgtgcagagcaggaaatagcctacaccagatacggcgatgatatgacctttagtggtgacttcgatgccaggcgagtccgcaataaggtgaaaggctttctggcagagcttgggtttgaactcaaccacgacaagaccagactgatgtcccaagggcagagacaaatcgtaaccggaatagttgtgaatggtccatacccgcaggcacctgccacacttaggcgtgagctgcgccaaaccttatactattacgaaaaattcggctggtcacccgcgcacagcgaaatgactgagcggcactggctgcagacaatgcagggaaagattgagttcatcctgcagattaggcccaacgactctgaattcctgcatgcaagacacaatgtccggcgctggctgaaacggtgcgcttga

SEQ ID NO: 9481 - RNA, 1038 nt, synthetic construct
  source 1..1038: mol_type = other RNA
atgtctcgcgacatctggaagtacatcacggtggaacagtgtaatgaatttctactcagctttcagctgttgggcgagactactctgagtaacaaggagcagattacctgtctatatagccttagtaacacactggaaaagcactacgaacaatatactctggtcaagagcaatggcgggacgagaaaaatcaccaaacctgacgagagactcaaacttgttcagaagaatatccttgccaatattctgagtcagcggagcgtatccatttatgccaccgcttatcagaagggggttggcctcataatgaacgcccagccgcacacggaaaaacagcagattctgaagcttgacatagaggatttcttcgactccatttctttttcccaggtgtacgcttacggtttccctcgttcatatttcccaaaggctacagcaggcttattgaccaatctctgttgctataaccactgtctgccacagggtgccccaacttcccccatgatctccaatctggtgctgagatccttcgacgatagtatcggacaatggtgcgtagagaaggggatctcttacaccaggttttgcgatgatatgaccttctcaggaacctttgacgccaccacagtgaaaaataaagtgcaagcattcctggtcgagctgggattctcgttgaacaaaaaaaagacacgggtgatatctaagcacgagcaacagacagtgactgggatcgtcgttaacgaaaagagccaggcccccaggacttaccggaagcagctaaggcaggagatttactattgcatgaagtttggcgttagctcacatattgcgcgaaaaaccgcggtcgctccccatctgatagagcagcgcacaatcgagaactaccttttatctttgctcagcaaaaccaatttcattttgcaaatcaaccctctcgatgaagaatttctgcaagcaaggacccagctgaaggtgttactcactgagcccgtgtcatatacacatctggatgtgtacaaacgccaggtctaccgatga

SEQ ID NO: 9482 - RNA, 1002 nt, synthetic construct
  source 1..1002: mol_type = other RNA
atgtctcaccgcgatttgtggaagtattgcacccccgctaaaaacagagaatttttgctgtcactacagttactgggccagaccgagctgagcgatgcccagcaaatcagctgcctttattctttgtccaaccacctggaagcccactatagaacctacttcctcataaaaaggaatggctccaagcgcaaaatttcagcccccgacttattgctgaagaaggttcagaaaaacattctcaccgtctgcctgaccaataggacctgctcaccctacgccactgcctacaggaaaggggtacagctgcttgagaacgctactccacacttaggacaaaagcagcttctcaaactggatattgaggacttcttcggctcaatcactgttcccatgattgctagaagcgcctttcctcgcacatacttcccatcttcggtcgcagggcttctgactcagctttgcgcatacgatgattgtctgcctcaaggagcgccgacgtcccctctgatctccaacctcgtgatgaaaccattcgacgacagtatcggtcaatggtgtgcccagcgacagataacatacacacgattttgtgatgaccttacatttagtggtgacttcgcccccaaggaggtgaagaaaaaggtgcagaattttctcttcgagctcgggtttactctaaacaagataaagacgaaacagttgagcgcaagccagcgtcagagtgtgactggaatcgtcgtgaataccaaggcgcaggttcctcggtcctatcggaagaaactgagacaggagatctattactgtctcaagttcggcgtgaggagtcatctaattcatcaacatacgaccagccagccagtactggaacaagaggaagaccagcggtacttgcaacaactgatcggcaagacaaatttcattctccaggtgaatccgtctgaccaggaatttctgcaggctaaaaaagcactgaaggagctcctgcaggctaactatacatga

SEQ ID NO: 9483 - RNA, 1011 nt, synthetic construct
  source 1..1011: mol_type = other RNA
atgccgtactttttaggagggattcgccccatgaacaaaagtatttggaagtatatcaccaccgaccaatgtaacgactttctcctcagttttaatctgcttgcacctacgaacctttcacccgaaaagcagctggcatgcttgtacgcagtcagcaacagcatcgagtctcactacaccacaacatatctgaagaaaaagaccgggggacaccgggtgattcacgagcccagtccactgttgaagaaaatccagaagaacatcctggtgcatgtactggaaccgcaggcctgcagcgtgtatgccactgcgtaccagaaggaaaagagcctcctggataatgctgctccacatattggaaagaaacaggtgtacaaactggacatcgacgattttttcgactctatctctttcactatggtgttccagagggcctttccccgtgagtattttccacctcaggcagccgggattctgacacagttgtgttgcttcaacgattgtttaccccaaggcgccccaaccagccctatgatatccaatctggtgctgaagccattcgatgattacataggtcagtggtgcagggaacggaatatcgcttacactagatattgcgatgacatgaccttttcaggggagttcaatgttaagaagcttcaccacaaagttagggcctttcttgaggctctcgacttctcccttaatcagaagaagactaaattactggccacgggtaagcaacagattgtcacaggaatcaccgtcaatgagaaaatgcaagtgcccaaaaaatacagacgagaggttcgccagtcagcttactactgtctcaactatggcacagcgtcccatctaaaaagaatgaacgaaggcaatggcgaactggatcctgagacttatctcaactccttgctgggcaagatcaatttcattttgtcagtaaaccctagcgacaaagagttcagtctactgaaggaagagatatccaaactactctcgcattcttga

SEQ ID NO: 9484 - RNA, 984 nt, synthetic construct
  source 1..984: mol_type = other RNA
atgcaaaaccaggatgtttttggttacgctaccaatgctcaaatcaacgacttcttgtattcccttcagctcttcggcgcaagcgattggtctaaggagaagcagatcggggctctgtatgcaatttccaatcacattgaggatcattgcacacttttccaggtacccaaacgaaatggatcagagcggaccatttgcgccccgtcacctctgctcaaaacagtgcaaaagcgtatcctgtttgctgtcctgagtgagcgccccgtgagcgaatttgccacagcttacaaaacgggggtgtccatactcgacaacgccgccgggcatgttggccagaaatatgttctgaagctggacatcgagaactttttcgggtcgatcttatttcaggacgtgatgaattttgcattccctcgcgccctgtttccaaagagagtgagtgccctattcgcgtcactctgttgttatcacgattgccttccccaaggagcccccactagtgcctgtatcagcaatattgtgctgaagcctttcgacgattacattggtagagtcgcaaaggaaatgggagccgtgtacaccaggtactccgatgatatgacctttagcggcgacttcgacacaaagaaaatgtactacaaggccaagctgttcttggaggctatgaattttaccgtgaatgaagcgaaaactcagatacttaccaaaaaatctcagcaaaaggtcactggcctggtagtcaacgagaaggtgcaggttccaaagaactacaggaaaactgtcagacaggaagcgtattttgccactaaatatggattaacgtctcacttggcctataggcagaacgtgcaggcagcagaagtaacacagaacgcagctttccggtacaagctcagcctgctgggcaaaatcaactacattttgctcgctaacccagaagaccaggagttcaagaagtggcagaatgagataaaatctctatga

SEQ ID NO: 9485 - RNA, 984 nt, synthetic construct
  source 1..984: mol_type = other RNA
atgaatcatcaggaagtttttggatacgcaactgacgcacagctgtccgaattcctgtattcactcagactactgggcccttctgcttggcccaaagagaaacaactcgcaactctttacgctatatccaatcatctggagaaccactataaaaccttcaccgtccagaaaaggaacggacagatgcggaatatttatgctccgtcgccactactgaagggggtgcagcgaagaatactcgtaagtctccttaacgaaaggcaagtcagccccttcgcaactgcctacaagaatgagggtagcatcttttttaacgccgctaagcatgccagacagaagtacattctcaagttggacattgaagacttttttggaagtattctgttccctgatgtcatgaattatgcctttcctaaagcgatcttccccaaacgcatctctgggctgttgacaagtttatgctgctatcacgatgcattgcctcagggggcgccaacatctgcggccatctccaacattgtgatgaaacccttcgatgattatatgggcaagttggcctccgaaatgggcattaattactcaagatactccgacgatatgaccttttcaggtgacttcgacacggcttacatgtacaggaaggcaaagatgtttctgaacgacatgaacttctctgtgaaccacgccaagacaaaggttcttacacgcaagatgcagcaaaaagtcaccgggctgattgtaaacgagaaggtccaggtgagcaaagcctataggaagaaggttcgccaggaggcttactatgtgagccgattcggactccggaaccacctggcctttatccaacagctgaatgaggtggagatcagcaaagaagctgtgaagcggtaccagctggtgctcttaggcaagatcaatcacatcctttgtgccaacccaaatgataaagagttcctgaattggcgtgagaagataaaaggcttatga

SEQ ID NO: 9486 - RNA, 1002 nt, synthetic construct
  source 1..1002: mol_type = other RNA
atgaactcccacttctggaaaaactgctccgcccaggaggagagggctttcctgttagacttgaaccttctacggcagtacggagacgcctggagtgataaggagaaaatcgcattattgtacactgtaagtcggactatcaatcagcattatttgaccgtgaaaattcctaagcgaaccggaggccttcggacactgcatgccccagatccgttattgaagatgatccagaagaatatccttagcctgctagagacacgtaccctctctgctttcgccaccgcctataggaagggggggtcaatattagcgaatgccacccctcacgttggtaagaaacaactgcttcagctggacctgctggatttttttgactctctgagcttcccgatggttatggccgcagcatttccaaagacggtcttccccgataacacacgcatgctgctaactaatctctgctgcctgaacgacgcactcccccaaggtgctccaacgtccgcactcatttcaaatctgatcatgaggcctttcgatgattatattggcgagtggtgtaaagaaagacagatagcttattcgcgctattctgacgacctcacctttagcacaaatgaaggcgacctgaccttggttaaaaggaaggtggagcatttcctcgaagccatgcagctcaacctgcaccccgctaagacaaaatacactgatcaaagtatgagacagtgtgtgactggcgtcgtggtgaaccaacaccctcaggtcccccgcagatacagatccatgctccgacaggagatttactatcttgagaaatttggactgacagggcacttggcttgtctgaaggaaaaaggagaagtagccgccgaccttagcgaaaagcagtacctgcgtaaactgatcggcaaggtgcagtttgtgtgtgcgatttgcccagagtcagcggggttccaagatgcttactggcggctccagaagctggcaatctcttttgaggaatga

SEQ ID NO: 9487 - RNA, 1002 nt, synthetic construct
  source 1..1002: mol_type = other RNA
atgaggtacactaacctgtggaagtactgcgatatccaacaatgtcaggattttcttctgtctttggaactttttgacgaaagcagactcacacgccaggagcggcttaaatgcctgtacgcagtcagcagacacgcagaaaagcactacagaaagacattccgcaaaaaggccgatggcagtctacggccactgcttgagccggactatctcctgaaacagatacagaggaacttactctgtaacgtgttggaacgagttcccgtctcagagtacgccaccgcttatcgaaagggtgtgagcgtccgtgataacgcagctgcgcatgtagcaagccctcagatcttgaaactggatattgagaacttcttcggctccatcacggactccatggtgttcacaaaggcttttcctcgggaatattttccctatccagcagcctctctgctaaccgccatttgctgctacgaaggctacttaccccaaggcgctcccaccagtgccgccatatccaatctgattatgaaagacttcgacagatacatcggaaattggtgccgtgagaagggagttaattatacccgctattgtgatgacctgaccttctcaggcgattttgactgggtggaggtgaaaaacaaggtgagggcctttctcaatgccatggggttcgagatgaataaaaagaaaacgaagttgctcactgccggtcagcggcagatcgtaacaggggtcgtggtgaacgaaaagctgcagactccacgcgcttacagaagggagctgcggcaaatttacttctatatgaagaagtacgggatgcgctcgcaccttcacaataaactcggaagggaggcagctaacgaggaaatggcttcttatttagaacatgttctgggacgagtgaatttcgtcctccagatcaaacctgaggacgggtgttttaaagaaatgaaagcctggattctggagaagaagaaggaggaagcgcatgagtgtctgtga

SEQ ID NO: 9488 - RNA, 975 nt, synthetic construct
  source 1..975: mol_type = other RNA
atggacttatggcggtattgcaccgccgagaaatggcaggagttccttgtctcactcgacctgctcggttcggctccggctgacagggaagcctatttcagatgcctgtatgcactgtcaaaccatcccgaggcgcactatcgcacgctgtctgttccaaagcggggcggaggccgaagaacccttcgtgagccggatgccttgctgaagaaggtgcagaagaacattctgcgccatatcctggcgggggctccagtcagtgaatacgcctgtgcctataggaagggaatgggcgtgaggcagaatgcagccattcacctaggacaacccatgatccttaaactggacatccacgactttttcggcagcataacattcccaatggttatgtggagcgccttccctggcacattgttcccacctgccgctgctaccatgctgactagtctctgctgctttagagatgtcctaccccagggggctcctacatctgcagcgatttccaatctggtcatggagccttttgatagacacatgggtgcttggtgtgcagccagggggatacggtacagtcggtactgtgatgatatgactttttccggtgttttcgacgctggggaagtggaagccaaagtgcgcgcctttttggaagtgatgggcttctccttgaacaagaagaagaccaaactgatgactgctggtcggagacaaacggtaaccggactggtggtaaacgagaaattacaagtgccccgggaataccagcgagcactccgccaggagctctatttttgtgagacatacggggtgcgaagccatttagaaaggaaaaatggaagagccccctctgaggaggaggccgcacgttacctggaaagccttgcaggcaaagccgcttacgtcgcgtcagtggcacctgaatccgagaatgccaggcgcatgcaggagaagatcaagaaactcatcaaaaagtga

SEQ ID NO: 9489 - RNA, 999 nt, synthetic construct
  source 1..999: mol_type = other RNA
atgcccgacaccgatgtgtggaaatattgcactacagcccagattaaacaatttctcgtgagcctgcgcctacttgggaatactgattggtcagacgagaagtatatcgcatctctctacgcggtgtctcgaaacattaacaatcattaccagcagactacactcctgaagagagacggaacacagagacaccttttggtgccagacaaactcctgaagaagattcagaaaaacattctgcggaaccttctgcaggacgttcccctcagtgcccatgcaaccgcatataggcaggggacggacatagtggccaatgcccaagctcacctgggccagagacagatcctaaaactggatatcgtggactttttcgggtctatcacattcatgatggtctgccggtcagtctttccaagtctgtacttccccccctccgtgggcaccctgctaacaaatctttgttgttacaatgacgcactgcctcaaggcgctcctactagcccagccatctcgaacattgttatgaccccgttcgacaactacataggcaaatggtgtcaggaaagaaagattgtttacacgcggtattgtgatgatatgaccttcagcggtgattttgaggctaagcaactcaagaataaggtgagggccttcctgcaggaaatggggttctccttaaaccaacataagaccaagttattcacttgccacaccaggcagctggtcactggaatagtcgtgaacgagaaactgcaggtgtccagggaatatcgaaagcagttacgtcaagaactctatttttgccagaaatttggagtactgtcacacctcacacagatcaataacggtctgatcgcgaaacaagaggatgtcgagtcctacctgcaaagtttgttgggcaaggctaattttattgtacaggttaaccctcaggatgcctacttccttcaggcccagagcttgatcaagcagttgatccgcacccaccgcgctgagtga

SEQ ID NO: 9490 - RNA, 999 nt, synthetic construct
  source 1..999: mol_type = other RNA
atgcccgatatgcctctgtggaaatactgtactacagcccactatctggagtttttgattagcctgcagttgtttggggatacagactggtgtgccgaaaagcagatatcctgcttgtatacgatatccaatgatgtaaacgcccactaccagaggacaaccatccttaaaagagacggcacacctcgccacttgctggcgccagatcccctgctgaagaagatccagaagaatatccttagaaacattctggcacctgtccccgtttcaccatacgcgactgcttaccataaaggcgcagacgtggtggccaatgcggcagctcatctgggtcaaaaactgcttctcaagctggacatcgaggactttttcggtagcataatcttcccaatggttcggaggagtgccttccctgatatctatttcccccccgccgtgtctacccttctcacacatctgtgctgttacaacgacgctcttccgcaaggagcaccaacctcaccgactatctccaatttagtcatgaaaccattcgacagccacattggtgaatggtgcagtgctcggggcattatctacacgcgatattgtgacgatatgaccttttcaggcgattttgacgccaaagcagtgaagaacaaggtgggccacttcttacaagccctaggattcagcctcaataaggagaagaccaagctgctaacccgccacactcgacagtctgtgactgggattgtcgttaaccagaaactccagctcagtagggattatcgtagacaactccggcaggagatttatttttgccagaagttcggggtagtgtcgcatctgaaacggatgaactaccctctggagtctggagatgtggaacgctacctccaggccttacaaggcaaagtcaatttcctgttgcaggtgaatcccggggacgacgtctttagacaggctatgtccggaattaagcagatgatcaaggctaacaggaactctcagtattga

SEQ ID NO: 9491 - RNA, 1005 nt, synthetic construct
  source 1..1005: mol_type = other RNA
atgcccgacaacgatctgtggaagtactgcactgccgagcactgtaaagaactgcttctcagcttccggctgtttggaaacactgcttggacaggtgagaagcaaatcgcgtgtctctatgccttgagcaggcacatcgggaaacactacgcccgagccgtaattcctaaaagggatggctccgcccgccatctattagtgccagacccccttctgaaacaagtacagaagaatatactccatcacgtcttggctgagatgcctgtctcgccgcatgctacggcctaccaccccaaggcaaatgtattcgccaacgccaccccacatctgcgtcagccacaggtgctgcggctggacatcgaagatttcttcggtaccattacattcccaatggtgtacagtcaggcatttccctatgtctactttccccctagcgtgcgcacattattgacacacctgtgctgctaccgggactatctgcctcagggcgctccaacttccgccgatatctctaacctcgtgttaaagcctttcgatgaccatatggggcggtggtgttctgaaaggggcatcacatacacccgatattgtgacgacatggtcttttctggggatcttgacgcaagagcggttaaaaacaaggtccagaattttctgcaggctatgggattcagccttaacctcaaaaaaacgcgcctctccaccagacatcagcaacaggtcgttaccgggctagttgtgaatgagaaggtgcaggcccctgtgcaatatagaaaggctctcagaaaggagatttacttctgccagaagtatggagtgcagtcacacctgactcagactgcagaccagacctacctgccccatggccacaacggcgttatgaggtatctggcatcactgttgggaaaagtgaattttgtgcttcaggccaatccgcaggatgcttactttcaacaggcaaagagtgcgatacaacacatgcgtgcacagctgaaattggcttga

SEQ ID NO: 9492 - RNA, 966 nt, synthetic construct
  source 1..966: mol_type = other RNA
atggatttctctcagtcacaaatcgaggaggtgcttgctctacctctgctgaccgacaagactcccgaaaagaggcttaagaccctctatgccctgtccaatcatgccgaggaacactaccatcccgttaccgccgcaaagcgcaatggcggtaggcgcaaaatccttgtcccggacgctttactgaagcaagtgcaaaggcagattctccacaatattctggagaaacaaccaatcagccgatatgccaaggcttaccatccaggggccgcaattcgggaaaacgcggccgtacaccttcaccaacccggcatactgaagctcgacatagaaaacttctttccgagcatcctgtttccagatgtcctgtccagttgtttctcctcgcagcggttttctgtccccatgggcaccttactgacgaatttatgttgctatcaggggtatctacctcagggggccccaactagtcctgcaatttccaatttggttctctaccacttcgacgtgtggatcgggcagtggtgcggtcagcagcatatccggtacactagatactgcgacgacttgacattttcaggagattttgatgcagccttggtgcagggtagagtcgagggatacctgcagacgatgggcttcatgttgaaccagaaaaaaaccagatggatgacagcgcaccagcagcagatggtgacaggcgtggtagtgaacgaaaaaatgcaggtgtctcgcgcgtatcgaaggaatctccggcaggagatttactactgtagaaaatatggagttcagagccaagcagcctatgctgctggcaaagacgccgctgagataggccccggagatgggaagcgttacctgcaaagcctcctgggaaagattaacttcgtcctgcagatcaaccctgatgacgcagaatttcagcgtgctgaggaagaggtgaaatcatggctcacagccaagtga

SEQ ID NO: 9493 - RNA, 1032 nt, synthetic construct
  source 1..1032: mol_type = other RNA
atgtatatagatcataacgaggtcatcttccagccttttgatgtggaatacgtggttgaacggggtctggagcgggccatggaagaggcatttgccttccaccagaattgtcgcctcccgttcctgatggacgtcagccaactggcaggttttttgtctttaaccaaaaaggagacgtttcggttcgtgttcgcctgtgattcaatgtaccgtaccttttccttgccaaaaagaaccggaggtacacgccagattgatgctcccatgcccgagctatcttgggctcagtatcggatcacccgggagatcctaaataagctgcctattagtcagtacgcgactgcttatcataaaggagcgagactgactcagaacgcctcaccgcacacgggcagacgctatcttctcaagattgacctttccgactttttccacaatatccgcatgactgacgtgcattcgcgagttttcaccccctactatcctaaacaaattgggtacttcctgtctctcatctgctgcaaggatgggactctcgctcaaggggcccctagctctccagccatcagcaatatcgttatgagatgctttgacgagcccttcggccagtggtgtaaaaaacgaggcctgagctacacaaggtactgcgacgatattaccataagtggcgatgtgcccctctatagggcctatgaaaaagcatcactgtggttgaacaacatgggctttacagtgaatgaaaagaagacaaggtttataaccgacgccagcaggcagacagtgacagggttgactgtcaacgaaaaggtgagtgtgccatccgactacaaaagaaagcttcgccaggagctgtactatgtagagaagttcggaattagatcagctgcggatcacatgcgtctgcctgacgccctgaagtactgtcagtccctgatgggccgaatcaattacgtacttagtgtcgagccagccaacgaatccttcctcagggcaaaggacgctttaagcggacaatttgcattctgcgtctga

SEQ ID NO: 9494 - RNA, 1032 nt, synthetic construct
  source 1..1032: mol_type = other RNA
atgtacattgagaataatgaggtcatctttcggagctttgacgtgaactatgtggcaaaacatggcctggaacaggccatggatgaggcgttcgccttccacgaaaagtgccgcctcccgtttctgatggatattgcccagctcgctgggttcctgagcctgactcaaagagaaacctataggttcgtttcaaagtgttcccgcatgtatcggtctttcgatctgcctaagagaactggtggcactagaaggatcgacgctcccctacccgagctgagttgggcccagtacagaattgacaggacaatcctgcgcaagatccctattagccgatacgctaccgcctaccacaagggtgccagattaacacgaaatgctctcccccataccggaaaaaaatacctactgaagattgacctgtcagatttcttccacagcatccgaatctccgacgtccatggtcgggtcttcgccccatactacccgaagcaaatcggctattttcttagtcttatttgctgcaaggatgggtctttggcccagggagcgccaacctctccagcaatatcgaacatcgtgatgcggtgtttcgacgaacctttcggccactggtgtgagaaaagaggcctctcatacacacgctattgcgatgatatcgcaataagtggcgacgtacccctttacagggcctacgagaaagcaagtttatggctcaacaacatgggatttaccgtcaacgaaaaaaagacgcgttttataaccaacgcttccaggcgtacagtgacggggttaactgtgaatgaaaaggtcagcgttccctcagactataaacgcaagttgaggcaggaactctattatgtaaacaagttcgggattttgagcgcagccgcctaccttaaactgccagacgctctgaagtactgtcagtccctgatgggacgggttaattatgtgctgtctgtggagcctgagaatgagtcctttataaaagcaaaagaggcgttgtctgggcagtttgctttttgcgtgtga

SEQ ID NO: 9495 - RNA, 1038 nt, synthetic construct
  source 1..1038: mol_type = other RNA
atgtatatagacaaagacgaagtcatcttcgagttcttcgacgtggagtatgttacgaaacatggcctggaacaggctatggatgcagcagtagcctttcaccagaagtgtagattgccctttctaatggacatttcacaactggcagcgtttctcagcctggacagacgcgaactgtttgggctggtcaaaaggtgcgatacgatgtacagaagcttcctgctgcctaagaggaccggtggttaccgacagattgacgctcccgcctacgagctgacagcgtaccagtaccgtattttgcaccggatccttggacgcatcccaatttccagatatgccactgcatatcacagaggagccgcactcaccaagaacgccagcccccataccgggaaacgctacctcctgaagatcgacattaaggacttctttcactctgttaggttatctgatgtacacgccagagtgttcgccccttattatccgaagcagattggctacctgctgtccctcctttgctgcaaagacggccggcttgctcaaggtgcgccaacatctccagctatctccaatatcgtgatgcggtgttttgatgagcctttcggcgaatggtgtgagaagcgagggttgtcgtatacccgatattgcgacgatatcactatctcaggcgatgtgcccctctaccgggcacttgagaaggctagtctatggctgaataacatggggtttaccgtgaacgagaaaaagacacgctttataaccaatgccagtaggcagacagtgactggattgactgtgaatgaaaaggtgaacgtcccaagcgactacaaacgccgtttacggcaggagctctactacgccgccaagttcggggtcagttcagccgctgattataaaggcctgacagatgctgaacaatactatcagtctttgatgggatggctgaatcatgttctcagcgtcgagcctgagaacgaatccttccttaaggcgaaacaggccttacgggaaaggtacgctgcagataggcgtatatga

SEQ ID NO: 9496 - RNA, 1050 nt, synthetic construct
  source 1..1050: mol_type = other RNA
atgatcgtgaagaacgactccgttacatttgaaccatgtgacatgccatttacccggaaattcggatgtgatgaggccgccaaaatggtgctggactttaaggcctttcatcctaaactgcctttcctgtacgacactcaccagctcgctgactttctgaagactggccgcaaaaccctcttcgacttaacgaatcatcctgaggcctgctattctacagtgagtgtgccaaagaaatccggcgggacaaggacgcttaatgttcctaacgatagacttaaagctattcagcggaagattttgtatgagattctcgcgtacctgcccgtgagcaaacacgccgccgcatatcacaagggagcaaggcttactgacaacgctgccgctcatatacaccatcgttacctcctgaaactagacctctctgatttctttggctccattaggttcgactctgttttttgctcagcattcaatgctcactattttccccgacaaatcggagtcatgctgactagcctttgctgtttcgacgatgtgctaccacaaggcgcgccgacatcacccgccttatctaacttggtgatgaagcggttcgataattccttcggagcgtggtgcagtgcccgcggttttagttacactagatactgcgatgacatcgctgtctcggggaactgtcctgtttaccccgcttacaagaaggcccgcctgcttctggagaacagcggcttcgaaatcaatgatgccaagaccagatttgtcaccgacgccggacgccaaaccgtaaccggtctgacagtcaatgagaaactgagcgtccccagcgattataagaggaaactgcgtcaggagttgtactatgcaaaaaagttcgggctggaaaacgtgatccagaagcagaatctgacagattacatctccggtggcaaggctgatgctgccagatatgcaatgcacctgttagggaagttgcattttgtgttgtcagtagaaccggataatgcatacttccggaacgcacgacagttcctcataacccagctctga

SEQ ID NO: 9497 - RNA, 1035 nt, synthetic construct
  source 1..1035: mol_type = other RNA
atgttggtgagtgacaacgaggtcatgttctttgagtctgatatgaggtttgtgaagagattcggcctggaggcggccactgacatggtgcttgactattctgcgataaataagacaccgttcatttacgacttcttccagctgagctcgttcctcaggatcctcccatccgatttgaggaaactgctggatgatatccctgggagctaccgctcactgcaaattcctaaaaaatcaggaggatatcgcgagctgaaccaaccactcgggagactcccggacatacaggagcgaatctacaccggtatcctgaaacgacttaagtccagcccttacgccaccgcctaccatcaaggagcccacctgtcagataatgctgcaccacacattggcaagcggtttctcttaaagttggacatcaccgatttttttggtagcatacgcttcgacatggtactaagttcagttttcaataccagcctgtacccccggcacataggagcaatgttgacgtctttatgctgcctcgaagacgtactgcctcagggcacatgtaccagtccaactctgtctaatctggtgatgaagaggttcgacgacatctttggggcttggtgtaaacgtcatggctttgattatacacggtattccgacgacattactgtctccggtaacacatctctttatcccgcctattgcgcagccaaaagcatgctgcacaagatggggtttgaactcaacgaacgtaagactcatttcattacggatagctttcgccagaccgtgacaggactaaccgtgaacgaaaaagttaatgtcacagccgcttacaagagaaaactgaggcaggagctttactacaccgatagattcggcatcgagagtgccgcacagtacctgcatcagcccgatgctaagaagtattatcagcaactaatgggcagattgaactttgttttatccatcgagcccgatcacacttacttcattaaggcaaaggaaaaactttccgagcagcgggctgaaatcatttga

SEQ ID NO: 9498 - RNA, 996 nt, synthetic construct
  source 1..996: mol_type = other RNA
atgcgcatcactgaaggcaccgtccggttcgacggatgtgaccgccattttgcagagaagtttggtgcacaccaggccgccgaaatggtgctggattttgccagtactaatacacatcccttcctttacgatacctaccagcttgcggcacacctcgggttacgcagaaaggccctgttcgaactcgtgaggcgaccaggacgccattatagaacactgcggatccccaagaggtcaggcggaagccgtaccctaagcgtgcctgacgaccggttgaaaaccgtgcagcggacggtactgcacacgattttgtgccactttccggcatccgcttatgctacagcttaccagcctggcgccacactcaggcagaatgcagcccctcattgtgggaagaagtacctactgaagctggacctggaggacttttttgggtctatcaggttcgatcaggtgtatggcgccgtgtttcacaccagaagattcccaaaacagattggcgcaatgctgactgctctgtgttgtaaagatgatgctctcccccagggagctccgacatctccacagttaagtaacctggtcctgaaatggttcgacgatactatgggggcctggtgccaacgcagaggtatcgcctacacgcgttattgcgacgacataacattctcagccgatagacctttgtacgacgcctatagaaaagctgttggcttactcgagcatcaagggttctccattaacgaagaaaagactcggttcgttactgcggcgggccgccaaaccgttaccggattgaccgtcaacgagaaggtgggggtgcccgctgattttaagagggcactgaggcagcaggtatactacgccctgaagtttggcgccgagccccctgagtatcggcgacttctcggtaaagtccaattcgtccttcagacagctccagagcacccatggttctgcgatgcgcgagaagagctcataaggcgtctgaaaggatga

SEQ ID NO: 9499 - RNA, 1065 nt, synthetic construct
  source 1..1065: mol_type = other RNA
atgcacttcgagggggaaaaaatcgttttctccgccgcagacatcgagcgggctaagcgtaccggcattgaaaatatgctcctcagggctgaccaatactgctccgccttctctatcccatatatctgtgatttgtttgagctgtctacggaactcgggcttcccgctgaggatctggcccgaattggttcaagagcttctatgaagtaccgctgttattacattaagaccggctcaggcaagttcaggaagatcgaggagccggacttcgagctgagaatagtgcagaatcggattctgaaccatattctccgatactatcggatctcggagcacgcggcagcgtatcacaaaggcgccagcgtcaagaacaatgccatgccacatgtcggtaaaaggtacttgctgaaaatggacctctcagacttttttggtcatatcacagattcaatgctgatggataccgtgtttagcgaacagcacttcccctaccctgtggggcgcaccttaactgatatctgcacccgtaacggatctgtgcctcaaggggcctgcacttcccctgcaatatctaacattgtcatgaaaggctttgacgatcgaatgggccgttggtgcagttatcggggaattagttacacacgatatagtgacgaccttacttttagttccgatgaacctttataccccgcctacagaaaggctcgccgcatgctggaagaaatgggattcgggattaacgacgacaagacacactttataacaagcgccggaaggcagcaggtaacgggactggtggtgaatgacaagctgggaatcccagcggattacagacggcggctcaggcaggagatctattacgtattgaaattcggggctagggatgcatttagcagaagcgatgattgtcgcaatgagcccggcatgaccctacggagatatctgcttaggctgatcggcaaaactgaatatgttcttcagatccgcaacgacgacaggttcttcagagaggccaagataaaattggccgaagagattgctaagctaagctccgcagaggaatga

SEQ ID NO: 9500 - RNA, 1059 nt, synthetic construct
  source 1..1059: mol_type = other RNA
atgtatacccagaacgggcgcatcacatttgagaagagcgatctgaagttcctacagaaacatggactgtccaaggcagtggtaatttatgaggaacactgtgcccactctaacctccccttcgttactgatcatcatcaattggcaggattgctagggtgctacactaacgtactgttccagacccttagaacagtggatgagttgtattacgacgcagccatcccaaaagctaccggcggctacaggaccttacaggtccctactcaccctcttaggtacatgcagacagttatcctccacagcattctggacaaactgccagtgtcaccttatgccacggcataccacaagggagccagaatcactgataatgctaagccccatcagcacaagaaatacctgctgaaaatggacctccaggacttcttcagcagcataacatttgaacaggtcctctccggcgtttttcacaagggacggtttcctacccatgtcggcgtatccttgacggcactctgctgtaaaaacggcgtgttaccgcagggtgcccctacatcaccagccctttcaaacctggtcatgagtcatttcgatggtgttatgggggaatggtgctgtagacaagggttttcgtatacacgttattgcgacgacatcaccgtgagtggcaatcgacccctgtatgctgcctaccaaaaggccaaaggacttttggaaaatatggggttcgaactgaatgagaaaaagaccagattcgtgactgcagctcaccggcagacggtcaccggactgactgtgaatcaggggattggcgtgacagctgattataagcgcaacctgcggcaagctgtgtattacaccgtgaaatttggcgccgcggatcacataaggcagcgcaacctcactcggtttatggttaatggcgtgccacagaccgagcgatacctcgcccatttagagggtcaaattcgttacgtcctgtccgtggagcccgacaatagggctatggtcaagctgcttgcggacctgtctgcgtctccgccctacatgggttga

SEQ ID NO: 9501 - RNA, 1014 nt, synthetic construct
  source 1..1014: mol_type = other RNA
atgattattaacaagaagtacgagtctatcgtctttgatgaaagtgacatgaatttcgtgtctaagttcggcattcaggaagccactgatatggtgttcgactacctgtcgactaacaaaacaccgtttatatacgacgtttttcagttagcagactatctgcaaatcaaactacccaagctgttcaggttggtcaataaggccgatgaactttattccaacgtcgtgatcaagaaacggaataagagcgatagaattctgtcagtacccgactattatctcggtagcgttcagaagaggatcaaccgcaaaattctcagtaaaatcgacataagcaagtatgcgaccgcttattataagggctctaatctgctgaaaaatgtggagaatcattgtgggaagaagaacatcctgaagatggacattacagactttttctctagcataacctttggcatggtgctgtcaagttgttttaacacctctagatttcctcggaatatcggttacatgttaactaccctttgttgtaaagacgactgcctgcctcaaggaacgtccacgagcccagcaatttcaaacatcgtcatgaagaatttcgatgacattctgggcaattggtgcgagaagcgcggaatctcctacacaaggtattgcgatgatctcaccttctcctccgatgaggatttgtaccctgtgtacgtcaaggccaagtccatgctgaacgatatggggtttcaggtgaacgagaaaaagacacacttcatcaaaaactccaaccgacaagaagttactggaattgttgtgaatgaccatccacagctctctaaagactatagacggaaattgcgtcaggagctttacttcgtattcaagtacgggataaaagatgcccttgagcacatcaacaagaaagaagtgtcgaacaaagagatttacagctacgcttgccagctatcaagtaaaatcagctacgtactctttatcaatcccaatgataaggaattcgtgtga

SEQ ID NO: 9502 - RNA, 1062 nt, synthetic construct
  source 1..1062: mol_type = other RNA
atgaaggtggtgaacgagacagtggagttctttgaatgcgacatgaacatggtgagtaaaattggattgatggaggcagttgagatggttctcgacttttcctcaaccaataccgtgcctttcatttatgatacgtaccagctgtctgatatgtttgctattgggcggaaaaatctgttctccctgatccgaaattgcgaccagaactacaagcagattaacatcaagaagtccaatggtgatattagggttctatattctcccaggactcgactgaaagcaatccagaacatcatcctgaaggagatcctgtacaaaataccagtctcaaaatacgcgacggcctatcataagggtgcgaagcttatcgataacgccaagcctcactgtgggaaaaaatacctccttaagatggatctgaggcattttttcgactctattactttcacccaagtgtatagctccgtgtttaacacatgtaggtaccccaaacagattggcacaatccttactaccctctgctgtcaccaggatgtcttgccacagggagcccctacctcacccgcactgtctaacatagtcatgaagagctttgacgactacttcggcaaatggtgcgaaaagagaaactttagctacactcgctattgtgatgatatcactgtaagcggagattccagtgtgtacccggcctatctcaaggctgaggccctgctggaaaatatggggttcgagatcaatcagaacaagacccacttcataacaaatacaaacagacaggaagtaaccggacttgtcgtgaatgaacgcgctcgggttagtagcgactatagacggaaattacgccaagagatacactatgtcacaaagtatggcatcctggacgctttaaaacatctcaaagactctggctatgagagcgtatactcatactatagttcgctaatgggccgtattaactacgtgctgcaaattgaaccagaaaatcagcaaatgttgaatctcaaggccgacctggaaaagtccttggagaagtacgagtggcagaccatgttacagtga

SEQ ID NO: 9503 - RNA, 1062 nt, synthetic construct
  source 1..1062: mol_type = other RNA
atgcttataaaaggacagtctgtgacctttcacgccgatgatatgcattttgtgaagaagttcggtatcatggaagcaactaacatggtcctcgattttgcttcgacttcaaacttgccatttgtatatgacacttaccaactggcatctctgctccagttgcgtagatcctccatgtttaaaattgtgcgaaagtgtaactcctattatagggacgtggagcttaagaaaaataatggcaaagtccggtacatctcagcccctcttgacattctaaagtggacacagaagtgcatactgacaaacattcttgagaagtaccccgtcagcaagtttgccacagcataccggaagggactgaaactcgttgacaacgctaaggtgcacacttctaagaaatatatcctgaagatggacctgaaggacttcttcccaagcatcggcttcgaacaagtatattcctgtgtgttcaataccaggcacttcccgaaacagattggagttatactcacgagcttttgctgcagaaatggggttttgccacaaggcgcgcctaccagtcccgctattagtaacattgtgatgcggaatttcgatgatattttcggagcatggtgtgagaagcagggttttagttacactcgatattgtgacgacatcaccgtgtcaggtaacaaaagcctatatgtggcctttgtgaaggccaaggcaatgttggagaagatgggctacgaaatcaataccaaaaaaacgcacttcctgacaaatgcctcctgccagacagtcaccgggctgaccgtgaacgagagagctaggatccctagcgattaccgcagaaatctgcgtcaggaaatctattatgcccagaaattcggggttaaagatgcggtcatgcgggccaatcgcgaagagtacatagtagatggcaaggtggacgaacataggtacatctctcatctcgaagggaaagtccaatacattctgcagatcgagcccgagaacgagtacttcaaaaaggctttaaaaacagttcagaacctgcgccccttaggcaacttttga

SEQ ID NO: 9504 - RNA, 1101 nt, synthetic construct
  source 1..1101: mol_type = other RNA
atgatcattagaaatggcacaatcgagtttgggcacggggatatgcattttgtggagaaagtgggcctttctgaggcggtggagatggtcctcgatttcaaaagtcagaataagataccctttgtatacgacacctatcagctagcggacctgctgatgatcagaagaaaggacttgttcagcctgagcaagaatgccgacagtttttacacctatgccactattaagaaacgtgatggatcgaagaggatcttatgtgtacctgacgcatatttgaaatctgtgcagcggacgattctttccacaattctctccaaacttccggtttccgagtacgctacggcttataggaagggctgcaagctgcagtctaatgcccagccccattgtggtaaaaagtacctgctgaagatggacatctgcaacttcttcgacaatatcacctttatgaaggtctactctagtgtcttcaacactcgccattttccaaagcaagtgggagtgatgctgactcaactctgctgtcggaatgatgtcctaccccagggtgctcctacaagcccagccatttccaaccttgttatgaaaagtttcgacgacacttttggagcatggtgtcttcgacacaacctgagctatacccggtattgcgatgatatcaccgttagcggcgatatacctctgcacaatgtttatctgaaggcctctgaaatgttgcacaagatggggtttgaaatcaacaagcgaaaaactcacttcgtaaagtacacagaccggcagtcagtcacagggttaaccgtgaatgaatgcattagggtcgactcaaaatataagaagcaactcaggcaggatatctactacactctcaaattcgatgtggtgtccgcaatgaaacgctcactgtccttcgaatttgacgaaaacgaggacattgatagcgctgtgataaaatacttaaacagcctgatcggcaagacagcctatgtgctgcagatagaaccagacaacgagtacttcaaaaagctgctgaagaaattgaccgacctcctcgatgagacgaagttggatattagacgctcaaaatactttaccttctactga

SEQ ID NO: 9505 - RNA, 1098 nt, synthetic construct
  source 1..1098: mol_type = other RNA
atgtatattgaagataacatcgtcaagttcgagtattgcgatatgtcttttctgaagaaattcggagtggatgtcgctgcggatatgtaccttgacttcaagagtgttaacaagatccccttcatttacgatacttatcagctggccgacttctttggcattagacggacaaacctctttaaagtgacgaagaatatcgacaaattctactacacaactaccattaagaagcgcagcggcggggtgcgcaagttgaatgtgcccgacgacacgctgaagtttatgcagaggtgtatactcaaaagaatcctgagtgagtttaaggtgtctaaatacgctacagcgtataagaagggggccacactcaaagataacgctagagtgcactcagcaaagaaatacatcctgaagttggacctgaaggatttcttcgacagtatcaccttcatgcaagtctatgacgccgcattttcgacccggtactttccaaagcaaataggggtcatgttgactaccctatgcacaaggcaggacgtcctaccccagggaacacctacatctccagttctgagcaaccttgtaatgaaaaatttcgacgattctttcggcgcctggtgcgaagagcggggtttctcctatactcgttactgtgatgatataactgtctccagcgataatgagctgaaaggagtgtactcaaaatgtaagttcatgctgaccaaaatgggctttgagattaacgagaaaaagactcggtttttaaccaatggctcaagacagaccgtgaccgggttaacggttaatagcagcgtaaaagtaccgtccccttataaaaaagagctgaggcaggctgtgtattacaccctcaagtttactgctgccgatgccctcaaacgagacaagaactttgaacgtaaaaccgaccttcctattgacgaagaagcattgcgataccttaactgcttaatcggtaaggttgcatatgttctccagattgaagaggacaacgtgtattttaagtccgccctgatcaaactggtgaatcgcaaggacgagctggagttcaatatcaagagggaaaacaattacaacttctga

SEQ ID NO: 9506 - RNA, 981 nt, synthetic construct
  source 1..981: mol_type = other RNA
atgattgaagacttttatagcgtgaattccaacaaactcccctttctaacggatcagcgccaactggctagtatgttaggcatcgagttgcggactctctacagtatccttaagtctatcaacgcaaattacacgacacataagtttgtgcaaaaaaatgggaaagtccggaccattaatgagccatccaccaagctgaagtcaatacagcgcttaatttacttccggatcctccagcatctgccagtttccaaatatgccaaggcttatcgtcccaggatcacgattaaacagaatgctctgccccacataggaaaaaagtatctcctgaagatggacatcaaagacttcttcccttctattactttcacacgagtctatggcgctgcctttaacaccaagttctttcccaagtatatcggcactctgctcacaacactgtgctgtaaggacgactgtctaccgcagggggcccctacctcacctgcacttagcaacctggttatgaaaaacttcgatgagtacctgggtaagtggtgcgaggaaaagggtattgcctacactaggtactgcgacgatctgaccttcagtagcgatatgccactctacggtgtgtaccttaaagcgaaatatatgctggaaaatatgggattcgacgtaaacgagaagaagaccaagttcatatcttccaaaaacaggcaaaccgtgacagggttaaccgtaaacaagaagctgaacatctcttcggtgtacaagcgagaacttagacaggaggtgtactatgtcttgaaatttggcgcaaagacagccattctcagagggggacacgaagattatataattggcggagaaactttgaaagtggactacctttaccacttgctgggcaaagtcaattatgttctgagcatcgagagagataataagtggtttcaggagagcaaagggtatttgactgatatgatcatcaagtactcatga

SEQ ID NO: 9507 - RNA, 1083 nt, synthetic construct
  source 1..1083: mol_type = other RNA
atgttgaataagaaggagatgcagaagatgaagataaccaaagggcacattagcttcgagcaatccgacatgcacttcgtagagaagtttggcatcagcgaggccttccggatggttggtgactatgtgagcgagagaaagactcctttcgtgtacgatacgtaccagctggcctatctgctaggcattggcagaaaagatctcttttccctggtcaaaacagttgataaccattaccgcccggtcaacatcctgaaaaagaacggtaacattaggacactgattatcccctccagtaaactgaagaggattcaaagtgttattgcagggcgcatcctgagctgttactccgtgtcagaatatgcttacgcttaccttaagagaaagacaatctacgacaatgcctccgtgcattgcggaaaaaagtacctcctgaagatggatatcacagattttttctcctcgatatgtttcgataggatctattctgcggtcttcaacaccaaatatttcccacggcaaattggggtcatgctcaccgctctcgtctgcaatgatgacgtgttaccccagggcgccccaactagcccagcaatctctaatatcgtgatggcatccttcgaccggcttatcggaacatggtgcaaagagcgtggggtgtcttataccagatattgtgacgacctaaccttttcaggaaacgtacctttatacggagtctttaagaagagcaagagtttgttggaagaaatgggctttgaagtaaacgaaaagaaaacccgcttcattacttcttcagacaggcagacggttactggtctgaccgtgaatgaaaaggtgtctgtcccttcagactacaaacggaaactccgacaggaggtgtattatgtgctgaaacacggcatagttaacactgtgctttttacagagaataaggagttcatctctgatgggcaggtagacgaggaaaaatactacctttcgatactgggacgagtgagttacgtgttgcagatcgagcccgacaataggttttttagcgaggcccgtaagcgcattatggaagatagatataaaacctga

SEQ ID NO: 9508 - RNA, 1050 nt, synthetic construct
  source 1..1050: mol_type = other RNA
atgcagatttttatcgacgacgtcacattcgatgcctgggacctgcactttgtggaggaatttggggtgttccgcgccacagagatggtgctggacttcttcgaacacaataggcaccctttcctgtatgatacctaccagctggctcacttcttacaagtggagcagaaacagctcttgacaatccttggacgatgtgatacgctgtatagaaaggtgaagctgcccaagaagaatggaggcgtcagaattatcagtgctccgctcagagatttgaagcagatgcaaaagatcatcctggaacacttcttgaagaaactccctgtgtccgagcacgccaccgcatataaggaaggtggaactataaggaaaaacgcgagcgtccattgcggcaaaaaatatcttctcaagctcgatattgaggatttttttgactgcatctcagccgaacgcgtatataaaagtgcctttcatacccagtactttccccagaagattggaaaaatcctgacacggctttgtaccaaaaacggctacttgccccaaggggcgcctacatctccaatgctgtccaacctggtgatgcggccctttgacatggtcatgggtaactggtgcaaaaaacacaacataggctacacccgctattgtgacgacataacgttctctgccgacgtgccattgtacgtggcttacgtaaaggccaagagcttactggaaaaaatggatttctgtctaaacgaggagaagactaagtttatcagatcaagcaataggcaggtagtgaccgggttaacagttaatgagtgcattcatgtgactgcagactataagcggaaactgcgtcaggaaattcattttgttctcaagttcggcctgaaagatgcacttctccataccactccaaatccattcgttactgaacaagctgtccataccgagcggtacttccagtccctaatggggcgaattcacttcgttctgcagatagagcctgagaacaggtactttcttgaagcagagcagaagctgaagggtatcaatcactga

SEQ ID NO: 9509 - RNA, 1245 nt, synthetic construct
  source 1..1245: mol_type = other RNA
atgccaaagtcagatactctcaggcggatagccaatcatttcatgatcctggattcccctcccctcaatcaaacaatcctgtactgcaaagggctcatttttggtcgcaccttacacatgaaaatagagggcagctgtgtcacattcgagccctgcgacgccgcttttgtgaaaaaattcggtcctctagaggctgccaacatggtgttggactaccacagcgtccatccaaatatgccgttcctgtacgatgccgaacagctggctggcttcttcgacatcagttgcggggagctgaatcacatcgtaaaccatattcagaaggaatacaagaaggcatttcttccaaaaaaagatgggacctatcgcagcctttatattccctctatcagactgcagttttgtctgggacctatcaaagacaagatcctctctcagctgcccgtgtcaaagttcgctactgcgtaccagaagggatcctctacgagaaaaaatgcagaacctcacatcggcaagaagaacctgttgaaactcgatatcaccgactttttcgggagtatctccttcgagcaggtgttatgcgctgcatttaatactcggtatgttagtaagcaggtgggctttctccttacctcattatgttgcaagaacgatgccctcccacaaggtagccctacatctcccgcacttagtaatattgttatgaggcgatttgacgatcaaattggacggtggtgcaaccaaaggcagattacctacacacggtactgtgatgacatgaccttttcgtctgaccgcccattgtatggcgtgtatcagaaggttaaaaaaatccttttcgagatgggcttcgagctgaacgaggcaaagacacactttatcagcaacgccgacagacaaacagtcactggcctggtggtgaacgaaaagctttcaattcccagctcctacaagcggaatctccgacaggaaatatattatactctgaagttcgggattgaggactccatcgtccatggaaaccgtctcaacttcctggaggatggccagcctattcgctgtccaacgtacatgacccacctaattggatccgtacagtacgtcctacagatagagccggaaaataggtggtttctgaacgccaaacagaagctgctggattatgcgcgtgcctattttagagctgaagggttgggagaagaatactacttgcatagaagccgactgagggagaaagacgagtga

SEQ ID NO: 9510 - RNA, 1002 nt, synthetic construct
  source 1..1002: mol_type = other RNA
atgccttgccggcgttacatcagggggaaggctccgccagacaacactcctaccaataagagaattacccctctgtttagcgttcgactgagattttatagggtgatcctctattgcaaaggactgtactccttccgcttgaagtattattctgcagctgtgattttcatgaacatcatagacagcaacgttgtgttcggcagcggagacgcggaatttgtgaagaagtttggtctatttgaggccgcccaaatggtgctcgattataaaagccgaaacaacctgccattcatatacgatacctatcagctggcagactttctgggcataaagcgcaaggagctcttctttatttcgaagaacaccgacaaatactacaacgcattcgagataaaaaagaaaaacgggaagccaaggcggctgtacgctcctgctagtaagctgaaggcctgccaagcagccattaaccgcctgattcttaaaaatctcccagtgtcagagtatgccgcggcctaccagaaaggctctcagatttcaaaaaatgccgcgccccacatcggcaagcgttaccttctgaaacttgatatcacggatttcttcgggtctatcagatttgaacaggtctacagtgccgcattcaatactcggtatttccccaaacagaccggtgtcatcttaacagagctgtgttgtttaaatgacgcattggtacagggtgctcccacaagtcccgccctctcaaacattgtaatgtacaatttcgacaactccatcggactatggtgcaaaaaaagaggaattgcctatactcgctactgtgatgatatgacgtttagctccgatcggccgttgtatggcgtctaccaaaaggtcaagaagatgttgtttgaaatgggctttgaactgaatgaggctaaaacacatttcatctcaaatgctgacaggcagactgtgacagggcttgttgtgaatgaaaagctctctatcccctcctcctactga

SEQ ID NO: 9511 - RNA, 1080 nt, synthetic construct
  source 1..1080: mol_type = other RNA
atgctcatcaaaaagaatcgcatcattttcgaacagtctgacatggcctttgtcgagaaatttggagtgctagatgcagccgaaatggtgatgaattataaaactgtctgcaccttgcccttcgtatatgacgcagaccagttagccgaattcctgaaaataggtcgcaaagacttttttgatctaatcaagaactgcgatacttgttaccggccaattagcctgaaaaagaagtcaggcacatacagacagatttacgctccaaacgatattctcaagagaatccagaaaaccattctcgacaagatactgagtaagctgcctatctcgcagtacgcgaaggcatacagaatgggcgggactcttatagacaatgccgcagcccacattggaaagcgatacgtgcttaagctggacatcaccgatttcttcggtagcatttcctttgaacaagtgtattctgctgcttttcatacgaagtatttccctaaacagattggggtactgcttacaatgctctgttgccgcaaagaagttttgccccaaggcgctcccacatcccctgctctgagcaatattgtcatgtgtcacttcgataactatatcgggtcatggtgcgaggcaagagccatagcctatacacgttattgtgacgatatgacctttagctctgaccggcccctgtttggagtgtaccagaaagtcaagaccatcctgggcgaaatggggttcgagttgaacgagaaaaaaacccattttatcctcaacaccagtaggcagtcagtgacgggaatcactgtgaacgagaagctgtccgtgccaatccattacaagaggaagctgcggcaagagatatattacacactcaagttcggactcgtggaacaaatcgttcgattaggtaaaactgagttcttcatggatgcgaggccgaacgttcagaaatactacaatcacctgttggggcagattggctttgtcctgcaaatcgagcctgaaaataactggtttcagaatgccatgatcaagcttaagagttcctctttcttacagggcgagatggagctgtggaggcggtga

SEQ ID NO: 9512 - RNA, 1065 nt, synthetic construct
  source 1..1065: mol_type = other RNA
atgaaaattgagaaagacaccgtgacatttgaagcgccagatgccgactttgtcaccaagtttgggattcaggcagccgccgacatggtgttggacttccactgctttcatccacaattacccttcctctacgatgctcggcagcttgctgcgtttctctctacatccaggcagaagcttctttattatgttcgccatactgcagctgcctatcaccccgtcacaatccccaaacgcaatggggacgtaaggatactctctgttccggacgacactttgcgacggtggcagcggaagatttgtagagagctgttggcgtatttgcctgtggcccctcaggctacagcctaccgtaagggcggggctattagtggcaatgcagccccacatgtgggcaagcgctacctgttaaaacttgacataagcgacttcttcgggagcatctgtttcgaacaagtccattcggccgcattccacacccgctacttttccagacaggtgggcttcctgttgacatccctgtgttgcaaagatggcgccctaccccaaggagcccctacatcacctgcacttagcaacttagtaatgaggaactttgatacctccatggcccggtggtgccagaggagaggtatcgtgtacactagatattgtgatgacctcaccttttcagctgatcgaccactgttcgctgtttattcaaaggcaaaaaacatgctggcagaaatgggattcgatctaaacgaggcaaaaactcactttatcacgaatgctggtcgtcagagcgtgaccgggctgactgtgaacgagaaggtcagtgtgcccgcgggttacaagcgctctctacgccaggaagtttactataccctgcggttcggcctcgccgatagcattctccggggaggacacgctaccctcctgacagacgatctgccggatacggagagataccgtcagcagctgctgggaaggatccaatacgtgctgcagatcgagccagaaaatcgatggttcagggaggccaagcaaaagctgctgagttgcgatgacagacctaaagtctga

SEQ ID NO: 9513 - RNA, 1068 nt, synthetic construct
  source 1..1068: mol_type = other RNA
atgatagtcaaggaaaacaccgttattttcgaggcctgcgatatggcattcgtgaaaaaatttggaatcgctcaggcaaccgaaatggtgctcgattataaatccgtgaatccactgccttttttgtacgacacataccaggcagctaaattcctaggcgtcggccgattaacactgtttcagtacgcaaaaaatccggaacaggggtacaagcttataacgcttaaaaagcggagtggcgacaaacggcgaatatacgctcctgacatcgtacttaagcacctgcaaaccggtattctgaggaagatcctcatttatttcccggtgagtccctacgcgactgcctactctaagaattgcactctgcgcaataatgcggccccccatgtaggaaagaagtacctgctgaagctggacatcaccgatttctttgggtccattagattcgaccaagtgtattctgctgcctttaacactcggtattttccaaagcagatcggggtgattcttacctcactgtgttgccgcgaagaagctctccctcagggggcaccaacctcacccgctctgtccaacctcgtcatgcgaaatttcgataactcactcggcaggtggtgtcagaagcgcgggatcgcctatactagatattgtgatgacatgacgtttagctcggataaaccactgtaccccgtctacgagaaggttaaaagtatgctgtatgatatgggcttcacattgaacgagaagaaaaccaggttcgtgacaagcgccggcaggcagtctgtcacaggactaaccgttaacgagaaagtggccgttagcagcgactataagagaaaactgcggcaggaaatttattacgctctgaaattcggtttggaggattccattcggtttgccaagagaacagagtttatgcgcgacggtgtgttagacgccgagagatacgcgcaacacctcatcggaaaggcaaattatgtgttgcaaatcgagcctgagaaccgttggttcagggaagccttagagcgtctccagtggactcttaagtgcttggaaatgcagggatga

SEQ ID NO: 9514 - RNA, 1029 nt, synthetic construct
  source 1..1029: mol_type = other RNA
atgcatatacagaacggtgccgtgacctttgagccacacgacatgtggttcgttaaacgggtaggttttgaggccgcatgcgagatggtgcttgactatgcaagtcagaacaagctgccattcctgtatgacacccaccaactcgctcactttctgcatattcccaggcggtacttgttcaggtggttccgagatatgagcagctgctacacccccatcgccttaactaagagatcaggaggcgttcggcacctgcatgtgccagtggaccccttaatgtgcgctcagcggaggattctgcaggatatagtgtctaggcttcccgtgtccccttatgcaaccgcatacgtcaagggaaagcgcttgactgataatgcggccccgcactgtgggcatagatatctgctgaaactcgatatcacagacttcttctccagcatccgttttgatcaggtgtactcggctgctttcaataccactcgcttccccaagctgattggggttatgctcacagctctttgttgttatgaagatgtgttaccgcaaggcgcacctacctcacctgccttgtctaatgtggtcatgagacggtttgacgatcgaatcggcgaatggtgcaagaaaagaggtatcgcttacactcgttactgtgacgacatgacattctcctcagataaacctctctttgccgtctaccaaaaagtgcgggggatgttggctgaaatgggactcagcctgaatgaaaagaagacacgatttgtgactcacgcctcccgccagagtgtcaccgggttgacggtaaacgagcgcgtggccgtcagttctgactacaaacgcgacctccgccagcaggtccattacgcccttaaatttggctatgcggatgccctggcgaagagaggcgacacgacatttgagaacggcgaccactacgcccaccatctaattggacgtgttagatatgtactgcagatcgagccacacaacacatggttcagggatgcactgcctaggctactgtggaagtga

SEQ ID NO: 9515 - RNA, 1185 nt, synthetic construct
  source 1..1185: mol_type = other RNA
atgattctgagatttgcttctgcgtgtattagagctatctgcactgccactgttcgtaggtttctggtgttcgagaaaggaggagtgtgtgttcggaagatcggagataccctgatcttcacatctagcgatatgccattcgtgaagcgcttcgggatcgaggaggccactaaaatggtgggggatttctacgccgaacatgacctgcccttcttatttgacacataccagctgtcctcggagcttggcctaaggaggaagactttattttcactaacgcgaaacccagaaaaactgtactaccccgtgaccctcagcaaaaagaacggggggactcggaaattgcatgtgcctttcaccgtcttgagaggtatccagcgccatattctgaacgccattctgaacaaactgcctgtgtccagttatgccaccgcatatcggcgcaagcaccagccattgcataacgccgctccccactgcggtaagcgatatctgctcaagatggacatccgtgacttttttggatcaatacgctttgatcaggtgtacagagcggccttccatacaagacactttcctgtgcagatcggcgcaatgcttaccagtctctgctgttatcaggagaggctgccccaaggtgcacctacatcccccgcactttccaatttagttatgaagcactttgatgagcagatgggagaatggtgtcagaaacagggaatcgcatatacaaggtatagcgacgacctgacattctcagccgacgtcccgctctatcacgtctacaaaaaggctaaggccttcttggagcacatgggcttcgagctgaacgacaagaagacccacttcataactaatgcttctcaacagagtgtaaccggcttggtagttaatggggatacaccaacggtgagccgtaaaacccggagagcactgcgccaggaactatactacgtgcaaaaatacggcctcggggacgcgataatgcgaggtaatcgaacggcctttattaaggatggccggccgctcgtctaccgctatctgaaccacctcgagggaagggtcggctacatgcttcatgtaatgggcgaagatgacgaactcaagaatgctctgcagatgctccacagacggaggcaaaatctgcttattgacgctggcgtcgtgttgtgcgatgatgactga

SEQ ID NO: 9516 - RNA, 1053 nt, synthetic construct
  source 1..1053: mol_type = other RNA
atgtacatccgcgagaatggcacaatttatttccacgaatgggatcggccctttgtggccaaattcggcgagcatacagctactcagatggtgctggcatttcaggcggagcaccgcgggcttccatttctgtacgatacccatcagcttgctgccttcttacagatgaaccggaagcggttgttcgacctcgttaagcaagtggacgagcactatgaccaggtgaaaatcgttcagaaaaatggcaagatgcgggtgttgcacgtgccagatggagcactgaaagcagtgcagagacagatacaacgtaacatcttgatgcattttctgccgtccccacacgccaccgcgtatattcgaagaagaaccttagtggacaacgcagcacctcacgtcgggaagaagtatctcctgaagcttgacatcacagactttttcgggtccattcagttcgcccaggtttaccggagtgccttctgcagcccttattttcccaagcaagtcggcgtgctactaacccggctctgctgttggcagggtgccttacctcaaggtgccccaaccagccccgctctgtcgaatctcgtcatgaagtcattcgatgtatacctgggagactggtgtcagaaacatgctatagcctatacgcgatactgcgatgacatgacgttttcagctgatcgcccgctgtacatggtgtaccagaaagtccagatcatgctcgaacacatgggcttcagcctgcatgaggataagacttgttttgtgactagggccagtcgtcaatgcgtaaccggccttactgtcaatgagacagtgtccgtctctagggtttacaagagacgcctccgacaagaattgtactacgctcagaaatttggactggccgactctctcaggcacactcagcgcggggggttcttcaccggtgatacacctgacgttgaaagatataggaaccatctgctgggacaggtaggatttgtgctgcaagtcgagcccgaaaacagatggttccagcacgcaaggaatgctctgaaaacaatgaggtga

SEQ ID NO: 9517 - RNA, 1086 nt, synthetic construct
  source 1..1086: mol_type = other RNA
atgattgtgaaaaatggtgctgtcgaattctccgatgtggatatgcggtttgtggaaaaattcggcatctttaaagccactgagatggttctggactttcataatctgaacaagacccccttcatctacgacacacatcagctcgcctccttcctgggatacggcagaagactgatgttcctggtaaccaaagatccggaatcacactatttccccactgaaatcccaaagcgcgacggaacagcccgcaagttgcttattccagacaccctcataatgtctatgcagcggcacatcctggacggaatcctaaaacatctcaaacccagcagatatgccactgcatacgcgcctaagaccaacattaagcagaatgcccagcctcacatcggtaagaaatatatccttaagaccgatatctccgatttcttcggcagtatccgatttgaacaagtttatagcgctgcatttaacacgcgtctgtttccaaagcagattggggtcatgctgaccgaattatgctgctataacgggtatctccctcagggagctcccacatcacccgcactctcaaacttagtcatgaagaacttcgacaacaatataggctactggtgtgagaaacacggcatttcctacacaaggtactgtgatgacatgactttcagcagcgataaaccactgtacaatgtgctgcagaagctgacgaaaatgttagatgaaatgggcttcgagcttaatgcgaaaaagaccaaatttgttacctcgagctctaggcaaagtgtgactggattgactgtgaatgagaggctctctgtcagccgcgactataagcggaacttgcgacaagagctgtactacgggtttaggtttgggttcgagggtgccgtgagtcgtacaaagcacccggagtttttcgatgacaataaccactttatgcatgagtcctattataactcactgctagggagagtacgctacattctttctatagaacccaacaatacagagtttagtgaggctctcgaccggctgaagcagtacgacatgtatcagtacagaaagttgcctaggattgtgtactga

SEQ ID NO: 9518 - RNA, 1068 nt, synthetic construct
  source 1..1068: mol_type = other RNA
atgaaaatcgtcaaaaaccacatcatgttcggagcagaggacacgaacttcattaaaaagtttggccttagtgaagccctggaaatggtggaaaattttcgcacattgaacaatttaccctttatctatgactccctgcaacttgctggctttctggacattcctctgggagtcatgttcagaatggtgaggaaggggtgcgattcgttgtaccacagccatacaatcaaaaagaaaaatggtggggaacgacagctatattcaccttactgcgtactgaaacgctgccagagtataatccttcggaatatcttgatgaagctgcccgtcagcaagtatgctactgcttacaaacccaaagtgagcatagtggacaatgccaatccccacattggcaagaagtatctcttaaagatggacatcaccgacttctttgattctatcagctttgaacaagtatacagtgcagcctttaataccagatacttcccaaaacacattggtgtgatcctgacaaatctgtgttgtaggtccgactctctgccacagggagccccaacttccccggcaatatccaacatagtcatgaagaacttcgacaacaacattggcaattggtgtgaggaacgtggaataagttataccaggtactgcgatgatttgacattctcatctgataaacctctctatcatctctacgtgaaagtcaagaagatgctttacaacatgaatttcgaagtgaacgagaacaaaacgaggttcgtgacctcagcctctcgacagtccgttaccgggattaccgtaaatcagaagctcactgtgtctcgggagtacaaaagagagctacggcagaagatctattacgttctgaagtttggcgtgaagtcaagcctcgtctacgagacaaatgggtttctcggggatgacgttaatgcaattgctactcatatgctgaacgtgctgatcggaaagattaactatctgctcagcgttgagaaaggcgagggtaacaactatttcaagaaggcgaagggcattttgatcttaatgcgcgatgagctggagtga

SEQ ID NO: 9519 - RNA, 1050 nt, synthetic construct
  source 1..1050: mol_type = other RNA
atgaaaataaaaggcaacaccgtttttttcgactcttccgacaagagcttcattaagaagtttggcttctctgccgccgcagacatggttatggattttagatcgcagaataagctgccattcatttatgatctccttcagttatcaggctttttgtctgtcgacttcaaggatacagtcaggttcttgaagaagggctgtgacaatgattatcgtacgcttactatcaagaagaggaatggaaacgatcggatcctaaacgtacctagccccaccctgaaacgctgccagaggattatctacaatgagatcctgaaaaaccttcctgtgtctaagtatgcgaaagcttataagaaaggagtccatctccaggataatgcaagcccccacgtcgggaaaaagtacatcctgaagatcgacataaccgacttctttggcagtatcacttttagggaggtgtacagcgctgcatttaatacaagatactttcctcgacacgtggggtacgtactgaccgtgctgtgttgcaaagatgaagctcttccgcagggagccccaacatcccctgccttatccaacctggttatgaaaggtttcgacgagaacataggcaaatggtgcgaggcccggggaatcagttataccagatattgcgacgatatgactttttcctctgacgagccactgtaccacgtctataaaaaggtgacctccttgctcgaagaggctgattttagcgtgaatcaaagcaaaaccaagttcattactaacgcaagtcggcagtcagtaaccgggctgactgtgaatcagaaggtgagtgttaaccgcgaatataagcggacactgcgtcaagaactgcattacctgtttctctacggtgcggagaattgtctcattaaaacggataacaagcaatacttcacaaatggtaaacccgacaagaaccgatacttgtcatcactggaggggcgcattgtgttcgtgctatccgtggaaaaagacaacccctacttcaagacagccctcgaaaagttaagagccctctattga

SEQ ID NO: 9520 - RNA, 1065 nt, synthetic construct
  source 1..1065: mol_type = other RNA
atgtttatcaacgggcagagtattaagtttcagaactctgacatggccttcgttaaaaagtttggcctgattgccgccacggaaatgatcctggactacaagaaaaagaactcagtcccctttatatacgatacctttcagctgagccagttcctggacatctcaaataaacaagtgtatagggccgtaaggaattgcgacaaaacatactcctacgtgaccattaagaagaagaatgggaatgatcggatgctgctggttccagggaaacagctcaaacgaatccagaggataattctccggagaattcttaacaagattccggtcagcgagtatgctactgcctacaagaagggggccaccttatactccaacgcatccccccacaccaataagaagtacctgctgaagttggatatcacggatttcttcaattcaatagacttcctgacagtgtaccggtttgtgttcatcaagtattaccctaagcagatttcgtatatgctaaccaagctatgctgtaagaatggattccttccacaaggtgctcctacaagtcctgcgctcagcaatctggtgttgaaatcttttgacgactatatcggtgaatggtgtaaaaaacgcggagtaacatacaccaggtattgcgatgatatgactttttctggagacagaccccttctcgatgtgtataagaaagtcaagaatgtcctggacaagaacggctttgacctgaacgagaataagacagttttcgtgtcaagtggtaaccgacaatccgtgactggattaaccgtcaacgaaaaagtgaacgtaagcaaagactataagcgcaaactcagacaggaaatctattatgcgttgaaattcggcttcgaggatgccatcatcaagagcgacaataaaaacttcattactgtggagaacggcgtcgagatagctgattccatgaagtaccaagactctcttatcggccgcgtgaattacgtgctccagattgaaccagataacgcttggtttcgtactaaagcaaaagagttggcagagaaagcagttttcgattga

SEQ ID NO: 9521 - RNA, 1062 nt, synthetic construct
  source 1..1062: mol_type = other RNA
atgtatattaaggatggtaccgtcaggtttgatgcatgtgacaaaaacttcgtgaagaagtttggtctaatcgaagcagctaatatggtactggacttttccagtacgcacaacatcccatttgtttatgatgtgtggcagctgtccgtgtacctcggtgaaaatcctaaatgcctctggccaatcgtcaagcatgtggatgatatgtataaggtctgctttgtgcccaaaaggaatggggggacaagacaactgtgttcccctaatagcagattgaaggccatacagcataacgtcctgaagaagttcctgaacaatatgcctgtcagcaaatacgccactgcttacatcaaggggaagactctctctgacaatgccaagctgcacacaaacaaaaagtatgttctgaagatggacatcagtgacttctttggctccattcacttcgataagatctacaattcagctttcaacaccacccttttccccaagcagatcggctacatgttaacttcactgtgttgccggaaggatgtgttaccgcaaggcgcaccaacctcgccagccttgagcaacattgtaatgaaaaggttcgacgactacataggcgattggtgtaaggggagaggcatctcatatacccggtattgcgacgatatgaccttcagctccaataaacctctgtataatatgtacgtgaaggtgaaaaaggtgcttgaggacatggggttcgagctgaacgataagaaaacacatttcatcactagcaactctcgacagagcgttacaggcctaactgtgaatcgcaaagtttctgtatctaaagattacaagcgagcactgcgtcaggaggtttattttgccctcaaattcggactcgctgaaagtattatgcacggagacaaaacggactttgtgaaaaataatgctcccgacaccgccgcgtactatcacaaccttcttggacgggtgtcatacgtcctccagattgagcccaacaacaactacttttgcgaggcgattcgcgaattgcgcacaggaaaaattttggcccagatatga

SEQ ID NO: 9522 - RNA, 1074 nt, synthetic construct
  source 1..1074: mol_type = other RNA
atgaaggaaaactcattcaccatatccttcgaacaacatgatatgccgttcctcaagaaatacgggctgttcaaggctatgaggaaggtccgaaaccacaataaaaagtacaaggtgcccttcatcgatgatacctatcagttggcccacgcactttctatcacccgtaagcagctctttgacctaagccgtaatgctaataagcattacaagcagatcctccttaagaagagaaaaggcggggttcgggtaattaacgctcctgatcccgagctgaaagacattcagagaagaatactacgccgaatcttatacaagagtgagatcagcaaatatgccactgcttacgcacctgataggaaattgaaggacaacgcgacgccacatgtgaatcacaaatacctgctgaaaatggatattaccgatttttttggcagcattacgtttctggaggtgataagctctgcattcaacagtaaaatctacccaactcagatcggtgctatgctgacagccttatgctgcaaagacgaggtactgcctcagggagcccccacatccccaatgctttccaacattgtcatgaaaaactttgacaatgccatcggcggctggtgtgagaagagagacattacctatacacgctattgtgacgacctcacattttctgcggacatacctctgtacaacgtgtatcagaaggttgaagatatgttgattcagcgcggattcgaagtgaatgagagtaaaaccaagttcatcactaattccgggcggcagacagtgaccggactcactgttaacgaaaaagtctcaattccaagagactataagaggcagttgcggcaggagatctattatgccctgaagtttggtctttctgagtcaattgtctacgggaacaaaactgaattcatggactcgaggggccccaattgctggcggtattaccaacacctgaagggaaagctcaaccacgtctttcaagtggaacccaataacatgtggttccgcgatgccgatgagaaactgtgggtggcatacatccaaccgaatatgaggtacccttattga

SEQ ID NO: 9523 - RNA, 1059 nt, synthetic construct
  source 1..1059: mol_type = other RNA
atgaaactcaacaaaatctccgtgtctttcgaacaccaggatttacacttcctgaagaaatatggcttttttaaggccgcctctatggctaaaaagcattacaagaaatacgacgtcccctttataacggacatataccaactgagtcacttgttccatgactttaacaaaaacgtgtttaagctgtccaagaatgcaaacaagcactacaagaaaaagattctgcggaagtcaaatggcggaatacgaatcttgcatgcaccagatgaaactcttaaattttatcagaggaggatcttagagaagatactgtacaagatccctatctcgaagtatgccacagcctatgtgccggggaaaaaactgcaggacaatgcctccccccacattaaacacaagtatctcctgaagatggacatcacggattttttcggttcaatcacttatatgcaggtgatttccactgcattcaattctaacatgtacccagtccagattggcgcgattcttaccagcctctgttgtaaagatgacgtgcttcctcaaggcgctcctaccagccccatgcttagtaacatcgtgatgaaaaatttcgatgacatcctcgggcattggtgcgaaaagcgtaatattacctatactcgctattgcgatgacctgaccttttcagcgaacatcccactataccacgtatacaacaaagtttctgaaatgctagagaagagagggtttgaggtaaatgaggctaaaacaaaattcatcagcaacactagttgtcagaaggtcacaggactgacagtcaacgagaaggtggctattcccaaggaatacaagcgccaattacggcaggaagtttactacgcactgaaattcggcctcaaggatagcattattaaagggaagaaaaaggagtacatcgagttcggagttcctgacattcatagatattacgatcatctgaatggtaagctcacctatgtgttgcagatcgaaccacagaatgagtggttcgagaacgcccacaagaagttgaaaaatctgtataccctgtgcacatga

SEQ ID NO: 9524 - RNA, 1077 nt, synthetic construct
  source 1..1077: mol_type = other RNA
atgaagctcaataaattcactgtatccttcgaacaacaggatatgcattttctgaaaaaacacggctttttcaaggcctccagtatggtgaaaaaacattataagcagcacaataccccgtttatatatgatacataccagctggcaaacgagcttcgcatttttcacaaggatgtttttgaactctctaagaatatccgaaagcactataagttgattatgctgcgcaaaaagaacgggggcctgagatacatttatagtcccgacgctaatctcaagcatgcacaactgcagatactgaagaacatcctcaacaacataaagatctctccttatgccacggcctacgtgaaaggcaaaaaccttaaggacaatgctaaaccacatactaaccacaaatacctactcaaaatggacattacggatttttttggtagcatcacctatttgcaggttctgtcgaccgccttcaataggaaaaggtttcctacccaaattggagcaatgttgtcatccctgtgttgcctgaatgacgtgcttccacagggagcgcccacatctcctgcgcttagtaacatcgtgatgaagaatttcgatgacattataggagcctggtgtaagaagcgtaatattacatacaccagatactgcgatgacttaactttcagcgccaacagcccactgtacaacgcttacatcaaagtcaagaacatgctggaggaacgggggttcgagttgaatgaagagaaaacaaagttcatcactaacagttctagccagagagtgaccgggttaactgtcaacgagaaagtctcaatccctaaggaatacaagaggcagctccggcaagaagtgtactatgcaatcaagtacggcctggctgacagcattgtaaaggggaataagagcgagtacatcaattatggtaagcccaacattcattcctacttttcccacctggagggcaagatcttctatgttctacagatcgaacccgacaatacctggttcgtgaaagccgctgagaaattaaacgatcggttctgctatgagataaaatcaacacagtgtacatga

SEQ ID NO: 9525 - RNA, 1059 nt, synthetic construct
  source 1..1059: mol_type = other RNA
atgagatttcacaatggtattctgtctttcgatgcttccgaccgatactttctggaaaaacacggattgcacaacacaataaaggccgctggaaagcattatgattcttacgagacaccctttatccgcgatacctaccagctagcgcaccaagccggcaccttccggaagactctgttcgagctctgcaagaataccagcaaacactataagaccatcaccctgaaaaaaaagtcagggggagtgcgatacatccacgcaccagatggcacactgaagtgcgcacagcagtacattctgcggaatattgtgaacaagatcgccgttagtccttacgcaacggcatatgtcaaggggaaaaggctgcatgacaacgccgctcctcatacaaaccacaggttcctgctgaagatggacatcacggatttttttggcagcattacttttctcgaagtgatttcaagcgcgttccctgccaagatgtatccagtacagataggggcaatgttgacaagtctttgttgccttaatgacgtgctgccacagggcgctccgacttctccgatgctctccaatattgtcatgaggtcgtttgatgacttcatcggctcttggtgccaaaaacgtggcgttacatatactcgctactgtgatgacctgacattctcaagcgacgcccccttatacggggtctatctcaaagttaaagaaacgttggagaaccgcggattcaccgtaaacgagcataagactaagttcatcaccaacgcttcctcacagagagtgactggtctaaccgtgaacgaaaaggtgtccatcccaaaggagtataaacagcagctgagacaggaagtgtactatgccgtcaagtttgggttagctaatagtatcctgttcggcaataaaaccgatttcgtgaagaacggtgtccccgaccctgtttcctattacgagcacttgttaggaaaacttcagtatgtgcttcaaatagagccccataatcaatggtttggtaaggccattaaagacctctgtgaccggtactacctcagcaaatga

SEQ ID NO: 9526 - RNA, 1053 nt, synthetic construct
  source 1..1053: mol_type = other RNA
atgaagaaagcttcaaacatcattcgcaacatacaagttttcgtcaagaaactcattggcatcttcgctaatagtcactcctccaaaaagcagaaatcaaacaaggggatttccaaggagctgcagtctctggccgatactctggggactacaaccggtgaactgttcgccctgtctaaaaaggcggattcatgttacaaggagatccggatcccaaagcggagtaatgggtttagaattatccatagtccaaatggaaagctcaagaaagtgcagaaaaaaatcttgcagagcataatcagcaaggccgagacatcgccatatgccatggcgtacaaaaaaggcaagaacctgaaggacaatgccgaccctcacatcaaccacctgtatttactcaaaatggacatcagcgatttcttcagctctatcaccttccatcaagtccttagttctgcctttcccagcacactcttccctacacaatgcggcgttattttaaccagcctatgtaccaaagatggcgtgcttcctcagggagctccgacgagtcctgctctttccaatctcgtgatgaaatcctttgacgagcatattggcttctggtgcaatgaacgcggtattgtgtacaccaggtattgtgacgatctgacattttctgcagattaccccttggtggtcctgtcttataagattgaggatatgctaaaccgatggggttttcaggtcaacaagaagaagaccaagtacatcttcttttcgtcccgtcagactgttactgggttgtgcgtgaataaaaaagtaagcattccaagcgactataaaaagactctgaggcaggacgtatactacgccctgaaattcggactcgaggattcaatgatacacggaaaaaagaacgacttctttgagaacggcaagtgggacacggcaagatataagtgccacttaatcggaaaggtgaattacatactgcagatagaaccggaaaataagtggtttcaagcagcaaaggaaaacctttccaaatcatttgacccccccttgaactcctga

SEQ ID NO: 9527 - RNA, 1068 nt, synthetic construct
  source 1..1068: mol_type = other RNA
atgatggtgaaacggttcatcacacgcttcgaaaaacaggacatgcatttcgtcgccaagcacggatttttcagggctgctcggatggtgcgcgctcacaagaaaaagcataatgccccattcatcgccgatacctatcaactcgcgcacgaattgggcgtaagacggagggaattgtttggccttacaaggcaccctgagtaccattatcggatactgactcttcgtaaacgcaatggtgggttaagggtcctgcacgctcctctctatcagatgaagcaggtacagcaacatatcctgaagcgcattctgccgcacctgcccgtcagtccctacgctactgcctacgtgcaggggaaggccctagccgataatgcagctccacacgtgggccacaagtacctgcttaaaatggacataacagactttttcggttccattacctatctccaggtgctgtctactgctttcccatccacattctaccccccccagattggagcgatgctgacggatctctgttgctacaaggaagccctcccacaaggggcccctacctcaccaacgttgtctaatatcgttatgtgtcgattcgacaacgcaattggaggttggtgcaaaaaacgcgggattgcctataccagatattgcgatgatcttaccttcagcgccgatacacctctgtaccatgtctatgagaaggtgaaagacaaactggagggcatggggtttgctgtcaacgagcggaaaacccattttgtgactgcagcctcgagacaaaccgtgactggcttaacagtaaatgaaaaggtggcaatcccggcagactataagcgtcagctaaggcaggaggtttactacgcgatccggtttggcctcgcagacagcatcaatcagggaggaaagccctttagaaccattggcaataaccctgatgttaggagatattacaaccacctgaacggtaagctgaactacgttttgcaggtggagccccataaccgatggtttgcctgtgcaaaggaggacttaagacgacagtttgaagacgagatatgccgttggtga

SEQ ID NO: 9528 - RNA, 1086 nt, synthetic construct
  source 1..1086: mol_type = other RNA
atgatcataaacgattggtccgtaaggttcgaaaatgcggatgcacacttcgtggaaaagtatggcttcttccatgcttgtcataaagtgcggcaacatgtggagaaatatgatacaccatttgtgcaggacactcaccagctcgccgcaacattggcccttcgtcataggcaatttttcagattacttagagaagcagacgctcaatacgaacgggttgaaattcccaagaaaaacggcggggttagagtgctgtatgcccccaatccactgcttaagagggtccagtttttgattttgaggctgtttctggatggaatgcccatctccaggttcgcaacagcctactgcaagggtaaatcgctgagggataacgcatctccacatactggccacacatatctgctgaagatggacattactgacttctttgatagtataaccttccctcagatcgtaggcactgccttcccgaaggacatgtatccctctcacatccgagcgatgctgactgccctgtgttgcagaaacgagcagcttcctcaaggggctcccaccagtccggctatctcaaatctggtgatgcgccgctttgacgacgttcttggagagtggtgcgagaagcacgatatagcttacacccggtactgtgatgatttaaccttttccgctaataaaccactctttgccgtgcaccagaaagctaccgctatgctcgagggaatgggtttcaccgtgaacgaggccaagacgcgattcgtcaagaataccagccgtcaggccgtcaccggcttaactgtcaacgagaaagtgtcaatctctgcagagtacaaacgagccctgcggcaggagctccactatgccatcaaatttgggattcgcgacagcctggtaaaggggctcaagacagcgtttctaacaaatggacagcctgacaccgaacggtactaccgccacctgagaggcaagattaactatgtcctcagcgtggaacctcagaatacgtggttcgccgacgcattgaaacgcctagaagttgtctatcattgggaggtgtacgagtacgtgagatacggtaagcggtga

SEQ ID NO: 9529 - RNA, 1044 nt, synthetic construct
  source 1..1044: mol_type = other RNA
atgatcgttaggaaagatggggttgtcttaaaaaaggaggacgacaattatatcaagaagttcgggttgatgaaagctgccgaaattgcaattgaatacaaacagacccacaaaacccctttcattcacgacctgtttcaactggccgcttttataggccccggcaagagatcattctttaagctgctgaaaaatgtgaacaacgagtactcttttttcgagatcaaaaagaagaacggtgggtttcgaaaaatatacgctccttcccctgagctatgcagggctcaacgtgttatactgaggggcatcctgagctgctatgacgtgtccccctacgcaagcgcatatattgagggcaaagggttgatcagcaatgcccagccgcacacaaacaagaaatacatccttaagatggacattactgatttcttcggttctatttcattcgagcaggtgatttctacggtattcaacaagaactactttccctccgcggtgggctatgccctcactaccctctgctgttataaaggctatctggttcaaggagcccctacctcccccatgatcagcaatctggtgctgaaacatttcgacgatgtgatgggagtgtggtgtgagaagcgcggaatctcttatagtcggtactgtgatgacataactttttccgcaaatgaaccattgttttgcgcctacagcaaagccaaggccttccttagtgagatgggattcgaaattaacaagaagaagacccgatttgtatcacatacatctcagcagaatgtgacagggcttgtcgtcaatgaaaaggtgtcagtgccaaaagagtataagagagatctccggcagaagatctactactttctaaagttcgataagaaggacacagctttcaaacagagcggtcgggaatattacagttacatcaactatcttctcggacgcgcgaactacgtcttatcgattgagccaaacgataaatttctgaaggagtccatcctggtcctcagagaaaaaagtgacgtagaatattggaatgagtga

SEQ ID NO: 9530 - RNA, 987 nt, synthetic construct
  source 1..987: mol_type = other RNA
atgttctaccgaaaataccactcttgtatatttaagggctacattatgaacgacttttcactgaccgaaattttcaatatgcgcgaaaaagagatctactacgtctcaaatcacatcagcaagcactacaagagggtggagatacctaaaaagacaaaaggggtacggatcctgtacattcccagcaaaaagttgatctacatgcagagaattatcctgaatgctttcctttctgagtacaagatttccgagtgtgcaaccgcctaccacaagggatcgactttagtcagtaatgccctgccacatcgcaacaaaaaatacgtgctgaagctggacatcgaggacttctttggatcaatcacttatgggcgagtgtacaagatgttcttcaaacattttccagtcaagtacgccaaactttttaccgaactctgttgctataacgataaattggttcagggtgctcccacatccccggccatcagtaacatcattatgctagatttcgataacagagtggaaagctactgcaaggaaaataacatttcctacacaaggtattgcgacgacattacgctctctgcggatttttcccttgataggacttatcatcgtattaaaaaggagctgcaaaaggctggcttcgaattaaacaaacgcaagacccattttgtgaaaaacacccaccagcaaaaaatcactggtgttgtagtgaatgaaaagatccaggtgcccatcgagtacagaaagaagctgcggcaggaactatattatctctataagttcggagccaataacgttatcctcaagaacaactatacagactatataagcaacgggaacaccctcgacgtgaagtatatcaatagtctgctgggccggatcaattatgtcttgcaaattgatcctgacaataatgagtttgcaaaggagaaagagaaactgtgctcttatgtccagcagataaagattcagaaaatattctga

SEQ ID NO: 9531 - RNA, 915 nt, synthetic construct
  source 1..915: mol_type = other RNA
atgctggaatctacttttaatatgagcaaacgcgaactgtactacgtcagcaataacataggcaagcactacaagaagatcatcatcaagaaaaagtccggagagaacagaacgttgtatgccccggacaaaaagttgaagtacattcaccggataattctcaaagaattcctgtccgattataaaatctctgcctgcgccaccgcttatcataaaggcgcacaacttgttgataacgcactcccccacatcaataagaagtacctcttgaaacttgacattaaggatttcttcccctcgataatgtttggtcgggtctacaagctcttttattccaaatttccagaagagtatgcaaaactgttcgccgaactttgctgttacgatgactgcttagttcaaggggcgcctacctcaccagccgtaagtaatatcgtcatgttaaacttcgacaatgaactcgaggcttggtgtaagagcaatttcatcagttatacaaggtactgtgacgatattactttgagctcagatgagcccctggtgtccgcttatcattatgtgaagaaactgctgaacaagaatggattcgaggtgaataagaagaaaacaaggttcatcaaacacactcatgggcagtatgtgaccgggattgtggtgaacgaacacctgcaggtaacacgagagtaccggagaaagctgcgtcaggacctatactacctttacaaatttggtgccagagacgtgatcctgaaaaataagctggatgactacatcttaggcaagaccacactgaacgctaagtatatgcagtctctcatgggaaggattaactttgtgctgcaggttgaccctgataacaaggagtttaaagaggagaaaaccaagctaatcaactatatgaacatccgcatttga

SEQ ID NO: 9532 - RNA, 969 nt, synthetic construct
  source 1..969: mol_type = other RNA
atgtggaagtacatgaaccaggagatgtgcaatcagtttctgctctcattacatctcattgatggcgatttgtcagatcaggagaaaatcaagctgctttacaccatttccaacacaattgagaaccaatacgagatcatcaagatcaagaagaactcagggaaactgcgtactatttactgcccccaccccctgcttaagtctatacagaggaaaattctccaccagattctgaatcacaaatctatatccagttacgccaaagcatatcatccgcatattggcctaaaagaaaatgcactcccccacgttcaccagaaaagaatcttaaagctggacatccaggatttcttcaatcacatccagttcataaacgtgtacgaaagttgttttagcctggcgtattttcctaagccaattggaatgctgctgacccaattgtgcacatatcacgatgacctgcctcaaggtgctcctacctccgcttatataagtaatctcgtgatgaaggacttcgacgaggagatcggggactggtgtagccagcgcaatatatcctatacacggtattctgacgatatgacgttttccggagatttgatcccagccgacgtgatcagaaaggtgaaacagtacctcaaccccctcggattaaagcttaattaccagaagatccacgtcattaaccattctcagcaacagaacgtcactggtatcgtggtaaatgagaagatccaagtcccacgactatataggaggaaaatccggcagaccatgcattatatcgaagcctacgggttgcaaagccatctggagaaaattggctatcaaaagagccctgaacgctacctgaaccacatatacggccaggtgctgtatattctgcagattaacgcccaggacaaagaatttcagatctacaaggacaaacttaaggaatacgagaattcgtatactttcagcgtttga

SEQ ID NO: 9533 - RNA, 948 nt, synthetic construct
  source 1..948: mol_type = other RNA
atgtggaaatacatggatcagaaccagagccaagaatttctactctcactccacttgctccacaaccagctgagcgataaggagaaagtgaagatgctgtattccatttctaacagtatcgaagagaattacaacatcatcaagatcaagaagaggaatggcagccttcgcacgatttaccagccccatactaatctgaagttaatccagcgacagattctgaaaactatcctgaataaccgcagtgtgtctacatacgccaaagcttaccacaagaatattggcctgaaagacaacgcttatccccatgtacaccagaaaagaatcttgaaactggacattaaagacttctttgagcatatccagtttatcgatgtttacaacgcctgtttctcgctagcctattttccgcagtccattggtcaccttttaacccagctgtgcacctatcatggctaccttcctcagggggcaccaacatctgcctatatcagtaacctggttatgaaggaatttgacgagcagattggcgaatggtgtgagaataagcacatctgctacaccagatactccgacgacatgacattctccggagatttcaatcccagagaggtgatacagcgggtcaggaaggctctgtatcctttggggttagagattaataaccagaaaattcacgtgatcggcaatggacagcaacaaaacgtaaccgggctggttgtgaatcaaaaagtccagacttcaagccggtatcgtaaaaaggtgaggcaagcgatatactacatgaagaagtatggattggaatcccatctttctgcaatacaatatcagcagagcccacaaaactatctgcaccatctctacggtcaggtccagtacatactgcagattaaccctctcgatcaagaattccagtcatatcaggagtacctcaaaaagatcaagtga

SEQ ID NO: 9534 - RNA, 954 nt, synthetic construct
  source 1..954: mol_type = other RNA
atgattatacacactaaagaggattgcaacaatttcctgctttccctgaatctgatcaataagaacatatccgatagcgagaaactacggctcctgtataccttgactaatcctatcgaaaagaactacaagatctacaagattaggaagaagaatggtcagttccggcagatttacattcctaacaacctcttgaaaagtatccaacgcaaaatcttgaagaatatcctcaacaacaagaagatttccatatacgccaaagcctacaaaaaaggcgtgtgcttaaaagataacgcgtacccacacctgaataagaagattatactgaagctggatatcatcaacttctttgacaacattgagtactatgacatttacagaacctgcttttcaaaagaatactttcctccatctgttggtcatctgctgactaatctctgtacatatgagtcgagacttccacagggggcacccacaagcgcttacataagtaatctggtgcttaaggagtttgatgaggaaatcggacattggtgtgacgaacacaatatatcatacacccgctattccgacgacatgaccttttctggcgatttcaatccccaagagatcattaaaaaagtgcgacactacttgaactacctgaacctaaagctgaataacaagaaaatcaaggtgatcagtaactctaaacagcagcgtgtaacaggcctcgttgtcaataaaaaaatccaagtccccaagaagtatcggtataaaatcaggcaggaggtgtactatattaagaagtacggactcctctcacacctccagaaaatcaactatgaagacaaaccgctgcattatttaaatagcttacttgggaggcttaattatctgctgtctattaacagcaacatcgagttcattaagtataaggaatacctaacgaagctgagaaagacatatttgtga

SEQ ID NO: 9535 - RNA, 942 nt, synthetic construct
  source 1..942: mol_type = other RNA
atgataaaccacaccaaagaacagtccaaagagtttttgctgagcctcaatctcatcaactcaaaagatgtgctgaaaaagctttactccataagcaataggattgagtccaattacaaggtttacaagattcgtaagcataatggtaagtaccgcacaatctattctcccaacacactgctgaaaagcattcaaagaaatatcctgaagaacatactgaacaacaagaaaatcagtaagtacgctaaagcctatcacaagaatatcagtctgaaagacaatgcaatgcctcatttgaacaaaaaaatcgtgctgaagctagacatcatcgatttctttgagaatatcgaatacccaactatttaccggtattgtttcaatgagatctatttcccaaagtcagtgggccaccttttaactaccctttgcacttatgagtccagactcccccagggagccccgacatcatcgtatattagtaacctggttatgaacgatttcgacaatacgataggcgaatattgcgaacagaataacatcagttacacacgatattctgacgatatgaccttctctggggactttaatccctctaagttaatcactattgtgaggagagagttgtacaagctcggattgaagattaacaacaagaagatccacgtcataaataactcccagcagcaaaatgtaaccggcatcatcgtcaacaaaaaaatacaggtcagctccagctatcggaacaaaatccgccagatcatttactacattaagaagtatgggcttaaggatcatctaaacaggattaactaccaagaaagcccttcaacctatattaatagcctctacggtaaaaccctgtatgtgctctctattgacaaaacgaacaaggagtttatcaattacaaggagtacctgaaagaactgaaaaaggcgatttga

SEQ ID NO: 9536 - RNA, 957 nt, synthetic construct
  source 1..957: mol_type = other RNA
atgtggaaatatatcggcactaaagagtgtaatgattttctcctgagtttgcacttgattgactgtctagaccagagaaagtacatcaaaacgatttacagcatttccaacaatatcgaaaagaactacaagatctacaagatcaagaagtcaaatgggggatacaggactatctatgaaccaaatcccctcctgaagcagatccagaagcggatcctgacctcgattctgaatcataaagctatctctcgatatgccaaagcctaccacaaaggcacccaattaaaggacaatgcatttcctcatgtaaacaagaacatgatgcttaaactggatatcaagaacttctttgagacgatcacttttctggacatttataactcttgcttctcaatcgaatactttccaaaaagtgtgggcatgattttaacatacttgtgcacctatgacaatcacttgacacagggcagtcctacttccccctatataagcaacctcgttatgcaggagttcgacgaggaacttggttcttggtgtgatctgatgggcatatcatatacccgctactcagatgatatgacctttagcggacagttcaacccgcgtaagattatatccaaggttaggaaaatgctgtatagactagggatggagctgaatgactccaaaacacatgtggtctataagagctctagccaaaaagtgacaggtgtagtcgtgaacgaaaagatgcaggtgagcaaacggtatcgcaacaaaatcaggcaggagatttactacattaaaaagttcgggctgaatagtcacctcaagaaatgcaacatagacattaactccataacctacgtcaatattctgtacggaaagattctctacgtgcttcaaatcaacgagacagataaggagttcataaagtataagcagttcatcaaggatcttaaaggaaatatcgggtga

SEQ ID NO: 9537 - RNA, 954 nt, synthetic construct
  source 1..954: mol_type = other RNA
atgtggaaatacattggcacaaaagagtgtaatgattttctgttgagcctgaacctgttcaattgcaaagacgagaatcactacataaaaaccctctattccatcagtaataacattgagaacaactaccgcatatacaagattaaaaagcggaacgggaaatatagaaccatctatgaacccaaccctttgctgaagcatatacagaaacagatcctcataaacatcctcaacaataaaacgatctccgaatatgctaaagcgtatcataagggaatttcactgaaggataacgcgaatcctcatattaacaaggacataattctgaagcttgacatcaaagatttcttcgagaacattagcttcctcaacatttacaatagctgcttccagattgaatattttccaaagtctgttggcatgctgctaacgacactgtgtacttacgatgatcacctcacacagggatctccaacttctgcctacatttccaatttggtaatgaaggactttgacgaggaacttggtagttggtgcaaagagaattccatctcatacacccgatattcggacgacatgacatttagcggctcatttaatcccagtgatatcataaagaaggtgcggaaaatgttatactccctgggactgcagttaaattctgacaagatccacgtggtcaccaaaaatgcctgtcagaccgtgactggtctggtggttaataacaaagtgcaagtcgggattaagtataggaaagagatccgtaaagaggtgtactatattaataagtacggcttgcaaagccacctgaagaagatcaacattaaggacaagaacaaatacctcaattctctttatgggaggatcctgtatgtccttcagatcaacaagaatgataaggaattcatcagttacaagaagatcatcaacaaaatcaagagcgatctatcctga

SEQ ID NO: 9538 - RNA, 954 nt, synthetic construct
  source 1..954: mol_type = other RNA
atgtggaaatacattggaaaagaagagtgtaatgagtttctcctgagcctgaaacttttcaattgcaaggacaagaagaaatatctcaacacgatatactccatttcaaacaacatcgagaacaactacaagatttacaagatcaagaagaagaacggcaagtataggacaatatatgagccaaattcccttctgaaacatattcaacgtcagatactggtgaaaatcctagataataaggccatttctaagtacgcgaaagcttaccacaaaggtattaatctgaaagacaacgcaattcctcatctaaacaaagagctgattctgaaattggatatcaaagacttcttcgaaaacatctctttcatcgatgtgtacaattcctgctttagtatcgaatacttcccgaaaagcgtcggtatgattcttacatatctgtgtacctatgatgattatctcatgcaaggcgctcccaccagcgcctatatcagtaatctcgtaatgaaggagtttgacgaggttctcggactgtggtgcgaggaaaataatatctcctacacccggtattcagacgatatgacttttagcggggaattcaatccccgcgaggtgatcgtcaaagttcgaaagatgttgtataagttagggttagaactgaacaacaagaagatccatatcattcacaaaagttcgaatcagaatgtcactgggatcgtggtgaatgaaaaagtacaggtgtcagccaaatatagaaaggagatcaggcaggaaatatactatatacggaaatttggcctggaatctcacttgaaaaagagaaacattgacatagagaaggagaagtacatcaacattttgtacggaaagattctctacgttcttcagatcaataataaggacaacgagtttaacaagtacaaaaagttcatgaacgacttcaagaacaagttttga

SEQ ID NO: 9539 - RNA, 957 nt, synthetic construct
  source 1..957: mol_type = other RNA
atgtggaagtatattggcctcaaggagtgcaacgaatttttactgagcctgaacctgtttgactgcaaagatgaaaagaagtacatcagaactctctatagtatttccaacaacgtcgagaacaactacaagaagtacaagattaagaagtcaaacggaaaataccggacaatttacgagccatctcttttattaaagcacatccagcgtcagatattgaataatatcctgaacgataggatgattagctcctacgccaaggcgtatagaagaggaagctcgcttaaggataatgccattgtgcaccagaacaaaaagatagtcctcaaacttgacatttcaagcttcttcgacaatattagcttcatcgatgtgtacaacagctgtttctccattgaattttttcccaaaagtgtcggaatgttgctgacatctctttgcatctacaatgattacctgccgcaaggcgctcctacctctgcattcattagtaatttggtgatgcgaagctttgacgaagagataggttcatggtgttccctgaaaaatatctcatacacccgctattcagacgatatgacgtttagtggtgatttcgattgtaaggaggtgatcaataaggtgaggaaaatgctgtctatcaaagggctggagctcaacaaggacaaaatccatgtaatcaagaacagttcctgtcaaaaagttactgggatcgtggttaataataaggtccaggtatgcagcaactataggaaatctatccggcaggagatctactatataaagaaatatggcctagagtcccataagaagtatcgaaacatactgtcctccaatcggaaatacctgaattctttgtatgggaaagtttcgtatgtgctccagattaatcgcgacgacaaagaattcatcgactacaagaactatctgctcaaactcctaaaagacaatctgtga

SEQ ID NO: 9540 - RNA, 951 nt, synthetic construct
  source 1..951: mol_type = other RNA
atgtgggattatatcggggtgaaggaatgcaacgattacctcctctcgctgcacttgtttgactgtgaggacgaacgcaaatacatacggactctgtacgccatcgccaacaatattaggaatcactaccgcaaatttcagatccgaaaacataacggcaagatgagaacaatctacgaaccttccgggattctgaagcacattcagaagagaatactgggggaggtgctggaggacctgaaggtatctccctacgcaaccgcttatacacgtggcaaatctctgttagataatgcctgccctcatgtaggttgcaagatgattctcaagcttgacatcaagaacttcttcgaaaacatttggttccttgacatctataacagttgtttccccatcgagttgtttccgaaatccataggaatgttgtttacctatctttgcacttacgacgatcatctggtgcaaggcgcacctacaagcgcctacattagcaatttagttatgagggactttgattacgctgtgggtaactggtgtcgtcagcaaggaattgaatatacccgctactcagatgatatgaccttctcaggcgatttcgatcccgcagctgtgatccgaaaggtccggagggagctgtatcgcctagatatggaactgaacgacagtaagacgagagtgatatataggagccacagacaatgcgtcactggcgttgtcgtgaatgaaaagccacaggttagcaaaaaatatcggaaagagatccggaaacagatgtactatatcgagaaatacggtctatccgagcaccttaaaaggacaggaaaggccgagaaggggtatctggaaaccttgaaaggatgtatctgttatgtcctccagattaatccagacgacgctgagtttagacagtacctcaagaaggccaatgagctcctgtacgcggacaagtga

SEQ ID NO: 9541 - RNA, 951 nt, synthetic construct
  source 1..951: mol_type = other RNA
atgtgggactatatcggtgtgaaagagtgcaatgattacctgctttctcttaatctcttcgactgtgatgatagacagaaatacattcgcactttatatgccatagcaaacgatgtccgcaaacattacaccaaataccagataagaaagcacgacggaaaaatgcgcactatttacgaaccctcggggatcctcaagcacatccagaagagaattttgaccgaagtgctggaggacatgcgcgtatctccgtacgccacagcttataccaaaggaaaaagcctgctggataatgctcaaccacatgttggccagaagatgatcctgaagttggacattagacactttttcgagaatatctggtttcttgacatttacaacagctgcttcccaatagagctcttccctaaatccgtgggaatgctgtttacatacctttgcacgtatgatgatcacttggtccagggcgcacccacaagtgcgtttatcagtaatctcgttatgagggagtttgactatgaggttgggaactggtgtaaccagaagaatatttcctacacacgatattcagatgatatgaccttctctggcgactttgatcctagcggggtgatccggaaggtcaggcgcgaactctataagctggacatggagctcaacgattcaaaaactagggtcattcggaggagccatcgtcaatgcgtgaccggtctagtggtgaatgaaaagaggcaggtatcccgggaataccggaaggagatacggaaacagatctatttcatccagagacatggactgtccgaacacctagcccgaattggccgagacgagaaggggtacttagagaggctgaagggctcaatctgttatgtgctgcaaatcaaccccgatgacgctgaattccgtaagtacctggaggacattgacgaattgagttatgccaacaagtga

SEQ ID NO: 9542 - RNA, 969 nt, synthetic construct
  source 1..969: mol_type = other RNA
atgtggaaatatattacgaaagagcaggtgcaggaatttctgctgtccctcaacctgttagacaacaaattgaacgacaaagacaacatcaataagctctatagcatcagtaataacatcgagaacaactacaagatcttcaagatcaagaaaagaaacggcaaattccgaactatatatgaacccaattacacactgaagaatattcagcgcaagattcttaacaacatcctcaacaataagtcaatcagtaaatacgctaaggcatataagaaaggcactagccttaaagataatgccaaagagcacctaaataagaacatcatcctgaaattggacatcaagaattttttcgagtcaatccagttcattgacatttacaactcctgttttccgatcgaatactttcctaaagaaattggcatgctgctcacctttctctgcacatacaataattatctaccacagggggccccaagttcctcttacattagtaacttggtgatgaaagagtttgatgaatacattggtgactattgcgataaaaacaacatcagctataccaggtattctgatgacttaaccttcagcggcaatttcaatcccagcatcatcattaaaaaggtcagaaaggatctgctgaagatgggacttgaaattaatgactccaaaacgcacatcataaaaaaaggtaacaggcagtctgttacagggatagtcgtgaatgagaagcttcagatatcctctgactatcgcaaagaaattcggaagcaaatatactacatcaagaagtacggaatagaaagccatttggagttcaccaataataatatttcggagatcaagtacctgaattcactgtatgggaagataaactacgtactgcaaattaacaaggatgataacgagttcatcgagtataagaagtacattaacaagctgctcaaggagaaacggcctaagaattga

SEQ ID NO: 9543 - RNA, 966 nt, synthetic construct
  source 1..966: mol_type = other RNA
atgtggaagtatattacaaaggagcagaccaaagattttttgttatctctgaacctcatcgatgataaactcagcgataaagaaaagatcaacatcctatactccataagcaacaacattgaaaacaactacaggatcttcaagattaagaaacggaatggtaagttgcggaccatttatgaaccaaatcccacgttaaaaaacatccaaagaagaatcctcaacaatatactcaacaacaagtcgattagcaaatacgctaaagcatacaaaaagggaatttgcctgaaggataatgcggtcgagcatctgaataaggaaactattctgaagctggatatcaaggacttctttgagaacatcaaattctccgacatttatgactcttgttttagtatcgagtactttcccaaagagattggtatgttgcttacccatctgtgtacctacaataatcacctgacccagggatcacctacaagtgcttatatctcaaatcttgtcatgaaggagtttgacgagtatattggcgactattgcgaagataataacatcagctacaccagatattccgatgacctgacattctcaggcaacttcaacccaagtaatgtgattaaaatcgtaaggaaggccctcctgaaactgaatttagagattaacgacgataagacttgcatcataaataaaggcaatcgccaaactgtgactggcataacggttaatgaaaaggcccagatatgtagcacatatcgtaagaacattcgaaaggagatctactacattaaaaagtttgggatagactctcacttgaaattcaccaacaataatatcacacctctgaagtatcttaggtacctatccgggaagatcaactacgtgatacagatcaacaataacgacaaggaattcctgaaatataagatctacatcaacgagcttctccgggaaaaacgcgtggactga

SEQ ID NO: 9544 - RNA, 954 nt, synthetic construct
  source 1..954: mol_type = other RNA
atgtggaaatatttgtctaaggacaaagagaaggaatttctgcttagcctgcatctcataaatggagtgaacgatgaggacattctcaataaaatttacaccatctccaacaacatcgagaagaactacaagatcttcaagataaagaagcggaatgggaaaacaagaactatctatgagcccaaccccaacctgaaaataatccagaaaaacatcctccacaatattctggaagatcgctatattagttactcagccaaggcttacaaaaagggcataagcattaaagacaatgcaaatgagcacgtagataaggacatgatactgaagctggacatcaagaacttcttcaacaatatcacctacattcaggtgtactgtagctgctttaaagaaatctatttccctaagtccatcggcaccctgttgacaaatctttgcacgtataatgattctctgcctcaaggggctccaacctccagctacatctcaaacattataatgctagacttcgacatcaagattggcgaatactgcaaagaaaataacgtcagctatactcggtattgtgatgatatgaccttttctggtaacttctccaaaatggagataattaaccttgtcaagtcagaactgaaaaaactgggattaacgctcaatcatgacaagacaaagttgatcactaagaagaatagacagtatgtgacagggatcgtggttaataaaaaagcgcaagtgtcgattgattataggaaagaaatccgcaagaacatttactacatcaagaaatacggactcaactcccacatgaattatcagaaaatgagtctcccaaaagagaagtatctgaacattctgcttggtaggattaattttgttttggaggtcgacaaagccaacaaggagtttattgagtacaagaagtacatcctaaagttaatcaaggatcgatga

SEQ ID NO: 9545 - RNA, 954 nt, synthetic construct
  source 1..954: mol_type = other RNA
atgtggaagtatactaccaaggaagtgtgcaacgattacttgttaagccttttttcgttcgatctgatctcatccaaccaggagacactcaaactcctttacaagatctccaacaacaaagaaaagtactaccatgtcatcaagatcaagaaaaagtcaggaggttaccgtaccatttatcagccgtcccccacactgaagtatatccagaagactatattggacaaagtgctgaaagagaaaggcatctctaaatatgccaaagcgtactacaacggcgcctctctaaccacaaatgccaagccacatttaaatcagaagatcatcctcaagctagatattaagaacttctttcctagcactaactatctcaccatctacaaggcttgcttcagcaaagagctgtaccctaagagtatcggaactctttttacgtcactctgtacttaccaggattttttgccacaggggtctattacagcaccctatatttccaacttggtgctgaaagacttcgataacgggattggcacgttttgtcaaaagcgcaatataaactatacccgatattgcgacgatatgaccttctctggtaattttgaccctcatcacattattaagtgtgtcgctaataaactgcacaaaatcggctacgaactgaacaagaagaagatccacattataaccaacaataagaggcaagaggtgaccggaattgtagtgaataaaaaactccaggtcccaaaagactatagacacaaaatcaggcaggaactgtattacgttacaaaatactcactgtccagccaccttgagcggaataatattaaggacaaagagacatacctccaaagtctgtatgggaagattctgtatgttctgcagatagaccccagtaataaagagttcataaagtacaaggagctgatcagcttagaactgaataagatgtga

SEQ ID NO: 9546 - RNA, 954 nt, synthetic construct
  source 1..954: mol_type = other RNA
atgtggcagcacctgacgaaaaagcagataaacaacttcatcttaagcctgaatcttattagctttaacaacctgtctaacaaggagaagctcaagttactgtataccatctccaatcatggtgaaaaacactacaaagtcttcaaaatcccgaaaaaaaacggcgggtatcggacaatatacgagccagattacacactaaaaatgatccaggagaatattttgacgaatgtcctcaacgaacgaatcattagttcatatgccaaagcttacaagaagggtctgagtctgctggataatgcactgccccatctaagacaaaaaatcgtgctgaaactggacataaaagattttttcccctcgattgacttccttaaggtgtacaagaaagctttccctagacatatttatcccgaggcagtggcgtcactgcttaccaacctcgtcacctataataataccttgcctcagggagcccctaccagttcatacatttctaatttggttctgaggtccttcgacattaaaataggatccttttgccaatctaagaatattgcctatacacggtactgtgatgacatgacttttagcggagagtttaatccacaggaaatcatcaacctcgtaaaaacagagctgttcaaggagaacttcatactcaacaagaagaagatcaagatcataaagtccaataaggcccagattgttactggcatcgtgtgcaatgaaaagttaagcattccaaggacttataagaagtttattcgccagaacatgtactacatcaataaatacggcctaaataaccacctcaaatacatcaactatctggatagcaaagactatctcaataagctgtatgggcagatcctctttgtgttgcaaattgagaagaacaataaggagttcttgaactacaagaacgaacttatcaaacttaaggaaaactga

SEQ ID NO: 9547 - RNA, 960 nt, synthetic construct
  source 1..960: mol_type = other RNA
atgttcagatatctgtcccttgataagtataacgacctgctgtcttcattcaatctggtgaatactaccgacatcaagaagataaataagatgctctacaacatctcaaacaatatcgacgccaattacgaggagatcattatccacaaaaaaacaggaggcctgagatttctctatgcgccttctaaagaattgaaaagcatccagaaaaggatcctaaaaaatgtgctcgaggagaagaagttaagccgctacagttacgcttatcgaaaaaaagtttcggtccttgataatgctaaaccccacgtaaaaaaggacgttatagtcaagctggatattaaggacttcttcgacaatattaccttttccatggtgtacgactcttgttttaatgaaaccctttacccgaagaagatgggaatgctctttactaatctgtgcgtgtacaataaccgtttaccccaaggggccccaacttctggcttcatatcaaatatcgtactacgcaactttgacgagaaggtgggtagttattgtgagaagcggaaaattagctatactagatattccgacgatctcacgttttccggtaacttcaacgtcaaggatctgataaagtacgtgaacaagctcttgtatgagtacaacttccgattgaacaagaagaaaattaaggtcgtaagcaagaaaacacggcagcaggtgacagggattgttgtgaacgaaaaagtcaatatccgccggaattacaagaggaaaattaggcaggaaatgtactacatcaagaaatacagtctgaaaagccatctgaagaacattgcatacaaatgcgatgaaaaaacctatctgttgaaccttttaggcaggattaactatgtgtacaacatcacaaaggacaccgagttctataactataaaaaggatgtgacgaagctcgttaagaaactggatctgaagtga

SEQ ID NO: 9548 - RNA, 954 nt, synthetic construct
  source 1..954: mol_type = other RNA
atgctcgacaatgtcacaaaggacatggctaacgaattcctactgtcgctgaatcttattgatgagaagttaagcgataaggagaagatcagaaagctgtacacattgagcaacaacattgagaagaactataagaaaacggtgatcctgaagaaggatggaaacaagcgtattatatacgagccaaattataccctgaaaaaagtgcagcgcaatattctcgataacgttttatcagggttcaaagtgtccaaatacgctatggcctacgttaaaggcaaatccgtgaaggataacgccaatatgcatgtcaataagaaactgattctgaaactcgacatcaaggattttttcaacaacatttccttcatggacgtttacaacaaggtatttttagaggagtactttcctaaacaggcgcggactgtgcttacctatctttgcacatataacgaatttctgccccaaggtgcaccgaccagcagctacatcagtaatctgattatgcaggatttcgacgaaaaaattggactgttttgcgaaaagaacaacatcagttatactcggtattctgatgatatgacttttagtggtgacttcaatgtcaagatggtcatctttaaggtgaaagacgagctgaagaagatggggatgcagctcaattatgacaagatacacgtgatctactcaaatatgtcccagcaagtgaccgggattaccgtaaatgaaaaaccccaggtcctcaaagttaaacgaagaaagataaggcaggaagtatactatatcaagaagtatggcctctactctcacttgaaaaggatcaatgtgaaagacgagttcagctacctgaggtctttgctcggcaaaatcaatttcgtgctaatggtgaattcagaagacctggagttttttaagtaccgcgagttcatccttaagatattcaacaacttgtga

SEQ ID NO: 9549 - RNA, 942 nt, synthetic construct
  source 1..942: mol_type = other RNA
atgtggaaatatcttaccaaggagcacaaaaaggaattcatattgagcctgaatttgatcggcggtaagtttagcgatacagagaaactgaacattctctacgctattagcaacaatagcgagaagtattacacgacgaagtatatcaacaagaaagacgggacaaaacgtgagctgttggtaccaaataagactctcaagaacattcagaagaacatcctgaataatgccctgaacgatctagaagtctcgaagtatgcatgtgcctacataaagaacaagtcacttaaggacaatgcttctcctcacatcaatcagaaagttgtgctgaaactggatataaaagacttcttcacctccattacgttcgaggaaatatacaaagtgatacccaacgaattgtttcccacctctatcaaggtgttaatgcttaagttatgtacttactacgactatctacctcagggagcccctacctctccatacctctccaatctcgtgctgaagaacttcgacaattatattggcacttattgcaaagagaggaatattaactacacccggtactgcgacgatctgacttttagtggcgatttcgatgtgaaaaagctcaaaaacaaagtccaggcgtttcttgaggagatcggatataacctgaatgacaaaaagacgaaggtgattaaaaacaacaagcgacaaatcgttacaggcctggtagttaatgaaaaagtcaatatccccatctcctacagaaaaaagattcgccaggaaatgtattacatcaacaaatacgggatcgactcacatctgaaatatatcaacaacaccaacaaggaaaagtacattaacagtctcaagggtaaaatcaactattgcctgaacattaatccgaataataccgagtttcaatcctacctgaagaagctcaataatttattgtga

SEQ ID NO: 9550 - RNA, 948 nt, synthetic construct
  source 1..948: mol_type = other RNA
atgattgataccgacgtgctgattatcagcgaaaccttggacgtccccgtgaacaagctctacatgctctctaacaactacacttcccggaaaaagcacaggagaagcaaatatgagaactaccatatggttgtgatccatcatggaatcgtacacaagaaacgtatgctctcagtgcctaatgccttcttaaagaccgtccagaggagaatacttgaccagtatctctaccagttagaagagagcgaatatagtacggcatactgtaaaggtaagtctctcctggataatgctagccctcacgttggtaaggagtgcgtgctaaaacttgacatttcccattttttcgacagtatagacgatgacatggtttatctcgtgatgaaacggcttggactgtccgtgccggcaaccgctcttctgactcacttgtgcacataccgggccaaactaccacagggcgcaccaacaagtccttatatcgctaatttggccatgaagcagttcgacgagaagctggggagatggtgctcggagaggaatatcgcgtacactcggtattgtgatgatatgactttttccggcagcaaagccgcgattagggagagccggattatttctaaagtgcgctcaatgatgtatcgcatgggctttatgctgaacgacaagaagacagtctttatctcctcatctcagcaacagcgcgtgacaggaatagttgtcaatgaaaaacccgtcctgtctaggacccaaagaagagctatacgacaggaggtgtactactgtcagaagtatggggccgccaagagcatcaagcgtcgcaagctgaatatttccccagataaatacctgcacagtctgttggggcgaatcgccttcgcactgcaaatcgagcccgataactcagaaatgaaaggctacttcgaaacggtaaagaacatgatctga

SEQ ID NO: 9551 - RNA, 948 nt, synthetic construct
  source 1..948: mol_type = other RNA
atgctggacgcagatataattaaaatcagcgaggctttggacgtgcccgtaaacaagctctatatgctctccaataactataaaccacgaaagaaaagaagggggtccacctacgaaaactaccacacagttgtcattcaccacggacggggccataaaaatcgacggctaagcgtgccaaatgcctttctgaaaatggttcagcgtaggattcttgaatgctacctttaccaactggaggtaagcgatcattcgactgcctactgcaagggaaagtctttacttgacaacgcatcaccgcacgtgggaaaggagtgtgtgctcaaactggacatttcacacttctttgactccatagatgacgatatggtctatttagtgatgaagcatctggggctttctgtgcctgccaccgccctcctgacccatctctgtacctataaaacgcgcctaccccagggtgctcctacttctccctacatcgctaatctggtcatgaaacagttcgacgaaaagttgggctgctggtgcaggcggaacaatattacgtacacacggtattgtgatgacatgacattcagcggtaccaagagtgccataagagaatcccgcattatcagcaaggttaggtctaagttgtaccacatgggcttcacattgaacgataaaaagaccgtctttatcagttcatcccagcagcagcgcgtgactgggatcgtggttaacgagaagcctgtcctgtctaggtcacagcgccgagctatcagacaagaggtgtactattgtcagaaatatggagccgtggaaagcatcaatcggaaaggcctggacatccccagtgataagtatctgagaagtctcctgggccagatcgcatttgcgatgcaaattgggccagataatgcggagatgagacgttacttcgacactataaagaacctgatctga

SEQ ID NO: 9552 - RNA, 954 nt, synthetic construct
  source 1..954: mol_type = other RNA
atgatagacgcagatgtgatgaagataagtgagactcttgatgtgccagcaaacaaactctatatgcttagcaacaactacacagctagaaaaaagaggagaggttccaaatatgaaaactaccacaccgtcatcattcaccacgggagggggcataagaatcggaagctgtccgtgcctaacgcctttctgaaaatggttcaacgaggaatcctggaacagtacctgtatcagttggagatctctgagtactcaacggcttattgtaaaggcaaatctcttctggacaatgccagccctcatgttggcaaagaatgtgttctcaaactggacatatcacattttttcgactcaatcgacgatgatgccgtctaccttgtgatgaagcgtctgggcctgtctataccagccacaacactcctgacccacttatgcatctacaaagcacgcctaccccagggagcgccgacaagttcctatattgccaatctggtgatgatgcagttcgatgagaggctcggcagctggtgctccgaaaggaacattacatatactcgctattgcgacgacatgaccttttccgggaataaagctgacatccgaagcgcgaacgtagtcggaaaggtgcgtcgcatgttatacagaatgggcctcactctgaatgataagaagaccgtattcatttcaagttcccagcaacagagggtgaccggagtggtcgttaacgagaaacctaccctcagccggagtcaaaagagatctctgcggcaggaagtgtactactgtcagaagtatggggctgctaagtcgatcaacagacggggtttagacattagccccgataagtacttgcactctctattgggtcgcattgcattcgccctgcagattgagcccgagaatgccgagatcaaggaatactttgagactgtcaagaatttgatcaatacctga

SEQ ID NO: 9553 - RNA, 945 nt, synthetic construct
  source 1..945: mol_type = other RNA
atgtacaacgacattccatatatcgccgagacattacgtgtccctgttggcaaactctacatgctgtccaacaattacaagccaaggaagaagagaaagggcagcatctacgaaaattaccatacagtcgtgattcaccacggaagaggccacaagaaccgcacactgaacgtgcccaacgccttcctcaagctagttcagcgacgactcctggacaactttctatatcagctcaaagtgtccgagtatagtactgcttattgtaaaggcaattcacttcttgacaacgccgcaccccatgtgggaaaggagtgcgtactgaagttagacatcagccacttttttgattctatcgacgacgataaagtgctgtttgtgatgaaaagattgggagtgagcataactgctactgtcttgttcacccacctttgcacgtacaagggtaagttgccgcaaggggcgcccacttcgccctacatagccaatctggtcatgaaacagtttgatgaaaaacttgggcattggtgctctgaatacaatattacatacacacggtactgtgacgatatgaccttctctggatataaggcagatattcacagtgcaaaagtagttggtaaggtcaagaggatgctgtatcatatgggcttcaccttgaacgacaagaagaccgtgttcatcaatagctcccagcagcagcgggtgaccgggatagtggttaacgaaaaacctaccctgagtcgctcccaaaaaaggacgctgcggcaggaggtatattattgtcagaaatacggcgccgctgagtcaatcaatagaaaaggtctggatatctcacctgataagtatctccatagcctcttagggaggatcgcctttgctctgcaaattgagccagacaattctgagatgcgcgaatacttcgagactgtgaagaacctgatttga

SEQ ID NO: 9554 - RNA, 957 nt, synthetic construct
  source 1..957: mol_type = other RNA
atggacagcgacgtcatctctattgctgagaaccttggtactacagccgcaaaactatacatgcttagcaataactactcccctaagaataaacgacacggttcacggtatgctaactatcataaggttacgatccagaagcctggcagccataagagtcgcactctgcatgtcccgaacggattcctgaagatgatccaacggaggattctggacaaatacctgtacacccttgaggtgtcagaattttcgaccgcttacagaaagggtacaaatttactggataacgcactccctcacgtggggaaggagtgcgtgctcaaactggatattagcgacttttttggctccatcgatgacgacgccgtatacatggccatgaaaggcttgggattgtctgtccctgccactgcactgctgacccatctgtgtacatatcacggaatactgccacaaggggctccaactagtccctatattgcgaacttagtgatgagacactttgacggaaagttgggcaagttctgcatctccaggaatattgcgtatacccgctattgcgatgatatgacattctctgggtccagggaggatatactacgtgccaagctgccaggcaaagtgaaggcaatgctcgctgcccggaatttcatcttgaatgactcaaaaaccgtccttgtgtacgcctccaggcagcagcgcgttaccggaatcgtagtcaatgaaaagaccacagtgcccaggagctctcgacgtgaaataagacagcaggtgtattactgtagaaaatttggggcccaggattgtattcgccggaaggggctcgatattacacccgaaaagtacttaagtggtctgctgggccggatcactttcgcactccaaaccgaccccgagaacaaacagatgcaggaacacttcagaactgttcgagagatgatcggcaaactcacgtga

SEQ ID NO: 9555 - RNA, 954 nt, synthetic construct
  source 1..954: mol_type = other RNA
atgacagactctgacgtactgaaaattgccagcgagatagagatcagtgtcaacaagctgtatatgttgtccaacaacaattcacctagacacaagtcgcggaagaagaaacaccggaattatcatactgtcatcatccatcgcggccgggggcacagaaatcgtattctgtccgtcccaaatactctcctgaaactcgtgcagcgcaagatcctagactgtttcctgtatcagctggaaaccagtgagtactcgactgcctattgcaaaggtaaatctctgttggacaacgcctcaccgcacattagaaaggaatgcgttctgaaacttgacattagtcacttttttgactccattacagatgatagcgtctatctggttttcaaacagttcggcttatccgtgcctgctacctccctcttgacacatttgtgtacatacaagggtaagttaccacagggagcgcccacttccccttatatagcaaatctggtcatgaagaacttcgataaaaaacttgggaagtggtgcaaggagagaaatatcacctacactcggtattgcgatgatatgacgttttcaggagataagacctcagtgcgaaaaaacaagataatcgtgaaagtgaaggcaatgctcggcagtatggacatgaagttaaacgacaagaagaccatctttatatccagcagccaacagcaaagggtgacgggaattgtggtgaatgaaaaagctgccatcccacgtgagatgaggaggtctattaggcaggaagtatactactgtaccaaattcgggatctctgatagcctgcagcagcaacgcctcgacatttctcccgataaatacctacatagcctgcttggccgaatcagcttcgcactccagatcgatccctacaattctgagattcaaaagtactttgacacagttaagcagcttatgaacgcttga

SEQ ID NO: 9556 - RNA, 954 nt, synthetic construct
  source 1..954: mol_type = other RNA
atgatcgataaagacgtgctccaaataagcgagacgctgggcgttcccgtcgggaaactgtacatgttaagcaacgactacatcccccgaaaaaagtcccgcaagtccaaatacaacaactatcataccgttgtgattcacagggggagaggacacaagaacagagtcctatcagtcccaaataatttcctgaaaatggtgcagaggcgcttactggagagatacctgtatcgcttagatgtgtctgaatgctccacagcctacagtaagggcaaaagcctcctggacaacgcctctccgcacgtgggcaaagagtgcgttttgaaactcgacatctctcattttttcgattcgatcgatgacgacatggtatacatgattatgaagcagttcggccttagtgatcccgccaccgcactacttacaaatctctgtgttcacaattgtaagctgcctcagggtgctccaacgtcaccttatatagcgaacctggtgatgactcattttgatgaaaagctgggtgcatggtgctccgagcggtctatcgcctacacacgttattgcgatgacatgaccttctccgggacaaaggaggctgtgaaaagcagtcacatcatccgcaaggtaaagcggatgttgtacaggatgggatttgaacttaacgagaagaagaccgtgttcatttcaagttctcagcagcaacgggtgactggcatcgtggtaaatgagcgtccacagttgactagggagatgagaaggtcaattcgacaggaagtctactattgtaccaaatatggagtgaaggaaagcttgcagcaccggggactcgatataagcgaacaaaagtatcttcatagcctgctcgggcagatttcctttgctctgcaaattgaccctcagaatgaggacatgagacggtactttgacaccgtcaaaaacctgatgaatacttga

SEQ ID NO: 9557 - RNA, 954 nt, synthetic construct
  source 1..954: mol_type = other RNA
atgatcgacgcagacgtaatcaaaatttccgagacactcgatgtcccagttgggaagctgtacatgctcagcaatgaccgctttccgagaaagcgtcgacggaaatcaaaatacaccaactaccacaccgttatcatccataggggacggggacacagaaatcgtaaactcagcgtgccaaacagctttctgaagatggtgcagaggcgaatcttagagcactatctctataacctggacgtgtccgcatttagcacagcatattgcagggggaaatccctactcgataatgcttctcctcatatcggtaaggaatacattgtgaaactagacatttcccactttttcgacaacatagatgacgatatggtattcatgataatgcggcaactggggctgaccatgcccgctacgagcatgctgaccaatctgtgtgttcacaatggtcgccttccccagggtgcgcccacttcaccttacattgctaacctggttatgaagcatttcgacgaaaaattgggggtctggggcgccgaaaataacattacatacacgaggtattgcgacgatatcactctttctggcactaaaaaagccatcgagagtagtcaccctgtgggaaaaatcaggcgaatgctttaccgcattgaattcaaccttaatgagaagaagaccgtgttcgcctcatcttcacagcaacaaaaggtgacaggaatcgtggtcaacgagaagccccagatttctagagagatgcgcagagccatcagacaggaagtgtattattgtgctaagttcggcgtgactgagagtctgaagcggaacggcttgaatataagtgcgaaggagtaccatcattctttactgggccggatttcgtttgccctgcaggtcgatccagccaacgatgaaatgcagagctattttaataccgtcaagaacttgatatccaagtga

SEQ ID NO: 9558 - RNA, 963 nt, synthetic construct
  source 1..963: mol_type = other RNA
atgacagatgtggatgtgatgctgataagcgaggtgttgggcgtgcccgtcagaaagctgtacatgctgagctctgaccgtgtgccaaggcagaagagaggcggtagctattccaattaccatcagagtgtaatctacaccggccggactaaaaaaaaacgtgtcctcaccgtacctaacggattcctcaagcttgtgcagcgcagaatcctcgaccgctgtctgtctaagttaccagttagcgaatacgctacggcttaccgcaaaggtacatccgtgcgagacaacgccctgcttcacaccgggaaggaattcatcataaagctcgacatttcgggctttttcgatagtattaacgatgatgctgtgtacatggtgatgaaacagtttagactgtctcccagagcaacatctctcttgacccacctttgcgttcaccgcggagtcttgccccaaggagcccctacatcaccgtacatcgcaaatctggtcatgaagcattttgacgaacatatcggcgcctggtgtgccgaacggaacattacctattcaaggtattgcgacgacatgactttttccgggagtcgggatgaccttctcgggagccgccttgtgggtaaggtgggacggacgctgtatgcaatgggctttactttaaacagggaaaaaaccgtgttcgccggaagctcccaacggcagactgtaacagggctggttgttaatgagaaagctgatttgcctcgagaaaagcgaagggagctgaggcaggaggtctattattgcctgaagtacggcgtcagagagcacctatcacagagagggtcctcagatgccccactgcggtatattaatggactaatggggcgcctcgcgtaccagttacaacagaggcccgaggacgagaaactgcgtgagtggttcgttcaaatcaaaaagctgagggaaagtgagggcgacaagtga

SEQ ID NO: 9559 - RNA, 954 nt, synthetic construct
  source 1..954: mol_type = other RNA
atgacagatgtagatgtaatgcttgtggccgaagtgctgggggtcccagtgcataggttatatatgctcagtagcgaccgaatgccaagaaacaaacgcggagggagctactccaattatcacaagagtgttatctactcagggagatccaagaagaaacgagtcctgacagtgccgaatggatttctgaagaccgttcagagaagaatcctccaccggtgtctctacaaactgcccgtgagcgagtacgccaccgcatactgtaagggcaggggccccgctgataatgctagtcctcacactggcaaggactacattataaagctggacattagcgatttcttcggcagcattaatgacgatgcagtttacatggtgatgaaacaactgaaactcactccccgcgctacgtcactgctgacccatctgtgcgttcacaacggagtgctgcctcagggcgcgcctacaagtccatacctagctaatttagtgatgaagcactttgatggtcgtatcggatcctggtgcgccgaacgcaatatatcgtatacccgatattccgatgacatgactttctctggtcgccggggagacttgctagcttcaggcctcaccgggagagtcaggaacatgctttattctatgggcttcgagttaaacagcaaaaaaaccgtcttcgcggtctgctctcagcggcaaactgtaacaggcgcagttgtcaacgagaaggtgaacgtgcctagcgaattgaggagaaaattgaggcaggaagtgtactattgtacgcggtttggggtggaggatcatttggcacggtgcggatctggtgaggccccaaaggcctatatctccgggctcctgggtcgcctttcatacgccctgcagcttcgtcccgacgacgaatggctgaggtccggctttgagaaaattaaggccatgtctaacgacatctga

SEQ ID NO: 9560 - RNA, 960 nt, synthetic construct
  source 1..960: mol_type = other RNA
atgacagattctgacgtgctggcggtcagtcatgcccttgatgtgcccgtgggaaagttgtacatgttatcaaacgagaggattccacggcaggccaaatctagtagctccaagtataagaactatcacaccgtggtgatcaaaaaagggttgttccgcaagagccgcaagctgagtgtgcccaatgctctgctcaaaatgacacagcggaggattctgcaccagtatctgtatcgtctggaacttagctcgttctcaactgcctaccagccggggcggagcctaaaagacaatgcatctcctcacctgcatcaggaatacttgataaagctcgatattagcaagtttttcgataacatcgatgcagacatggtgtacagcgtcatgcgccagctcggacttagccaagccgcgaccgtcctgctgatgaggctgtgcgttcataattccgttcttccccagggcgcaccaacctccccatacatcgctaacctagtaatgaaaaggtttgatgagcatttgggcgagtggtgtggtcgccggggcattaactatacccgatattgcgacgacatgaccttctcagggcggaaaacggacctactcacatgtgacctggtccgtaaagtaagacgcatgttacacggtatgggattcgagcttaatgaaaggaagtcactgtttttatcctgtgccaaccaacagaaggtgacaggcatcgtggttaatgagaagttgcaagtccccagggaactgcgaagacaactgcgacaggaggtttacttctgcctcaagtttggacctaaggaatctatgaagagaagaggcctcaaaactagtcctgagcaatacctgcactccctgctggggagaatcgcttttgccctccagatagaccctgataatttggagatgcagggttaccactctcagatcaaagaactcactgctcagctctga

SEQ ID NO: 9561 - RNA, 960 nt, synthetic construct
  source 1..960: mol_type = other RNA
atgactgaccgggacgtcacagagctaagcagagccctgggtgtacctgtgggaaagctgtacatgctgtccaacgaacgaatcccgaggaaaccaaaaaggggatccagcaagtataagaactatcataccgttgtgataaagaaggggctcttcagaaagtcccgcaagttaagcgtgcctaacggccttctcaagatgacccaaagacggatcctgcaccagtacttatatcgattggaggcttctcgatactctacggcttatcagcctggcagatctctccgcgacaacgctagtccccacctcggccaggaataccttatcaaactggacatctcaaagttctttgataacattgacgccgacatggtctataatgtgatgcgtcaactgggactctcacgggcagccgccgttctgctaatgcgtctatgtgtccacaatagtgtcctgccacagggggctccaacttctccttacatagcaaatcttgttatgaaaccctttgacgaacacttaggcgattggtgccgcgcccggggaatcaattatacacgctactgcgatgatatgaccttctcaggtaggaaggcagacttgctgacatgccatttggtgggaaaggtgcggaaaatgctgaggcgcatggggttcgagcttaacgacaaaaagaccctgtttctgtcccgaggcagccagcagaaggtgaccggcattgtagtgaatcagaaactcaaagtcccaagagagctcaggagaactctgaggcaggaggtgtactactgtacaaaattcggggccgaagagagcctcaaacgcaggagacttgatatggcccccgaggaatatctgcggagtttgctggggcgtattgcctttgcgttgcagattgatcccgaagattcggagatgcaaggttaccattcccagatcaaagctctggcagcgcaaaagtga

SEQ ID NO: 9562 - RNA, 963 nt, synthetic construct
  source 1..963: mol_type = other RNA
atggccgacgctgacgttataaagatcgctcagagcttgggggtgagcgtgaagtcgctgtatatgttgagcaataacccgatgcgcctcagggagaaacggagaaaacccaggtacgagaattatcgccgagtagtcattcatcggggtagggggcgcaagaatagagtcctctctgtgccaaacgagtttctcagacgggtgcagcgaggtatcctgaagaaatatctgtacaatctcgaaccgtcagagtacgcgacagcttatcttcctggattcagcgtcagagccaacgctctaccacacactgggaaggaattcatcgttaaaaccgacatactgcacttcttcgattcaatcgatgaggaactggtctggcgtacagtgagagagttggggttttctatccccgccaccacgcttctgactgacctctgcgtatacagggatcggttgcctcaaggcgcccccactagtcctcacctggccaatctcgtgatgcggcgcttcgatgaaaagatcggcgcatggtgcaaggaaaggggaattacctacactcgctactgtgacgatatgacgttttccggacagaaggacgctctctgcggcgttggtctgataggcgaggtccgaaaagaattacaccgcattgggttacagcttaacgatgagaaaacagcctttatcccagcatcccagcaacaaagggtgaccggagcagtggtgaacaaaaagacacgtttatctcgggacgcaaggcgagaactgagacaggccgtgtactattgtgagaaatttggcgttaaggaacatctggcacatcgtaacgatccatccgcccccgaggaatatctgcggtccctgctaggcaaaattagcttcgcgcttcagctggatcctaccgacggcgagatgagagagatgtttaggaagattaagaagctgaccgacggaagtaaatga

SEQ ID NO: 9563 - RNA, 978 nt, synthetic construct
  source 1..978: mol_type = other RNA
atgaatgacatcgacaacgatatcataaggatatccgaggagctcgatgtgccactgaagaagctgtatatgctgagcaataacagaattcggtaccacaaacggaaccagaagaaatgctattccaactatcgcaaagtcatcattcacagaggacgaggtcacaaaaatcgggtacttaaagtgcccaatgagtacctgaaactggtgcagaggcgtatcttggaaagatatctttataccctgtctgtgagtgaatacgccaccgcctactgtaagaacagttccctcttgaagaacgccgagcctcatattgggcagcaaagggtactaaaactcgacgtgtctggctttttcgacagcatcgactttgggaaagtgtacggcgtcatgtgtgagctcgggttttcaaagcccgctaccactctcctaactaacatttgtacctacaattccatcttgccccaaggggcaccgacatcacctcagatctcgaacttaatgatgaaacgtttcgacgaacggatcggaaagtggtgcggtgagcgcggaattaactacaccaggtactgcgatgatatgacattctcaggaggcaaagcggtgctgaatgcaaaggaaataacgcagttggtgtctagggcactgtggaaaatgggcttcaagctgaatatgaaaaagacaactctgattggttcaagccagcgccagcaagttacgggaatcgttgttaatgagaaggctcaaatcagcagcaagcagagacgagagatcagacaggaaatctattattgcgaaaagtatggcgtgtctcagtccctctttttcaagggcgctgacataacaccagaaaagtacattaacagtcttttagggcgcattagcttcgccctgcagattgatcctgccgatgtcaagatgcatgagtactttaaggtggttaagaagcttaaaagtgaggtctgtgtcgaaaaatga

SEQ ID NO: 9564 - RNA, 960 nt, synthetic construct
  source 1..960: mol_type = other RNA
atgaatgaacaggaggtgaattacatgtcctcactttttctgggagcatcaacgttggaaaaacgcgacttgattaacctaatgcccaataaaatcgtacggaaatattatatccggcacgatattccaaaacggacaggcggcattagggtcatatacgagccctcccagaccctgaagactgttcagcgacggatcaaccgctggttcctcaaggacgcccccgtgtccgatttcgcctttgcttatgtgaaaggtagatgcattctggacaacgccaagccacatgtgggcaagccaatactcttaaaactggacatacatcacttcttcgataatatccactttgagagtgtctttgacattttcaagtctctcggattttcggaaaactttgcgaggctcgtggccggactcactacggtggacgactatctccctcagggtgctccaacatcccctgcactgtcaaacctttttctgaaagaattcgatgaggagatcggcgaatactgtagcaagaacgacatcgtctacacccgctacagcgacgatctgactttttctatgtacaggttcaatcccgacttagttaagttcgttagagagaaattaggagcactggggttggagctgaaccgaaagaagtctaaaattatttgcgggccgttgcagaagagagtgaccggcgtggtcgtcaataataagccccaagtacctcgcagctacagacacaagattcgtcaagaaatgtattacatcagcaaatatgggcttgatgctagtctgaataccaggaacataaccgacaaagagaagtatgtttcttgtcttctggggcagatcaacttcgtgctgcagatcaataaaaacgatgatgagttcaagaagtacagggaaatcctgatgacacctagtctagataacctccgtagccaacttacaaatctgttgaactga

SEQ ID NO: 9565 - RNA, 933 nt, synthetic construct
  source 1..933: mol_type = other RNA
atgaatagcaacgagaagaaatttttactgagtctcttttccttcgacaagaacctgagcgacaacgagaagatcaaaaagatgtacataatgtcgaacaggatcgaaaagtactaccatcatttcaccataaagaaaagaaacggtaccgagaggaacatcctgtgtccatatactcaactgaaaaaaatccagctgaacatcttgaatgggttgctttatgataagtctgtctctgtgtttgctaaggcatacattaaaaatagctacttggtggacaatactattatacacagggggcacaaatatatcctcaaactggacatacacaacttcttcgagaatattagctatgtggacatctttaacatctataaggaatacggattctccaatgccctatgtagtctgttagcccatttaactacatataatgactacctgccccagggggctcctacctcaccttatcttagcaacctggtactcagaaactttgactataaagtgggcaagtggtgcgagaaacaaaacattaattatacgcgctactctgatgatatgaccttttcgatgaatgagtacaataaagacttgatccgattcattcggattaatctgttcaagcagggccttgagcttaacaacgagaagatttgcctgatccatcactcccaacagcagaaaatcacaggtattgtggttaatgataagatccaggtcgattccaaatatcggaaaaaaatcagacaggaactctattacatcaataaatacggactggatgaacacctggaacgtaataagacaaaggacaagaagaaatacctcaaaattctctacggaaagatactctttgtcctatcagtggataagaacaacaaggaattcatcaagtacaagatgattgttcgcaagattctgaatggctga

SEQ ID NO: 9566 - RNA, 1053 nt, synthetic construct
  source 1..1053: mol_type = other RNA
atgttgtatctcaacagccaaaaggcactgattgaccttctctatgaggactggtgtgaagatatctccaaggaagtgtttacagccttcatttatcgtatcagtaacaacccccagaacttttatcgacgaaatcagatttaccagaagaatgggaaagttcggaatgtggatgtcccatcccagggcttaaaaataatccagaggatcatactgaagcggatcctggagaacatcccagtccataattcagcaagggcctacattaaaggcagctcactcagagacaatgccggcgcccactgtggtcgcaaatgcgtggtcaaactagacatcaaaaggtttttcgaacacatagacgagaagtccgtttacctcatattccggcgccttagttaccctccggatgtttgcagaatgctgactaaactgtgctgtctcaaaggtcgtctgcccacaggcgctcctacctctccctacttaagcaacctgttcatgaaaaagttcgatcgcgagatgagcttgttttgcgagaataaaaacatctcctacacaaggtacagtgacgacattaccttttcatttgattctttcgacaagaccagactaattcgggtgaccagaaacttcttgggactctatgcaaatggactgcctcttaaccagaagaagatcttcgttgtgacgtctaacaaaaaacagaaagtcaccgggcttgtggtgaatgaaaagacttctgtcgacaaggaattacgcaggaacattaggcaggctgtgtattatatcggaaagtttggagtgtccgatcacatcagacatctgcaaagctcagagtacgggggctgggtaatgttcattgcggatgactggcatttccgcatggtaaagttgcgatacctgagaacactgcaagggcggattagcttctgtctgtgtgccgatccagataatactgagatgaagcagtacgctgaatttatcaaggagatcatcaaaaaggagaaggaagagatttgcatactgaagatgtcgtttcaaaatgctaagaaatga

SEQ ID NO: 9567 - RNA, 921 nt, synthetic construct
  source 1..921: mol_type = other RNA
atgatagtttatcaagaacttgcgagtatcgagagggatctagggttttccgccaagaccctgtacgggctgtcaaatcatctggaaaagcactatcataacgtcttgattcccaagagcgatggatctaaacgtaaactcagcgtgcccgaacttattttgaagcgagtgcagcggagtattgctgaccatattctcgtgcagtttccagtgagcaactacgctaaggcctacaaaatcggcggttctgttcaacacaatgcccagccacacgtgggcaaaaagaaaatcctcaaacttgacattgagggcttctttgatcacatcctctactctcaggtcaaagagaaggttttctgcaaggagaaatttgcagaacccatacgcatcctcttgacaatgctatgctattacaaggagtcattgcctcaaggcgccccgacttcgcctgctattacgaacattattatgtacgacttcgaccagactgtcggtgcattctgtaatgagagagggatcagctatactagatactgcgacgatatgacattctccggagatttcgacgaaggcgaagtgatagccttcgtaaagggggagctgtatcgactggggcttttcctgaagaataggaaaacggtggtcgtccctgcatcaaaacgccagaccgtgacaggcatagtagtgaacgagaaaatcaacctgaccaaggagtataagaaaaagatccgccaggaaatgtactacatccagaaatttggcatcgatgagcacttaacccggctgggagttagtgacaagagaggttacctcctgtccctgatgggaaggatctcttttgtgttacagaccgtaccaaacgactgtgaatttgctaagtatcggaagatgctgacacagggatccttccaaaatgcctga

SEQ ID NO: 9568 - RNA, 912 nt, synthetic construct
  source 1..912: mol_type = other RNA
atgatcgtctacaaagagttggctagtattgaacaggatttagggttcagcgcacgaaccctgtacggcctctccaaccatctagaaaagcactatcacaatgtcttcattccaaagagcgacgggtctaaaaggaagttgtcagttcctgacctaattctgaagcgggttcagaagtctatagccgataatatcctggtgcagtttcccgtgtccaggtacgcgaaagcttataaagttgggagcagcgtgcagagaaatgctcaacctcatattggaaaaaagaaactcctgaagctcgacatcgagggattttttgatcacattctgtatagtcaggtgaaagacattgtgttctgtgaagagaagttcgccgagccgattaggatactgctcactatgttatgctattacaaggaatcccttccccaaggggcacctacctccccagccatcacaaatattatcatgttcgacttcgatgaaactgtaggcgctttttgtaacaagaagaacatcgcatatacccgttactgcgatgatatgacgttctcgggagattttgacgaaggtgaggtcattacattcgtgaagaaggagcttttcaaactcggcctgtttctgaagaatagaaagacagtggtactgcccgcctcaaaacggcagactgtcaccggaatcgtggtgaatgagaaactgaacatcaccaaggagtataaacgcaacatccgccaggagatgtactacatacagaaatttggcatggacgaacatcttaataaattaggcatctcagacaagcgaggttacttgctcagtctgaagggtcgcatctctttcgtccttcaaacaataccaaacaatcgggagtttgttgaatatagaaaagtgttgaacgccaacctgctgtga

SEQ ID NO: 9569 - RNA, 1134 nt, synthetic construct
  source 1..1134: mol_type = other RNA
atggctagccgccacctctttacacatgcacagctgatccggtgtacttctcccacaaaggattttctacgcaaacttctgctgaatggcctagtgcccctgagtcggaatgcccaccgatccgccgctaggctcagaaagctgcaccttgccgacttgagactgcgcgtgtctccatgcaagttagtgttgttctacgacccttcgggcaaggaatccgatatgatcgtctataaggagttggccagcatagagcaggacctaggttttcctgcccggacgctgtatggtctgtccaaccatttagagaaacattaccataacgtgttcatccctaagtctgatgggagcaaaaggaagctttcagtacccgacttgattctgaagagggtgcagaaatccatagcagatcacattctttcacaataccccataagcagatacgcaaaggcttataaggtgggaagcaacgtccagagaaatgcgcagccacacgtgggcaaaaagaaaatgctgaagttagacatcgagggctttttcgaccacattctctactctcaagtaaaaaacatcgtcttctacaaggagaaattctcggaacccataagagttctgctgaccatgctgtgctattatcaggaggctctgccacaaggggctccaagtagtccggccattacgaacattatcatgtacgacttcgacgaacggatcggggctttctgcaatgaaaaacacattgcctacacacgctattgtgacgatatgaccttttcaggagagtttgatgagagggaagtgatttcttttgttaaggaagagctctccaagctcggtctgttcctcaaaaatcgtaaaactgcagtgatccctgcctccaagcgtcagaccgttaccggaatcgtcgtcaacgagaaactgaatgtgaccaaggagtacaagaaagcaattcggcaagaaatgtactacatcaagaaatttggggttgatgatcatctcgcccgactcgggattagcgataagcagcactatatccgaagtcttgcgggcaggatcgcctttgtactgcagacaactccgtcagacggcgagttcgcaggatataagaaattccttgctgaatgtagcttgtga

SEQ ID NO: 9570 - RNA, 912 nt, synthetic construct
  source 1..912: mol_type = other RNA
atgatcgtttataaagagctcgctagtatagaacaggacttgggttttagcgctaagactctctatggcctgagcaaccgtttagaaaagcactatcacaccgtctacgtccccaaatcggatggtacaaaacggaaactgtcagtgcctgatctcatcctgaagttggtgcaaaagagtattgcagacaatatactggttcagtatcctatctctagatacgccaaagcctataaggtggggtccaacgttcagaagaacgctcatccccatgtaggcaaaaaaaaactactgaagctggatatcgagggcttttttgaccatattctttactcccaagtcaaggatatcgttttctaccaggagaagtacgcggaaccgattaggattctgctgaccatgctgtgctattatcatgactccttgccccaaggagccccaacatcaccagcaatcacgaatattataatgtacgacttcgacgaaactgtcggagccttttgtgatagcaaaaatattgcttacacgcgctactgcgacgacatgaccttttcaggcgacttttctgagaaggaaatgattggcttcgtaaaaaacgagttgtctaaactggggcttcaccttaaaaagagaaaaacagccgtgataccagcaaccaagtgtcagtgcgtgactgggattgtcgtgaatgagaagatgaatctcacaaaggattacaagaagaaaatccgacaggaaatgtatttcatcaagaagttcggactagatggtcacctcaagaaaatgggagtgagtgacaaagagcagtaccttctgtccttaaaggggcggatcgcctacgtgctgcagaccattcctaacaacgatgagttcactgagtataagaagatcctccacagcatcagggtgtga

SEQ ID NO: 9571 - RNA, 909 nt, synthetic construct
  source 1..909: mol_type = other RNA
atgattatctataaggaactgagtagcatagagaaggtgcttgcctatccagccaaaaccttatatgggttgtctaacaatctcgagaagcattatcacacagtgtttgttcctaagagcgacgggtcgaaacgtaaattatccgtgcctgatctgattctgaaaaacgtgcagcgcagtattgctgatcacattctggcctactaccccattagccggtacgcaaccgcttacaaggtaggcagttctatccagaagaatgcccggccccatgtgaacaagaagaagattctaaaactggatatcgagggctttttcgacaatatactgtattcacgcgttaaggacgtggtcttctacgaagagaaatattcagaaccgataagaatcctcttgactatgctgtgttactaccaagaaagcttgccacagggagctcccacttcccctgccataaccaacatcatcatgtacgactttgatgaaaagatcggggcttactgcacagagaagggtgtttcatatacaaggtattgcgatgatatgactttttccggcgactttgacgaaaaggaggtaatcgccctcgtgacgtctgagcttcagaagctcggtctgttccttaaaaacagaaaaaccgtggtcatcaaaaatacaaaacgacagaccgtgaccggaatcgttgtcaatgagaaaatcaatctggtgaaggagtataagaaaaagattaggcaacagatgtactacattaagaagttcggcattgaatcccacgcggaacatctaggaatcaccgacgtattcggatatttgtctagcctcaaagggcaggtcgcatttgtccttcaaacttgtacgcagaacgcagagttcaaaggctaccaagagttcctgcagaacctgaaatga

SEQ ID NO: 9572 - RNA, 909 nt, synthetic construct
  source 1..909: mol_type = other RNA
atgatagtctataaggagctttgctccattgagaaggacctaggatatcccgcgaaaactctttatgggttatcaaacaggatcgagaagcactaccacactgtatttattccaaagagtgatgggacaaagcggagactatctgtgcccgatctgatcctgaagagcgttcagaggagcatagccgataatatcctggcttactacccgatctcagagtatgccaccgcctataaagtgggctcttctgtgcagcggaatgcaaggccacacgtgaataaaaagaagatactcaagctggacattgagggcttcttcgataacattacttatagtagagtcaaggacatcgtattctacgaggataaattcagcgaacccttgagggtgttacttaccatgttgtgctattatcgagattccctcccacagggagcacctacatcccctgccatcaccaacattatcatgtacgatttcgacgagaagattggcgcctactgctccaaaaacggggtcagttacacacgttactgtgacgacatgacattttctggcgactttaacgagcaggaggttatctcgttggtgaaggaggaactgcgcaagctcggtctgtttctcaaaaatcggaaaaccgctgtgatcgaaagaacgaagcgccagacggtcactggtatagtggtgaacgagaagattaatctcaccaaggaatataaacgaaagattcgccaagaaatccactacatcgaaaaattcggaattgaagggcatgcaaagaaacaggctattaccgatgttgccgaatacctgacaagcctgaaaggcagaatcgcttttgtcctgcaaacttgtcctgacgactcagagtttctgaaatacaaagcgatcgttcatcccctgcattga

SEQ ID NO: 9573 - RNA, 909 nt, synthetic construct
  source 1..909: mol_type = other RNA
atgattgtatatagagagcttaatactctggccacagatctggggtttccactcaaaaccctgtttgcgctgtccaataacatagacaaacactaccataacgctttcattcccaaatcagacggcactaaacggaaactaagtgtgcccgataaaatcctaaaactcgtccagaaaagcatcgccgataacatcctggcttattatcctgtatccaaatatgcatgcgcatatacttacggatcgaatgtgcaaaagaatgcggcaccccatattggcaagaagaagatattaaagctggatattgagggattcttcgacaatatcatatactctcgggtgaaggacattgttttttacaaagagaagttctctgagccagtcagggtcctgctgagcatgctttgttaccaccgagacgccctccctcaaggtgctccaacatctcccgccattaccaatattatcatgtacgacttcgatgagatcatcggctgttattgcaacgaaaagggcatcagttatacccgttattgcgatgatatgaccttcagcggggactttgacgaaaaagaggtgatagtgttggtgaaacaggagctgaagaagctcggtctgtttctgaagaacagaaagacggccgtgatcccgaataccaaaaggcagaccgttactggcattgtcgtgaacgaaaagatcaacttggctaaagaatacaagaagaaaatccgccaggaaatgcattacattacgaagttcggattagatgagcacttgaagaggacaggggagacagacaagaagaaatacctcttgtccataaaggggcgcatcgccttcgttcttcagactacccctaacgacaaagaatttctcgagtacaagtcactgcttacaaaggaaaagtga

SEQ ID NO: 9574 - RNA, 909 nt, synthetic construct
  source 1..909: mol_type = other RNA
atgatagtgtatagggagctcaaatcaattgagcatgatctgggattcagcgctaagacactctatgggcttagcaataatctggacaagcactatcacaacgcctttatacccaagtccgatggtacaaaaagaaaactttcggtcccggatctcatcttaaaaaaggtgcagagaagcattgcagacaacattctagcctactatcccactagtaaatatgcgtgtgcttacgcctacggagccagtgtgcaaaaaaatgccatgcctcacgtgggaaagaagaagatcttaaaactcgacattgaggggttcttcgacaacattatttactctagagttaaggagactgtgtttttcaaagaaaagtttagcgagcctattaggatactgctgtctatgttgtgctactatctggattccttaccacagggtgctcctacaagtccagcgataaccaacatcatcatgtatgacttcgacgaaaagattgggtcttattgcgcagagaaaggcatcgctttcacccgctactgtgatgacatgaccttctcaggggactttaatgaaaaggaaatcatcgagttggtcaagtccgaactgaaaaaattgggcctgtttctcaagaaccgcaagacggccgtggttcccaacaaaaaacgtcagattgttacaggcatcgtagtcaatgagaagatcaacctgaccaaggaatacaaaaagaaaatccggcaggaaatgtactacatcaagaaatttggcctggaggatcatctgcgaaagatcggccaatctgacaagcagcggtatttgctctcacttaagggaaagatcgcatttgtactgcagactattccagataagaatgaattcctggagtacaaagagctactttccaggaaatactga

SEQ ID NO: 9575 - RNA, 906 nt, synthetic construct
  source 1..906: mol_type = other RNA
atgatcgtctacaaagagctgaagacaattgaacatgaactgggcttccctgccaaaacactctacggcctgtccaacaacttggaatcccactatagaaccgtgttcattccaaaacgggacggaaataagcggaagctttctgttccagactctatactgaagatggtgcaaagagccattgcggacaatattttgtcgtattatcctgtatccagctacgctatggcctacagtcccgggtgttccgttcagcgtaatgcatctcatcacatcggcaagaaaaaaatcctgaaactggatatcgagggcttctttgataatattacctacagcagggtcaaagacatcgtctttttcaaggagaagtttagcgagcccattcgcatccttctcaccatgttgtgttattacaaggaaagtctacctcagggggctcccaccagtccagtgatcactaacatcctcatgtatgactttgacgagagggtgggagagtactgcagggagaaacagatttcatacactcgctattgcgatgacatgaccttctcaggcgatttcgacgagaagaaaataatcgcttttgtgaagaacgaacttaaaaagctgggtttatttctgaagaatcgcaagacggcagtggtccccgtgaccaaacgacagacggtgacaggtattgtagtcaatgaaagaatcaacctgactaaggactacaagaaaaaaattcggcaggaaatgtattacatccgaaaattcgggatagatggacaccttaaaaagctagagattacagataagaaggcctatttaaacagcctgaaggggcggatatcattcgttctccaaactatcccgaacgataaggaatttctggagtacaaaaatatcctcaagtgccagtga

SEQ ID NO: 9576 - RNA, 909 nt, synthetic construct
  source 1..909: mol_type = other RNA
atgatcgtttaccatgagttagcatccttacaaaaggatcttggattctcagcaaagaccttgtatgggatttcgaacaatattgctaaacactatcacacagtgctggtcccaaagaaggatggtacgaaacgcaaactctcagtgccagatgtaatgctgaaaagggttcagcgggctatcgccgacaatatcctttctcaatatcctgttagcagatacgccaccgcttacaagccaggagcaagtgtccagaaaaacgctggtaaacacgttgggaagcagaagatcctgaaactggacgtgaaaggcttctttgacaacatattgtactctcaagtgaaggacatcgtcttttacgagaaaaagttttctgagcccattcggatcctgctcagtatgctgtgttactttaatgacagcctcccgcagggagcacccactagtcctgccattgcgaacataattatgtaccagtttgaccagaatgtcggctccttctgcaagcagaacaatgtcacttacaccaggtattgcgatgacatgatcttctccggggactttgatgagagacaaatcgtatccttcgtgacttcagaactgaaaaagctcggcctgtttctaaaagacaagaagacagccgtgattcccaattctaagcgacagatagtgacaggaatcgtggtgaaccaaaaagcgaatgtggccaggcagtataagagcaaaatccgccaggaaatgttcttcataaagaaattcgggatcgatggccatctacagaagacaggcattaacaaccgtcagaaatatcttaacagcctcaagggcagaattgcctttgtactgcagaccttgcctggtgataaggaattcctgaagtacaagaactatctggccaatttgaaatga

SEQ ID NO: 9577 - RNA, 948 nt, synthetic construct
  source 1..948: mol_type = other RNA
atgatcgtttatcatgaggtagcgacagtggctcgcgagttggggattccactcaaaaccctttacggcgtatccaacaatattagcgcacattatcacaaggtcgccctgcccaaaaagaatggcggtacacgtatcctttctgttcccgatcccgtgctgaagaccattcagtgcgccatagcggataccctgcttccactgagtccagtgagccgatacgcgaaagcatataaaccggctgcaagcgtgaaagccaacgcactaccacacgttggcaaaaagaagctcttaaagcttgatatcctccatttctttgattccatcctctactctactgtgaaggagaaggtcttcccagcctcacggtacgccgagcctattcgcatcctgttgaccatgctgtgttatgaacgtgacgccctcccccaaggagccccttcaagtcctgcaataaccaacatcattctcttcgacttcgacgaaaccgtgggagctttctgccacgagaggggcatcgcgtatacgcgctactgtgatgatatgacatttagcggagactttgacgagaaagaggttaccgcatttatagaggctgaactaagaatccgagggttctttttgaaccggtccaaaactgccgtgatcaggcacactagaagacagacagtcacgggaattgtggtcaatgaagctcctgctttaccaagggccaccagacgcgaattaaggcaggctgtgtactactgcaagacttatggggtggccaatcatctggcccggatacagtcatctactagtcccgggaagtatctggagaagttgctgggcaaaatttcgtacgctctgtccgtagacccggatgacgccgacctgcagaaggcacggaagacagtcctcctgctgattggtctggaaaaacacatccccgaccctacacaaccttga

SEQ ID NO: 9578 - RNA, 918 nt, synthetic construct
  source 1..918: mol_type = other RNA
atgatagtctatcgggagctgtcgacactggaaagagatttgggcttctccgcgaaaaccctgtacgctgtttctaactccattgataggcattaccataaggtgactcttcctaagaaaagtggaggcactaggaccctcagtgtgcccgatgagatcctgaagaagatccagagggccatcgccgaaaagctgctcgcttatcacccagtttcacagtatgcgaaagcttacaaacccgccgcaagcgtcaagcgcaacgccatgccacatgtggggaagaagaaactgctcaagctgtacattttgcacttctttgactcagttctctacaacactgtgaaagaccgtgtcttccccgaaacagtcttcagtgagaagctacgcattcttctgagcatgctgtgctactatcgggacgtgttaccacagggtgctcctacgagccccgtgatcaccaatattattctctacgatttcgatgagacaatcggcgacttttgtttgtcacggggcattgcctataccagatattgtgatgacatgactttttccggggactttgacgaaaaagagatcattaaaactgtgcagcaggagctgaatgctcgagggtttcttctgaataggaaaaagaccgcagtggtaccttctagcaagcgtcaagtggtaaccggaatagttgtcaatgagaagcttagcctgagtagatccgcccggcgctcattgagacaagcattgtattattgcaagacatacggtgtaagcgagcacctcgcacactgtggcatccatgatacccctaaacactacctagaatctctgttaggaaaaatagcctacgccctgtctatcgacccggatgactccgaattactgaactgcaaggagacagtgacgcgactccttcaggaatga

SEQ ID NO: 9579 - RNA, 924 nt, synthetic construct
  source 1..924: mol_type = other RNA
atgatcgtgtacactgagctgagatctttggagattgatctcgggattcctatcaaaaccctgtatgccgttagcaacaacattaacgctcactattactctaagagcatccccaagagtgatggtagtcaacgggtgctttctatccctgatgaaccactgaagaagattcagagggcaatctcagagaagctgctagtctacgagccagtgtccatctatgcaaaggcgtacaagcctacatcatccgtgcggaagaacgccgtgtgtcacgtgggcaaagaaaagctcctgaaactcgacatctacaagttctttgacagcattaattacagcctcgttaaggaaaaagtgtttcccagcaataagtactccgaacaaattcggatacttcttagcttactgtgctataaaggagaaccactgcctcagggcgctcccacttcaccagtcatttctaatatcataatgcgtgacttcgatcagactgtaggggagtggtgcaaagagcgcaaaatatcatactctcgatattgtgatgacctgtccttctccggaagttttgatgagacggacgttatcgaattcgtaaccgttaatctgaaatctctaggttgcatcctgaacaagaagaaaacacactgctttaaaggcaaggaaaaaaagaccgtaacaggagtggtcgtgaacgagaaaataaacacacagaagagctatagaaggcagatacgccaggagtttttctactgtcagaagttcggcgtgcaagaacatttgtcaaggattggctcgagtgagaaaccctataattacttgagtagatccttggggcagatcaattacgtcctccagatcaccccggacaataaagagtttctgtcctataaggtccaaattcttgccttactcaaagagcataagtga

SEQ ID NO: 9580 - RNA, 924 nt, synthetic construct
  source 1..924: mol_type = other RNA
atgatcgtgtacaaagagcttcagagcttagagacagatctgggggttactgccaaaaccctgtacgcaacatcgaataatataaatgcccattaccacaacaagtctattcctaaatctgacggatccattcgggtcctgagcattcctgacgaacctctcaagaaaatccagcgagctatttcagaaaaactactagcgtacgaacctgttagtatctatgcaaaagcttacaaaccagctagttcaatcaggaaaaacgccatctgccacgtgggcaaggagaagttgctgaagctggacatctacaacttcttcgattccatcaagtatagcctggtaaaggagaaagtgtttccagcaaagaaatatagtgaacagattagagtcctgctgtctcttttgtgctataagggagaaagcctgccccaaggagcccccacttcaccagtcatctctaacataataatgcgtgactttgatcagacagttggcgagtggtgtgaggaaaggaaaatacggtacactagatactgcgatgacatgagcttctccggtagttttgatgagtctaatgtgatcaagttcgtggaaggggagcttaaatccttaggctttatcctcaatcgacgcaaaacccggtgttttactggggggaacaagaagaccgtgacaggcatcgtggtgaatgagaagattaacaccgagaagagctataggagacaaattcgccaggaggtgttttattgtaagaagttcggtgtccaggagcacttgacccatatgggatcacccgaaaacccgtataattatctgtcccgccttctcggccagattaactacgtactccagataacgcccgataataaagaattcttgaactacaaggtccagattctgaacatcctcaaggacaatcaatga

SEQ ID NO: 9581 - RNA, 936 nt, synthetic construct
  source 1..936: mol_type = other RNA
atggtcgtgtatcgagaactgagcagcatagaagcagatctaggaattccagcaagaaccctgtatcgcttatccaacaatattggcaaacattatagggagaagaaaatacccaagtccgatggaaccgtgcgcctgctttccgtgcccgacgagattctgaaaaaagtgcagaggtcaatcgctgagaagttgttggcgtatgagcctgtttcgctctacgcaaaagcctaccggatcgggggaagtgtaatttcaaatgctgcgcctcacgttggcaaggaaaagattttgaagctggacatctaccacttttttgacagcatcagttattcttccgtgaaggagaaatgctttccggccgaaaaatacgccgagaaaataagaatcctgctggcaatgctttgttatcacggcgagtctctgccacagggtgcccctacgagtccaatcattagcaacattatcctcagggactttgatatcgaagttgggagatggtgcagcgaacggaaaattttttattcacgatactgtgacgacatgactttcagttgtgacggggactttgatggggccgaggtgacagctttcgtcaaacagaagctaggcgtcctcggattcatcctgaatgatcggaagacccggctccttaagaagggtgataagaagaccgtgacagggatcgtcgtgtccgagaagctgaacgcttcaaaggagtaccgcagaactgttagggcagaaatacattactgccagaagttcggcgtggaaggccatttgtctcgtacagccaacgccctggccgaaaatccaagcaaataccttgcttctttaatgggtaaagtaaactacgtcctccaaattactcccgaaaataaagagttcctcgagtataaggagtacctgtctgatatcatcaaggagttcaaatga

SEQ ID NO: 9582 - RNA, 921 nt, synthetic construct
  source 1..921: mol_type = other RNA
atgattgtttacaaagagcttaagagcattgagaaagaacttggcttctcatccaaggcactgtacggactctctaacaatctgggtaagcattatcataaggtcgaggtccccaaaaaatcagggggaactagaaccctctccattcctgatgaagccctcaagaaggtgcagcgcgccatcgtacagtccttgttagaatttgaaaacgtgagtttccacgccaaggcttacaaatataactctagcatcacgaagaatgcatctcctcacgtggggaaagagaagatactcaaactggacatttaccggtttttcgataacatctcatatagtgcagtgaaggagaaagttttcccagcggaaaaatacagtgagcagattcgcatcctgctctcgatgttgtgctattataacgaagctttaccccaaggcgccccaacaagcccgataatcaccaatatactaatgcgggaattcgacaatgtgctgggagaatggtgcaaaaagaggaatgtggactacacacggtattgtgatgatatgacttttagcggcagctttgacgaaaaagagattattgactacgtcatccatctgctatgcggctttggtctgaggttgaatgacaaaaaaaccaaggtgttcaccagcagtcagaaacagatcgttacaggcatcgtggtgaacaagaaaatgaatgtctcaaaggcttacaagcgtgaaattaggaaggaagtgtacttttgtaagaaatttggggtcgagaaccacatagagcacgaggagatacaactgtcccccgagagatatctgaattctctgcttgggcgaattaacttcgttctgcaggtatgtaagaacgataaagagttcaaggagtacaagaagatcatctccaagatcatcaagaacaaatga

SEQ ID NO: 9583 - RNA, 924 nt, synthetic construct
  source 1..924: mol_type = other RNA
atgattgtgtacagagaactaagcaccctcagcagggatctcggaatacctgccaaaaccctgtatgctgtgtctaatgcccaagataaacactaccggcttatcaaaattcccaagaaggacgggactgacagaacgcttagtatacccgatgagattcttaagaaaatccaacgtgctattagcgaacagctgctgtctagagaacccatctctaggtacgctactgcatatcggcccgccagcggtatcttaaagaatgcactgcctcatgtgggcaaagcgaaattgttaaaacttgacatcttgcacttcttcgattcaatcttgtacagtgccgtgaaggagcgcgcatttccagccgacaggtactcagagtcgaacagaattctgctctccatgctgtgttactaccgggacacactaccacaaggggctcctagttcacctgccattacaaacataatcatgagagactttgacgaagctgttggcgcatggtgcgcggagcgaaagatcgcctataccaggtattgtgacgatatgagcttctccggcgatttcgacgaggaggaggtaatcgaatacatagccgcacgcctgaaggaactgggtttcaccctcaaccgtcgaaagactgtagtgaagaccaactcccagcagcagacagtcactggaatcgtcgtgaatcaaaaaccgaacattagcgccaagtacaaacgcgagattcggcaggccgtcttttattgcacgaaatttggggttacagaacatcagaagcagatcggctctagtcagtccccagtcgcttatctccaggctctgttgggaaagattaactatgttctgcaggtgtgcccaaatgatacctcatttgccgcatacaggaagtccgtgctcgcgctgctggagaagaatcgctga

SEQ ID NO: 9584 - RNA, 924 nt, synthetic construct
  source 1..924: mol_type = other RNA
atgataacgtacaaagaacttgctaccgtggagggggaactgggcatacctctgaagacactatacagtgtgtcaaacaatgtaaatgcgcactaccgcagggtgctgatccccaagaaggatggaacctaccgcaatctctctgtgccagacgctcctctgaagcggattcagagagcgattaacgagaagctgctagtctatgagccgatcagccgttacgcaacagcatataggattgcatccgggatccggaataacgcccttccccacattggtatgcctaaggtgctcaaactggatatcaagggatttttcgattccgtaacctatagtctcgtcaaggaacgcgtctttagaaaagagaagtatagcgaacctgtgagagtcctgttgacaattttgtgctactataaagacgtgcttccccagggagccccaacttcccccgttatcactaacatcgtaatgcgagagttcgacgaggtaatcggcgaatggtgtggtaagaaaggaatagcttatacccgttactgcgacgacatgacattctcaggggactttgacgagaaagaagtcaaggctttcgtcgccggggagcttaagaaacaaggcttttttctgaacgcccagaagaccgttgttgcaactgctgccaaacggcagacagttacgggcgttgtggtgaacaaaaaagccaacgtgagctctgaataccgacgcgagatcaggaaagaggtgtttttctgtcaaaaatatggagtggcagagcatattgaaaggctcggcttagatgttgataccaagaactatctccggaagctgttaggcagaatcaattacgtgttgcagatttcgccagatgacggtgtcttccaggggtacaagaatgccgtgactgaaatgctggccaatgagaggtga

SEQ ID NO: 9585 - RNA, 924 nt, synthetic construct
  source 1..924: mol_type = other RNA
atgattgtgtataaagaactgtccagtgtggaagcggacttaggatttcccgccaaaaccctttacggtctaagcaataatctcagtgcacactaccgggaggtgaaacttcctaagagggacggcagctttcgaaccttaaatgtgccggatgagatcttgagccgtgtgcagagagccatagctgacaaactgctctcctacgagccaatttcgacttatgccacagcctatcgaatcgcggggtctgtatgcaaaaacgccgttccacacgtgggcaaggcaaagctcttgaagctggacatcgcacatttcttcgattcagttttgtattcaaccgtgaaggagaacgcattccctaaggagaaatatgctgagaagatcagggtgctgctcgctatgttgtgctattgcggagaggtactgccccaaggcgctccctcctctcctatgatcacaaacattattatgcgagacttcgacgaagccgttggtaagcggtgtcgggccctgggagtctcctatacaagatactgtgatgacatgactttttcaggggatttcgatgaaggagagatcgtgcctttcatcagagacgagcttcgcaagcgggggttctttctaaatgaaaagaagaccgcagtggtccccttttgtcgtcggcaaattgtcacgggcgtagtggtgaacgaaaaactgaacattagtgcggattacaagagaaaaattaggcaggaagtcttctttctccgcaaatttggcgttgctgatcatctgaggcgcactgcctctccattttctgaaaagcagtacctgatgagactgctggggcgcatcaattacgtcctccagataagcccagacgacgccaaattccttgattacaaagaggctgtcatcaggatactgaaggaggccaagtga

SEQ ID NO: 9586 - RNA, 987 nt, synthetic construct
  source 1..987: mol_type = other RNA
atgtgtgggaccacgttccgcccaatagccatacaaatgtactgcctcgcagtcgtttacgtttcgatgattgtgtacactgagctaaagtcagtggagcaggaccttggaatcagtgccaaaacccttttctccgtgagcaactccctgagctctcattataagagggtcaagatccctaagaagaacggctcctttcgcgaattatctgtgccggatgaagttctcaaaaaaatccagagggccatcgtccagaaaattctcgtgtacgaaccaatttcaaagtacgcccaagcttacaagacaggagctagcgtgcagagaaatgcatcgcaccacgtgggcaaaaagaaaatattgaagctggacatcaagcacttctttgactccattctgtactctactgtcaaagacaaatgctttcccgccgagcggttcagtgaacctattagaatcctgctctccatgctgtgctataatcgcgaggctttaccccagggcgcacccagttcacctatcataactaacatcattatgcgtgacttcgatgaaaaagtcggtgatttctgtcgagagcggaatatcatttatacgagatactgtgacgacatgaccttttcaggggactttgatgaaaagccgattattgagtttgtcaaggcggctctcttcgagtacgggtatctgttgaattctaagaaaacaaccgtggttagcagctctgggaggcaaatcgtgacaggagtagtcgttaacgaaaaaatgacagtgcccgccgagtataaggcgaaaattcggcaggaggtgtatttctgcaaaaagttcggcgtagagaaccatctagagcacatccattatagtaaggataccaaggcatacctgcagagcctgttgggtcgagtgagctttgtactgcagactgaaccaggcgatcaagagtttctggaatacaagacctatcttaccgagatcctgtcccagatctga

SEQ ID NO: 9587 - RNA, 921 nt, synthetic construct
  source 1..921: mol_type = other RNA
atgattgtgtacactgagctcaaatcagttgaacgcgacctggggattccattaaagaccctgttctccgtgagcaacaacttgagcgcccattacaggacagttaaaattcccaagaaaaatggctctttcagggagctccacgtcccagatgaggtgctgaagaagatccagagagcaatcgctaagcggattctggcttacgaagcaatcagcacatatgcacaggcgtatcgcttcggagccagcgtccaaaggaacgcatcccatcacgtaggaaaaaagaaaatcctgaagcttgacatcaagcacttctttgactctattatctacagtaccgtgaaggagaagtgttttccctctgaacggttctccgaacgcgtccgggtgttactctcgatgttgtgctattatagagatgctttgccgcaaggagccccttcaagccccgtgattaccaacataataatgcgagactttgatgagagagtgggtgccttctgtaaagagcggaacatatcatattccagatattgcgatgacctgacgttctccggggatttcgatgagaaacctgtcgtggaatttgtaaagacagagctgtttcagcgtgggtacctgctcaaccatcagaaaacgactgttgccagcagttctcagcgccagcttgtgaccggcgtcgtggtcaatgaaaatatgactgtaccctgtgagtacaaggccaaaatcagacaagagatgtacttttgccagaaacatggtattgaagaccacctgcaccacatccagtatacaggcgaggttcgtgcttacgtgagttcacttctaggcagggtgagtttcgttctccagactgaacctgagaataagaccttcatggaatacaaggcgtttctaatcaatgccctgcgaaggttttga

SEQ ID NO: 9588 - RNA, 924 nt, synthetic construct
  source 1..924: mol_type = other RNA
atgattgtctacacagagttgaagtcgatagagaaagatcttggcatacccctgaagacactcttctccgtgtcaaataacctatctagccactacaagaaagtcaaaatcgccaaaaagaatgggggtactagagagctgagagtcccagattacatcctcaaaaaaattcagcgcgcgatatgcgacacctttctggtgtatgaacccatcagtaagtatgctcaggcatacaggttcggcagtagcgttcagaaaaacgccagctaccacattaacatgaaaaagatcctaaagctggacataaagcatttctttgactccatcctttacaccacagtgaaagataagtgctttcctagtgatcggttctccgaacccattaggattctcctttccgtgttatgctactatggcgatgctctgccacaaggtgccccaagctcaccggtaatcaccaacattataatgaaggacttcgacattgaagtggggagtttctgtgagaagcggaacatctcatatactcgatactgcgatgacatgaccttttctggcgattttgacgaaaaggagatcatctcctttgttaaagagaaactgttcagctgtgggtatctcatcaacaacaagaaaaccacagtcgttaaggagggcaaatgtcaactggtgacaggaattgtagtgaataagaggctctcaaccccttctgaatacaaagctaagattcgccaggaaatctatttcggaacgaagtacggatttgagaaccacttgaatcatactggaaatcagacggagctgaagtcctatatcgaatctttgttagggcgtgtgtctttcgccctgcagactgagcctgacaataatgaatttaagaagtacaaggcacagctgatcaaatataagaaaagcattagctga

SEQ ID NO: 9589 - RNA, 924 nt, synthetic construct
  source 1..924: mol_type = other RNA
atgatcgtataccgcgaattgtccagcgttgaatccgatctggggttctcttccagggagctctatgcactatctaattcaatagaccgacagtatcgcgccgtgaaacttccaaagagtgacggcacataccggaccctgtctgtgccctcacagaagctgaaagcggtccaaagggccattacagaaaagatcctggtccatatgcccgtgtcccgatacgcaaccgcctatcgctacggggcttccgttcagagaaacgcaagggtgcacatcggcaaagagaaggtgttaaagctggacatttaccacttttttgacagcatacggtaccaacaacttaaagataaggtctttacggccgacagattctcagagtcaatccgtattctgttgtcgatgctgtgttattacagagatgtactcccgcagggggctcctactagcccagctgttagtaacattatcatgcgtgattttgacgataccgttggagctttctgcgcggagcggggtctagcttatacaagatactgcgatgacatgactttttctggatcgttcgactatgccgagattatcaagttcataaagaacgagcttcacaagaatggcttcatcctcaacggtaaaaaaactaagctggtgagctctgccaatagacagacagtcaccggaatggtggtgaataagaaactcagtacccctagtgattacaggcggggcattcgcagggaggtctatttcattaagaaatatggcgctgccgaacatctgaaacatatcgagagcaatctgagccccaaacagtacctgcagtccttgcttgggaaaattgcgtttgcactcgaagccgcacctttcgacaagcacttagtggaagccaaaaacgccataatcagcgagatcaagaaggaaccatga

SEQ ID NO: 9590 - RNA, 945 nt, synthetic construct
  source 1..945: mol_type = other RNA
atgtactgttcgggagaaaaaatgatcgtgtatagagagctttcctctgtggaggccgatctcgacttctcagcaaaaactctgtactccttaactaacgatattgagaagcattacagacgagtggagattcccaagcatgacggtactttcagggtcctgtacgtgcctgacacgctgctgaagacagtgcagagacggatcgcgaatcgcattctgcttctggaaccaatcagcaggtacgctaccgcttataagcgagggtcttttataaggaaaaatgcttcctgccatgtgggaaaggaaacagtattgaagctcgacataaaacacttcttcgacagtatcctatactcacacgttaaagacaaagtctttaccgagaagcggttcagtgagcccattagggtcctgctgacaatgctgtgttactacaaggatcggttaccgcaaggcgccccaacttctcctgtgatcaccaacatcgttatgcgcgactttgacgagacagtagggaattggtgtaaccaacgcggtatcacgtatacaagatactgcgatgacatgactttctctggctcctttgatgtcaacgaggtcaaaatctttgttaagtccgaattgcggaaaattgggttctttctgaatgagaagaagaccgtcagcgccaagggaacccagcggcagatcgttaccggcattgtcgttaacgagaaacttaacgtgagcagcgaatatcgtaagaaactcagacaggaagtgtactattgccgcaagtacggcgtggaagaacacctaaagaggataggcaatagcgtggatgccaaaaaatatctgcagggactcttggggcgtataagttatgtacttgaagtgcgatgcgatgataagtcattcctcgcagacaaagagtttattgcaggtttgatcaagcagtatgagtga

SEQ ID NO: 9591 - RNA, 930 nt, synthetic construct
  source 1..930: mol_type = other RNA
atgaagatagtttacaaagagctgtcctctatcgaggctgatcttgggtattctgcccatatgttatacgctctctcaaatagtatagccaaacactaccgcagtgtaagtattccgaagcacgacggaactagcagaaccctatccattcctgatgcccccctgaaggcagtgcagcgaagaatagccagcgtcatccttccattgctcccaattagccagtatgcaaccgcctatagatgtcgagggggcattgtcgcaaacgcgagtccccacagagggaaagataagatactcaagctggacatctaccgattcttcgactccatcatgtattccgctgtcaaagaccgcgtgtttacacgggaccggttttccgagccaatccgcgtattgctgagcatcctgtgttactacgacgacagactgccccagggagcacctacatcacctgccatctcaaatattatcatgagggaattcgacgacgccgtgggaaagtggtgctctagacggggtattacctacacgcggtattgcgatgatatgactttctctggcgattttaacgcggctagggtggttgcattcgtgaggcgccgactgaagaagtacggcttcctcctgaatgacaagaaaacccatgttgctagatattttaacaagcaggtcgtgactggtatcgtcgtgaaccgtaagctgaatgtgccttcaagctaccgtaggaaaattaggcaagagatgtacttttgccgcaaacacggcattgaggaacacctaaaattcatccatgaccccacaccgccccaagagtacatcaggcggcttctcgggcgcgtgggctatgttttgagcgtgtcgccagatgatggagaattccgtaaatatcgggattttttacggagggccctggctcaggaatctgaatga

SEQ ID NO: 9592 - RNA, 921 nt, synthetic construct
  source 1..921: mol_type = other RNA
atgatcgtataccgggaactcggctctttggagagcgacctgggcttctcactaaaaactctgtatgcactgtccaataacatcaagaagcactacgtgtcggttgagatacccaagagaaatgggggggtcaggtgcttaagcgtcccggacgagatcctcaagcgcgtgcaacgccgaatcacagaggtgattctaagtggacagagggtttcaaaatacgcaaccgcatatagatacggcgccggtatcctgaaaaacgcctccgagcacgtggggaagccaaaagtgcttaaactggatatcctccatttcttcgacagcatatcctacagtgaagtcaaagagaatgtatttgtgaaggagcgttttagcgaatctgttcgcatccttcttaccatgttgtgctattgcggcgacagattgccacagggagctccttcctcacctgccatcacaaacattgtgatgagggatttcgacgaaaaggtcggagcctggtgtaaagagcaaggaattgcctatactcgctattgtgacgatatgacgttcagtggcgattttgatgaacggtccatcattgcttttgtgaaacaggagctcctgaaaaagcacctggtactgaactacggtaagacgtctgtgacaacccccggcaaaaggcagattgtgaccgggatagttgtcaatcagaagcctaacataagcgccgactatcggagaaagctgaggcaggagatttattactgtaagaagtacggtctggaggagcatgcgaatcgtattggagaagacgatacccaaaaatacctgctgggtttgcttgggagagtctcttacgctctccaggtgcggcccgatgacgttgctctcaaggaagtgaagcggtggttaacacagactatcaacgaacgaggctga

SEQ ID NO: 9593 - RNA, 921 nt, synthetic construct
  source 1..921: mol_type = other RNA
atgattgtgtacaaagagctgaaatctcttgagtccgatttaggattttctctcaagctgctatacgccctgagcaacaacattaagaagcattactcaaccgtcgaaataccaaagcggagtgggggagtcaggaggctgtccgtccctgacgaaattctgaaaggcgtgcaaagaaggatcgccgttgttatcctgtcaggacagagcgtctctaggtatgcctccgcctatcgttacggtgcatcggtggttaagaatgcggcagagcacgtaggccgaaagaaggtgcttaaattggatattctgcacttcttcgattctatctcttatagcgctgtcaaggagaatgcattccctagcgaacgattctcagaaccggttaggatcttgcttaccctgctgtgctattacggagatgtccttccccagggcgcgccaagttcccctgtaatcacaaacattgtgatgcgcgatttcgacgaaacggtaggcgcctggtgcgaagagaaaggcatatcctatacacgctattgcgacgacatgacatttagtggggactttgatgaaaaggctgtgatcgactttgtcaaagaagagttgcgcaaaaaacggctcctgctcaactacaagaagacctcactaactaatagaggggggagacaaactgtgaccggtatcgtggtgaacgagaagcccaatatcactagtgagtaccggcgaaaactgcgccaggaagtgtactattgtcagaaatacggcgtgagcgagcatacaaaacggattggtgaggcagatgctaagaaatacttgagagggctcctgggacgggtgagctatgcccttcagataagacccgacgacgcctggttagttaaggctaagtgtgagctgctcaagctcattaaggagcgtcactga

SEQ ID NO: 9594 - RNA, 921 nt, synthetic construct
  source 1..921: mol_type = other RNA
atgattgtgtatagagagctgtcaagcctttcaaaggacttgggagtgagcaagagcagcctgtacaaactgtcaaattctatcaacaagaactaccacaaggtcgaaatcccaaagaagaacgggggcaccagagtgttgtctgttccctccgagaacctgaaggaagtacagaggaagattacaaaagtgatcctatcgaaggagacagtgagtattcacaccactgcctatcgctatggtgcatccaccgcatataatgctagccaccacgtcaataaggacgttgtactcaaattggacatccttcacttctttgattccatcctatacagcgacgttaaagacaaggtcttccccgctgaaaagtacagtgagcaaattcgtactctgcttgcgatactgtgttaccataaagattctttaccccagggagcaccttcatccccggccataacgaatatcatcatgcgggattttgataatacagtgggcgaatggtgcaggaagaaaaacattgcctacactagatattgcgatgacatgaccttcagtggaaattttgacgccaaagaggtcatcgggtttataaagatccagctgagggagaacggcttcctcctcaacaccgccaaaacacgagtaattcggcgcaacaggagtcaaaccgtcacgggcatcgtggtgaacgagaaaataaatattcctgctgactacaaacggaaacttagacaggagttatactattgtaagaagttcggggtgaattctcatatggctcgcatggatttcgacggaaacgaaatgtcttatattaaccgactgctgggtaagattaattacgttctgtccgtgactccacatgataaacagatgctggattacaaaaagtggctcatcaatgagctcgaatatttttga

SEQ ID NO: 9595 - RNA, 909 nt, synthetic construct
  source 1..909: mol_type = other RNA
atgatcgtgtatagagaactcagctccctggagcaagacttaggtattaacgctaagatattgtacgccgttagcaactctatcaataagcactatagggaaacgtcactgcctaagaagagtggcggattcagataccttagcgtacctgacaaaatcctaaaatctatccagagacagattgctgaagtgctgctgatacacatgccaatttcgaaatacgctaaagcctaccgttttggtagtagcacactccgtaacgccaaacatcatgttggaaaacaggtagtgctgaaacttgatatcctcaggtttttcgattcaattcggtactccacagtgaaggacaaggtcttccccaaggaaatttacgccgagccactcaggattctgctgaccatgttatgttattataaggaaggactccctcagggcgcaccctcttcacctccgatcactaatatcatattgtacgagtttgacgagcagatagggcagtggtgccgcgagagagagatcagttatacacggtattgtgatgacatggcgttttccggcgatttcgaccccgctgaagtgatcaggtttgtgcgggtccaacttaagaagatgggctttttactgaatgaacagaagaccagaattcagcgcctgggacagcaacaaactgtgaccgggatcgtcgttaacaaaaagctctccgcgcccgccgattatcgcaggaagttgcgacaggagctgtactactgccggaagttcgggatccgcgagcatttgcagaagctagggctggagattaacgaacacacctatcgaatgcaactgctgggcaaagtgaattacgtcctccagttctgcccagatgaccaggagcttaaagccgcaaaaaagtggctgcaggcaaaatga

SEQ ID NO: 9596 - RNA, 915 nt, synthetic construct
  source 1..915: mol_type = other RNA
atgatcgtttatcgcgagctgtctagccttgagcaggatcttggtatcagctcaaagactttgtacgccgtttccaataacatatctaagcattaccaccgggccaaactccccaagaagtctgggggttaccgcaatctgtccgtgcctgacgagatcctgaaggccattcaacggcagattagcgaggtgttgctgattcacatgccagtgtcaaggtacgctaaagcctatagatttgggtcctcgacactaaggaacgcaaagcatcacgtgggaaagcaggtggtcttaaagctcgacattctgcactttttcgacagcatacgttacagtaccgtaaaagacatggtgtttcccgaagaaatttacgccgagccactgcgtatcctgctgacgatgctgtgttaccataaggatgaccttcctcagggagcacctagtagccctgctatcacaaacatcatactctacgagtttgacgaggtgattggacagtggtgtagagaaagaggcatcgcgtataccagatactgcgacgatatcaccttcagtggggacttcgatccggctgaggtcataaggttcgttcgcctggaattgaaagaactgggcttcctgctgaacgaacagaaaactcgcattcaaagaccaggacaacagcagtcagttacaggcatcgtcgtaaatgagaaactctctatccccgcagtgtatcgacggaaactcaggcaggaattatattactgcaggaagtttggcatccaggagcatctccaaaaaattggcctagaaactccagaggatacatatcggatgcagctgctcgggaaggtgaattatgtccttcaggtccaccccgatgataaggaaatgttggaggctcgaaagtggttacaacagtccaccaaatga

SEQ ID NO: 9597 - RNA, 915 nt, synthetic construct
  source 1..915: mol_type = other RNA
atgattgtctacagggaactttcgagcttggagcaggatctgggaatcagcgctaagactttatatgcggtcagcaataatctgaacaagcactaccgaaaggcaaagctccctaagaaaaatggggggttccgcaatttatcagtgcctgacgaagctctgaaaactattcagaagaggatagccgaggtgctgctgatccacatgcccattagtaaatatgccaaagcatacaggttcgggggatccacactccggaacgctaagcaccatgtgggtaagcaaatcgtgctcaagctggatatcttgcactttttcgactccatcagatactccacggtaaaggacgtggtttttccggagaaaatttatgctgagcctcttaggatcctgttgaccatgctatgttaccataaagacgcgcttccccaaggcgccccaagttctcctgccattaccaacatcatcctctacgagttcgacgagcagataggcggctggtgtcgaaaccagggtatcgcatatacccgttattgcgatgatatgacttttagcggcgattttgatccctcagctcttatacagtttgttcgcctcgagctaaagaagatgggcttcctgctgaatgaacaaaaaacaagaatccagcggtctgggcaacagcagaccgttacaggcatcgtggtaaacgaaaaactctctattcccgccgactaccgcaggaaactgcggcaagaactctactattgcagaaaattcggaattagagaacatctgcagaagataggtctggacatcccagaggatgcctaccggatgcagctgttaggaaagattaattacgtcttgcagctgtatccagatgaccgtgacatgattgccgcaaagaaccagattatcgccaaatcccgctga

SEQ ID NO: 9598 - RNA, 915 nt, synthetic construct
  source 1..915: mol_type = other RNA
atgatcgtctatcgggaactcagttcactcgaacaggatctgggcatttcatctaagaccctttacgctgtgagcaaccacattaacaagcactaccacaaggcaacactgccgaaaaaatccggcggatttcgaactctgagcgtgcctgacgaagcgctgaaatcgatccagagaagaattgtcgaggtactgttaatctccatgcccgtcagcaggtatgcaatggcatacaggtacggctcatcaaccctgcagaatgctaagcatcatgtggggaagcagctggtgttgaagctggacatctttaggtttttcgacagcattcggtatagtacggtgaaggacaaggtgttcccagaagagatttacgccgaatctttgcgtattcttctcacaatgctttgctatcacaaagacgcactgccacaaggagcgcccagctctccagctataaccaacatcattttgtacgagttcgatgagagagttggccagtggtgccgagatcagggtatcgcctacaccagatacagtgatgacatgacactatccgggtcctttgaccccgctgaagttatccggttcgtacgtctcgagcttaagaaaatggggttcctgctgaatgaacagaagactcgcatccaacggcccgggcagcaacagtccgtcactggaatcgtggtgaatgagaggttatctatccctgccgattatcgcaggaaattacagcagcagctctactattgtaaaaagtttggcgttcagtctcatctaacaaaaataggtctggaggtcagcgaggccacctatcgcatgcagctcttgggaaaaataaattacgtgctgcagctctcccctaacgatcgcgacatgctggaggccagacggtggcttcaacaaagtgccgagtga

SEQ ID NO: 9599 - RNA, 912 nt, synthetic construct
  source 1..912: mol_type = other RNA
atgatcgtgtacagggagttgtcgagcctggaacaggatctcggcttttcagcccgcactctgtatgcagtatcaaacaacttgacaaagcactaccacgagacaaaactccctaagaagtccggcggattcagaaagctcagcgtccccgatcaagttctgaaagcaatgcagaaacgaattacggaagtgctgctcatatacatgccggtaagtaggtacgctatggcctaccggttcggcagttccacgatccagaacgcccggtatcatgtgggaaaacagattgtgcttaaactcgacattctgcacttcttcgattcaatacgctacagcgacgtgaaagacaaagcttttcccacagccatctatgaagaaccacttcggatcctgctgaccatgctatgctaccataaagacgctctgccacagggagccccttcctctcctgccattaccaatataatcctgtacgaattcgacgagcagattgggcaatggtgtagggagcggaatatcacatataccagatactgcgatgatatgacctttagtggggattttgaccctgcggaagttatatgcttggtccgccaagaattaaagaagctcggttttcttcttaacgaacagaagactaggatccagcgtcccggtcagcagcagactgtcaccgggatcgttgtgaatgagaaactgtctattccctctgactatcgtcgcaagctgaggcaagagttatattactgtcgaaagttcggcatgcaggagcatttacagagaacaggatctgagattagcgctgatacttatagaagacaactgatggggaagatcaactatgtgctacagctcaccccagacgatcgggacctgttgcaggcaaaggagtggctgtccaatgagggctga

SEQ ID NO: 9600 - RNA, 921 nt, synthetic construct
  source 1..921: mol_type = other RNA
atgatagtctacagagagctgtcctccttagaacaggatctggggattcgagctcagaccctgtacgccgtgtcaaacaatctggggaaacattataggaacgcaaaactgccaaaaaagagcggaggataccggactctgtctattcctgacgccgtactaaagtctatccagaaacagatcgccgaagttctgctgatacatatgccggttagccgccacgctaaagcttaccgatttggtagctccacagtccggaatgcaaaacctcacgtcggaaagccaatcgtcctcaaacttgacatcctgcactttttcgattcgattcggtatagtaccgtgaaggacaaggtgtttccagccgagatctacgccgagcccctcaggatacttctcactatgctatgttatcatcgcgatgcgctcccccaaggagcccctagtagtcctgcgatcactaacattatcatgtacgaattcgatgagctggtaggccagtggtgccgagagcgcaatatcgcttacacaaggtactgcgacgacctgacattcagcggggatttcgatccctatgaggttattcgctttgttcgtcaggagttaaggaatatggggttcttgttgaacgaacagaagaccagaatccagagatctggccagcagcagtcagtgaccggcatagtcgtgaacgaaaagctctccattcccgcaagctatcggagaagactgcgtcaggaactttattactgccgcaagtttggcgtgtcagaacacctgcggaaaagcggcctggagattctcgagtcaacatataggatgcaattattgggtaaggtgaattacgtgcttcaagtgagtccagacgaccaggacatgttggatgcaaggagatggctccaacaaacgtccaagtcttgttga

SEQ ID NO: 9601 - RNA, 933 nt, synthetic construct
  source 1..933: mol_type = other RNA
atgattgtctatcgtgagctcagctctttagagcgggacttagggatcccagccaaaacactgtacgccgtatccaatagtctttcccggcattaccgcatggtgagtatccctaagaagaccggcggggtacgaaatcttatggtgccagacactgctctcaaaaccatacaacgcagaatcagcgatgtccttttggcgcacatgcccgtttctagctacgccacagcatacagatttggaacatgcacgctccgaaacgctgctgtgcacgtggggaagcccgtggttctcaagctggatatctaccacttctttgactctatcccatactcgctagtgaaagagaaggcattccctgcccatatctatgcagagcagattcggacgcttctgactatgttgtgttatcacaaggatgtcctgcctcaaggagccccgtcaagccctgctattgtcaatataattctcgcgaactttgacgaaaggattggcagatggtgtacccagcggggtattgcatacactaggtattgtgacgatcttaccttctcaggcgacttcgatcccaaagacgttatcgcctttgtggagggccagctgaagtccctcggcctgctgctgaataccaacaaaaccagggttcagaggcagggtcagcaacagctcgttactggggtgatagtcaacgagaaacccggagtgccagccgtataccgcagacagctgcgtcaggagatgcactattgccagaaattcggagtgggggaacatctgaagtttctgggacaaggcatctcagaagaagcttatctaaggcagctgctgggtaaggtgaactacgtcctgcatattgtcccggattgcgaggaattccaacagtatcgcacatgggtgttacagaaattgcagaatatctccttggccaagtga

SEQ ID NO: 9602 - RNA, 930 nt, synthetic construct
  source 1..930: mol_type = other RNA
atgattgtttaccgtgaggcccctaccctagcgcgggatttaggagtaggactccacacactctacgctttaagcaatcgcctgagcgcacattaccatacggtggaactgactaagcctaacggcggcgtgagacggttgaccgttcccgatgaggccctgaaaggcgtccagaggtcaatagcccgcaatctgctggcttgcagggaactctccccctatgcgaccgcctaccgttacggggcaggaaccgttcggaatgctagtgcacatgtggggaaggcacgtctgctgaagatggacatctaccacttctttgactccgtgaactactctgctgtgaaggatgccgtatttccagccgaagtgttctccgagcctctaagaattctattgacgatgctgtgttattaccaggatgccttgccacaaggggcccccacaagtcctgcagtcgcaaacattctcatgagggactttgatgaagacgtgggtggttggtgcgcccggagaggtatcgcttacacacggtattgtgatgacttaacttttagcggagacgcaggtctggctggcgcgtatcggtacgccgaagctcgcctcagggagaaggggttcctggtgaaccgccgaaaaacactctacctcgacgctggcagacgacaatgtgtcactggcctggttgtcaacgagaaagtggacgtgcccgccgagtatcgacgcgctcttcggcaggagttgtattattgcaagaaattcggacttgaagagcaccttagatcagtagggtgggagggggacccaaccgcttatgcgaggaggttgctgggaagattctcttatgcccttcagatcaggccggaagatcgagcactgcttgagggcaaagcctggctggtcgaagagctgaatcgcagagccggcaagtga

SEQ ID NO: 9603 - RNA, 921 nt, synthetic construct
  source 1..921: mol_type = other RNA
atgattgtttaccgcgaggcggcctcacttgcacgcgacttgggggtggagttaaagacactgtatgcgctgtctaacagtctgccagcccactaccgtacagtggagatacccaaggccgacggaggtgtcagacgactgactgtccctgatgaagccttgaaaagggtgcagagggctatcctgaataacctcctggtgcatatgccagtatccccgtacgctaccgcttatcggtatggaggcggcgctgtctgtaatgcagccaggcatgtgggcagaccccaggttttacggctcgacatcaggcacttcttcgatagtgtcaggtattccgcggttaaagacgcagtgttcccgccagaaatattcagcgagccactcagagttttactgaccatgctatgctattacagagatgcattgccccagggtgctcccacgtctcctgccatcgtgaatatcctgctcagagattttgaccggagagtcggtggctggtgcagagagcggggcattgtgtacacccggtattgtgacgacctcacctttagcggcgaggatttgtcaggggtgcgagccgtaacggaagccgaactgcgggatctggggtttttcctcaatgagaggaaaacccggcttcgtagcgcagggcagcgacaaacagtgactggacttgtcgtgaacgaaaaggtcagggtaccccgggaagagcgcagagcaattcgccaagctgtttactgttgccgccgctttggtctagaggaccacctggctcgcacaggggtgggacttactcctgaagcctgcctgaaccgattgctgggccgggtgggatacgtacttcaggcagaccctgattgtgcctgggccctagaggctagacgttggctcctggaggaaaggcgccgaaggatctga

SEQ ID NO: 9604 - RNA, 942 nt, synthetic construct
  source 1..942: mol_type = other RNA
atgatcgtgtacactcacaccgaaactctcgcccaagacttgggcattcccgctgcgaccttattcggtgtatccttccatctggaccgccactacagacgagtgacactcccaaagcgcgatggtggggtccgcacgttatgtgttccagacccgatcctcaagaaaattcagaggaggatcctgcgggtgctgctcttccacagacccgtgagcccttacgccaccgcctacagaccaggggtaggattacgtgccaatgcactgccgcattgcgggcggcagtgtgtccttcagctggacatcagacagtttttcgactccgtccggtatctccaggttaaggaaattgtgttcccaaaagaaatcttctctgagaagctacgggtattgctgagctgcctgtgctatggcagagacggactgcctcaaggcgctcccacgagtcctgccatttcaaacctgctgttgagggactttgatttgcgcgtcggagattggtgtgctgcaaggggcataagatatacacggtactgcgacgaccttactttctcaggcgcttttgatcccaaaccagtcatccgaatggtgagcgatgcactatggcgggagggctttgtgctgaatcctcggaagacccgcttttcccggtctggacaacgccagacagtgaccggtgtggttgtgaacgatcgacctcgactcgatgcggccaggaggcgagcacttagggctgagctgtattactgtagacgctttggggtggccgaccacctgagtcatataggggatcccaggacacctagagcctatttgctctcgctgcttggacgtctggatttcgccctgtctctgggcgctgagccacagctagcagaggggaggcgttgggttctcgaacagcttaaacccagcaaacagaaggaagagattgacggttga

SEQ ID NO: 9605 - RNA, 933 nt, synthetic construct
  source 1..933: mol_type = other RNA
atgattgtgtatactgagacagccaccctcgagagggatctgggcatcccagcaaagaccctgttcgctgtctcgcatgaccttaagcggcactaccggcgggttgagctgtccaaagcagacggaacagtgcgtgtgctcagcgtacctgatgcagtgctgaagaaaatccagaggagtatcaacgcgaacctcctcgcatatatgccaataagtccctacgctacagcctacagaccaggcggaggcgtgagacgcaacgccttaccccactgcggccaggaacagctgttgaaactcgacatccggagatttttcgatagcgtgcgctatacacagcttaaagaaaccgtctttccggccgccgtctacgctgagaagctacgggtgttactctctattttgtgctactcaaaggaggggcttcctcagggtgctcccacctctcctgccattgctaatatactgctgcggcagttcgacgagactgttggtggatggtgcggggccaggggcattgcttacacccgatattgtgacgatcttgccttctcagggaggtttgaccccgctgcagtcatctgtactgtgcaggaggccctgaggagagaggggtttagcctcaatgcacaaaaaaccaggctagcgggacctgggggtcgtcatctggtgactggggccgttgttaatcttcgacctcgagccccagccgaagagagaagagccctgagacaggaactgtactattgtgaaaagttcggcgtacgaggccacctcgtccaaacgggagatccacgtacggctcaggcatatctggcggcgctgctaggcaggttggactacgctctgtccctgtcccctgaaccgcgcttggcccaaggacgcagatgggtgttggatcgcttaagggaggaacgcaccgcacggccctga

SEQ ID NO: 9606 - RNA, 924 nt, synthetic construct
  source 1..924: mol_type = other RNA
atgggcattgtctaccaggaaggaccaagtctggcccgcgatcttgggttgccgttgcgcaccctctacgctgtgtcaaatcgtattcccgctcactaccaccgcgcggaagttcccaagagagacggcggggtgagagtccttcgtgtcccagacccagtgctgaaagacatacagaggcgtatcgcccgtgttctattatcgggaatgcctgtgtccccccatgccacagcatacagatacggagcaggcgtagttgagaacgcccgccgccatgtgggaaggcctgaactgctgaagctcgacatactccacttttttgactctatcaggtacattcaggtgaaggaagccgcctttcctgctgagatctatgcggagcctctcaggacgctgctttccatgctatgttatgaccgcgatgtccttccgcagggagctccaaccagcccctggatcgcgaacctggtactgcggccttttgatgaaaaattaggtgcatggtgtcgggcccggggagtggtttatacacggtactgcgatgacttggccttcagcggcactgcactggatggggtggaggagagggctgaggaaggccttagggcactcgggttccggctaaatagagccaagagggccctgtgccgagatggtcagcaaaaacgggttactggcctcgtcgtgaacgagcgagtggctgtgccagcatgttgcagacgacggctgcggcaggagctgtatttctgcagacgcagaggcgtcgaggaacatctgagggcagtgggcttggctgaggggcgagaacaatgtctcagacgattactggggcaggtagacttctggctgcaagctcagcccgattctcaggaagccgccgagtataggagatggctgttggacgagatgcgcgatggtcggtga

SEQ ID NO: 9607 - RNA, 930 nt, synthetic construct
  source 1..930: mol_type = other RNA
atgaaaatcgtgtacagagaggccagtaccctggcccgagacttgggcattccgctggacatcctttatgctgtcagcaatcgtctggatgctcactaccacaccgcagtacttcctaaacgcgacggtggaacaagaaccctgactgttccagacgggctgctaaagcggattcaaagggctatcctggagacattgcttgtgcacatgcccgttagccgcaacgcaactgcgtaccactacggggcccgggtgacaaagaacgcagcacctcatgctgggaagaggtttctgctgaagctcgatatcgcccgtttcttcgactccataagatatacgtctgtcaaggaagctgccttcccaccagagatttatgcagaacccttgcggattctcctagcgatgctctgttatcatcgggatgctcttccgcaaggagccccaaccagtcctgccatctcaaaccttgtgatgcgccccttcgatgaacaggtggacggttggtgtagggctcgcggcatcgtctacacaagatattgcgatgatatgacctttagcgcgggcaggcctctaggaggtgtgcatggattcgtgcaggacgctctggggggcatgggtctgctgttaaacgagcgaaaaacagcaaggttccacgcaggccagcgacagactgtcactggcttgaccgtaaatgatcgccctaatgttccccccgcttacagaagggccttacgccaggagctgtacttttgccggaaatttggagcggcctcccatctcgctcacatagggctcgacatggatgtccctacgtacttacatcggctgctgggaagagtgtctttttggttgcaggccgaccccggcaatcaagaagccgcagcctataggagatggactctcgcccagctggactcagccctcccatga

SEQ ID NO: 9608 - RNA, 942 nt, synthetic construct
  source 1..942: mol_type = other RNA
atgattgtctatcgagagctgtccaccctggccggcgatttaggcgtgtcgggacggactctgtacgctgtgtcaaacagcctccctaagcactaccgcacagtagagctcccgaaaggggacggggccgtaagaaggctttcaattcccgacagggaattgatggagattcagagacgtatacttaatcgcctgctcgtgtacatgcccgttagtccatacgcagcggcatacagacgcggcgttgatcatgcggctggtgcgcgtcctcacatcggaaggccagtgctccttagacttgacatccgacacttctttgactccatcttgtatagcgatgttaaggagtatgcctttcctgctcatatatacgccgaacccctccgagtgttactgtccatcctctgctactgtggtgatgctctgccgcaaggggccccaacatccccagtggttagtaatcttgtgttaagggatttcgatttggaaacaggcgcttggtgtagcgctcgggggatttcttatactaggtactgcgacgacatggccttctctggcgcctttgaccctgtcgaagtgtctcggcttatcgccggaaaactgcgcgaaaggggcttcttcctaaacgaggagaagacccgcgccatgttcgctggccagagacagaccgtcacggggctggtcgtcaacgaaaggctgaatctgccacgggagtatcggcgagcattgcggcaagaactgtatttttgcaggagatttggagtgagcgcacatctggccagaaccggagcagctcctgaacccgaggcatgtctgcggtcactactcggtagagtaagttacgtgctgcagatctctcccgaaaaccgcgagatgctcggatatcgcgagtggctgctgcaggagctagccttgctgcactccggtgagcgtgacagctga

SEQ ID NO: 9609 - RNA, 930 nt, synthetic construct
  source 1..930: mol_type = other RNA
atgatcgtgtatcgtgagctggagactctgaccagagacttagggattggagcgggcgtcttgtacgccgctggcaaccgaccagaggcacactatcgaaccgtgtcaataaccggtggcaacggcactgtgagaacactttctgtccccgaccctatgctcatggctatacagcggcgcattttattccgcctgttggtacatatgcccgtgtctccgcaggcagctgcttaccgctgtggtgttagcaccttgagcgctgcacggtttcacatcggcaagcccgttctcctgtgcctcgatattaggcactttttcgacaatatccggtacgcagatgtcaaaagatatgctttcccccctgacatctacgcggaaccacttcgcgtgctccttacaaggctgtgttatctgagagacgcactccctcaaggagctcctacatcccccgcgatctctaatctagtcctggccgactttgatcgggctctcactagctggtgtgcccccagggggatcgcctacaccaggtattgtgacgatctggccctgtccggggatttcgatcctgatcaggcctgcgaaatcgctgccgccttgttacgacagcatggctttcttctaaacccagccaagaccaggataaggcgagccggtactaggcagcaggttacaggactgattgtgaacgaacggccaagtgtgccacgtgaatatcggcgggcactgagacaggagctttactactgcagacgtttcggggtagccagtcagatgcagagacgcgggttttgcggaaaagagacgtcctatctgcaatcactcctgggaagagtcaattacctgctacaaattaggccggacgacgtggcagccaagcaggatcgcgactggctcctggccttgctgcatacacaacagacgccttga

SEQ ID NO: 9610 - RNA, 936 nt, synthetic construct
  source 1..936: mol_type = other RNA
atgcccgataggattgtctacaacgagctgagctctatagagctcgatctagggtttaccgcacagcagctctatgctgtatccaatagcttgcatagacaatacaggcaagtaaagcttcctaaggctaacggaggatatcggacactttctatcccttcacctttactcaaggccatccagcgacgcattactacagttctgttggcccaggagccagtcagtccttacgccacagcctatagatatggcgggggtcccttacggaacgccagacagcacgtgggtcggcagatggtagtgaaactggatatacggggatttttcgaccacatcctctattccgacgttaaggacgcggcatttccagcagatcggtatgccgaacctcttagggtgctgctggcaatgctgtgttactacggcgattccttacctcagggtgcccccacatcgccggccatttcaaatatcgtcctgaggagctttgacgatgctgtgggagcttggtgtcgagcccacgggatcgtgtacaccagatattgcgacgacatgaccttctctggcccaccagaggtcaccgaggtgattccgttcgtgcaggcccagttggagcagcgcggcttctacctaaaccgccgaaaaatggtggttgcgcaccgtgggtgcaagcaaacggtcactggcctggtggtgaataggcgcctcaacgttccagctggctacagaaagaaacttaggcaggagctgtattactgccgtaaattcggactggttcaacacctggcgcatattggggacactacaccccccatgacttatgcaagacgcttgctgggcagggtcaattatgtgctggctgtgagtcccgaccgggaagagtttagagaataccgccattacctcacggaatggtgtcagacctacaccgaatga

SEQ ID NO: 9611 - RNA, 939 nt, synthetic construct
  source 1..939: mol_type = other RNA
atgattgtgtaccgcgagctctcgtctctagtaagggacctgggcgtggaagccaagacattgtatgcgctgtccaactcactcgaaaagcactaccatcaagtgaagatccccaaaagggacgggggctatcggcagctcagcgtacctgatgagcaacttaagcgggtccaacgccagatcgacagagtgttgctggctaggatgcccgtctctccatacgcaacagcctatagatgtgggtgcggaattggcaggaatgctctgccgcacttaggacagcccggggtgttaaagcttgatattcgccacttctttgatagtatcccttacacggccgtgaaggagcgcgcttttcctggtactatctacggggagcctctgagagttctcttgaccatgctgtgttattacagggactccctgccccagggtgctccaagtagccctgcgatcaccaacataatcatggccaaattcgacgccagagtgggccagtggtgcgcacagagagagattcggtatacacgctactgcgacgatatgaccttttcaggctcctttgatccccaagaggtggtcgctttcgtgaggcctctgctccgagagatggggtttttcctcaacgagaagaaaactcgattcttaccagccggacgacggcaggtagtcactgggatagttgttaatgaaaaaccaggccttccagccgagtacctgcgacgtttgcgtcaggaagtctatttctgccagaaatacggaaccgcagatcatatggcacgctgtggcattcagggtcccgctagcggctatctgaggagactgcttggccgggttaattacggtcttcagatcctaccaggaaaaaaggaactgctcgaagcccgggcatggctgatgaaggagatggcccgtgaacaggaaggagacagaccgtga

SEQ ID NO: 9612 - RNA, 945 nt, synthetic construct
  source 1..945: mol_type = other RNA
atgatcgtctaccgtgagctttccagcctggttcgcgacttaggtatccccgctaaaaccctgtatggggtatcaaatactgttgagactcactaccacaaggtgcagctgcctaagagggatggcggcgtgcgagagttgagcgtccctgaccccatcttgaaacatattcagagacgaattacacaggtactgttgctgccaatgcccatttcccggtacgcatctgcttatcggtatggggccagtaccttacgcaatgccgctccacacgcaggccaacccggaatcctgaaactagatataaggcatttctttgactcaatcctctatagcacagtgaaggagaaagcctttccaccagaaatctacgcggaacccttgcggatcctgctggcaatgctttgctattaccgcgacacccttcctcaaggtgccccatccagtccagccattacgaacataattatggcccagttcgacgaagatgtgggcgcctggtgtagatctagaagtatacggtataccaggtattgtgatgacatgacattctctggagcttttgatcctcgggaggttaaagccttcgtctcccagaaactcagagaaatggggtttttccttaacgagtccaagtctaagtacctccctgcaggccaaaggcagactgtgacaggcctggtggtgaacgaaaagcccgctgtgccttcagactacctgcgatccctcagacaggagctctacttttgccaaaagttcggagtgagtgatcatatggcccacctgggtattaaggagtcggaggcgcactacttagcacgcctgctcgggagggtcaactacgtgctgcagatcaccccgggaaagaaagaatgggcgcaggcccgtgcttggctccttgttcagctaagcagcctgaatgactctagcccggtcatttcatga

SEQ ID NO: 9613 - RNA, 927 nt, synthetic construct
  source 1..927: mol_type = other RNA
atgatcgtctatcgcgaactaagcagcctcgctagagacttaggcgtggatgcaagactgctctatgctgtgtccaactcccttgataggcattacaggcaagtctgtttgccgaaaaaggacgggggggtgaggaccctctctattcccgatcagctcctgaaaacaattcagcgacgcattacgcaggtgctgctagtgcatatgcctgtctctccttatgcaacagcctaccggtacgggggatcagcttggcggaatgccgcacctcacgtcggacagcccgctttgcttaagctggacatccgccacttcttcgacagcatattgtacgcgactgtcaaggagagagccttccccccagagatctacgctgagcctctgcgtatacttctgacaatgctgtgctattaccggcaaagcttaccccaaggcgccccatcctcaccggcgattaccaatattatcctgtcgggtttcgatcaggaagtgggagcatggtgtgcaggaaaaggcatccgttacaccaggtattgtgacgatatgaccttttcaggactgttttctcccgaggaagtgacaagttttaccgaagccaggctgcagccatttggcctgttccttaacggaagaaagactcgatttatcccagctggccggcgccaggttgttactggcttggtggtaaacgaaaccgtgggcgtacctgcccattacctcagaactctgagacaagagttgtactattgccggaagttcggtgtgagtgggcacatggcccgactaggcgttcccgaacctgaggcccggtacttagctcgcctgctcgggaaagtgaattatgttctgcaggtaacgccaggtaagagggagtttcagcaggctcgtgcctggctgctccaggcacttgcccactgcgaggggtga

SEQ ID NO: 9614 - RNA, 963 nt, synthetic construct
  source 1..963: mol_type = other RNA
atgatcgtgtaccgcgagctgagttctttggttcgcgatctggggatccctgctggcaccctctacgcggtttccaacacattagatcgacattatatccggcgtcagttacctaagtcatcaggaggcgtcagagaactgagcgttccagacccgctgctgaaacatattcagagacagatcctccgcgtacttctggtgcacatgcccgtgtcgccttatgccaccgcgtatagatacgggggatctaccctctgcaacgccgcaccacacgtgggcaagccctgtgtgctgaaactcgacatatgccatttcttcgatagtatactttacagcgcagtcaaagagacagcctttccggccgaagtgtatgccgagaacttgcggattctgttggccatgctgtgctatggatgggacaggctaccacagggtgcccccacctctccttgcattactaatatcctgatgagagacttcgacaatgaagtcggggcctggtgtcgggagcgacaaattgcttacacaagatattgtgatgacatgactttttccggcgatttcgcccgcgatgaagtacttcgctgtgtcgagccaaggctgagggccttgggcttttacttgaacccaggcaagacgaagtggctccccgcagacaggaggcagcttgtgaccggcatcgtggtgaataagaaatgcaacgttcccagcgaggagcgtcgggctcttagacaggagctgcacttctgtcaaaagtttggaatctccgggcacatggcacgggcgggaattgacggtcccgaggaccgatacctcgctcagctgctagggagggtcaattatcagctgcagatcactcctgggcgcagggaactccaggaagcaagagattggctgataaaggctcagcctcaatacggcggaggtcgggagacaagcccagctgaaaaacaaattttatga

SEQ ID NO: 9615 - RNA, 933 nt, synthetic construct
  source 1..933: mol_type = other RNA
atgatcgtttacagagagctcagttccttggtccacgatctggggatttccgcccgcaccctctatgcggtgagcaacggcctggatcagcattatagaagggccgagttacctaaggcagatggcggcgtacgggctctttccgtgcctgaccctttactgaaacacatacagcgcagaattacccaggtcctgcttgtacatatgccaatctcgccctgcgctacagcgtaccgttacgggggttctgttttggtgaatgcagctccacatgttgggcagtcagccgtcctgcgcctggatatacaacgcttcttcgacagtatcagatacacaagcgtgaaggaagcagcctttccagccgatatttacgctgagcccctccgaatcctgctgggcatgctctgttatcatcgggagggattgccccaaggagccccctcatcccctgccatttcaaacattgtgatggccgacttcgacgcccaagtgagcgcctggtgcagggaacggggtttgacatacactcgatactgtgacgacatgacttttagcggagcgcctgtgccatccgaggtcgtgtcttttgttagcgatcggcttaggccactgggcctgttcctcaatagaaggaagacgcgctatctgcccagtgatcgtaggcagctggtcaccggcatcgtggtaaaccaggccctcaacaccccggccgaataccgacggaaattacggcaggagctgcacttttgccaaagatatggggtggctgctcacatggcatggcagggattgacttgttctgaagacgcttatcttgcaagactgctcgggcaggtgaattatgcactacagatctctcccggccgctcagacctagagcaggctcgtgcatggcttagggcgggaggtggtaggacagaaccgcacacctga

SEQ ID NO: 9616 - RNA, 963 nt, synthetic construct
  source 1..963: mol_type = other RNA
atgcacatcttgtatggattcagtagacggaagggcccaaaccacatgattatttaccggagtatcgacacccttgccaaagacctgggtttcagtccgaaaaccctatatgctgtctcataccagactgatcgccattatgaacaggtcagtttcgcctgcggagggaagaccaggctgctgagcgtgcccgacccattgttaaagtccattcagcgtagcatctatcgcaatctgttatgtcatatgcccgtcagcccttgcgcagctgcatacagatttggcacatcgatagctcagcatgcgagacttcatgccggacagaaactcgtatatcaaatggacatacaaaacttcttcgatcacatcttgtatagcacggttaaggacaaagccttcccggaaattatttactccccttctctgaggatcctcctcacgatgctctgttactatcgggatcggcttcctcagggggcaccaacatcacccgttatcgcaaacctggtactgaaagatttcgacgagaaagtgtgcgcctggtgtaggcagcgccacattcgctattcaagatactgtgatgacctgaccttttctgggtcttttgatcccgtgtccttatatgaatttgtgaagggtgctctgtatcaggaggggttctatttgaatcccaaaaagactaggctcctcagccagtcccgaaggcagacagtcacaggcctcgtggtgaatcagcaggtgtccgtcccttcagcctaccgtcggcaagttaagcaagagatctactactgccagaagtacggcataactgcgcacatgtctcgccagaatatcgctgacaccccagagcactacctacgaagcctgcttggaagagtggactttatcctgtactaccatcaggatgcctcttgggccatggatggccgacaatggctgattactcaactgaagaacttttga

SEQ ID NO: 9617 - RNA, 912 nt, synthetic construct
  source 1..912: mol_type = other RNA
atgattatctacaaagaaatcagcagtatcgagcaggaccttgggtacgacatcaagacactctacagcatctcatacagcctccatcggcactacattagtataaagatgcccaaaaaacagggtggatataggattctgtcgatccccgatgctcctctgaagtgtatacagaagcgcatcgccgaggtcctgctgtctcaaataaatatttcaccttacgcaatcgcctataggtacggcggatccacgttaagaaatgctgccccacatataaataaggatatcgtccttaagctcgacatccacgatttctttaataacatcctgtattccactgtgaaagagaaagcgtttccgaaagaaaagtactctgagaacattcgtattctcctgagtgttctttgctattataacgacaccctgcctcagggggcaccaacttcacctgctatctccaacatcattatgtgcgatttcgacaataccatagggtcttggtgtaaaaagcacagcatagcctatactcgatactgcgacgacatgaccttttccggaagcttcgaccccaaggaggtaatcaaatgtgtggaatctgagctgaagaaaatgcggctgttcttgaacaagaaaaagacaattgtggccagaaaatccaataagcagattgtgaccggcatcgtggtgaacgaaaagctaaatattccacggcagtacaaaaaggacattaggcaagctctgtattattgcagaaagtttggcgtcgaaaatcatatggccgatgcaaatatcaacgatacaaacgagcactacattctaaagttattgggtaaggtgaactacgttctgtcagtatgtcccaacgataaagagttcatcaactatcgcgattttttgaaaggcctcatttga

SEQ ID NO: 9618 - RNA, 912 nt, synthetic construct
  source 1..912: mol_type = other RNA
atgatcgtttataaggagatatcctctatcgaacaggatctcgaatacgacatcagaacattgtactccatctcttatagtctccatcgacactaccacagcattaaaatatcaaagcggcagggaggctatagggtcttatccattccggacatgcccctgaagtgtatccaaaaacggatcgccgatgtgttgttgagccagataactatttccccctatgccaaagcttacagatatggagggtctaacattaagaatgcaaccccacatatcaacaaggacattgtgcttaaacttgacataagggacttcttcaacaatattctgtatagcacggttaaagagaaggcctttcctaaagagaagtacagcgagaatattcggatcctgctgtctatgctgtgctattacaacgatgctctgccccaaggcgctcctacctccccatttattagcaacatcatcatgtgcgagtttgacaatgccgtcggaagttggtgcggcaaacatggcgtcgcatatacacgatactgtgatgacatgacctttagcgggaatttcaaccctaatgaggttataaagtacgtgagattcgaactgcgcaagatggggttcttcctgaacaataaaaagacaattgtggcgcacaaatcgaataaacagatcgtcactggtatcatcgtgaataagaagcttaacatcccccgcaaatacaaaaaggacatcaggcaggcaatatactactgtaagaagtttggcgtgtataaccacatggaatccaccaatattaatgatacggtggagagttacattctcaagttaatggggaaggtaaactatgtactctcagtgtgcccaaacgataaggaatttatgggttatcgtaactacctgaaatcactaatttga

SEQ ID NO: 9619 - RNA, 927 nt, synthetic construct
  source 1..927: mol_type = other RNA
atgatcgtttaccgcgagctgtcttcacttgaacgcgacctgggatttcctgctagcacgttatacgctgtctccaacaggctgaaccgacactaccgtaaagtggaactcccaaagggcgatggacctctgcgcaccctgtctgtccccgacaatctcttgaaaacaattcaaagaaggatcgcccaagtcctgctgagcactctgcctgtgagtccgtatgctacagcctatcggcctggtggctcagtggtcaaaaatgctcgaccacacgtagggaaacccgtagttcttaagttggacatctaccatttcttcgacgccgtgtgctatagccgcgtaaagaaagagatctttcctcccgagatttattccgaacagaacaggattttgcttagcatgctgtgctgttaccaggacaagttaccccagggagcccccacctctccagcgatatctaatcggatattgctggagtttgatcaggagatcggctcctggtgtgcaagacaggggatttcgtacacccgatattgtgatgacctcacattcagtggtgattttgctccaggcgacgtgattcgtcttgttagagaaaggctcaaggtgagggggttcctgttgaataaccgtaagatacaggtgctcaggcaggggcagcggcaaagcgtgactggagttgtcgtgaaccaatccctgcaggccccagtttcacttcggcgagagctaagacaacaggtgtattactgccggaaatttggtgtgagtgatcatctggcgcgcacaaagcagaccgtctccgaagaagactacctccggagactgctaggccaggtgaacttcgcactccagatcaatccggcagatcaggagttagccgatgccaggcagtggctactggcagagatccgcagaaagagaacttga

SEQ ID NO: 9620 - RNA, 933 nt, synthetic construct
  source 1..933: mol_type = other RNA
atgaggtcctattctattgtatacaaagacatctacgccctcagtggggatctgggagtgagccccagaattctttactccctgtcaaatcgcatcagcggccactatcataccgtcgcgatccccaagaaaaacggaacctaccggaaactgagcgtgccagatgacatactgaagtatgtacagaggcggattaataaggtgctattgtgctatatgccgtcgtcaggctatgccatggcctacgagtatggaaaatccatcctaaaaaacgctaatccccactccaacaagaaatgcattcttaaactcgacatcgacgattttttcgatacggttaagtacagtcaggtcaaagagaaagccttcccagcagctcactttgctgaaaacctcagagtgcttctgtctcagctctgctataacggcgaagggctgccacaaggtgcagcaacctcacctaaaatagccaatttaatactgcgcgacttcgatgagaggatcggatcttggtgtgcccagagggacattacttacacacggtattgtgacgacatgacgttttccagtgacaaggggttggatggcgtgtacaaatacgtgcgcgatgaattattcaaggagggttttctgctgaacaaagacaagacaaagttcattgatagtcatcaccgacagaaggtcactgggatcatcgtgaataatagccctaaggttcccacagaatataccaagaagatcagacaagagatttactactgccgtaagtttggtatctcagagcacttgagccatactgattccgataagtctctctgtgaatacttggcttctctcctgggccgaattaactatgtccttagcgtgacacctaagaatgaggagatgaaggactacaaggaccaggttaccatatggcagaaaagcctgtga

SEQ ID NO: 9621 - RNA, 918 nt, synthetic construct
  source 1..918: mol_type = other RNA
atgatcgtgtataaatcgctggaatctgtagaggctgacttgggtgtaagcctgaaaactctctatgcagtctccaacaatctgcagagtcattacagaaatgtcgagctgcccaagaaaaacggcgggattagacacctatgcgttcccgatgacgtgctgaagcacattcaaaggaggatcactgaagtgatgctcgtccacatgccgattagcaagtacgctggagcttatcgctacggcgcatctgtcatacataacgcctccgcccatctcgggaagaaaaggatccttaagctggacattagtaagttcttcgacagcgtgctgtattctcaggtgaaagaatatgcctttcccgaaatcattttctcagagaaagtccgcgttctgctttccatcctctgctattacaaagaatcgttaccacagggcgcaccaagcagccctgccatttccaatatcatcatgcgccaatttgacgaaaaggtcggcgcctggtgtgaggagcgtagcatatcctacaccagatattgcgatgatatgaccttctccggagactttgatgcgaatgatgttaagaagcttgtggagcgcgaattgggtaagtatggattttacttgaaccctgtaaaaacgaaaacagtgaccagtgaccaccggcagtcagtgacaggcattatagtgaatgagaagttgtctctgccttcagagtaccggaggaagctgcggcaggagctgtactactgtagacgatatggcgttgatgctcacatggaacgtatcggggtgagtggttctgcaggaagctacctatcacgactcctggggaaagtcaactacgtgctttctgttcggaaggacgatgccgagatgaaagagtacaaagcgtggctcgtggccgagttaaagaagtga

SEQ ID NO: 9622 - RNA, 933 nt, synthetic construct
  source 1..933: mol_type = other RNA
atgatcgtgtaccatgaattgagctcattatgcgcagacctgcggttatctcctaggaccctatacgccgtgagtaatgccatggaaaagcactatcatactgtgcggatcccaaaaaaaagcgggggatttaggaaacttaccgtcccggacgacctgctgaagatgattcaacggcgcattacagaggccctccttctgccactccccgtatctgccgccgcttctgcttactatccaggtcgcggcataaaacgtaacgctctgccccatgtgggcaaacctgtactgctgaagatggatatttatcacttcttcgacagtgttctctacagggatgttcgggattgcgcatttcctgccgagatttattccgagcccctccgggtcctgctaacaacattgtgttatggaatgaatgagttacctcagggcgcaccctcatcgccagcgatctccaaccgcattctatacaggttcgatgaaaaagtcttgaagctctgccgaaagcaggggattcactatactcgatattgtgatgacctttgttttagcggggactttgacgccgaagcgttgaggaaggaggtcaccaagctgctgatagaagagggcttcttcccgaatcgaaagaagactaaagtgcagaaaggagggacaaggcaatgtgtgacgggactggttgtgaatgaaagagcaaacgtgcctgctgagtacagaagaaagatcagacaggaactgtactacataggaagatttggtcttcgctcacacatggagcgcaccaaggctgaaggttccgaattgagctacctgaggaagctgctgggcagaatctcctactgccttgagatcgaccccgagaacgatgagatgaaacgtgatcgcgaaatggttctcgagctcatcggggagcggaccggcagacagtga

SEQ ID NO: 9623 - RNA, 927 nt, synthetic construct
  source 1..927: mol_type = other RNA
atgatcgtctaccgcgagttgtcaagtctttccacggatttagggttctccgccaaggccctctatagtgtctcgaatagcataaccaagcactatcaccctgtgaagatacccaagggcaatggcgaatacaggcagctaacagttcccgacgagtttctcaaagccatccagagacggatcaatgataagctcctatgtttcgagccaattagcccatatgctacagcgtaccgtgtgggagggtctacaaaagctaatgcctgtccacacgtaggacaaaaagttctgctgaaactggacatcagacactttttcgacaatctcatctaccctgtcatcaaggaggctgctttcccaaaggaacgctacagcgaggcgaaccggatattgctgacaattttgtgcacctaccagggctacttgccccagggtgcacccacttcccctaccattagcaacattgtgatgaggcaatttgatgatactgtcgggacatggtgcgaaaaacgaggaattcattactctcgctactgcgacgatatgactttttcaggtgacttcgacccgaagcctgtgaaaagcatggttgcaggcgaactgcgaaagctgggcctttttctcaatactaagaagatggtggtagccggcaaagggcaaaagcagaccgtgaccggtattgtcgtgaacgagaaagcatcagtgccgactggatataagagaaaactgaggcaggagctttacttctgcatgaagtatggcaccgactctcatatgaaccataatgaaatcaacatggagaaagggaactatattttatctctgcttggaagggtgaactatgcctgtagtatcgaaacggacaacgaggaactcaagtcctatcgggattggctgctgctggagtcccaggaaaccaaaagatga

SEQ ID NO: 9624 - RNA, 1005 nt, synthetic construct
  source 1..1005: mol_type = other RNA
atgggcctgcgtattcagagggactcgtgccacattttaacggtgttgctgcatggaaacaggggccgaagagcatgttgcatgatcgtgtattgggagctctcatcattatccaccgacttaggattttcccctaaggcattgtattccgtcagcaacagcatcggccggcattatcggctggtacagatacccaaaggcaatggtgaactgcgccgcctgacagtgccagatagattcctgaaagctatacaggtgcagatttacgagaaattgctgcgcctggaacctgtgagcccccatgctgccgcctatagaccgggaggatctacgcttgtcaatgctaggccccatgtagggcaagccgtgcttctgaaactagacatccggcactttttcgatagcctcatctatccacaggtgaaggacgcagccttccctgtcgagaggtactctgaagcaaatcgtatactcctggcaattctctgcacatataggggaatcctaccccagggggcccctactagtccagctattagtaatatcattctccgaaacttcgatgataccatgggcgaatggtgtggcagacagggggtccgatacacccggtactgcgacgatatgacctttagcggtgactttgacccagctgcggttatcgaaaaaacagccgctgagctgaagaacatggggttgtaccttaatgccggcaagactgttgtggcgagaaaggggcaaaagatgattgtgaccggcatcgtggttaacgaaaaaacctctatcccgcgggactacaagaggaagcttagacaggagctccactactgtactgagtacggtcttgccagtcacctggcgcacactcactcccaaatggaacaacgggattacgtcctgtctttgctggggcgcgtgaattacgccctgtccgtagagcccgctaacgcagagctaggacagtatcgcgtttggctcacagaggccatgaagcagatctcatga

SEQ ID NO: 9625 - RNA, 915 nt, synthetic construct
  source 1..915: mol_type = other RNA
atgattatctataaggagttttcctcactgcttagcgacctgggcttttctggtaagaccctctatagtgtgtcaaaccatattaaccgtcattatcacccagtcaaaattcctaaagccaacggggagttccgagagttgaacgtccctgacaaactactcatgaccatccaacgcgctataaataacaagctcttatgcctggagaatgtttccaggttcgcaatggcttacaaacctggctctagtaccaagatgaatgccgtggcacacgtggctcagccagtggttttaaagctggacattagacacttttttgatcacttgatcttcccgcttatcaaagagaaagcctttccggcagcgaggtactctgaacagaactcgatcctgctcacattcctctgcacatacaaggatgccttgccccagggtgcaccaacatctcccactatcagcaatataatcatgaaggacttcgacaactttgtgggggggtggtgtaacgaaagggggattgcgtacaccaggtactgcgatgacatgaccttcagcggagacttcgatccaaaagctgtgattatcctggtcaaaaaggaactgaaaaaacttggactttacctgaatgataagaaaacagtggtcgtgagaaagggacaacgccagtccgtaactggcatcgtggtaaacgagaagcggtccatacccatcgaatataaaaagagaattcggcaggaaatgcactattgtatgaagtacggagttgccagccatctcgagcgaatcggcatagatgaagcccccaagacgtatactctgaagctgctaggcaagattaattacgtcctgagtgttgagcctaataatagcaacatgcgccagtatcggtcatggttgatggagcagaagttctga

SEQ ID NO: 9626 - RNA, 921 nt, synthetic construct
  source 1..921: mol_type = other RNA
atgatcgtttataaagagctgagctccctaacctccgatctcgggttctcatctaaggctctgtattccgtgtctaatcatataggtcgccactacagagctgtgagcgtacccaagggaaacggcgagtctaggcggttgcatgtgcctgacgccctcctgaaggccattcagcggcggatcaacgaccgcctgttgtcattggaggcagtgtctgcctatgcgacagcttatcgcgccggagggtctaccaaacgtaacgccgcacctcatgttggtaagcccgtgttactgaaaatggatatacgtcacttttacgatagcctgatctacccccttgttaaggaaaaggcttttccgaaagaaaggtatagcgagcagaaccgcgtgttactgagcctgctgtgcatttacaatgacacgttgccacaaggagccccgtcctcgcccaccataagtaacatcattatgagagatttcgacgagagggtggggcaatggtgcgcgcagcaggacatcacatacactcggtactgcgacgatatgactttcagtggcgactttgatcctcacccagtcattcgatttgtcaggaaagagctgcagtcccttggccttttcctgaataatagaaaaaccgtcgtagctcgaaccggccagaaacaggcagtgactggtatcgtggtcaacgaaacaacacatattccatcaggctataaggcagcactgaggcaagagctctactattgtcgcaagttcgggattgccagtcacctcttacactgtggcatcgacgaaagccctgaaagatacgctcagaagctgctaggaagagtctcatacgtgctctccgttgagccacagaatcgacagatgcaagattaccgggcctttctccagagttgtcttcagagcaggtga

SEQ ID NO: 9627 - RNA, 927 nt, synthetic construct
  source 1..927: mol_type = other RNA
atggtctgtaagtcctactctgacttggaacgcctgctgggcattagcgtgaaggcactctattcggtcagtaacgcctcctggaagcactacagaagtgttaaaatcccaaagaatgatcgaggggagttccgcgagcttcacgttcccgatgaattcctcaaaaccgtccagagacggatcgctgaccgcctcctgtcagcctatccagtgtctccttacgccacagcttatcgtcctggcgggagcaccattgtaaatgctcggccccatgtcgggaaaaacgtgctgctgaaactggacatccaccatttctttgacaacatcctctacgcaacggtgaaagagaaggcttttcccgctgaggactattcagagagtattcgcatactcctgacaatcttatgcgtgcataaggacgccttgcctcaaggggccccgacttcacctgttatcagcaacattatcatgagagatttcgattgtaccgtaggaggatggtgcgatgctaggggtatagcgtatacaaggtattgcgatgatatgacttttagcggtgactttgattctcgtgaggtggtttccctggtgagaaccgaactcagaaagatgggacttttcttgaacgagaaaaagacagtccgggcggtgcgaggccagagacaatccgtcactggcttggttgtgaatgagggcctgcgtatacccgcagcataccgcaaaaagcttcgacaggaagtgtactactgtaggaagtttggcgtagccgcacaccttcagaggatgggatctggggaaagggccgaagagtacctaccaaaattactaggtcggattaattatgcctgcagcgtgatgccagacgaccaggaactgcgccaggagcggaggtgggtgatgcaacagctgcacaccctggaacggtga

SEQ ID NO: 9628 - RNA, 933 nt, synthetic construct
  source 1..933: mol_type = other RNA
atgatagtgtataaggagctctcttccttgactaatgatctcggtttctcagtcaaagctctgtattccgctagcaatcatatctcatcgcactatcataaggcaaagatcctaaagaaaacaggcgaatatcgcgagctctctgtcccagacgacttcctgaagagcattcagaagagaatagtggagaagttgctcgtgtatgaagaggtgagtccgtatgctacagcctaccgttattccacatccataatcaagaatgcgagggtgcatctgcacaataacacgatccttaagctggacatacgccacttttttgaccacatcatttacccagtcgtgaaggaaaaagcctttcccaaggaaaaatactcagaggagaataggattttacttagcctgctgtgcctgtaccacgatgcacttcctcagggggcccccactagtcctatcattagcaacatcatcatgaaagacttcgacaataccgtgggagcatggtgcaagtctaaaaaaattcgctacacccgatactgtgatgacatgactttcagtggtgactttaacattagggaagtcatctcctttatcaaacgggagctgggaaaaatgggcttctacttgaacgatgccaagaccgttgttgctaggtctgggcagaaacagatcgtcaccggcattgtggtaaacgataaacttaatacccccttactctaccggaagaagctgcgacaagaactgtattactgtaagaagtttgggattgccagccatctaagacagaagtctatagatatgagcgagagagagtacatcctgaaactgttaggacgggttaatttcgtgctttcagtaggccagacgaacaaagaaatgcaagaatacaagagttggttgctggatcagaacaacctcttcattacagagaaatga

SEQ ID NO: 9629 - RNA, 921 nt, synthetic construct
  source 1..921: mol_type = other RNA
atgatcatatacatggagctctcctcaattattcacgatctgggcgtgtctgcaaaagccctttatgctttgtctaatcacacagaaaagcattaccacagagcaaaaattctgaagggcaatggtgagtatagggagcttgcggttcccgacaattttctgaaatcggtgcagcgaaaaatcgctgataccctactggttcacgaggagatatcaccctacgccactgcctatcggtatgggggatccgtcattgccaatgctgaacctcacctgggcaacagctccattttaaagttggacattcgcaaattcttcgacaccataacttaccccttgatcaaagacaatgcatttccaaagaacagatatagcgaaaagattcgcattttgctgactttcttatgtgtctacaacgatgtgcttccacaaggggccccgacatcacctgtgattagtaacatcatcatgcgggagtttgataatacagtaggcgcttggtgtcgacagaggaatatctgctacacaagatactgtgacgatatgacctttagcggagagctaaatagggaagagataattgactttgtcaagaaggagctgaaaaagatgggcttcttcctcaacgacaaaaagacggccttcatacatgacggacaaaagaaaatcgtgaccggtatcgtgatcaacaagaagctcaacaccagcaaaaagtaccggaaacaggtacgtcaggagatcttttattgcaaaaagttcggggtggcctctcatatgaagcatatcaactccgataagagtaaaaacgattatctgctgagtctcctcggaaaagtcaatttcatcctgagcgttgacaaatgcaacgcagaagcgctggggtacaagaagtggctttctgaagaaatcaagaacaattga

SEQ ID NO: 9630 - RNA, 927 nt, synthetic construct
  source 1..927: mol_type = other RNA
atgatcgtttaccgcgaattgtcaagcctgtctgaggatctcggggtgtccaagaaggcgctatatacagcttccaatcacgccagttcccattacaggaggatcaagatccctaagggaaacggagaatttagagagcttgcagtccccgataattttctgaagagtatacaaaagcgcattgctgacaaactcctgatctatgaagagatctctaagtatgccactgcctacagatacggaggttctgtcgtcgcgaacgcaaagccccatataaagaacgggacggtgcttaaagtggacatccggcacttttttgaccacattatctatccaatcgtgaaagacaaagcttttcccgcttacaggtactcagaacctaatagaatcatgctgagcctgatttgcttgtacaaggacactctcccacagggagcaccaaccagcccggtcattagcaacattattatgaagaacttcgacgattgcattggccagtggtgcgataagaaaggtatagtctatacacgctactgtgatgatttaaccttctccggcaacattatacccggcgagattatatgtttcgtgaaacaggagttggcaaaaatgggcttctacctgaacaacaaaaagaccgtaatcgcccggaatggacagcgtcagctaatcacaggcgtagtggttaacgacaaactgaatattcctctcgattataggaagaagctgcggcaagagctttattactgtaaaaaattcggtgtgagcagtcatctgtcaaagatcaattctgaacagaatgaagagaaatacctccaaaaactgttagggcgagttaattatgcccttatgatcgacaagtcgaatgcccagatgaatgggtaccgacagtggttggtgaacgagctgaaaaagtataacggctga

SEQ ID NO: 9631 - RNA, 927 nt, synthetic construct
  source 1..927: mol_type = other RNA
atgatcacttacaaagaactctcctctctgaccaatgaccttggattctctgctagggctttgtacagcatcacacataacattcacaaacactataagccggtgtcgatacccaaaggcaacggcgagatgagaaagctatgtgttccagataaattcctgaaagccgtacagagaagtattgcccgcaacctgctctcctacgaagagattagcccatatgcgactgcctaccggttgtgcggttcaaccgtggtaaatgctcggccacatcttggagcggaggtcattctgaaactcgacatttgtcacttcttcgatcacataatctatccagtcgtgaaagataaggtgttccccggtgagaagtattctgaagccaatcgtgtccttctcacattgctgtgtacctaccgcgagagtattcctcaaggcgcacccacatctcctgcaatctccaacattgtgatgagagactttgatgacacggtcggggtttggtgcgaggaccgagggatatgctatacccggtactgcgatgacatgaccttttcaggtgacttcagccctaaggaggtgataagctttgtgcgaactgaactgggcaaaaagggctattttctgaataacaggaagaaggtgatcgcaaagaggggacagaagatgcaggttacaggaatcatggttaacgagaagttaaacgtacctaatacctataggcgcaagctaagacaggagttgtactactgtcggaaatttgggatcaagagtcatatggagaaaatcggggtggagatcacggaacaagaatacatcatgaaactgctcggccgtgtcaattaccttttacaggtgactcccgatgacaagtccgccaaagaagctaaactgtggctgattaaggaactgaagaaggcctcactctga

SEQ ID NO: 9632 - RNA, 939 nt, synthetic construct
  source 1..939: mol_type = other RNA
atgtttcgcaaaagagagggggggtttgccgtcattgtttattccgagttatcatccttgtgtcgggatctgggcttcactgcccgcgagctgtatgcagctagccggaacaccgacagactctacagaaaagccgtgctgccaaaagcgggtggaggagtacgggaactgagcgtgccatctcctcttctgaaagccattcagacagcggtctatgagaaactcctgtcgcaggaaccggtgtctcggtatgcctgcgcatataggcccggtggcgggatcaagagatgtgccgcaccgcatgtgggcagaggccaagttcttaccctggatattcgacgatttttcgactccgctatctaccccctgataaaggagaaggtgttcgctcccgagcgttacagcgctcctaacagggtcttgctgtcaatgctgtgtacatacagagatgctcttcctcagggcgctccaagtagcccagccatctcaaatatattactgtacgggttcgacgaggcggttggggaatactgcagggagcgtggcattaggtacacgcgatattgcgatgacatggcatttagtggtttgtttgacgcacgcgaactgactgccttcgtggagtccgagcttcgcaaactcggattctacctcaatcgaaagaaaacaaggctggtgcggcctggacaacgtcaggcagtcaccggagttatcgtgaatgaaaagcttgctgtgccccgggagtacaagaggagactacgccaggagctctattacatcgaaaagtacggcatggaagaacacctgtctcgcctcgggggcgaagcccaaaacgtcgattatgccgcacggttgctcggaaaggtaaactatgtgttaagtatcgaacccggtaatattgaggccgcccactgggctaggttgctaaaggacaagtga

SEQ ID NO: 9633 - RNA, 930 nt, synthetic construct
  source 1..930: mol_type = other RNA
atgatcatctacaatgaactggcgagcctggaagccgacctgggttatagtgcaaagcaattatacagcctgtcaaatggaattaaccggcactatcatcctgccgagatccctaaaagcgacggcggctctcgttcactatcggttcccgatgctcagctcaaggcagtccagagtaaaattgctgataggctgctttctctcgaagatatttccgtatatgctaccgcataccggccagggggctccatagtgagaaacgccctgccacatattgggcattcagatgtgttaaagttggacatacgcaggttttttgattcgatcacgtacccactcatcaaggagaaggccttccctgcaaagcggtacagcgaaaaaaatcgcatcctgctagcaatcctctgcacctacaaagaggctttgccgcaaggtgctccctcatctcccgccatctccaacatcatccttcgaaatctggacgacgccgtcggctcctggtgtagatccagatacattacctataccaggtattgtgacgacatgacatttagcgggcgtattagtacagccctgaaaaaggagatcattaacacagtagagcagcagctccggaaagcgggcctgtatttgaacgccgataagacagtcttcgtgcacgacggacagagaaaatgcgtgactggcatcattgtgaatgaaaaggtgtccattcctgctggttatcggagggatataagacagaagatgcactacatatgctcctacgggatcaagtctcacattcagcatactggaagtaaattgtctgaggaagaatacctgcgaaagcttctgggacgcattagcttcgttttatctatcgacccccacaacgaggagatgcttggatatcgaagcaaactcatagagatccgcaggactctgtga

SEQ ID NO: 9634 - RNA, 918 nt, synthetic construct
  source 1..918: mol_type = other RNA
atgatcgtctatcgtgaatttagtagcctgactgaggatctggggttttcaggcaaggccttatattcgctgtcaaacaagatccaccgccattataagaaggtggaaattccaaaggccgatggatccgtgagatccctatcagtgccagacgacttcctcaaggccgtgcagcgcagaatcgcagatcggctcctgtctatggaagagatctccccctacgccatagcataccgccccggtggatctccactgaagaacgcaagacctcatatcgctaaaaacaccgtcctgaagctcgatattacctgtttctttgaccacattacttacttcttagtgaaagaaaaggccttccccaaagaaaggtacagcgagaggaatcgaatccttttgacgatgctgtgtatttacaatgatgccttgcctcagggtgcacctacatctccggttatcagcaacataatcatgaaggacttcgataatgcggtaggaaggtggtgcagagagcggcggattgtttatacaagatattgcgacgacatgaccttcagcggggactttgacgtctgcgaggtcaaaaattttgtgtctggcgagctaaggcgtatgggcttctttcttaactccaaaaagacaacagctgttcgacgcggacaacggcacactgtgaccggcattgtagtcaatgagaagcctagtattagcgctaattacaaagccaaattgcggcaagaactgtattacatcatgaagttcgggatcaattcccatttggagaaatgtgggatagacatacccgctgagaaatacctgcagaagctcctcggtagggcgaactatattcttagtgtggagccagataacaaaaaggtgaaagaatacaagggctggctgaccgcccagctgaagaaatga

SEQ ID NO: 9635 - RNA, 921 nt, synthetic construct
  source 1..921: mol_type = other RNA
atgatcgtctacagagagttatcttctctcgaaacggacctgggggttagcgccaaagtgctctacaccctaagcaacagtcgttcgtcacattatcacactgttatgctgccgaaggagaatggagagttgagacaactgagcgttcctgacgggttgttgaaaagtgtacagcgaaaaattgcgaggcagctgctcgtctacgaggaggtatccccatatgcaatggcttatcggctcggaggatcaactctccacaatgcagtgccccatgtggggcagcccatggtgatgaagctagatatcaggaagttctttgaccactgtttttacccgctggtcaaggagaaagccttccccgctgctaggtattctgaaccaaaccgggtgcttctgtctcttctgtgcgtctaccacgacgccttacctcagggagcccctacctcacccgcgatctccaatataattctgcgggatttcgataacgccgtgggctcctggtgtgctaagcgccatatcgtctacacacgctattgtgatgacatgaccttcagcggttcctttgacccagccgaggtgaagacgaaagtacggacagaactgagaaaggtgggcctgtttctgaacgataacaagactgtcgtgcttaatggcggccaacggcagacagtcaccggcatcgtggtgaacgaaagggtttcagtgcctagtgactataggcgaaaactccgtcaggaactgtactactgcagaaagtacggtatagcagcacatttggaacacattggcagcgaggctgacgtacgctcctacgagagacagctcttagggagggtgaattacgttctgtatgccgatccatgcaaccaagagatgcaggaatatcgacgctggctgcagaatacacttaccggtaaatga

SEQ ID NO: 9636 - RNA, 912 nt, synthetic construct
  source 1..912: mol_type = other RNA
atgattacatataaggagatctcctctttggagaacgatcttggtgtcagcgctaaagcgctctatacccttaccaatgagatccatcgccactacaggactgtaatgataccaaaggacaacggcgagctgcgtaagttgtcggtgccagacccctttctcaaaagcgtgcaacggaagattgcccacaatatcttgtttttcgaggaaatcagcccgtatgcaactgcttatagacctggaggaagtaccctcattaacgcactgccacacgtgtccaagaacactgtcatgaaactcgacataaacaagttcttcgaccacattatttaccccattgtgaaggagaaagtcttccctgcccacaaatacagcgaagccaacaggattctgcttaccctgatctgtatttacaaggattcactcccccagggagcaccaacaagtcctgtcatctccaacatcgtgctgaaagacttcgataacaaagtaggtgagttttgctttaagaggaatgttacgtatacacgatactgcgatgacatgaccttttctggagaattcgacccccagcaaataaagagattcctgcagaacgagctaaaaaagttagggctataccttaattccaaaaagacagtgatcctgaagaacggccagcagaaaaaagtcacgggcatcgtggttaatgaaaagcctaacgtgtgtgccaagtacaaacgcaagctgagacaggaaatctatttctgccagaaatacgggattaagaatcatttggataagaccggctcatgtctgactgaagcccaatataaggctcagctcttagggcggataaattactgcctgtctgttagtcataaagataagaatatgcagggctttaaggagtggctgatcaataataaatga

SEQ ID NO: 9637 - RNA, 1119 nt, synthetic construct
  source 1..1119: mol_type = other RNA
atgaacgttaattttctgacagccgcagcctcacgttgcgggcagacctacacattcgattcacggttcgcccctgaaaagctgactgctcagtatacaggcccctgctctatggggtggcgcattctactgcgcatttttagtatgaggatctctattgcatcccatgctttccgggaaggcagtagcgtggtcattgtctaccgggagctttcctccttggtcagtgctttagggttttccgccaaaacgctctacggtgtgagcaatcgtgtgaccacacattacagacagctgaagataccgaagtcaaacggaggtttccgaacccttcacatccccgatcagctgctgaaaagcattcagcgacaaataaatatgcagctgctgctccctgagcctgtgagcccgtttgcaaccgcctatagaccaggaggcagcactcggataaacgctcttccacatgtcggcaaacctatagtcctcaagcttgatatcgatcatttctttgaccacgctttctatccattggttaaagagaaggcgttccccgcaatgaggtattccgaaaagaatcggattttgctgagcctattgtgcacatataaggatacccttcctcagggtgctcccacgagtcccgcgatctctaacatgatcatgtacgacttcgacatggccgtgggcaaatggtgtgtgatgcataatgtgagctacactaggtactgtgacgatatgaccttttccggaatgttcgacattgcagaggttatcgcggtggtgaaggacgccctgaaagactgggggttttttttaaacgccaggaaaaccactgtgattagatcgtcacagcgccagactgtaacaggactggtagtaaatgagcaagttcacattccatcttcttacagaaacgccctccgccaggagctgtattactgtagaaagtttggaatccagtcacacctggagcacaggcacatcaaaatggaacccgaagcctacgcattatctttgctcggcaagatcaactattgtctctccatccacgctgccgacccaatgatgctggagatgaagcagtggctcatgcaacaaatccgaaacaattgcttctga

SEQ ID NO: 9638 - RNA, 954 nt, synthetic construct
  source 1..954: mol_type = other RNA
atgatcatttatcgggaattttctagcctgtctcgcgatcttgggtttagcggccgaaccctgtacggggtcagtcacgccgtgaccaaacattacagaccagtccgaatccccaaacgcggtggtggaactagggagctgcatatccccgatcccctactgaaagcaatacaaacgcggattgccgaaacactcttgcctctggaggaaatttctccatgtgcttcagcctaccggcccggaggcagtaccaaaaggaatgcgttgccgcacgtgggccggcagacagttctgaaattggacatctccgggttcttcgatcatattacctacccacttgtaaaaaagaaggctttcccagcctccaggtatagtgaatcaaacagagtgttactcgcaatgctgtgcgtgtataaggattccctgccacagggcgcacctacttcacctgctatatccaatatcgtgatgaaggacttcgacgatgccgtttggaggtactgtgccgcgcgcgagatcgcttacactagatactgcgacgacatgacgtttagcggcgacttcgaccctgcccccttgattgcatttgtaaaagcccgtcttaagaagatgggtctatttctcaacgagaagaaaaccgctgttttaagacagggacgcaggcagcaggtgacaggggtcatagtcaacgagaggccaggagtgcctgccgagtataagcgggcaattcgccaagaggttcactattgcgaaaagtatggcgcggctgatcacctctcgttcagaggagatccaactccgcctgccgactatctgatgtctctgatgggccgagtgaactacgtgctcagcatcgaacctcaaaatgaagagatgcgtgggtacaagacactggtcgctgcctggcttaaggaggctgcacagcccaaaaagacccccgaggaacagccctga

SEQ ID NO: 9639 - RNA, 924 nt, synthetic construct
  source 1..924: mol_type = other RNA
atgatcgtctatcgggagctctcttctctggctcgggaccttggggtgagcgggagaactctttacgccttgagcaaccatgtcgtgaagcactaccgtcgagtgctcctcccaaagggctcaggcgagtaccgtgagctgcacgtccccgacgatctcctgaaaatggttcagaagcgcatagcagaaaggctgctggcgatggagccagtctcaccttatgcgactgcatatagagtggggggaagccctatgttgaatgccaaacctcacgtgggcgctcctgtgctcctcaagatggatattaggcatttcttcgatcacgtgatttaccccgtggtcaaggaaaaagtcttctccgcagagagatatagcgaaaagaaccgggttctgttgactcttctttgcatgtacaaagatagtttaccccaaggggcaccaacaagcccggttatttctaatatcatcatgagggacttcgacgacaggatcggatcatattgtcgcgagaggggcattcggtacacaaggtattgtgacgacttaacattctccggtgactttgatcccgccccaatcaaagcctttgtacgcgaagaactgattaagatgggattttacctgaacgataaaaaaaccgttgtgctgcgagaaggtcagaagaagacggttaccggcatagtggtgaatgagcgattaaacaccagttcggcctacagaagaagtctgcgccaagacgtaagattttgcaagaagtacggtgtcgctgatcatctgaaacacattggaaaagtgggagtatctgaatactcctatctatcccagctattgggccgcgccaattacatcctgcaggtagacaaggataacgctgaggtgaaggggtataaacggtggataatcgagcagatgaccaagcattga

SEQ ID NO: 9640 - RNA, 912 nt, synthetic construct
  source 1..912: mol_type = other RNA
atgataatataccgggaactgtcctccctgtctgatgacctgggcttcagcgctaagaccttatactcagtaagcaattctatttcttcccactaccgctgtgtctcaatcgccaaaccaggaggcggctatagagaactctctgtgccggattgtctactgaaaagcattcagaggagaattaacgagaagcttttgtggatggaggagatttctccctacgccacagcctaccgagtgcttgggagcaccaagaaaaatgcattccctcataagggtaaccctatcgtcctgaagttggacatacgccactttttcgactcaattatttatcccgtcgtgaaagagaaggtattccccaattatcgatactcagagcagaacagagttcttctgagcttgctgtgcgtgtataaagatgctttaccccaaggcgcaccaacgtctccagccatctcgaacatcatcatgcgggactttgacaacaagataggatcgtggtgcagcgaaaggggggtggtgtacactcgttattgcgacgatatgacattttccgggaatttcgatcctaaaccgctgcgcgcacatgttaaatccgaactcagaagtatgggcttctttctgaatgaccggaagagtgtgatcctcaaccggggtcagtgtcacatcatcactggagttcttgctaatgagcgactccgggccccaagtgactacaggcgcaggatcagacaggagatgtatttttgtcgtaaatatggaatcgggtcccacctgcgcaggatcggtattgaagacgacgtcgcccattataggttagtgctgctcggcagaattaactacgctctatccctggatcctgcggatagcgagctcgtcagttacaagaagtggttgtgcgaaaatgattga

SEQ ID NO: 9641 - RNA, 924 nt, synthetic construct
  source 1..924: mol_type = other RNA
atgatcgtctaccgcgagttttctagtctcgcaggcgatcttggcttcagtgcgcgtaccctctatggggtgagctatcatagagctagccactaccaaaccgtcagaattcccaaggccaatggcgaatatagagagctgcacgtgcctgacgccctattaaagtcgatccaacggcggatcctgagcgtgatactggaccgggaggaaatctccccatatgctaccgcctacaggtacggaggtggtattgcaaagaacgcagctccacatgtaggcaagccagtggtgctgaaactggatattaggcactttttcgaccgagtcatatacccccttgtaaaagatcgggccttccccgcagaccggttttcagagagcaacagggtgcttttgaccatgctctgcatgtatagagatgctttaccgcagggggctccaacatcccctgcggtttcaaatatcatcatgagggagttcgatgacactgtgggggcgtggtgtgcaagacagcagattgcttacacacgatattgtgacgatatgacattctctggcgactttgaccctaaacccgttattcagaaggtgcgccaggaactgcagaagatgggttttttcctgaacgacaagaaaactgtggtggtccgcgatggacaaaaaaaactcgttacaggggttgtagtcaataggagactgagggcccctgccgaataccgtcgtaacctccgacaggagctgtactattgcaggcgcttcggagtgtccagacatctggagcacagggcccttcagcaaactgagggccagtacctacgaggactgttggggagagtccagtttgccctgcagctcgatccggatgaccgggaacttcgcgacgatcgcgcctggttgttgtcccggatctctgactgcacgtga

SEQ ID NO: 9642 - RNA, 924 nt, synthetic construct
  source 1..924: mol_type = other RNA
atggtcgtgcatagagagctgagttctttgtgccaggacctgggttacagtgctcgcgcactttattctctgagcaattcagtcagcgagcactatcacgatgcgatgatccccaaggccaatggcgagtaccgactcctgcacattcctgataaattcatgaaggctgttcagaaatctatcgctcagaacatcctgagctatgaggatattagcccttacgccatggcctatcggccagggggctctaccaaggccaatgcgttcccccatgtaggggcatcgatggtgatgaaactagacgtgcgcaagttttttgaccacattacctaccctatggttaaggaaaaggtgtttccgagcgagaaatacagcgagtccaatcgtatcctgctctcagtgctttgcgtatataatcatgccatcccacaaggggccccaacttctcctgccatctcaaacattatactgagagatttcgacaaccgtgttggtgactggtgcggtaagagtggaataacctacacacggtattgtgatgacctgaccttttcaggggaattcgaaccaaaagaggtgaaggcttttgttaagaaggaattattcaaggaaggcttcttccttaactccaaaaaaacaatcgtgttgaggaacggccaacgcaaggaaattactggaatcgtcgtgaacgagaaggccgcagtccccgcaagatacaaaaaaaggatacgacaggagttgtactactgtcggaagtttggcattgacgaacacgtgaagcggctcggactacccgaatccacggaagcttacgcaaggaaactgctcggaagaattaactatgtgctctccgtcgagccggataatgacgagatgaaaaggggccgcgctgagttactgagttggttccagtccacatcctga

SEQ ID NO: 9643 - RNA, 912 nt, synthetic construct
  source 1..912: mol_type = other RNA
atggtggtctaccgggaactgtcttccctgtgtcacgatctcggctattcagctcgcgccctctataccctgtcaaacagcgtggcagagcactaccacgatgtgatgattccaaaggctaatggggagcagagacttttgcacgtgccggacaaattcatgaagtccgtccaaaaaagcattgcgcgtaatctccttgcatacgaggaaatcagcccttacgctatggcctaccggcctggaggttcgacgagagccaacgcaaggcctcatgtaggggcgccaatggtgatgaagcttgatgttcgcaagttttttgaccatatcacttatcccacagtcaaggagaaggtgttcagcagcgaaaagtattccgaaagtaaccgagttctgctgtccgtcttgtgcgtgtattcacacacaaccccccaaggagctcctacatccccagccatcagcaatatcataatgcgagatttcgataacagagtgggcgattggtgcgacaaaaggaacataagttacactaggtattgtgacgacttaactttcagtggagagttcaacccatctgaagtcaagacattcgtgaaagaggagctgtttaaggaaggtttttttctgaacagtcggaaaaccgtggtgctgcgtaatgggcagcgcaaggagattaccggcatcgtagtcaatgagaaagcctcagtgcccgccgagtacaagaagcgcattagacaggagctcttttactgtcagaaatacggcatcgacgagcatgttaaaaggttgggtctatgcgaatctggggaatcttatgcacgaaaactactgggccggattaattacgttctctctgtagaacccgaaaatgaggagatgaagagaggacggaccaacctgcttctgaggttatga

SEQ ID NO: 9644 - RNA, 930 nt, synthetic construct
  source 1..930: mol_type = other RNA
atgatcgtgtaccgcgaactgtcttccctgtgtcaggatttagggtattccgcccgggcgctctacaccttgtccaacacagttacggagcactaccacgacgtgtcaatcccaaaagccaacggagagtataggctgctccatgtgccggatacattcatgaagagcgtccaaaaatctatagcccggaacatcctcgagtatgaagagatctctccttacgctaaagcatataaacccggaggtagcaccattagcaatgcagagccacacgtgggggcccagatgataatgaaactggatatacggaagttcttcgatcacattacttatccaatggttaaggaaaaagtgtttctggctgaaaagtactccgaggcgaatagaattctgctgagcgtgctttgcgtatatagtcatactgtccctcagggagctcccaccagtccagtgatctccaatatcatcatgaaagactttgacaaccgcgttggcaagtggtgtagcgagaagtcaattacctacactcgttactgcgacgatatgaccttctcgggtgtgtttaaacccgccgaggtgcggaaatacgtcggcgaggagttgttcaaagaagggttctttctcaatgggcaaaagacagttgtcttacgcgagggacagcgaaaggaaatcacaggcattgtgataaacaacaagctgagtatccctaaggcctacaagaataagattaggcaggagctatactattgcaggaaatatggcatcgaagaacatatcaggagattggagattaaggaacgtcctgaacgataccttagaaagctgattggtagaattaactatgtcctctgtgtagagcccgagaatgaagaatttaaggctggcaaggagtgggcatcagaagagatcaaaaagctttctgacctgtga

SEQ ID NO: 9645 - RNA, 930 nt, synthetic construct
  source 1..930: mol_type = other RNA
atgatcgtttataaagagctcagctcactctgtcatgatctgggctttagtgcaagagccctgtacactgcatccaactcagtggaccagcattatcacaccgtcgaaatacccaagggcaacggagagactaggacattgcacgtcccagacccatacatgaagaccatccaaaaatccattgcaaagaacctgctggcctacgaagaagtcagcccatacgctattgcatatcgattcggcggcagcacaaaagctaatgcggctccgcatgtgggccaccctgttattttgaaaatggatatccgcaagttcttcgaccatatcacataccccatggtgaaagaaaaagttttccccgagaaaaagtatgcggaatccaatcgcattttactatctattctctgcgtatacgatcacacgattccccaaggggctccgacgtctccagccatatctaatattatccttcgggagtatgacgacattgtcgggaagtggtgcgaaaatcaggccataacatataccagatattgtgatgacatgaccttcagcggtgattttgagcctgcccccgtaatcgcctttgtgaagaaggccctgtttgagcagggattttttgtgaacaacaagaagaccgtggtgttgagaaacggacagaggaaagaggttactcggattatagtgaatcaaaagatctccgtgcctgcttcgtataagaaaagtttacgtcaggaactgtactactgcgagaagttcgggatcgagagtcatcttaagcacatcaaagccaatgaaaatgaggagcactacatcgaacggctgctgggtagggtcaactacatcctgtcagtggagcccgataatcaggagatgaaaaaatatcgacagtggcttctcaaccagaagccttacatgactaaggcatga

SEQ ID NO: 9646 - RNA, 918 nt, synthetic construct
  source 1..918: mol_type = other RNA
atgatcgtgtacagagaactgccctcattgtgcaaagatctgggcttttccgcccgggctttatatgcggcctcaaataccattaataagcggtatcataaggttaggatccccaaggctgacggagactaccgcgaactttacgtgccagatgactttttaaaatcaatccagcgcagcatagccaagaacatactggcctatgagccaattagtccctacgcctgcgcatatcgaattaacggatccacagctctgaacgcctgtacccatgtcggagagccaacgatcctgaagctagacatcaggaagttcttcgatcacattacttaccctatggtcaaagagaaggtgttccccgcagaaaaatacagcgaacagaacagaatattgctctcgatcctttgcgtctacctgcagacagtacctcagggcgcaccgacatctcctgccatttccaatattattctgcgagagtttgatgaccgtgtaggcgaatggtgtaaggcgaggaacatcaattataccagatactgcgatgacatgactttcagtggttcttttgacgcaaaggaactcaaacagttcgttgagaatgaaattcaaaaggagggttttttcatcaacgctaagaaaaccgtggttctgcacgatgggcaacggaaagctgtgactgggattgtggtgaatgagaagctgagcgtccctgccgaatataaaaaggacatcaggcagatcatgtattattgtaacaagtacggcgtgatcgatcacatgatggcaaataagatcatcgggtataaaagtgactacctcaacgttctcctaggcaaaattaattacgtgcttagcgtggagaaatctaacaagcaatttatagagtaccgctcccaggtcaagaaatggttggccgagtga

SEQ ID NO: 9647 - RNA, 939 nt, synthetic construct
  source 1..939: mol_type = other RNA
atgattaccataacctacaaagagctgagttctctaacaaatgatctcgggttctctgcaagggccctctatgccctgtccaaccactccacaaagcactaccataagacagtgatccccaaacatagcggaggggagagggtgctccatgtccctgatgagtttctcaaagcagtgcagcgctcgattgtgaggaacttactggcctacgaggctgttagcccccatgcccgcgcctactgttatggcgcgagcaccgtgaagaatgcgctgccgcacaaggggcaccgagttcttctcaagcttgacattcagaatttcttcgacagcatcaattatcctctggtgaagaacaaagtcttcacaaaggaaagattctctgagtcaaaccgggtgcttctttccctgttgtgcacgtataaagacactctgcctcaaggagctcccacctctccattcgtctccaatatcataatgaaggactttgacaacactgtaggtacctggtgtaacgaaaggaacattacttatactcgttactgcgacgacctgacgtttagtggagacttcaatcaggatgaggtcaaaacatttgtaagtcaggaactgcgaaaaatggggttctttttaaacgctaagaaaaccaccctgctgcacgatggccagcaaaagtgtgttactggaattgtggtcaacgataagttgaatgccccactgagatatcgcaaaggcatccggcaagaggtttattactgcaagaagtttggtattgaagagcacatcaaaaaacagggtatagaaaagacccgggaaggctacctaaagtcactcttgggcagaatcaactacgtgctgtcaatcgatgatactaatgaagagatgaaaagctacaaggcatgggcattgaaggagtgcaaaacagctcagttaaaaaagtga

SEQ ID NO: 9648 - RNA, 930 nt, synthetic construct
  source 1..930: mol_type = other RNA
atgatcaccattacatataaggaactctccagtctaacctgtgacctgggattttcagccagagctctgtactccttgagtaaccacgcctccaaacactaccacaaaactgtgattcccaaagggagtgggggcgaaagggtgttgcatgttcccgacaatttccttaaggcggtgcaaagaagcatagtccgcaatatactctcccacgaagaggtttcaccttacgcccgagcatatagatatggcgcaagcactttgaagaatgcgatgccccacaagggtcataaagtcatcctgaagctggacatcaaaaattttttcgacagcatcatctacccactcgtcaagaaaaaggtgtttccttctgagcggttttcagagtccaatcgggttctcctgacacttctttgcatgtacaaagatgccttacctcagggggccccaacatcgccctgcattagcaatattatcatgaaggacttcgataacaccgtaggcacctggtgtaaggaaaggaacatcacctatacgcgctattgcgacgacctgacattctctggagatttcaatgtagatgaggccaaggcctttgtggaggctgagctgaagaaaatggggttctttctgaatgcaaagaagactactgtcttgcgagacggtcagaagaaatgcgtgacgggcatccttgtgaacgataaaattaacgcaccgttagaatatcgtaagagcataaggcaggcagtgtactactgtaagaagttcggcattgatgaacatctgaaacgcaacggaatcgagaaagctgctgagggatacctcaaatctctgctgggtcggattaactacgtcctctctatagataacaccaacgaagagatgaagggctataaagcttgggccgtgaagcagctaaagaagctgaaatga

SEQ ID NO: 9649 - RNA, 924 nt, synthetic construct
  source 1..924: mol_type = other RNA
atgatcgtctataaggaactcagcagcctaaccaccgatttaggctttagcgctcgaactctatactcggtggccaggatggttagaaagcattaccacgaagtcagtattccaaagaaggatggaacagagcggaagttgagcgtaccagacgaactcctcaagaggattcagagacgcattgccgagaaaatactgatgtatgaagacattagcccctatgcgacagcatatagggtatgcgcctccacacttatcaacgctaaagcccacctggacaagaaatgcatattgaagttagacatcaaccatttcttcgattccattatctttcctgtggtgaaaaacaaggtttttaccgaagagaaatactcatacgcaaatcgcatcttgctcactgcgctgtgtatctatgaggattccgtgccccaaggggcacctacttcaccggtgatctccaatataatcctgcgagaatttgattttcacatcggctcttggtgcagtgagcgggggattacctatacaagatattgtgacgatatgacctttagtggcgagttcgaggctaaggaggtgataaaagaggtcgaggatgcactcgctaaggaaggattctaccttaatcggaagaaaacggccttcctgaaagacggccagcgtaaagaggtcaccggcatcgtggtgaacgataaggttagcgtgcccaaagagtacagacgcaagataaggagtgaagtccactacattaagaaattcggaattgactcacatctgtctcacattggttgtaacatggacaaggtgaaatacctgatgtccctgttcggtaagatcaactacgccctttctgtttctcctgacaatgccgaaatgaaaaattgcaagaagatcattgggaaaatcctgtacaagctgaaatga

SEQ ID NO: 9650 - RNA, 939 nt, synthetic construct
  source 1..939: mol_type = other RNA
atgaagaacacgtactttgagctgaaaacactggaaaatgatcttggagtgaaggcagggaccctatataggctgtcaaacaacattaactcccattatcggtctgtaagtataccaaaacctgacggcagcaaacggactttaagtatcccggaccccgtgctgaaacacgtacaaaaacgaatcaacgacgtcattctatctacaatgaatgtttccgtgtattcgaaggcatattcatttggcgattcacctctgaggaatgctatcccccatctgaagcagaagttaatcctgaagttggacatcagaaagtactttgatcacgtcacatatccccttattaaagagaaggtgttcaaagatgatcagttctctgagagcaacaggatcttgttgagcctgctctgcatttataatgaaagcttgcctcaaggagccccaacttcccccgccatatctaatatccttttatacgacttcgacaatgtgatcggcgaatggtgtcgccagcgcaactttgtttatacgcgatactgcgacgatatgacattttccggtaatttcgacggacttcaccccatcgacataattagaaaagtcgagctcgagctgaagaagtacggcctgttcattaaccggaagaaaattcagagtctccatgatggccaaagaaagaaaattaccggtatcgtggtgaacgacaaaccaaatgtgcctgcgaattacagacgcaagatcaggcaggaaatgtactacatcaacaagtacgggctgcaggatcacctcaagaaaaccgggtcaaagcagaccgaggccgaatatctccgttctctcctggggcggataaactacgtcttgagtattaattgttccagcgagttcgaggtttaccgtaccaagactgtgagcctgctggatgctctcctttccgtctga

SEQ ID NO: 9651 - RNA, 930 nt, synthetic construct
  source 1..930: mol_type = other RNA
atgatgaacacttactttgagttgaatacccttgaaaaggatctcggaatttctgcgaggaccctgtattcgctgagtaacaacatcaactcccactaccatagcgtggtgatacccaaatctgacggcggctccagaaaactatcgatacccgattacagcctcaagaatgtccagaagaggatcaacaatgttatactgagctgtatgaatgtgagtatttatgctaaggcctatacgaatggtgacagtccgctgagaaatgccttgcctcatctcgacaaaaagaccattctgaagctggacataaggaaatacttcgaccatattacttaccctctgatcaaggagtcagtcttcaaaaaggaaaattttagcgagagcaatcggatcctcctttccttactatgcatgtttaatgagagcctccctcaaggtgcaccaacaagccccgccatttccaacattcttctgtatgatttcgataattggatcggggagtggtgccgacgccaggacatcacttacacacggtactgtgacgacatggcattttctgctgaagaactgaatagtgatataatcatcgagcgagtacgcctcggactgaaaaaatatggcttgtacatcaacaacaagaagactcagattatccacgatggacagagaaagaaaataacggggatcattgtgaacgacaagccaaacgtgtccatcgattattgcaagaaaattcggcaagaaatgtactatatccgtaagttcggcattgattctcacttaaaagctatcgggtacgagaagaccgttgacgactatctgaggtcattgctgggcagaatcaacttcgtcctttctatctcattttccaaagagttcgatgattaccgcacaacaattgcctatattcggaacaccattttttcatga

SEQ ID NO: 9652 - RNA, 948 nt, synthetic construct
  source 1..948: mol_type = other RNA
atgaagcacacgtactttgaactggagacattagaaaaggatcttaacgtgcacgccaagactctttacgggctcagcaataacataaatgcccactaccactctaggataattaagaagtctaacggcggtgaccgcgtgctcagcgttcctgacttcattttggtcaaggtgcagaaccagattaatgacgttatcctgagtcgcatgcccgtgtctgtgtacagcaaggcctacagcgcaggagattccccattaggtaacgcggcacctcatctgcgtaatgataccgttattaagctcgacattaggcagttttttgaccatgtcacatatccactcgtaaaagagaaagtgtttagaaaggaactgttctccgagtccaatcgcatcctgctatcattactgtgcatgtataatgaatcacttccacagggcgctcctacttctcccgctatctccaatatcctgctgtacgacttcgataaccgcatcggtgaatggtgtcgacagcggaatattatctacacaagatattgtgacgacatgactttctcaggagattttgagaactgggatccgatagacattatcagaaaagtcaaactggagctcaagcaatacggcctcttcatcaacggccggaaaaccaagatcctacataacgggcagcgcaaaaaaattaccggaatcgtagttaacgataaacccaatgtctccatcgactacagaaaaaaaatcaggcaagagatgcactatattcggaaatacggattgaagaaccacattcgtaagaccgggtgcgataagtcggagatggaatatctgcggagtttgcttggcaggataaactatgtgttgagcgtgaatagaatcgaggagtacgaacggtatcgagacgatgtggtcagttatctgaggcatatggggctgcgacaggatctgtga

SEQ ID NO: 9653 - RNA, 972 nt, synthetic construct
  source 1..972: mol_type = other RNA
atgaaacacacttatttcgaactgaaaaccctggagaaggatttgggagtctccgccaaagtgctttatacactatccaatcagatcaatcggcattaccgctctgtggagatcccaaagtccgatggtggcacccggaaacttagcgtccctgaccccttactgaagtctgtgcaacgaaagattaacgaggttatcttgtcacggatggatgtcagttcttacgctagagcatatagttacggggactctccgctcaagaatgcctcttcccacgtgaacaaaaaggagatttttaagctggacattcgcaaattctttgaccacgtcacatacccactgattaaagagcgcgtgttcacagcggaccgattcagcgagagcaaccggattctactgtccttgctgtgcatgtatgacgaaagcctccctcagggagctccaaccagtccttcgatatcaaacatacttctctacgagtttgacgaagaactgggcatctggtgtaaagagcgggatgtgtcctacactcgttactgtgatgatatgacctttagcgccaatagcctcactcccgaggaaatcgaacataaggtatcatctatgcttaagcagtacggcctgttcatcaaccaaaagaagaagcagtatattagggggagtagaagaaaaaaagtgactggcatcgtggttaatgaaaagcccaacacgcccgttgagtatagaaagaagatcaggcaagagatatttttcatcaacaagtacggtctgaaagatcatatggaaaggattaaatgcacagatagccaggggagttatctgtcctcactgttaggaagaatttcgtatgtactctccatcaatcagagcgaggagtttgaaaagtaccgtgagcagatatcaaccttactcaaggagcaggacgacatgcgcatcattcagaaatctgaagaaacgaggaggttgctgtga

SEQ ID NO: 9654 - RNA, 927 nt, synthetic construct
  source 1..927: mol_type = other RNA
atgatagtgtacaggaccatgcaggctttggagacagacctcggcttttccgcccgcacactctattccgccgctaataccattgacagacactaccatgaagtccggatccccaagcgtgatggcacagagcgtattctgcatgtgccagacgagttcctaaagcgaatccagagaagaataaacgatgttctcttggcgggaatgccagtgtccaggtatgcaaccgcttacaatcctggtaattcgatcatgcagaacgcacagccccacgccggcaagcacttcctgttgaaacttgacatccgagacttcttcgatcatattacttacccactcgtaaaggagaaggtttttccggaacacatctactctgagcagaaccggatactgctaagcgttctttgcgtgtaccatgactcaatcccccagggagcccccacttctgatttaatcagcaatatcgtgctctacgatttcgacagaaccgtggggcgatattgtagagaacggaacatagccttcacaaggtattgcgatgacatgagcttttccggcgattttgatccacaagaactgaccgcatttgtctcagaggagctgcgcaaagacgggttctttctgaatcgcaaaaagactgtcacggctaggcctgggcaggccatgagggtgactggtctgtctgtgaacgaaacggtcaacgtccctagtgagtatcgccggaagattagacaggaaatgcactttattcagaagtacgggaccgcacaacacattaaacgcctgggcatcggaatggaggagcaagcgtatctgaatagcttgaaaggacggatcgcctatgtattatcagtgcgtgaaatccctgagttcagggaatacctgaaacaaattagtcttctggagaagcggcagatgattcagtga

SEQ ID NO: 9655 - RNA, 987 nt, synthetic construct
  source 1..987: mol_type = other RNA
atggtctactataaggatctgagcactcttgagaaggacataaggatcccaaggaaagtgctgtacaagtttagccggaatattttctcaaactacaagaccgtcgaaatcatgaaaaacaacggagagatccggacccttcacgtcccaaaggacaatttaaagagcatccagaggaaaatacgcttttatatattgcggaagatgccgacaagtatctacgctaccgcatacatccgtggggagggcatagttaataatgctaaggttcacgtgggggcggaaaatattctgaaactggatatccgacacttctttgataacatcacctatcctatggtaaaggagaaggttttcaaacccgacattttttcagaaccaattaggatcctcctatcaatcctgtgtgtgtacgagcactctattccccagggagcccccacttcgcctgacatttccaatatcattatgcgcgatttcgacaaagaaattggtgactggtgcaaagaacggaacataaactataccagatattgtgacgacatgacctttagtgggaaattcgataaagagcctgtgatcgagaaggtggaatccgaactccgaaagatgggattctacatcaacaataggaagacaacgtacctccattccgggcaatccaagaacgtgactggaataatcgtcaatgagaaattgtctgccccccgtaaatacaaaaaggaaatcagacaggagatctattactgcaagaagtatggcatcgaaaaccatatgaagcattctgtgctgaaaaagaaatccagacagcttagtgatgccctgaagggccaaatcgacattgacattgatgtggagattagcacagagcagtatattaattctttgatgggccgcattaactacgtcctgagcgtagaggataacgaggaaatgagagagtacaaggaatggctctatggctgcggtaatacacagaaattttga

SEQ ID NO: 9656 - RNA, 975 nt, synthetic construct
  source 1..975: mol_type = other RNA
atgactaacgcgaaaaaaaagtattccgatctgtcctccttagccctggatctcggcttcactggaaaagaactgtacaccgtgagtaacgcgataacccgatattacttagaggtggcaattccaaaaagcaatggcgagacgagaaccctccatgtgccctctgggatgctgaaaatgatccaaacctctattgccagggtcctgctgccaaaagtgcctgtttcgcgttacgcctgtgcgtataagcctggggccagcgccgttaaaaacgctatgccgcacgtgggggctcctatagtactgaagttggacattcggaaattctttgaccatatcatctttcctatcgtgaaggagaaggcctttcccgaaaaaatgttcgctgagaagcttaggattctcctaactattctctgcatctataaggaggcactgccccagggctcaccagcttcacctggtataagcaacatcataatgagggacttcgatgataaagtcggcggctggtgtgcagaaaggggtatagcctacacacgctactgtgacgatatgaccttttccggcgattttgatccaaagcccgtgaaggacttggttcgcaacgaacttagaaagatggggttcttcctgaatgacgcaaagacagtggtcgctcacgatggaatgagaaaacaggtatgcggcattgtcgtgaatgagcggcccagcgtgcccaaagattacatcaagaagatccgccaggagatttactacattcgtcgctatggactggcctcacacctaaagagaacaaatccaggagtggaccctgtcaattacatcaactctctctctggacgaatccggtattccatctatgttagcaaggctagtgacaggtgcgccgacccggagttgagtgggtacctggatgtaattaagaaggaaatggacatccttgcaggtcgggactatcgggacagaacatga

SEQ ID NO: 9657 - RNA, 1026 nt, synthetic construct
  source 1..1026: mol_type = other RNA
atgctggccgcagagcagcataccagtagagtgcacgctctgactggatgtcctgcagccgctctgcagaatattttgaaatggtgtcagaaaggggggagaatgattgtatatagggaattatcttccctttgcagtgacctagatgtatccgcaaagaccctttacactctctccaatagtatcacttcccgttataggacagcccagttactcaagaaagacggaggctacagaacccttcggatccccgatccactgctgaaggaggtccaaagaaaaattgtccaggtgcttttgagcagaatggaaataagcccctacgctaccgcttatcggtacggcgcgtctatcaagaagaacgcaagcgtccacgtgggccagaaaacagttctccacctggatatccggcgcttcttcgataggatattgtttccccaagtgaaagagaaggtctttccaaaggagcgctatagcgagccaatccggatattgctgaccattctctgtttcgacggggagaacctaccgcaaggtgcccctacgtcaccctggatcagcaacatcatcttatgtgactttgataacacagttgccgcttggtgccgcaagcgtggcatccattactccagatactgcgatgacatgacgttctcaggtgaatttgaccctgcggccgtggaggacttcgtggaacgccagctgaaaaaggagggcttcttcctgaataggaagaagacacgacgaatggataggtcacgtcggcagtatacttgcggactcgttgttaacgatcaggtgtctgtgcctagcagtgtgagaaggaagattcgccaggaaatgtacatgatccagaaatacgggctggactcccatctccggaagatacaatatgaaggttctgaggaagaatacttgaattcacttctgggaagggtcggctttgtgctgtcgattcaggcctctgacgagtttctgcgatataaacaaaccctgctccgcatgatgaagaaacgaaatatttga

SEQ ID NO: 9658 - RNA, 933 nt, synthetic construct
  source 1..933: mol_type = other RNA
atgatagtgtaccgtgagctctcctcgctgtcccgtgaccttgaggttagcgttaagactttgtattcactttcaaacagcatctccagacactatcatactgtccagcttcctaagaaagatggaggagtcaggactctgagggtgcccgacccccttctcaagcatgtgcagaggcgcattgctgaggtactgctggctcagacagaaatctctccgtatgccaccgcctaccattacggggccagtatcaagaaaaatgctgcggtgcacaccggtaatgagaaggtgttaaggctcgacattcgacaattttttgatcacatcctcttcagtcaggtgaaacagaaggtgttcccagcggaaaggtatagcgaacctattagagtcctgctaacaatcctgtgtttcgatgaggagactctaccacaaggcgcccctacaagcccctggatatccaacattatccttaaggattttgacgacgctgtatctgcctactgcagatcgaaaggcattcactactccagatactgcgacgatatgaccttttccggagaactggacgagaaagaactcacggaattcgtttctgaacagttaaaaaaggaaggctttttcttgaatcgcaaaaagaatcggctgatgaaggcaagccagagacaatatacctgtggtctgattgtgaacgaaaaagtgtcagtcccatctgatacgcggcggaagattcgccaggaaatgtacatgatacagaaatacgggctcagttctcacctggaggccgtgcatttcgagggcagcctggaggaatatctctacagtttgctgggccgggtcaactttgttttatcaatcgagaaacgcgaggagttcttgaagtatcgaaaggcactgctggagatgatcagcgggaacacagacacccacgcatga

SEQ ID NO: 9659 - RNA, 1035 nt, synthetic construct
  source 1..1035: mol_type = other RNA
atggggcctggtacagccgctgcacgcaggaacatcagaaagtggtgctttggccgcgaagaacggcgtatgatcgtttaccatgagcttagtagcctttgcttggacctaggaatcgaagcaaagaccttgtacgctttatccaacaatgtctccagtcattaccatgaagtgaaaattcctaagaagggcgggggaatgaggaccctgcatgtgccggacgatgtgctcaagcacgttcagaagagaattgctgaccagctgctcgcgtgtgaggagatttcagcatacgcttatgcctacagatatggctgctcggccaaaatgaatgcaaagagacacgtgaatcaggaaattgtgatgcggttggatattagggactttttcgaccacataacattcgctcaggtgcgcgagcacgcttttccaaagtggaagtactcagaacccctgcggacgctgctcagtgtactgtgtatcgacgaagatagccttccacaaggttcccccgcgtcacccgccatatccaacattattatgcgcccctttgacgatgtcatgggagagtggtgccggcggaagaaaatcacctatactaggtattgtgatgacctgacctttagtgggtctttcgagcctaatgaggtcatcgcacaagccgccctattcctgagccacctcggctttttccttaatgagaagaaaactgtgatcagacggaaagagcagcgccagttcacgactggactgatagtcaacgagagcgtcagcgttcctccagaatatcgtcgcaaaatccgtcaggaaatgtactacctccagaagtacgggttatcttcccatctggagcagattaacgagacagatgagaaaacctatctgcgatctctcctgggtcgaatccgatatgtattatacatccactcttcagaagagttcaggaactatgaagccatagtgctgaaattgactgaggagacaagccacggcagagacaatcaaaaaaccgattgtgatgccggcagggccgaatga

SEQ ID NO: 9660 - RNA, 948 nt, synthetic construct
  source 1..948: mol_type = other RNA
atgatcttttatggtctagcgaaactggagaaggccctgggctacgaggcaaaaactctgtacgcgctgtcgaacaatgttaagaaacactatcatcccgcacagatccccaagaaaaacggggaaatgcggaatttgctggtgcccgatatggccctgaaaagcgtccaaaaagctatagccgaaaagatcctccagaatttcccagtatccccgtatgcctatgcctaccgcaaagggttcggaattaaaaagaatgctaggcagcacaccggcaaagaaaaggtgttgaacctggacattgaaaagttcttcgaccacattctttacacacaggtcaaggattacgcatttcctaaggccttttttgccgaagacgtgcgcatcttactcagtatcctctgctatggagagaaagggcttcctcagggcgctccaagctctccagctataacgaacctcgtgatgcacgactttgatatgaaaattggtaagtggtgcgaaaagcagggcattgattactccagatattgtgatgatatgtctttctcaggcgacttcgacgagaaagccgtaatctcattcgtgaaaaaagagctccggcgtctgaacatgtccttaaagcgtgagaagacccgggtggcaaagaaggggagtaggcaaacagtgactggtatcgttgttaatgagatccctagcgtccctagtgagtaccgcagaaagcttcggcaagagatttactaccttaagaagttcggcgctggacatcagctgcgacattacggactgaagatgaccgcaaaagactattttttatctctgttggggagggtcaattatgtcctgcacataagccccgacaactatgaaatgtggcaatacaggagataccttaagaacatgctgagacagtcacgcttgcagccacgaaggtccgtgctactctga

SEQ ID NO: 9661 - RNA, 972 nt, synthetic construct
  source 1..972: mol_type = other RNA
atggcttatctcgaccccgatgtcattgctgtgttactgcacgtaccggtccacatcctgtacgcgttttctaacagtagctataagcactataggctgatctcgatcccaaagaagaatggcaagacacggcagttgaccgtgcccgacaatgacctgaagatcatccaacggtcaatttactttcgcttcctcaggggtagagaggttagcccagctgccaaagcctatttgaaaaaaggaacaaccacggaaaacgcaaaaccccacgtgggtaagccaatgatactgaagctggatatacgccattttttcgacaacgtgctgttttggcatgtgaaggagaaagtattcactagtgacatttactccgagaacgcccgggtcctcatgacctacttatgtacctacgatggccacttggcacagggcgcaccttcatcccctgctattactaacatcctcatgaaggatttcgatgatgagattctacggttttgcggaaaggatggggtttgctacactcgatattgcgacgatatgacattctcaggagtatttgaaccagatcaagtgatcagcaaagtggcctgggagctgaaaaaaatggggctccacttgaatcctgccaagaccagagtgatttggcagggccagcagatgaatgtgacagggcttgtcgttaatgataaggtgagcgttcccgcctcttatcgacgtaagatccgccaagagattcattatatctggaaatattccgtggaagaccatctcaagcacatgggaagagaagaggacgaacagtacagttacctgtctaatcttctgggcaggataaactacgtcctttccatccataaagacgacttcgaattccaggagtacaaagactacgtcgttatgggctgtgatggtaggcttcgttacaaggaaagaccttatcagatagggattgacgagctgctaggatga

SEQ ID NO: 9662 - RNA, 1008 nt, synthetic construct
  source 1..1008: mol_type = other RNA
atgaaacgttccattaaaaaactgattaggcccaaggacgctgccatgtggttatataaggcccagagcggtaaggaggtaactgaagctcttatgctactttacgacatgagtaacaatgcacctaaatattaccagaagaaggagatcccgaaaaaacaaggaggcaaaagagtgctctcggtccctgtcaccgaactgaagcgggttctgtgctgtatcaaggcagagatattggattacatacctgtgtcagactacgcccgagcgtacaagaaaggcggcggtatcgcgcatgccgccaaggaacacgtggggcacgagacgctcctgcgtctggacatcgaaggtttctttgatcacattacatacaaggaggtgtataagcacgtgttcggacggtattacccacgcaaagtcgccggcttgctgacagctctgtgttgttatgaaaagcatctcccccaaggagcccccacttctccagccatttctaatattgtgatgaaaggattcgacgacgaagtagctgttttttgcaagatgaacaacatccattacaccaggtactgcgacgattgtatcttttctggtaagtttgacgtgggcgccgttattaaaaaagtgaagtcagagttgctgaagatgggcctaagactgaacgatgaaaagacaaaggtgataagccagggacagaggcaaatcgttttaggggtttgcgtcaatgagaaaatgcaggctcccgctgcatatcgcaataggatcagacaggagatttattactgcaaaaaatacggggtcaaaaatcacctgttgcgactcaatgatgaacgcttcgtgaagaagacccctgggggggtatttgtggatgcagtgggctatctcatgcagcttaaggggaagataagtttcgtcctcagcatcaacccagatgacaaggagatgcgggagtatttcaacctgctttccgtctccaagaagagcacgagagcaaaaaaatcctgttga

SEQ ID NO: 9663 - RNA, 1224 nt, synthetic construct
  source 1..1224: mol_type = other RNA
atgaacagaagcctgtacctgccccaaatggactccctgtacgcatttgcctaccagtatctgcgcgtcaacggacggtcttgcaggtcagacgacatctactcctgtggcggagagatcaaagcgattcttgatgatacaaggcctcattatcgcaaaattctcatacccaagcctaataagaaagaaatgcggactgtcttcgaggtgacccaggacctacgatcacttcaacatttcatcaagcggtatatcctggatagactcgacgcaatgtatacttcgccttacgctttcgcctatcgcctcggcctgtcagctcgtgataacgcttctgcccacgccggacacagatacatgcttaaactcgacatacgccatttctttgagagcacacgcgcagggcaagtctactctatgtttagaaagtacaccccatataacagacagatattgggcacactgacccgtctggtgtgctataagggcgccttgtgccagggcgcttgcacttcccctcaaattgccaatctgattctctccgattttgacatggccatcggaacctgctgccgcgatatgtgtattacctacacgcggtactgtgacgatatgacattctctagcgttcttcccttcgacaagagcgctctggaacgaacggtggccctaatgttacagccatatcactacaaactgaatacacgaaagactcgatttctagggcccgggcacagactcgaggtaactggcgcggtcgtgaacgagagggtgcatgcaaagcgtgaatataggcagaaaatcaggcaagaactgtactacaccaatcgctacggggtagcagatcacctggagcggactcggcctgcttggtaccataccccctgttcctgtgcccagattaggcacttcctgtatagcctccagggaaggatcaattatgttaggatgttggacccagacgaccccttcctgggtgacgcacagtaccagttatttagattgtttctcagagaacagagcgccttccggaatatttatgctgacgtgggcccagtttcacagcggcagggtagtacaagtggatttttccccgaggagggtcccgtggggtttgatgatcttgacaccgatttaatggaaccacctttcaacatcccggatatggacccaccagagttgccgtttgacgtgctggggtgggatgatcctttcagtggctga

SEQ ID NO: 9664 - RNA, 1149 nt, synthetic construct
  source 1..1149: mol_type = other RNA
atggactctgacgagatatatgcatgcgcgggcgaaatcaaagccatcctggacgacgtaagaccccattaccggaagattctcatccccaaaccaaaccaggaggagatgcgaacagttttcaaggtcactagcgacttgcagctgttacagtacttcatcaaattcaggattctggaccccctggaccgcgcttatacctccccttacgctttcgcttaccgtaggggctattcagcccgtgataatgcctcccagcattcaggaaggaagtacatgctgaaattggacattagacacttcttcgaatccacgcgggcaggccagatttatagtatgtttcgcaaatacactccttacaataagaccatcctgggtacactcaccaggctggtttgtttcaacggagcactctgtcaaggcgcatgcacctcgccccaaatagccaacttggtcctgagcgattttgatcgcacaatcgggagctattgcaagtgcatcggggtgacttatactagatactgcgacgacatgactttttctgcctattggccttttaacaaggtggctgtgaaggatatggtcgaagacctgttgcgcccctatcactacaagcttaacacagccaagacccggtttctcggacccggaaaacggcttgaagtgacgggggctgtgattaatgacagagtgcacgctaaacgagagtaccgccataagttaaggcaggaactgtactatgcctgtaagtactctgtcgccgaacatctagagagaacccgacctaaatggtaccactccccgtgtacagcggagcaagtgagacacttcatatacagcgtgcagggccgtattaattatatccggatgctcgatccggaggatcctttcctcgagtatgcccaggatctgtttcaagtgctccaccttagtgaggtaagcgcatttagtcggaatggccacttcaggggctctgagcccgatgaggatctgcctgacccattagatattcctgacctgtttttcaccgatcttgaagaaccgccattcgatgttatgggggattattttccaggtgaggaattttttcatcctggagactaccccgtcccaggtccacaggacgatccactattcgggtcagagtga

SEQ ID NO: 9665 - RNA, 1476 nt, synthetic construct
  source 1..1476: mol_type = other RNA
atgaaacccaccctccccaaaatggactcagcttatactttcatcaaggcttatcgccggtctaaaggttatagcgaaaaccgtaacagagcgtttcgagatacccgtgaactcctttcggtattagacgagatatctgaacactacgaaaaacactttgtctccaagaaaaattccgacgagcttagaaccgtttttagcgtgagctaccctctccgggagtatcaggagttcataagagctcaggtgctcactccactggacctggcgtacacatccagtttcgcctacgcatataggagaggattgtccacaaaagacaacgccaaggtccacgagaagagtcgatacatgttgaaactagacattaggcacttctttgagtccacacgcaagcggcttgttttcgccacattcgagaagtacacgtcttataacagaagcatcctgggaatcctaacgaagctggtgtgttataatggcagtctgtgtcaaggcgcctgcacgtcccctaccatagctaacctggtactcgctgattttgatgcctctgtcggtctgttctgtgacggcctgggcattcgatatactaggtattgcgatgatatgaccttttcttctccctttgaattcgaagccaaaaatgttgaggagtttgttaggttgcagctgaagccactgcggtactccctgaatgaccgaaagacccggtttttcagaccaggacagagactcgaggtcactggggccgtagtgaatacacgggtgcgtgccccgagagagtacaggcagaagatcagacaggatctgtattacatcaacaagtatggcttcatctttcatctcgagaaaacccgcccaagttggtactcgggtaaagctactgaatacgacatactgcacctgctcaaaatcatgaaggggcgaattgcatacgtgaagatgcttgaccctgatgatcctttcgcaagcaatgccaggaaggaactggatgccgctgcactaaggtacggagtgggagacttgagcaagatgcaagatcggcagatcagcttcgaaattgagaacgcaaaaatcctgcggttcatgacactggaagagaggttgcagcgctcagtgagtcccgaggtgcatttaatggtctggcatgccatgaggggtcttgaataccatcccgaggggaatgggggctttgtgtcagacgaggaggatgacggcctctttagcgatgaacgcgacgttcgcgataatcgctgcttcgcagacgaggggcacacctctatgcaagacgcgaacgacacattaccctttgaagctgtgaacttccccacctttgatgaagtctcaattcccccgttcgacgaggacttcccaacttttgacgaacatcgcattccgtcattcgacgaggtcattgtgccatcccctgatgaggataagactcctcctcttggaaacgaatttccagatgattga

SEQ ID NO: 9666 - RNA, 1542 nt, synthetic construct
  source 1..1542: mol_type = other RNA
atggtggtcaattgggagaaaaaacgtcgcaggaggctgacagaattggaacaaaaaatcctggcagagaggccaggcgaacctgcatttaacgccggttcaggcgatctccctgtgatcggatcactgatgagcctcgtgatgctagctcgcggaaactccttctcaagcgaggaaggcttttggcgcgagtacagaagggcatccgcaatggttgatgacacttccccctattataggcactacccaatcccgaaagctaacgggcgcggctacagggaaatctacacagtggacgacgggttacgcgtctaccaggaggcaattagaggcacaatcctggatccccttgatgagaaatatagtagcaagtacgcttatgcatatcggagagggcgttcggtcagagataatgctgccgtacacgctggtcatggttatattgtcaaactcgacatcaaggacttcttcgactctactggaaagtctgatgtgtatcggatgttctcacgctacacaaattactcaagggccgcaaagacagtacttacggccctggtctgtcgagatggccacctgagccagggaagctgcacgtctcctcagattgccaacctggtcatggttgacctcgatggagagttggccgcatactgcgagccacagaagataacctactcacggtattgtgacgacatgaccttctcttccgatgaacccttcgaccacgaggctcttattaggtttgtaagtctacggctgcggcaaatgcactaccgattaaattgcagaaaaaccaaggtgttaggcccagactctagacatatcgttaccgggatcgtcgtgaataacgagcggatcagagtgaccaaggagtacaagaaaaaactccgacaggaaatctactacatacggaggtacgggataactagccacctgaagcgaatacgtccgggtgagtacacccctgtcttcgaaggcgccggaagtaagcacgagattcactatcttgcccatctgttggggcaggccgcttatgccctgtatatcgatcatgacgatgaggaactgcgcgcgatggtggactatctgaaacaggctgtgaccgaatgtgtagcctctacaggcacacggcgcagcgaatatctttccgttatttccaggcaaattttgaataaccgtatgtgcagcgtgaacgaccggctcaagattagagtgtcttgtcagtatgatgaaatcgtggtaactgccagctttcggctcatcgacgatcccgacgttcgggaggtggccgatcattatacaaaatactcccgcgttcagcgaaggtgcagaggccgctttgtgaagcctggtaggggaaccggaagaggtactgagtcggctaccgaaagtactacggcgactggcggggatgggataatttgttacgaggttgtgattccagaacgagacttctccagatacaatgaggcggtgcccgaggtcatggatgacatcacctggatttatagtgactttatgaagtacaagctgatctga

SEQ ID NO: 9667 - RNA, 1581 nt, synthetic construct
  source 1..1581: mol_type = other RNA
atgaagctgcagattgaggattttgagaacgttaaggtcgacatcaaggaattcatcgagtatatcatgccttctaataaacagtcgatgaataagcttgccagaatactctacccagacagcaacgagaaggattacgactctctcactaactatctttacgtgatgctggacggaatcgagaaagattacgaggagttcaccatcaagaagaagaacgggaaactgagaaccatttccaaaccaaatgaagctctagctgacattcaaaagcgcatctatgagtacatcttgagaaacgcacctgtgagcccctgtgctgccgcttatgtaaagggcaagagtattagggatgcaacagccaaacatattggccaaccaatcctgattaagatcgatgtgaaggacttcttctacaacatattctttgattctgtgaacgatgcattcaccaacttgggatttgataaatatcaggccatcactttggcgaatttttgttgctacaaaggaagtttaccccagggcacttcaacctcccccatgctctcaaacctggtctttcgtgacttcgatgatgagatggagaaactgtgcttgaagtataacatccgctacacacggtattccgacgatatgctgttttccggcagctttgacaatgagttcgacaccaaacggtttgttccgtacgtaaagttcatgcttgaagatttcggttttcagatgaacctcagcaaaactaagataattaagcaggggcagagacagacagcattaggagtcgtcctgaatgagaagcagcaggtcacaaaagaataccggaagcaaataaggcaagaaattcactactgcagtgaacactctgtgaaatctcacttggagcacatccaggacgaaaggtttctgcttccaaacggagagcccgactatattggctatattgacaatctgaacggcaggattaatttcgctctgcaaatcaaccctgatgacatggaaatggtgtcgtataaaaatagcctcaagtctctgtcaagcagtatgtatcaggcaaaggtggtggaacagaatcagcttatggaatgtctctacaaagtgttcagtgactatgtaaactccaaaatcaagtacaccattctgtataagaagctactggaatacgggttttccaattcacaactgagcaaaatcggcatctatgaggagaaaatcgtctacgggtttgacgaagtttatctcacgaaagatgacaagggtaattacctatccttgattaccaaacattcatgctccgagcacctgggaaatgtcataatcaacccttactgtgatggtttctttggctctcgattcgacaagaatctggggtatcttacagttactagcgacaaaattgctgccgtgacgtctggcctcaccaactacgtttcctttaataacgccccgtcaaagttcttcctcagcaaaaagaagctggagatgatccgaaagtacgggaacaaagtagtggtggccgattgcagtggtgccgagtacatacgcttacagatgattgcgaatcatatcgaagtgatatga

SEQ ID NO: 9668 - RNA, 966 nt, synthetic construct
  source 1..966: mol_type = other RNA
gaaacagtgtacattacaaaagcatctggaaagaaacgggagatcaataaaccagatattgtgctgaagtccttccaaaagtctgtatataagaacatccttctgcacattccgacatcctattacgctgtggcctataagaagggctctagcctaagatactcaacagcggtgcacattggcaagcccatgatcctgaagctggacatcaagaacttttttgggtccatcctctacaaaactgttcaggaaatgttcctgaaacaaggatacgattacttcatggccactaccctggcaaccttgtgttgctataagggacgcttaccccaaggcacacctaccagccctgccattagtaacatcatcatgaaggacttcgatgataaagtcgcctgtttttgctacgcccgaaatattgcttatacccgttacagcgatgacatgacatttagtggtagtttcgactcagacgaggtgatcgagttcgtcaaaaataaattgaacaagtccgggttccagctgaataataagaagaccaaactgataaagcaggggcagaggcagactgttaccggtgtagtggttaacgaaaaacagcagttacccaaaggctacaggaaacagatccggcaggaaattcattactgccagaaatatagcgtgaagtcgcacatcctgcataccaatctcacggcttatatacggcctaatggagatgtctactacaaggagtatctgctaaatttgtatggcagaattaactatgcactccaaatcaacccaaccgacgaggagatgctgaaatacagatccgtcgtgaagtcagccatagacaagcttgatattatcaaacgcaagataaacgatgagatttttaggctcgctgtcgactttttcactagcgacaaatacaagacgaacaaaatctacctctatcttaaggaatctgggtatactaactga

SEQ ID NO: 9669 - RNA, 1074 nt, synthetic construct
  source 1..1074: mol_type = other RNA
atgtactggaatcgcgaaacaaacgcgatttccataagtgccggcgacatgaagatcatgcgccagtgcaacatatccatggagagactgatgcagaaacctgccaatccgcaactcccacctctttggtcaattctgtcttacgcaatgctacggagtgatggggatgcagccgtcggcatttggcgaaacttcagactctatcaaaaactgttcgagaatccaaatcagttctatttcggtaaggagatctgtaaaacagacggatctgtccgggaactcaacgtacctatgtcaagactgcgttgtgagcaagagttcgtgttcgaaaacattctgtccaagctccccgtcgacagccacgcatatgcttacaggaagggcattagtatgcaagattgtgctcgaccccacgtgggtaaaaaagtgctgatcaggctcgatattcaggacttttttggaagcgtgaccgagaatatggtttacaaccgccttctggaggataccggctacccacgcaaactctgcagatttttggccaagttatgttgctaccagcaccatctgcctcagggcgccgtgacaagccccatgctgtctaatatagttttccggcccttagacgaaaagttggctgaatttgccggtttctgcgggatggcctataccaggtactctgatgacctatacttttcaggagacgaaatcgatgtgacttcctttatctcgtgtgtgaaactggttctcggaaattccgggtttcgtctgaacggaaagaaaacccgcgtccggatgccacagcatcgacaggcagttcttggtcttactgtgaacgagaagcttcaggtcagcaggacgtacagaagaaacttgttacaggaaatctactacctggagaaattcggaaagaactgcctgggggcccagaaggaggggaattatctgcggtatgtacagcggctactcggcaaggtgaattatgcgatcgctagcggcgctgaagacccgaagttgaaagccgctgcagaaatgctgaagaagaggattttcttgatcgagagggagttttattga

SEQ ID NO: 9670 - RNA, 1065 nt, synthetic construct
  source 1..1065: mol_type = other RNA
atgaaatggaaggagagaagcagtacattttgcctggagccccaggacatgcagatcattgctcagtgcaagatgagcctcacagagatggtacggcatgaccacccaaataaaaatatcccgccactctggagtgtcctgtcctatgtgatgctgcaatcaacttcacatgcaaatatttggtaccgctaccgcgcccttcgcgaaatggcctcgaatacaaagctgtggtattatacccaatacatacccaagtccaacggtggcgcacggcggatatccgttcctacgcacgccatacgcacacagcagaagtatatcctggcaaaaatactgaaaggattgcccgtgtctgaccacgcctacgcctaccgtgaagggcgctcaattcaggactgtgctaagcctcatgagagccaggacgtgctcattcacctggatttgacagatttctttggttccatcagcgaaaacatggtattcctcacgttttatagggaaactggctactctagaagtctgtgtcgatttctagctaaaatgtgctgcctgcggggatctctaccacaaggcaccgttaccagccccatgctgtcaaacattgtcttttatagatgcgatgaggatcttgcaaggttggccgctaggtacggcatgaactacactcgatactctgatgatctgtatttctccggtaatagtgcccttgatgtgggggaggtgttaaagaagattactcgcattctgttgtactatgggttcaggatcaacgaaaagaagaccaagatccggagacgtcagcatcggcagaccgtcctcggccttaccgtgaatgaccatatccaagtgagcagaaaatataggcgagacttactgcaagagctttattacctcgacagattcggagaaaactgtaaaggggctgtcgcgtgtggagattacctgaaatatatgcagcagctccagggcaagttagcatacgttttgcacgccgaccctgaaaacgtgaaaatgagggaggcgcactctaagctgatcagaaggatccaccagtactccgagtga

SEQ ID NO: 9671 - RNA, 1098 nt, synthetic construct
  source 1..1098: mol_type = other RNA
atgaaatgggagggcaagcaggttcttttctctgcggctgatctccaggtcctgatgcaggctcggtttcgacctgatgaggtgccggacatggaggaagtcaaggaagggctaccacctctttggtcgcccttgtcatacaccctgtggaaatgtcacggcgaaacgtctcggaagaacctgtggcgccagcaccgtgaagcacttctcatggctaagagtggctccggatactatcatcacatgcttgtgcgaaagaacggtggaagcggcgtgcgaaggatttcagttccatgttacgagctgcgggaccaccagcggttcatatacaagaatctactcagcagactgcccttatctccgagagcgtgcgcatacaggaagggtgttcctctccgccgctgtgctgagccacattgcggagccgaagtcctcgtgcatctcgacattagggacttcttccctagcatcacagaggaaaaagtgagttttgccctccaccgcgccacaggctatgaggaagagctttgcgacttcctggccggactgtgttgcgagaatgggaggctaccccagggagcagtcacttccccagctctttctaacttggccatggctggcatggacgggaccttcggtgccatggccgccatgctggggtttacctacactcgttatgctgatgatatctacctgtcaagtagcgatcgatccgccgatgccgctaggattgtgaagttggccagagattttttaagatccgagggctttgaattgaatagggacaaaaccagaatcatcagacaggggcgtcatatggcggtgctggggctgagcgtaaacgagaaagtgcaggtgtcaagaaggtatcggagagaggtccggcagaagctgcactatctgaaacggtatggcgcagacgcacagggcgttcaagaagcaggcggacaagagccttacgcattgcacctgctcggaaaagtggggtatatactgcaggtaaatcccatggaccaacaagctctgcgcgcccgcctggaactcttgacaggtctgcaccgcttacataggggtatgcccttttggtggtccgcctga

SEQ ID NO: 9672 - RNA, 1266 nt, synthetic construct
  source 1..1266: mol_type = other RNA
atggagtgggatccccgccgggaaaagcttagcctgagtgagcgcgatctcaagatcatgaaagattgcggaatgacgcccgccgagattttacgtgctgtggagagcaggggaaggattgtcccactgtggtccgtgctgagttttttcatgctctatgagacaagcgaatctcccaaggctttctggaggacctataggcagggcgaaactgcggctcgctatagggactgcttataccacgacaggaaaattccaaagcgttgtggtggtgtgagaacgatcgcaatgccaatgtggccgcttgcacaaatgcagacttgtattgccgagaaaatcctccagcatatcatgcctgatgatcacgcttgcgcataccggagaggaatgagtgtgtcagactgtgctgagcctcatcggaagaagcggattgtcatccacctggacattcgagatttctttgggaccatcagggaggacatggtgttcgatgctctattgcgcgagacaggctactcaaaaaagctcgtcagatttctttcccggttgtgctgctatcaggacagactgcctcaaggcgcgtgtacctctcctgcattgtccaatctggtatttaaaccgtgtgatgaggccatcggcgggttcgcagccagtcttgggatggactacacacggtattcagatgatctctacctgtccacctccggagaggttgacaccgggctggtcattgaaactgtgagaaagatactcgccgaccatggctttcgtctgcacaatgagaagactaaaatcatgggaagacagcagcggcagagcgtggtcggcatagtggtgaacgagaaattgaggccctcacgaacctacgttaggaccgtactcaaggacgtttattacgtttctcgattcggcgccgggtctaaccaggttgctgcctttggcgactactattcgtatttgcgtcagttacaaggtcgcgtgaactatgtgcgctgcttcatgccagaagaccgggcagtgctcgaagccgttcaaacagtgcgcagcctgataggtgcctatcacagaactcttctggacgcggtgacagcactggaggcccagtgtcgggacggatacgtagtcgtattcagcgaaaattattaccgccctctggtgaagctgaaagaacagctggctgtggtcaggagattcctaccccgagattaccgatttcatgatgccgaggaaagagtctacgccatgctgggggaagaactatactga

SEQ ID NO: 9673 - RNA, 1104 nt, synthetic construct
  source 1..1104: mol_type = other RNA
atgcgctggtacccaagtgggaaactgaacttcacagccgcagatctggctgtcttgtcccatcctgcttttgcaagcaaaccttgggccggagctggagcatggttaagagctgaccctgcttatcctcctattccctcagctctggtgttcagccttctggcgggcccaagagaatctagaccggaacgcatgtggaaacagtatcgcaaactcctggagatcgcgaatgatcctgcccaatactatgtgagtcatgaaattgttcagcacagaaaaccaaggaccatttccgcccccttctatgaactggcgcagtaccagcggtggatactcaagaatatactggagcgagcccccacaaccgacttcgcattcgcctacaagaagggtctgacactggccgacaatgccagggtgcatcttgggcgatccgtaatagttaaactggatttggtccactttttcgattcaatcacatttggcatggtctatgaggtcttcgcaggtcaactgcggtatccacaggaaacggccgtgcttctggctaatctgtgctgtctcaacggcaggctcccacagggtgcttgcacttcgccctatctatctaatctttgttttgcaaaggcagacggcgagttagctggttattgccgggaaaaaggccttgcttactcaagatatagcgatgacttaactttctccggagacagaatcgacgtgaaggaactgattgcgtttgtgagggagactgtgaagaagtatgggttctctctcaactaccggaagatccacgtagacggaaaaggaaggcgtcaccgcgtgaccggcattgtgtgcaatgagaagctaaacgcaggggcagattacaggcggaaggtgaggcaggagatctactacctaagaaagtatggagccgccgaccacttgcgccgacgtaacgatccggcctacagaaacgccgatgggaccccctgtgttgagcgatactacgctgccttgctcggccggatcagctttatcttgcaggttgaccccgaacaagaggagttttggagttaccgggactacgtccgcgatctcatgctgcgtgccgccgagtga

SEQ ID NO: 9674 - RNA, 1077 nt, synthetic construct
  source 1..1077: mol_type = other RNA
atgatctggcgtaagcgcgagcgaattaaccttagcgagctcgatgtttttgtgcttcggaaatacgcaggacagacaaatcctatggaggagattctgaacagcgaaatacccgaaaatttgccaccaatactgactccctaccatctccccctgtttatgcacaactttaagaagatgtactacttctgggagaattatagggacattatgaaatgctctaacgagcccagagaattttaccgcagatatgacattatgaagcgatatggaaagatgcggaccgtctataaagtgagcggtgtccttgcagatgtgcagcactggatcctgcgcaacatcctcgatgaactccccgtatcacggcatgccaccgcgtacgctaagggcaggaagatcatggacaatgcagcgcctcatgtgggcaagaagctagtagttaaagccgacattactgactttttcggcaatgtgaagtacttgagtgtatacgatgtgttcaaaaacgctgggtatagtaagtcagtcgccacactgctggccaatctgtgttgttgcgatggacacatcatgcaaggtgcctgcacctccccggctttgtccaacctgtgttttactaaaatcgattcagtgatctctgaattctgcacggagcgtggcattacctacacacggtattccgatgacatgaccttttccggggacttcgctcctagtgagctcataacttacctgcgacgggttctgaaattctatggtttcactatgaacgacaagaagaccaaagtgttatatcggcaccacaggcaaacggttacaggggccgtcgtgaatgacaaaccacagcctaccaaagagtacagaagaaggattcgccaggaaatgtactatatccgcaagtacggcgtcttgggacacatggataggcttaaggacgagaaaagctatgtgtctccaatcaactacctcgaaaacttatatgggagaatgaattacgtcctgcagtatacaccggatgacgaagaactaaaaaggtggatgcatgaggtggatagaatagagcagtcgctgttctga

SEQ ID NO: 9675 - RNA, 993 nt, synthetic construct
  source 1..993: mol_type = other RNA
atggatgagatcctaaagtccaacataccggagaacctgcctcctctcttaactccatatcacatccctacactcatgcataatttcccaaaggtgatttcattttggaaatcataccgggaactgatccattgttctaatcaccctgaagagtattacaggtgtttggttttgcccaagagggacgggaagatgcggaaagtgtatgcggtaagtggggcccttgcccaagcacaacactggattcttcggaacatactggatgaactgccagtgaacccgcatgctatggcttatgtgaagggaagaagcctcctcgataacgcgaacccccacgccgggaagaaactcgtagtgaaggccgacattgaggacttctttggaagcgtgaagtacatctctgtctaccacgtatttaagtccgcaggatatagtgaaagagtctccgcagtgctggctaatttgtgctgttgcaaaggccatatcatgcagggcgcttgcacctcgcccgctttaagcaatctgtgttttgccgtgatagacgagaaaatatccgccttttgcgcactccgcgggatcacatatacccgatactctgatgatatgaccttctctggtgattttgccccctcagagcttatcacttacctgcgaggcctgctcaagttctatggcttcaccatgaatgacaagaaaacaaaggttctgtaccgccaccataggcagacggttactggagccgtggtcaatgaaaggcctcagccaacaaaagagtacagacggcgcattagacaggaggtctacttcattcgcaaatatggtgtcctggagcacatggaccgtctgaaggataataaatgctacgttagccccattaattaccttgaaagcctgatcggccgtatgaactatgtgctacagtacaacccacacgacgaggaattgctgagttggatggacgaaattgacaaaatcgagcagggtttattctga

SEQ ID NO: 9676 - RNA, 1029 nt, synthetic construct
  source 1..1029: mol_type = other RNA
atgatccagactctggaagagttctgcgaatggctcgatccgtctgtgtccccccggatcttgcaaaaaaaggtgtattggctccggagcctgcgcagtgccaaaaagaaacgcaaggagtacgggctattctggttggctaaaaggggggggggatataggcctgtggcgtctccgtctcctggactgaagcaggtgcagaggggtattctgtcactgcttgcctatggcgaaattgcgccaccagctactgcgtatcgtcctgggagaaacctcctagacaacgcagcagttcacgtggggcagcctatcctggtgaagctcgatctgctgcacttcttcggcagcatacacttcccttccgtgttctgtgctatcgatcgcacactgtcccaaaaccccgagatcgctccctactccaaagagtcaaacggtaagaatgcaggcagcaccagagccgactcctttaatgccctgctgagctttttcttcactacattctgcacgcttgacggaatcctcccacaggggagtccagccagtcctatgctcagtaaccttgtcttttttcctttagaccagcaaattgccgcattttgtggccagagacatatacactacaccaggtacagcgacgacctgaccttttctggcgatttttcaccagagcccctgatcagatttgtataccagctgttgagaaagaatggattcttgctcaatcccgcaaaaaccataattgctcgacagggccggcgacagcaggttacaggtattctcgtcaatgatcatccgcaggtgggccgggattataggcgccgtatccgtcaagaggtccactacctacgacgctttggagtagcttcgcaccttcttcatgaaggccagacaggttgggccttacatcccgccccctacctccaatcactgttgggaaggattcagtttgtcctgcagatttgcccatatgaccgggagttcttagaatatcgggcctacgttctgagattgctgaagagctctctttga

SEQ ID NO: 9677 - RNA, 1020 nt, synthetic construct
  source 1..1020: mol_type = other RNA
atgatccagactcctgaggacttttgtcaatggctgcagccagacgcctcaatccgcagcgtgcaaaagagtctctattggctgctgagcttgaggtcggcccgtaagaaaagaagagagtaccaggtcttctggctggcaaagcgggggggaggatatagacccgttgctgctccctccttaggattgaagaaagtccagcgcggtatactgagtttactgtccgtgggggaggtttctccccatgccaccgcttatcagcctgggtgcaccctacttcgtaatgccgccccccatgtaggccagccctttgtggtgaaactcgatatcgcaaatttcttcggatctataccgttccctgctgtttacgccgcaattgacagagcactttgtaggaaccctgagattcagagttccgccaaggcgtcatcagcacgggaaggtgccaccgagagttacaacgcggccctcagcttcttcttcgccaccttgtgtactctggacggcgtacttccgcaaggggctccaacatcaccactgctctccaatttggtgttctttccactggattgtaggattgccgcgttctgcgagggccggaaaattcactacacacgttacagcgacgatcttacctttagcggcgatttctctccagatacactgataagattcatcaggaggctcctgtgcgaacacggctttctgcttcacgagagcaaaacggtgatcgctcgcagaggcaaccggcaacaggtcacaggcattctggtgaacgaccggcctcaggcagggaggaagtttcgccgccgaatccgacaggagctctattatattcagcgatttggcctttcttcccacttactgcatgaaggtagaactggtgaatcctgcgctcctggaccctacctacactctttgctgggaaggatccagtttgtgctccaggtctgcccatatgatcgcgaatttctcgggtatcgggcttacatcctgcaacagatgaagcattacacgtga

SEQ ID NO: 9678 - RNA, 1035 nt, synthetic construct
  source 1..1035: mol_type = other RNA
atgttgcgaaccctggaggatttttgtagggccgtttacccaggactgacacctgagcagtttaggaagaactcacaccagctggcggcctacgcagactcccgtaagaggagaaaatcttatagagagtgctggattcctaagaaacacggaggagcccgaaggatactagtgccatcaccaggcctgaagcaaattcagcgcgcagctgcagcactcttgaagaatggtagcgtttctccgtacgctacggcatatcagacaggccgaagtgttctcgacaacgccgcccctcatgtagggcgtgaactgttggtcaaacttgacatccggaactttttcggctccatacggtttccggccgtgtttcatgcgattgaccacgctctccgcaggaacccagaagtcggacggcactgcaaggactacccccacgggtcccgggaaagccacaattataatagtgtgctgagcttctatctggcccagttctgcaccctagatggggtgctgccccaaggcgctccttcctcacccattctttctaacctcgtgttcgattccttggattgcaagatcgccgcttactgtgagcgcagaaatatccaatatactcggtactcagacgacatgacattcagtggctgttttcatcctgaggtgctgatccacttcgtaagaaggttacttgctgaatacggtttcaccctccatgaggaaaaaacagtgctggctggaagaggttgtcggaaatctgtcactggggtggtgattaacgagactccccaagtcagccgttcgtatcgcagaaatctgcgacagcagatctattatatcagacgcttcgggttaagagagcacttgctgcatttaggaaggaccgccgatgcagggcagcccgaacagtacctccgccagctgctaggcaaagtcagcttcgttcttcagatctgccccgaggatccagaatttcagcaataccgggcgtactgtctgggcctgcttagggctcatgccggcaagaaggccctctga

SEQ ID NO: 9679 - RNA, 1104 nt, synthetic construct
  source 1..1104: mol_type = other RNA
atgcgcagagctatgaatcacacattgcgcgaatttctggagtcgattaagagtaagcatacatacctgctgtttcggtacacggacgaggcctataaactacggcgctgctaccgtccagtaatccttaagaagaaaaacggcggattcagagtcctccaggtgcccgacgagaatctcaagaggttacaacgtcagttgctcacctatctgcagcacgccgaaatctccccttgtgcagccgcctatgtgaagggtagaggcctgtcagaacatgctcattatcacgcgggccggagtatgcttctcaagctggacattgaggactttttcgggagcatcagttttagcaaagtcctgtttgctgtgaaagaggccctgaaacgatctccactggtgggtcaggaacagcgatccgagatcggatggttcatcgcaaaagcttgtacacttgatggggtgctgccgcaaggagctcccacttcccccattctgagtaacatggtctttttgcacctcgatcaagagattaatagctactgcatccagcgaggaattcattataccaggtacagcgacgacctgttcttctctggcgattttagaccttcagagataatccctcttatcaggaagttactgaggcgcaacgggtacaccttgaatgaaaacaagatcgttgcagcaggaagagggtccaagaaactggttactggcgtagtggtgaaccagaggcctcaggcggaccgctcatatagaagggagattaggcaaagcatctactatataggaaagttcggactcgaagaacacctcaaacggaaggggctgctagacgaaggtatgcagcccgaggatatgcgttctgaggccgcagggaatgaggatttcggcagggaagatgtcatcatccgagcccagatggtgaaagagttgcagcggctaattggtagaattgtttttgtgcttcagattgacccacaaaaccgcgagttccaggattacaagaaattctgcataggcctgttaaaccggcttccagtcatattcaatggccggctcctgtccgaagccgaaataaatgagggctgggggtctgcttga

SEQ ID NO: 9680 - RNA, 1035 nt, synthetic construct
  source 1..1035: mol_type = other RNA
atgctgcataccctggaggcgttctgtgcttggcattacggcgggggcgacccactaagactggctagacgcacccgctggttgatgaggctggcaagaggccggcgattagaaggggaataccgccctcaagagattcccaagcggaagggaggaacacgcaaactccttgtcccctcccataggttggcccacctccagcgcggaatactgagactccttgaagccggagaggtgtctgctgcagccacagcgtatgaacctggttgcagtctaaggcagaacgctctccctcaccgtggggcaagacttctagtccgtttggatctggccgactttttcggctctatctcgtttcaacaggtctttcaggctgtggatcgggctttgcggagaagcccccttgtgggccggcatctccttgacggttacgaccggctgcagagggaggagcgagtgtacaaccaagtgctgtccttttatttcgcacgcttctgcacttataggggacacctcccccaaggggccccaacttctccgcacctctcaaacctcgtattctttccgctggatgaggccctgctgcgttattgtacacggcgcggaatcacctacacgaggtattccgacgatcttgcatttagtggagaaaccttcagcgttggcgagctgctgcgcttcgtgcagaggttactggccgcacacggcttccggttgaatgagggcaagaccgtggttgcgggtcctggccagagaaaaagactcccaggtgtagttgtgagccataagctacaggccgacgtcggcctgagacggcaattacgacaggaattctactatattggcaggtttgggttggcctcacacttagagaggactggggagcagcgacccccaagtgcctacctgaggcggctgctgggaagaacagggttcgtcctccaggtgaatcctgaggatagggagtttcaggagtacctggagcgtgggaagcgctggctgaaagaacaggaagaacgagctgctgaaggttga

SEQ ID NO: 9681 - RNA, 996 nt, synthetic construct
  source 1..996: mol_type = other RNA
atgctgcacaccctcgaggacttctgccggtacctctaccataaccgagacgagaggaagttctatcgctgttactaccaattactcaggctgagtagggagaaatatcgctgcagctgttatacgcttcgggaactgccaaagggagaagccggaactcgcttgttatgcgtcccaaacagagctctgagacgggtgcagaaaggaatcctggggttgttgccagctgctggcccttgttgtgtgacagcctatctgccgggaaaaagcgtcctggataatgctagaccacatctaggccagcccctggtcgtgaagcttgacatcagggcgttctttgactcaatctcgttcgctcaagtttttcgggccgtcgacagagcgctggaagcatcaccttacgtagggtgccactacctgaacgcagatgatcgatcatccctcgagaatagaaactataattccgtgctctctttctattttgcacgtttctgcacccgtggtggcagtcttcctcaaggagcccccacctccccccttctgtctaatctcgtgttcggccccatagacggtcagatcagtgcatactgcggtcgacggggcattgcctacacaagatattctgacgatatgaccttttccgggacattcaaccctcttgccttaattgactttgtgagaagggtgttggccgagaacggcttcactttgaatgataggaaaacacgcatactgaacagaggacagcgcaggaagatcactggcgttgtagctaatcagaagctccaggccccgcgtgagtaccgaagggatattcggaaagagctgtactacattcggaagtatgggtgggaaagccatctgagccacgaaaacatcgcccagggccccgaagaatatcgccgaggcctgctcggtcgcgttgggtttgtgctgcagctgtgtcctgcagatggggagtttcagcaataccggcagtggctactagagaattga

SEQ ID NO: 9682 - RNA, 1059 nt, synthetic construct
  source 1..1059: mol_type = other RNA
atggaagacgccgcacggttcgagagggaaactgggctgccctattttccggatgcgcatcaatttgctgatgcctatttaccaacagacaggtccgaagaacatggtgaaaacgtgcggcgcttatacgatctggccaacgctcccagatggtattatcggtcagtgagcatcccaaagcaaagcggaggcacaaggaccctgcacatcccatacggcacgctcaaaagtgtgcagcactttctgctgcactcagtcttggaacggcttcctgtcagtccttgtgcagtggcctacgtccggggagtgagcctcagcgagagtgttagggtgcatgtcggcaagccattgttggtaaggcttgacctcaaggactttttcgatcacattggttttcttcaggtatatcagaatgccttcgccgcctaccctaaagctgtgcgggtcttgctctccagactgtgcacttacacactgccttcaggtaggtcttgccttccccagggcgcacccacctctccttacctcgccaatctgtgtatgcgccgcgctgatgacgcaatatacgcatactgtgctaggcgctccatcgcatatacgcgctacgctgacgatatgaccttcagtgggagcttcgaaccagagcgcctgattgaaactgtgagaagcatacttcgtcgtgaggggggctttgagttgaacgaggagaagacccggattctaagagcgtgtcgcagacagtcggttactggggcggtggtaaatgagaggccccgagcatctgctacctatagaagagagatcaggcaggagtgcttttattgcaaaaagttcggcgtgcgatcccatctactgagaacaaaaaaagcccctttcgtgcgaccatctgaatccgtcaaggacggatactatgtttctcagacacgctacctggagcacctgttaggaaaaatcaacttcaccctgtcactggatccgaaggacagagagatgcggctctgccgaaaggaggttctactctggctggccgaacgaaatgctgccccccgtgagcggtga

SEQ ID NO: 9683 - RNA, 1062 nt, synthetic construct
  source 1..1062: mol_type = other RNA
atggattttaaccactataaagaggccttcattaaggagagccggaaaattggtttttctcttccaaacatccagcactgcctggactatgccgaggtactattctcacaccatgttccagtcatatataatccatcacatctgtctgccctggttggctacaagaaggaatacttaaaaaaggcttccctatttccaaattacttctaccgagattttgaggtggcgaaaaagaatggaacaaagcgcctgatcagcgaacctttgccctcgttaaaagagatccaaatttggatcctgcgttccatactgtataagatccccgtgtccccgtttgccaaagcctataagcctaatgtaacattgctggaaaacttgcggttccataaaaaccagtccaagatctttacccttgatctcgaaaacttcttcccgtccatctcagcagagctggtcgaggcagaatttctggaactcgggtatagtaagatagtgtctaaactactgagcagactctgcaccaggaatggaaatctgccccagggcgctccaacttctccttacttgagcaatctcattttcaagaaggcggacgccgaaattgctagctattgtaaagactacaagatccgctatacaaggtacgcagatgacatgagttttagtggggattttgaccatgaggaacttctgaagaaagttactgagacagtcgagaagctcaacctgagaatcaacgcaaaaaagacgaagctgatgacgcctaatatgagacaaaccgtgactggcgtcgtggtgaaccaaaaaccccaggtgatcttctataaacggaatgaacttaggcagaccctgtactacattcagaagttcggttttgaagagcacaagatcttcaaaaagaacaaccacaacaactacttagagcatctgctcgggaagattaatttcgtcctgcagatcaatcctaaggatgctgaattcattaagtacaaagccgtgctcttcgaccttaaacacaaacaggacctcaccgctattgagaacgagttgtttcccatatga

SEQ ID NO: 9684 - RNA, 1062 nt, synthetic construct
  source 1..1062: mol_type = other RNA
atggattttacacactataaggacgctttcatcaaagaagcacataaaaccggttacagcttgaccaacattcagaggtgccttgactacgccgaggcacttttcctccacgaggtcccggttatctataacccatcacacttgtcttctctggtcggatataagaaagagtacctcaagaaggcttccctgttccccaattatttctacagagatttcgaggtagcgaaaaagaacggcaccaagagattgatttccgagcccctaccctctctgaaagagattcagatatggatactacgcagcattttatacaaggtgcccatttcaccattcgccaaagcctataagcctaaagtgactttaatggagaatctgcggttccataaaaagcagcctaaagtgttcaccctggatctcgaaaactttttcccatccatcaggatggaaactgtacaaaacgtctttcttaagctgggctacagcaaaatcatcagtaagtttctgactcgactctgcactcgcgatggaacacttcctcagggttcacctacgtcgccttacctttccaacctcatttttaaacaggccgatgccgaaatcgcgagctattgtaaagactacaagatacggtatactcgatatgctgacgacatgagttttagtggcgactttgatgagaatgaattgctgcaaaaggtcacagagacagtggagaagatgggcctgagaatcaacgctaagaagaccaatctcatgacaccaaatatgcggcagacggttaccgggattgtggtgaaccagaagccccaggtgatctttaagaaaaggaatgaactgcgccaggcactgtactacatacagaagttcggatttgaagagcaccgtgagtacaaggaaattgaccaaaagaattatctggaacacttattggggaaaatcaattttgtgctccaaatcaacccgaaggacgcagaatttataaaatacaaggccgttctgttcgacctgaaacataagaaagggattaaaaccatcgataacgagttcttcccaatctga

SEQ ID NO: 9685 - RNA, 1062 nt, synthetic construct
  source 1..1062: mol_type = other RNA
atggacttcgcccattacaaagatgctttcattaaggaagctcacaaaacggaatactctttgactgatatccaacggtgcctggactatgccgaagctttatatcttcaccaggtgcctgttatttataatcccacacacctgtcaggtctggtcggctataagaaggagtatctgaaaaaagcatcgctgtttcctaactacttctatcgggactttgaagttgcaaagaaaaatggcggcaagcgactgatctctgagccgctgccctccctcaaagagattcagatctggatactgagaaacattctttacaaggtgcccagctctgcattcgccaaagcctaccgcccaacagttacactgctcgagaatcttcgtttccacaaaaaccagccaaaagtctttaccctagatctcgagaacttttttccaagcatccgcgttgaggccgtcgaaaatgaattcttgaaactggggtactccaagattgtgagcaagctgttgtccaagctctgcactcgcaatggcactctaccgcagggagccccaaccagtccctacttaagcaacctggtgttcaaagaagctgacgctgctatcgcgacttattgtaaggagcacaaaatcaggtacacccggtatgccgatgacatgtcattcagtggagactttgacgaaaatgaactcctgcagaaagtaaccgaaaccgtggaaaaaatcgggtttaggattaacgcgaagaagacaaaattgatgaccactggtatgagacagacggtcacaggcgtggtagtcaacgaaaaacctcaggtggtgttttacaagaggaatgagctgagacaagcactttactacatacaaaagtttgggttcgaggagcatcgagagtataaggagatcgatcagaagaattatcttgagcatctcttgggaaagataaacttcgtgctccaaattaaccccaaggatgccgagttcatcaaatacaagtccctgctcatcgacctgaagaacaagcaggatctgaaggcattagaggacgagctacttcctatatga

SEQ ID NO: 9686 - RNA, 1062 nt, synthetic construct
  source 1..1062: mol_type = other RNA
atggatttcgctcagtacaaagaaacctttacagacaaatctcacaaaattggatactctttgcctaacattcagcggtgcctcgattatgcagaggtcctctttagccatgatgtgcctatcatctacaatcctacccatttaagtctgctcgtcggctacaaaaaggagtacttgaagaaagccgccgtttatccaaggtatttttatcgcgacttcgagattgctaaaaaaaatgggactaagagactaatcagtgagcctctaccctctctgaaagaaatccagatctggattttgcggaacattttaaacaaggttcccattagcccatttgccaaggcctacaaaacgaacgtgtccctgatcgaaaacctcaaattccataagaaccagcccaaggtatttactcttgatctggaaaactttttccaatcaatcaccatcaagctggtggagaaggagtttcaccagcttgggtatagcaagatggttagcaggctcctatcgaaactgtgtacacgtgacaagaccctcccacagggtgctccaacaagtccctatctgtccaatctgattctgaaagatgcggacgcccaaatcgccgcatattgcaaactccacaaaattcggtacactcgatatgcagacgatatgtcattctcaggcgacttcgacgagaataagctgttgcacaaggtaatagaaatagtggaaaagctgaatctgcgaatcaacaagaataagaccaagttgatgacttccaatacccgccagacggtgacaggcatagtggtgaatgagaaaccgcaagtcgtgttccataagagaaatgacctcagacaggcgatgtactatattaagaagttcggtatcgaagaacacagggagtacaaggaaatcaaccagaaaaactacctggagcaccttttgggaaaaataaatttcgtcctgcagatcaaccccaaggacatagagtttctggaatacaagtccattcttaaggacctgaagaaaaaacaagatcttaaggctatggaggatgagttactgccgatctga

SEQ ID NO: 9687 - RNA, 1062 nt, synthetic construct
  source 1..1062: mol_type = other RNA
atggatttcactcagtacaaagaatcatttactgaagaagctcacaagatggggtacattgaacaaaatatagagcactgcctggaatacgcagaggtgttgttttcacacgatgttcctgtcatctataatccatcccatctttcactgctgctgggatacaagaaggagtatcttaagaaggtgagtctttttccccggtacttctatagggactttgagatcctgaaaaagaacgggagcaaacgactgatttctgaaccgcttccgtccctaaaggaaatccagatttggatcctgaggaacattttgtacaaggtggccatctcgccatttgccaaggcttacaaacctaatgtgtgcatcttggagaaccttcgcttccataagaatcagcccaaagtgttcacactggatctcgaacatttctttccttccataacaattgagaaagttgagaaagagttcagagagctgggttattccaagatggtttctaaactcctatctcggctctgtaccaaggatggtagcctcccccaaggagcacccaccagtccatacttaagtaacttgatctttaaggatgctgacgaagcaatctctgactactgtaaacagcataagataagatacacacgctatgccgatgacttatcctttagcggcgactttaatgaaaacaaattgctgcacaaggtgaccgaagtgattgagaagctgaacctgaagattaacaagaacaagaccaagttaatgatgcctaatacacgacagacggtaaccggcattgtagtgaatgagaaacctcaggtcgtcttctataagagaaacgacctgaggcaggcgatgtactacatcaagaaattcggattccaggagcaccgtgagtataaggagatcgaccaaaaaaactatctggagcacctcctcggcaagatcaatttcgtcctacagattaatccccgggatactgagttcatcagctataaaagcatcctcatagacctcaaaaaaaaacaagaccagaaagaactggaggatgccctgataccaatttga

SEQ ID NO: 9688 - RNA, 1062 nt, synthetic construct
  source 1..1062: mol_type = other RNA
atggacttcatccaatacaaggaaacatttagccacgatgcacagaagaaaggctattctgaacagaacattaagcggtgtcttgactatgccgaagtcctgttcgcccatgacgtgcccgttatttacaatactacccacctttccctgcttgtaggatacaagaaggagttcctcaagaaagctgcattatatcccaaacggtattaccgagactttgagattctcaaaaaaaacgggtcgaagagacttatcagtgaacctctgccctcattgaaagaaattcagatctggatactgcgcaatatactgtacaaagtgccaatcagtccttttgccaaagcctataagcccaatatctccattttggagaacctgcggttccacaaaaaccaaccaaaggtctttactctggacctggagcatttctttccgtcaatatcttttgaggccgtagagaaggagtttctagagctggggtacagcaaaatggtcagcaagctgctatccaagttatgcatcagagatggtagcctgcctcagggagctccaacttctccgtatctgtccaatctcatttttaagaaggccgatgctgttatcagtgactactgcaaacagcataagataaggttcaccaggtacgcggatgatctatcattctctggtgactttgatgagaacaagctgctccacaaggtgacggaaaccgtgggaaaactcaacttgcgaatcaacaagaacaagacaaaactgatgatgcctaataccaggcaaaccgtgattggcatcgtggtgaatgagaagccccaggtcgttttccacaaaagaaatgagttacgccaggctatgtattacatcaagaaattcggcttcgaagagcatcgtgaatacaaggaaatcgatcagaagaactacctggaacacctccttggcaaaattaacttcgtgctccagattaatcctaaagatgaggagtttatcgggtataaaacaatcttgatcgcactcaagaagaagcaagacctgaaaacaatggaagacgagttgataccaatttga

SEQ ID NO: 9689 - RNA, 1062 nt, synthetic construct
  source 1..1062: mol_type = other RNA
atggatttccctcattatacttgcgtctttacgcgagaggcatcgaaacttggatacagtcctaaaaatatccagaggtgtctcgagtacgccgaagtgcttttctctcacggtgtaccagtcctgtataaccctagccaatttgcactgctggtgggatacaaaaaagagtatcttcagaaggccgcgctctaccccaattacttctacaggaatttccatattaccaaaaagaacggaagcaagagattgataagtgagccactaccaagcttgaaggagattcagctctggatcctccgtaatattctgtacaaggtccccgtgtctgcatttgcgaaggcctataagccgaccgtctccatcctggaaaatctgaaattccacaaaaagcagcctaaggtgtttacgctcgacgtcgaaaacttctttccttccatcaagtatgatagtatacagaaggtgttcctgcagttaggctattccaagatgatgtcccggctcctgacacgattatgttcttgtaatggggccctcccacaaggtgcttgcacatcaccgtatttgtccaatctgatcttcaaagaggccgatgccgctatctcaaacttctgcatgcagagaaaaatccgctatactcggtacgctgacgacctgaccttttcaggggattttgacgaaaacgagctactgaaacatgttactgaaattatagagcgccagaatttcaggattaacggcaataagacaaagctgatgacaccaaacagcagacaagaggtaaccggcatcattgtgaacgaaaagccccaggtggtgtttcacaagcggaacgatcttagacaagctctttactatatcaagaagtttgggttcgaagagcatttagagtacaaagaaattaaccacaggaactacttggagcacctactgggcaaaataaatttcgttctgcagatcaacccccgcgatatggaatttatcagctacaaatctttcctgattgacttgaagaaaaagaaggacctcaaaatgactaccgtttttcccctgctgatgtga

SEQ ID NO: 9690 - RNA, 1062 nt, synthetic construct
  source 1..1062: mol_type = other RNA
atggatttcgaacagtatcgcaacaatttcagtaaggaggctttgaaacttggatattccgagcagaacgtcgtgcgttgcctggactacgcagccgtcctctttagcaacaatgttcctgtgatctataacatatcccacctgggacagctggtgggctataagaaagagtatcttaaaaaggcgtctacttatggcgacaacttctacagaaacttcgagattacaaagcggaacggtacgaaaagactgatctccgagcccctgccaagcctgaaggaaatccagctttggatattgaagaacatcctctacaaaataccagtgtcaccagtcgccaaagcctataaacctaaggcacgaattatcgagaatctcaaatttcaccggaatcaacccaaggttctcactctagacctggaaaattttttcccctccatcaagatgaaggcaacccaaaatgtctttctgaatttgggatacagcaagtacatggccaatattctaagcaaactgtgtacaaaggaggattcattacctcagggtgcccccacctcaccgtatttgtctaacctgattttcaaatctgcagatgctctcattttcgacttttgcagacaacgagaaatcaggtacacccggtacgctgatgatcttagctttagtggcgactttgacgagaagatgctcctagggaaagtgacagatattattgaatcgctgggattcaaaatcaataacaccaagaccaaactgatgacacctaatacgcgccagactgttactgggatcgtggtgaaccagaaaccacaagtggtagcccacaagaggaatgctctcaggcaggcgctctactacattaaaaaatttggcctgaaagagcatcaggaatacaaggaaatcgtccagaagaattatctggagcatcttctgggcaaggtaaacttcgtgctgcagatcaacccgaacgataatgagtacaagaattacaaggacttcttgatcgacttaaagaagaagaacgaactggggataaaaaacgcctctcccagtttaatttga

SEQ ID NO: 9691 - RNA, 1053 nt, synthetic construct
  source 1..1053: mol_type = other RNA
atggactttacacaatactcttttgctttttccaaggaagccctaaaattcggctacaccgagcaaaatatcaagagatgccttgattatgcagtggttctttttagtcacgacgttcctgtgatctataataccagccacttagctcagctggtgggatataagaaggagtaccttaaaaaagctaccctctatactaatagcttctatcggaacttcgagattgtcaaaaaaaatggcagtaagcgcctcatctcggagccgctcccatctttgaaggaaatacagctctggatcctgaagaacattctgtacaagattccggtgtcacccgtggccaaagcgtacaaacccaatgtgagaattattgaaaacctgaagttccataggaatcagccaaaggtgttaacgctggatctcaagaattttttcccctccattaagatcaacgccattaagaacatcttcatagacctgggatattcaaaattcgttagtagacttctggccaaactgtgcactaaggaagacgcactaccccagggagcacctacatccccttacttgtcaaatctgatcttcaaaaaagccgacgcgctgatatttgacttctgtaagcaacgcaaaatcaggtatacccggtacgcagatgatctctgttttagcggtgattttaacgaggaggagcttctggaaaaggtgacagatattgtagaggatatgaacttctccatcaacaaaagcaagacgaaattgatgctccctaatacacgacagactgtgatagggatcgtagtgaacgagaaaccacaggtcgtctttcataagcgtaacgccctgaggcaagctgtttattacatcaagaagttcggcctgaatgaacaccaggagtgcaaaggtattttgcagaacaactacctcgaacacctgctagggaagatcaattttgtcttgcagattaacccaaaggacaccgaatttcggaactacaaagacttcttaatcgacctgaagaagaagaatgagtggtctaaacccgtcttccaccattga

SEQ ID NO: 9692 - RNA, 1062 nt, synthetic construct
  source 1..1062: mol_type = other RNA
atggacttcgcccaatataagaataccttcacacaggaggcgtcaaaaaatggctattccgagcagaacattcagcgatgccttgactatgctgaattgctgttctcacacgaagtcccagtgatttacaatactagccacttaagtaatctggtaggatacaacaagaaatacctgaagaaggcgtcatattatccgcagtacttttatcgcgactttgaaatcacaaaaaagaacggcacaaaacggccaatatccgaacctctcccgagcctcaaggagattcagatctggatcttaaagaacatcctctacaaaatccctgtttctccctttgccaaggcttacaagcctaacactgcactgatagaaaatctgaaattccacaagaaacagccaaaagtgttgactcttgacttggagaacttctttcctagtatctccgtgaagagcattgaaaagattttcatcgagatggggtactccagaatggtgtctcagttgctggcaaaactgtgtacccgggacaagacgctgccacaaggtgcccctaccagccccactctaagtaatctgatttttaaggatgccgatgtggctatcgcagatttttgcaagcaacgaaaaataaggtacacccgctacgcagacgatctgtcgttcagcggagactttgacgagaaggaattgtttgagaagattaccgagactgtagagaatctgaacttccatatcaataagtctaagaccaagcttatgacacccaacacaaggcaggttgttacgggtatcgtggtgaacgaaaaaccacaggtcgtgttccacaaaagaaatgagctccgtcaggccatgcattacatcaaaaagttcggcattgatgagcacagagagtacaaggagatcaaccaacggaattatttagaacatctgcttgggaggatcaactttgtcctgcaaataaatcccaaagatctggaattcattgggtataaagccgtcctcattgatctcaagaaaaaacaggctctaaaaatgaagaagaaccagcccctccttatgtga

SEQ ID NO: 9693 - RNA, 1059 nt, synthetic construct
  source 1..1059: mol_type = other RNA
atggactttacccattataaagaggcattcattcaagaagcttccaaaaactccttcagtgaacacaatatcgagcgctgcctggaatacgccgctgtactgttttcaaacaatgtccccgtgatatacaatacatcacatctaagcgcactcgtggggtacaagaaggagtatttaaagaaagcctccctctatcctaaatatttctaccgggattttgagatcacgaagaaaaacggcagtaaaagagccatttcagaacctctgccatccctgaaggagattcagatttgggtgctgaagaacatcctgtacaaaatacccataagccctttcgccaaagcatacaagcccaatagcggcttgattgagaaccttaaatttcacaagaagcaaccgaaggtgtttaccctggaccttgagaacttcttcccatctatctccattaagagcattgagaaggtgtttttaaccgcgggttatagtcgcatggttagcaagttgctgtcaaagctctgtactagagatgggacattgcctcagggagcccccaccagcccatacctgtctaatttaatctttaaggatgctgacgccgtcattagctcgtactgcattgagcgtaagattagatataccaggtatgcggacgaccttagtttttctggagacttcgacgagaaagagctcctttctaaaatcacttctatcgtggagaacctcaatctgcatctgaacacagctaaaacgaaactgatgactcccaacatgaggcagacagtgactggaatagttgtcaatgataagccacaggttgctttccacaagaggaatgaattgcgacaggatatgcactacatcaagaaattcgggatagacgaacatcgggaatataaggaaatcaatcactccaactaccttgaacacctactcggcaaagtaaacttcgtgctgcaaatcaatgccaaggatctggagtttatcggttacaaggccgtcctgatcgcactcaagaaaaaacagcagaaaacacagatgatccagccgctattgatgtga

SEQ ID NO: 9694 - RNA, 1056 nt, synthetic construct
  source 1..1056: mol_type = other RNA
atggacttctctaattataaggatacattcaccaacgaggctattaaacggggctactcagaacagaatattaagcgctgcttagactacgcagccccacttttttctaatgatgtacccgtgatttacaataccagtcacctgagcgtccttgtgggctacaaaaaggagtacttgaagaaagccgctctgcacaccaagtatttttacagggatttcgagattgttaagcggaacgggaaaaaacggcccatcagcgagcctttgcccagcctcaaagagattcagcattggattctgaagaacatcctgtataacataccagtttccccttttgccaaagcatacaagcccaatataagcctgatagaaaacttgaagttccaccgcaatcagccgaaagtgtttaccctggacctggagaacttttttccttccatcacaatcgattccattgagaaaatattcatcgagctgggttactccaagtcggtcagtgacctcctagcgaaactttgcactagggatggcaccttgccacagggggctcccacatcacccagtttatctaacctcatcttcattgaagccgacgcgcttatagccgactactgtatccaacgtaagattcgatacactagatatgcagacgacctcagcttctcaggggattttgatgaaaaagagctgttcgataaggtgaatggcatcatcaagaagatgaactttaacatcaacacggccaagacgaagctcatgacccctggatctcgccagactgttactggtattgtcgtgaacgaaaaaccacaggtagtgttccataaaaggaatgagctacgacaggctatgtattatatacagaagtttggcatcgaccaacatagagagtacagggaaattaatcagagaaacttcctggaacacctgctgggaaaaatcaatttcgtgctgcaaatcaatccgaaagacacagaatttatcggatataaatccttcctgattgatctcaagaagaagagagacttaaactatgatacactcaagatcatctga

SEQ ID NO: 9695 - RNA, 1062 nt, synthetic construct
  source 1..1062: mol_type = other RNA
atggacttcagtcaatatgaagatgcttttacaaaggaagccacaaagatgggctactccccacaaaggattgagcggtgcttagattatgcagagatgctctactcaaatgacgtgcctgtcatttataactcatctcatctggccgggttagtagggtacaagaaggaatatctgaagaaggctgccctgcatacgaagtacttttatcgagacttcgagattttgaagaagaatggcaagaagaggcccattagcgagcctcttccgtccctgaaagaaatacagcattggatcctgaagaacattctatacaaaagacccgtgagcgcatttgcaaaagcttataaaccgaacgtttctctcatcgagaatttgaaattccacaaaaatcaggcaaaggtcttcacactggacctcgagaatttcttcccttcaatcggcatcgaatcagtcgaaaaggtatttgccgacgtcggttatactcggtccatcagcgaccttctgagtaagctatgtacccgcgatggatctctgccacagggagcgcccacctctccttacctcagcaacctgatctttgaggaggccgacaaggttatatcccagtactgcattcagaagaaaatacggtatacacgatatgcggatgatttgtcgtttagcggtgactttgacgagaaagagctgttcaacatcgttaccgaggccgtggaaaagttgaaactgaaaatcaacccaagtaaaaccaaattgatgactccagattctcgccagactgtgaccggcatcgtggtgaacgaaaaaccccaagtcgtgtttcacaaacgcaatgccctcaggcaggccatgtactacattcaaaagttcgggattgacgagcacagagaatacaaagagattaaccaggctaattaccttgaacacctgctgggaaaaatcaacttcgtgctgcagatcaatcccaaggattccgaatttataggctacaagagtttcctcaaggatctcaaaaaaaagcgtgaggctagcaataacagaatcatgcctttacttatgtga

SEQ ID NO: 9696 - RNA, 1113 nt, synthetic construct
  source 1..1113: mol_type = other RNA
atgggcgtatctgattctaagagtccgcactccattaacgacagcgatgcaatggattttgttcattacaaggactccttcactaaagaagctctaaaaattgggtattcgcaacagaatattctgagctgcctggattatgcccagattcttttgacaaaggacgtgcccgtgatatataacagtagccatctcgctgtactggtcggctacaagaaagagtacctgaagaaagcagctcaccacacaaaatacttttatcgagacttcgagattactaagaaaaatggaaagaagcggcctatcagcgagccactgccctcactgatggagatacagcactggattctcaaagaaatcttgtataagctgcccgtctcaccatttgccaaggcttaccgaccaaacatctcaattatcgagaacctgaagttccacaaaaaccagcctaaagtgtttaccctcgacctggagaattttttcccttcaatcaagatcgaagccgtcgagagaatcttcacagagcttggttactctaaaaacatatccaacttgctcgcccagctatgcaccagggatggtcgcctgccacaaggagcaccgaccagcccttttctttccaatttaatcttcaaggatgccgacctgatgatctccgactattgtaaggaacacaagattcgctatacgcggtacgcggatgatcttagtttctctggggacttcgacgagaaaaaactgctccacaaggttactgaaaccattgagaaattggatttcaagatcaacgcagcgaaaaccaagctaatgactcccgatagacggcaaacagtgactggcatcgtggttaacgaaaaaccccaggtcgtgtttcataaaaggaataccttgcgtcaaacgatgtactacattaaaaagttcggaatcgacgaacacagggaatttaaggagatagaccagacaaatttcctcgaacatcttctggggcagatcaattttgtgttacagatcaatcctaaggacagcgagtttatccattacaaagccttcctcattgacctgaagaaaaagcaggatgccaagaacataaagagaggcctcctgttaatgtga

SEQ ID NO: 9697 - RNA, 1062 nt, synthetic construct
  source 1..1062: mol_type = other RNA
atggattttaccaaatacaagaaggatttcactgatgaggcgaccaaaatgggtttatcgaagcgcaatattcaggattgcctggactatgcagaagtattagtgtctcacaacgtttcagtaatctacaacccgtcccatctctcagcgttggtcggctataagaaggaatatcttaagaaagccgctctccacacttcttacttctaccgcaattttgaaattaccaagaagaatgggaagaaaagaccaataagcgagcctctcccttccctgaaagagattcagatctggatcttgaagaacattctggagaacattcctgtgagcccatttgccaaggcctacaaaccaaagatgcggcttatcgaaaatctaaagttccataagaaccaacctaaagtgttcacacttgacttggagaacttctttcccagcataaagatcgaggctgtcgagaaaatttttctgaaactgggctacagtaagatcgtgagtgaacttctcgcaaaactctgtacgaaagacaatgccctgcctcaaggggcacccacatctccgtacctgagtaatctggtcttcagggatgccgacgcaattatcagcgaattctgcaagcaacggaagatcaagtataccagatatgctgacgatctttccttttcaggagacttcgacgaaaacgagctgctggataaggttacggaaacaatcaaaaccctgaacctgcgaataaatgaaagcaaaaccaaactcatgacacccgacatgagacagactgttactggtattgtggtgaataacaagccccaggtggagtttaataaaaggaatgaactccgtcaggccatgtattacataaagaaattcggctttgaggagcatagggtgtataaagagatctcccaggccaattaccttgagcacctgctgggaaaaatcaactttgtcctgcagatcaacccaaaagactatgagttctctgcctacaaagctctgctcattgaactgaagaagaagcagaacttgaagataaagaaagagttacccctactattgtga

SEQ ID NO: 9698 - RNA, 1062 nt, synthetic construct
  source 1..1062: mol_type = other RNA
atggatttcactaaatacaaggttgactttacggcggaagcctctaagaagggcctgagcaagaataacgtgcagcggtgtctcaactatgctgaagccctgatctctaagggcatagctgtgatttacaatcctagccatcttagcgccctgctggggtataagatcgagtatctgaagaaggccgctctgcatccgtcctatttttatcgggatttcgagatcgctaaaaaaaatgggaaaaaaagggccatatccgaaccactgccctctcttaaagagatccaggtgtggatcctcaaagatatcctcgaaaaggttccagtgtccccttttgcaaaggcctataagcctaaaacgtcgttgacagaaaacctgaagttccaccgtaaccagcccaaggtcttcactttagatctggaaaactttttccccagtataaagattgatctcgttgagaaggtgtttctggagcttggttacagtaagatggtcgccaacttactggctaaactatgcacacgagacaacgccctcccacaaggagctccgacatcaccctatttgtccaatttgattttcaaagaggccgacgccattatcgcagattactgcaagcagcagaaaattagatacactagatacgcagatgacctcagtttctcaggtgactttgacgaaaacaagcttttcgagaaagtaaccaatgtggtcgagaaacttgacctacgcattaataagtcaaaaaccaggctcatgacccccgataagaggcaaagcgtcaccgggatcgtcgtgaataataaaccccaggtagcatttaagaagagaaacgcgctgcgccaggcgatgtactacattaaaaagttcggaattgacgaacaccgggtgtacaaggagataaaacaagcaaactatctggagcacttactgggcaagattaactttatcctccagatcaatcctaaagacacagagtttatggaatacaaaaccctgctgttcgacttgaaaaaaaaggaggatcttaagatccgaaagcctctaccattgctggtgtga

SEQ ID NO: 9699 - RNA, 1038 nt, synthetic construct
  source 1..1038: mol_type = other RNA
atgaaatttgaacagtacaaggaagctttcgagaaaaaagcaagcatttttgggtactccgaggacaatatacaactctgcttaatctatgccgaattgcttttcaaaaacaatgtccccgtcatttacaatacgtcacatctctctgcgctcgtgggctacaacaaggagtatttaaagaatgcaaccaaacacactccgtcgttttatagggatttccagattaagaagaagaatggaacactacggactatcagcgaacccttaccttcactgaaagagatccacatttggatcctggagaacatattggccaatgtgaagctgagcccatttgccaaagcttacagaaaaaaaatccgcatcttcgagaacttgaagtttcataagaatcaacccatcgtgtataccatcgacctgaaggacttcttctgcagcattaataccgatgctgtagaggccatcttcaagtccctgggctacagccttctgatctctaatctactagctaagctgtgtacgaaagataactcactgccacaaggggcacccactagtccatgtctgtctaacatcttttttaaggaaaccgacaatctgatcgccaactactgcctcgaacagaagattaagtatactcggtatgccgatgacctgagtttttccggtgagttcaatgaaaacgttctgctcgaattcgtcaaaaactccatcgagaaaattgggcttaagattaacgaggataagattcgtttgatgcgcacaggatcccgacagacagtgaccggcatagttgttaacgagaaacctcaggtagtgttctacaagagaaacaaacttaggcaggacctgttttatatcaagaagtttggccttgcgggtcacatgtctcatagaaaaatagagaaaaccaactacctggaacacctgctcggccagattaacttcgtgctgcagataaatcctgatgacaaggagttccagggatacatgacatatctcattgagttgaagaaactcagtgaaatcagggactga

SEQ ID NO: 9700 - RNA, 1035 nt, synthetic construct
  source 1..1035: mol_type = other RNA
atgaactttgaacgatacaaggaggccttcgagaaggctgcctcaaattccggatatagtgaagagaacattaactactgcctaggctacgccgaggtgctcttccgcaataacgtccccgtgatatacaacacttctcatctcagcgcgctggtgggctacaagaaagaatatttgaagaaagccgttgtgcacaccccattcttttacagggacttccagattaagaaaaagaatggtaagcttcgcacgataagcgaacctctgccaagtctcaaggagatccaaacctggatactggactctatcctttcgaatgtgtccgtgtcaccttttgcaaaggcatataggaaaaacgtcgggctgttagaaaacattaagttccacaaaaaccagccccttgtgctgacaatggacctgaccgatttctttacttccgtaaaaacaaattccgtggaagagatctttagatcactggggtatagtgacttgatcgctaatctccttgccaagctgtgcacaaaagataatagccttcctcaaggagcccctacgagcccggccctatctaatttgttctttaaacccgtggacgagaggatcgcagcttattgtaaactgaatcacatccggtatacccgatacgctgacgatctcaacttctctggcgatttcgatgctgaaaaactgaaggcatatgtcaaaggtgcggtagagtcagttggcttgatggtcaacgactccaaaacaagagtcatgaagagcggtagtcgtcagctcgtgaccggaatcgttgtgaatgagaaaccccaggtagcatttcagaagcgcaacaaactccggcaggatctgttttacattaggaagttcgggttagaggaccacatgaagcggagaaaaattaagcaggccaattacctgagccacctgttaggccaggtcaactttatcgttcatattaacccagacgataaggaattccaggattacaagacttatctggtgggattgaagcaaactctggggcatgcttga

SEQ ID NO: 9701 - RNA, 1038 nt, synthetic construct
  source 1..1038: mol_type = other RNA
atgacatttgaacaatacaagatcgccttcgagaaggccgctagcaatagcggttactcagaacttaacattaagaggtgtctggattacgcaaagccactgatcgagaataatgtgccgataatctacaacacatcacacttttccagtcttgtggggtacaagaaagcctatatcaagaaggcagtctattacacaaaatccttctacacggattacgctataaagaagaaaaacggaaagaccaggactattagcgagcctctcccaagtctgaaagaaatccagacctggatattacagaatatctttcagcagctcaaagtgtccccctatgcgaaagcttataaaagaaaggttagcattgtggagaacctcaagttccattataatcagcccaaggtgtttaccctggacctgaaggacttttttccttccattaaaatccactcagtggaacagatattcaaatctttagggtattcagacctgatctcgaatctgttggccaaactctgcactaaggagaattgtctgcctcagggagcaccgactagcccctatatctctaatctgtatttcctaccagccgataatcatattagtgagttctgcaagcaacactctattcgatacacccggtatgcggatgatttgaccttcagcggaaacttcgacgaaaacgctgttcttaactttgtcagtgagcagatcgtgaagctcgagctggtgattcatcccgacaaaattaaactaatgacaccaaaccagcgccaatccgtcacagggatcgtcgtaaatcaaaagcctcaagttgtgttccacaaacggaacaaggtccgtcaggagttgtactatatcaaaaagttcggccttgccaaccacatggaacgcaaaggtatcaagaagagaaattacttggaacatctgctgggcaaagtaaactttataattcagatcaaccccaccgacactgagtttattgagtacaaagagtacctcatcaagctgaaatctgaaatttctggccagacgtga

SEQ ID NO: 9702 - RNA, 1029 nt, synthetic construct
  source 1..1029: mol_type = other RNA
atgaaatttgagcagtacaagcaggaattcgaaattaaggcatcacaaagtggatattccgcggagaacattactagatgtctcaattatgctaagcctttgatagataaggggttcccggttatttacaacaccagccatctgagcgttctggtcggctacagaaaagattacataaaaagggctgtggtctacaccccatatttctatcgcgatttcgagattaagaagagaaacggtaaaatgcggaaaattagtgagcccttgccgagcctgaaagaaattcaagactggatacttgtcaatatcctagaagtggaaaaggtgtcaccatttgcaaaagcatacaggaagaaagttggcctaatcgagaacgtaaagtttcacaaaaaccaacccaaagtcctgactctggatctgaaggacttttttccatccatcaagcgggagaatgtggaatctatattccgttcctttggctactctgccctcatctctaatctcctgtcgaaactgtgcacgcgcggagggtgtttaccccaaggagctcctaccagcccctacctgtctaacatattcttcaagtcagccgatgacattattatcaagtactgcctggccaatgatatccgatatacccggtatgccgatgacctttccttcagtggaaatttcgacgagaaaatgttaatcgaactggtcgacgacaccgtgaggcagctcggcctgactctgcacccagacaaaattaagatcatgaagcctaacgaacgacagacagtgacagggatcgtggtgaatgaaaaaccccaggtggtatttcacaagaggaataagttacggcaggagatgcattatatcattaagtttggcatccaggaccatatgcagcgcaagaacattaaatacagaaactacatcgagcatctcttgggtaaaatcaactttgttcttcaccttaatcctaaggatacagagttccagaagtataaagagcacttgatcgagctcaagaagcagacaatctga

SEQ ID NO: 9703 - RNA, 1029 nt, synthetic construct
  source 1..1029: mol_type = other RNA
atgaacttcgagcagtacaaggttatatttgaaaaggaggcgtccaattcaggttactctgagacgaacatccggcgctgtttgacatacgccgaaatccttttcgccaataaagtaccggtgatttacaatacaagtcacttgagcgtcctggtggggtacaacaaacgatatctgaagcgggctgtggtctatactccctatttctatcgggactttcagatcaaaaagaagaacggaaaattccgcaaaatctctgagccactcccttccttgaaagaaattcagacctggattctagagaacattcttagcaatatacctatctcaccatttgcaaaagcctataagaagaacacctccatcattgaaaatctaagattccacgttaaccagccaaaggtatttaccctggatctcgagaatttctttccctcgatcaaaaccgactctattgaaagtattttcctcaatgtgggctatagcaagatcctcagtaatctgatggcaaaactgtgcaccagggataattctctccctcagggggccccaacaagcccctatctgtcaaatatatttttcaagcccgtcgacgatatcatttccagatattgcatcgacaacaaaattaggtacacgaggtacgctgacgatttatcattcagtggtgacttcgatgagaacagcttgatggagtttgttagcaatgtcatatctgaactgaacctgaccattaacaagaacaaaactcgcttaatgacacctaatatgagacagactgtgacaggcatcgtggtgaacaaaaaaactcaagttgtgttccacaaaagaaataatctgcgaaaggatatctactacattaaaaagtacggactccataaccatatgaagttccgtaatatcaagcagtccaactatcttgaacatcttctgggcaaggtgaactttgtcctgcaactcaaccccaatgacatcgaatttaagaggtacaagaactttctgatcgagctgaagaacaagatagagtga

SEQ ID NO: 9704 - RNA, 1041 nt, synthetic construct
  source 1..1041: mol_type = other RNA
atggactttgatcagtataagacggaatttgcaaccctggcaagttccgtgggatatactgaacagaatatccagaaatgcctcaaatatgccaaacctctgctcgataagaaactccccgttatttataacactagcaatttgtcgaacctggttggatacaaaaaggagtacttgaaaaaggccgtgagatatacatctagctactaccgcgattttgaaatcaccaaaaataatggtgggaaacgtaaaatctccgaacccttaccttcactgaaggagatccaaatatggattctggataatatcctctctcaaatcgaaatctctccatacgccaaggcctataggcagaatgtgactctaattgagaatctgaaattccacaagaaccagcccaaggtcttcaccatagacctggagaatttcttcaccaccatcaaacaggacagtatacagaagatttttggagagatgggctactccaggctgatcagcaatcttttgtcaaagctgtgtacccgcgatgattcacttccgcaaggcgctccaacatctccttatctgtccaacattttcttcaaaagcctggacatagagatcactaagtattgcaacgagaataagattaggtatacccggtacgctgacgatctgagttttagcggtgattttgacgaaaagattctcctcgagtttgtaactgagaagatcacaaaggcgaaattagttattaaccccgacaaggtgaagctgatgaagaaaaacacaagacaaattgtcacagggattgtggtcaatgaaaaaatgcaggtggtgttccataagcgaaataagatccggcaggacatgttctacattaaaaaatacggcctagtaaaccacatggaacacttaaagataaagaagaacaactaccttgagcatttgatcgggaagataaactttatcctgcatattaacccaaacgacaaagagttcatcgattacaagtccttcctcaacgaccttaagaataaagtcaacaaaacgaatgcctga

SEQ ID NO: 9705 - RNA, 1032 nt, synthetic construct
  source 1..1032: mol_type = other RNA
atgaccttcactcaatataaacggaaattcacagcagaggcctttaagtcggggtattctcagcagaatattgataggtgtctagtttatgctgaacgtcttttttccaataaagtgcctgtcatctataatactagccacctttctggccttgtagggtaccgaaagagttacttgaagaaagctgcattattcaccacgtacttctaccgggacttcgagatcctgaagaagaatgggaagaagaggcagatatccgagcccctgccatcactgaaagagatacagttgtggatactcgagaacattctgtacaaagtcaagatctctaaattcgccaaagcttatatccccaaggtcaatttgaagcagaatctcaagtatcatgtgggaaaaccactgatcctggcgatcgatattgaaaacttctttcctagcatccgccagaacaacgtggaaaagatttttcaggagctcggatactcaaatcttatctcaaatcttctggccaagttgtgttgcaggggagaaagtctcccccagggcgcacctacaagcccgtacttgtctaatatctacctcaagccactggatgatgacgtgtccgaatactgtctcgagcggaacatccattatacccgctatgccgacgatctcaccttttccggtatgttcaacgataaagaactgtgcaaatacctgcacatagagatcgagaagttaaacctgaagatcaataacgacaagacgaaggtgatgacaccaaataccagacaaactgtaactggcattgtggttaatgaaaaaccgcaagtgtgctttgtgaaaagaaacggtattcgccaaaccatctattacatcaaaaaattcggcctagaaaaccacatggacagaattaagattaagaagcagaactacctgaaacatctcttaggccaggttaacttcgtcctatttataaaccccagcgacaaggagtttattgagtataaaaactacctgcgaacactgattattcaccctctgagttga

SEQ ID NO: 9706 - RNA, 1023 nt, synthetic construct
  source 1..1023: mol_type = other RNA
atgagcttcgaacactaccagaaagaattcactagcaaggctgttaactctggctactctgaacagaacattttcgactgcttagaatatgccaagaaactcatcagtaacaatgttccagtgatctacaacaccacgaatttgtcagcactggtaggttacaaaaagtcctaccttaaaagggccgcaatctataccccttacttctatcgcgagtttgacatactgaaaaagaacggcaaaaagcggaaaatatctgagcctttgcccagtcttaaggagatccaactctggattttgaacaatatcctgtacaaggttgaagtgagtaagtttgccaaggcatatattccaaaggtgtcgatcaagcagaatctcgttttccataaaaaacaagcgaaagtgctcacaatagatctcgagaatttttttccttccattaagatcgatcaggtaatagtgatctttaagagcctggggtatagcaacatcattagctccttaattgctaagctctgctgcctgaacgattgtctgccccagggcgcttccactagcccatacttatccaacattttccttcgaaactcagacgatattatctctaagtattgtctcggaagaaatattcggtacactagatatgccgacgacatgaccttttcaggagattttgacgaggtcgaactgctgaaattcgtcaggacagaaataaaaacactgaatctgcaggtgaacgacgaaaaaacaaaactgatgctgccgaactcacgtcaggtggtgaccggaatcgtggtcaacaataaaccccaggtcgagttcaataaacgcaataagattagacaggagatgtactacatcattaagtttggtttggagaatcacatgaataggaagaacattaagaaggccaactatgtgcctcatctactggggaagatcaatttcatcttgcaaataaacccccttgataatgagttcatcgagtataaaaagcaccttaaggctctaaccctggtctga

SEQ ID NO: 9707 - RNA, 1044 nt, synthetic construct
  source 1..1044: mol_type = other RNA
atgaatttcgaacagtactccctggcatttagcagggaggcatcgcagtccggatacactgagcaatctatcatccgctgtctcaaatatgctgaaaagttgttcagcaacaaagtccctgtaatttacaataccagccatctctcagttctagttgggtatagaaaaaactatctcaagaaggctagcttctatacaccatacttttaccggaacttcgagatcctcaaaaaaaacgggtctaagcgtattatttctgagccgctgccaagtctgaaagagattcagatttggatcttaaacaacatcctgtacaatatcgaagtttcaaggtttgccaaagcgtatattcggaagtcccacataaaacagaacctggtcttccataaaggccagttgcaggtactcaaactcgatattgagaacttctttacttctatcaagctaagctcaatacaggatatatttatgtcggtgtggtattcccaactgatcagtaatcttctcgccaagctgtgctgtcaccggggctctttacctcagggaggtcccacctccccctatctttcaaatttgtacctgaagagtgtggacgagagcatctatcactactgcatgcagaaagaaatccgcttcaccagatatgccgacgatatgacattcagtggcgtctttgaagagaaggggcttataaagtttgtgacagaggaactgcggatccttgacctgaagattaacgaaaaaaagacgaagatgatgtccagatccagcaggcagttggtcaccggagtggtggtgaatgagaaactgcaagtgcccttttacaaacgcaataagctgaggcaggacctgtactacatcaaaaagttcggcctggaaaatcacatgcaacgccgaaagattactaagtcaagttatatcgagcatctgctaggtaagataaatttcattctcagcatcaaccaggaagatcaagagtttttgtcttacaagaactaccttattgagttaaagagaaagtcccgtgagatccgacctgaatga

SEQ ID NO: 9708 - RNA, 1032 nt, synthetic construct
  source 1..1032: mol_type = other RNA
atgtcgttcatcgtttatgaaaagctcttcactgcaaaagccgtgaaggcaggcttttcccaggacaatatccaaaagtgtttagcatacgccaagcctctgatcgataaggggctgccagtcatctataatacggctaatctgtgcgctctggtgggctataacaaaaactacctgaagcgtgctgctctgcatacccagttcttctataggaagttctttatccggaaacggaacgggaaagccaggttaatcgtggagcccctgccaagcctaaaggagattcagctgtggatcctgcacaacatactatacgaagtcaaggcgtctagatacgcgaaagcttatattaaggggaggaatattgtcgacaacgtacgctaccacagggaaaaagacattgtgctccgcatagacattaaggacttctttccttctatcggcttttccaaaattcagcttctgtttgagcagctcggatactcatccaacatcagcaacttactcaccaagttgtgttgcgtgtatgagacacttccgcaaggcgcccccacaagtccctacctaagcaacttggtccttaagaactttgataaacgacttgctgagttctgcgtagcaaagaatatacggtacactagatacgccgatgacctgactttctctttcgcaaagacaatagaccccaatgaggtccgcctgtttgttgaaaatgaactttcaaaagagggtttcagcgccaatcctgataaaactcagatactgacacctaacaagcggcagattgtgaccggaatcgtggttaacaaggtgctccagatcccaaaaattgatagaaagctcattagacaggaaatgtactatatttccaagtttggtttgcgagatcatatgaaaaagacgcaaaataccaaggccagttatctgctgcacctcttgggaaaaaccaactacgccctccagatcaatccagaggacaaagagatgaagaaatataaagccatcatctggcagatgttgaatcaagaatga

SEQ ID NO: 9709 - RNA, 1050 nt, synthetic construct
  source 1..1050: mol_type = other RNA
atggattttctggagtataaggtgaagttcgtgaagaaagcgctggaagcgggttactctgaggttgaaattgaccagtatcttacctacgccaaagtgttgcttgacaagaagcttccactcatctataatacctcacatcttgcagccctcacggggtacagtacacgctatataacaagggcagctctgtacccaaaaagcttttacaggacgtttaagatcaagaaaaagaacggcaaaatgcgcgagattaacgagcccttaccttcgctgaaagagatacagctctggattaacaagaacattctactgaacatcaagcctaacaaattcgccaaggcctacattaagaaaaccaacatcctggataatgtcaagtaccacaagcggaagaagtatgtgttcaatctagaccttgtcaatttcttcccctctatcagcactaaaaccgtggagatgttctttaagaaactgggctacagcgataacctgtctaaccttttggcaaaactgtgttgctttggggacggcttagctcaaggagctccaacatcccccgccctgagtaatcacatcttgtatgaatttgacgatctactcggaagtttcgcagtagagaataacctgaggtatactagatacgctgacgatttgactttttccttcaatgatgagtttgacgtctccataatcgaagagaaggtgattaataccctcgacaagacagtgctctactcaaaactcactgttaatcgggaaaagaccaaactgctcagacagaatgatcgacaaatcgttaccggggtcgtcgtaaatgataaaactcaggtgccgtcttcatacaggaagcagatccgtcaggaaatttattacatccgaaaattcggtctgagcaatcacctgaatagactgaacgaagttcgctataactatctctatcatttgctgggaaagattaatttcgtgttactggtgaacagcgaagacaaagagatgaaagagtaccggaacgccatcaagatgttgatatccaacagacctacatga

SEQ ID NO: 9710 - RNA, 1089 nt, synthetic construct
  source 1..1089: mol_type = other RNA
atgtttaaaggcccagcacgaaagctggcaggcttaaatgagatcaacatgaccgccgcacagtatgaatctgctttccgcaagaaagccctggtggctggttacagcgaggagaacatccagaaatgtctgagctatgcaattccactcctatccaaaggctttcctattatctacaacactacaaacttcgccggactggtcggttataacaagctataccttaaaaaagcggccctgttcaccgctagttattaccgtaccttcaaggtgaagaagaagaaaaagaaggactacagggagatcaaggaacctctccccagcctgaaggaaatacagttgtggatcctctataatatactgtaccaagaaagaccctcaaagtacgctaaggcgtacattcagaagaggaatctgagagagaatgttaagttccacgtgggcaaaaacaaagtcctgaatttggactttaagcacttttttccgtctattaaacaggacgcaatagagaagattttcctgtcatttgggtattctagcaacatttccaacttactatcgaaactgtgctgtctcgatggcagtctgcctcaaggggccccgacatcaccttacctttccaatctgtacttaaagaccttcgacgaagatgttttcggcttctgcaaaaataaacacatccgctacacacgatacgctgacgatatgacatttagtggggacttcaatgaactcgaggtgataaacttcatcaaagagaagatcgaagatagcccccttgaaattaacgacgaaaagaccagagtcatgaggcgcaatcagcggcaggtggttactggaatcttggtgaatgataagacgcaggtatctaaaaagtataggaataacatccgtctcgagatgtactatatcagcaaatatggaattgccgagcatttggccaaaagtaagaattcccgggccaactatttgtcacatctcctggggaagattgaatacactcttcattttaacccagatgacgtagagtttctcgagtatcggtccaaactgaagcaactgcttcccaagaaacaggatgctgagtga

SEQ ID NO: 9711 - RNA, 1035 nt, synthetic construct
  source 1..1035: mol_type = other RNA
atgaacttccagcagtattctgaggctttcagaaagaaggctttggcggccaccttttctgaggatgagattatttactgtttggattacgcaaaaccgataatcgaaaaaggccttccagtagtttataatacgacacacctggcagctctggttgggtatagaaaggtttacttaaaaaaggcagtcctctataccagttacttttacaggagattcgtgatatcgaagcgaaacggcaaacctcgcacaattagcgaacccctgccatcactcaaggaaattcagatctggatcctaaagaatatcctcgagaatctgcctgtgtctaaattcgcaaaggcctacctggccaaaaaagatgtgcgcgacaatgtgcggtatcacataggcaagccaatagtgttgaagctagacatcaaggacttctttggaagcattacacagcagtcagtccagcaaatctttctggatgccaactattcatccaacatcgcgaatttatttagtaaactgtgcacccttaggggcacgctccctcaaggggctagtacctctccttacctgtccaacctcttcatgaacaaatttgacgaggtcgtaggtggatatgccattaaagagaagactaggtacactcgttacgctgacgatctgaccttctccgggaattttaatcccgacaacgtcatcgaatttgtgcagacagaaatagagaaaatcggtctgagactgaacctgtccaagaccgccgtgatgcggcagaacagccggcagtttgtgactgggattgtcgttaacgagaagatgcaagtaccaaagaaggataggcaaaatctgcgccttgaaatgcacttcattcagaaattcggattagagaatcatttgcgacgtgtgaagaataagaaagccaactaccttccccatattatcggccggattaattacttcatcactatcaaccccgacgacgaggaattcgtgagctacaaaaagtatctcatcgaaacctatgtgaatgagaacctcacatga

SEQ ID NO: 9712 - RNA, 1068 nt, synthetic construct
  source 1..1068: mol_type = other RNA
atgggccccgagatatcgttctggcctcataagaagatgaatttcagccagtatgagaagaccttcagaatcaaagccactaagatcgggttttctgaggaagaaattactgcttgccttaattacgccgaacctttaattagcaacaaactccccgtcatatactctaccgccaacctggccgctctggtgggttataagaccaattaccttaaacgcgcagtgaagtttaccaagtatttctatcgagacttccagatcaaaaaaaaggatggcaaattgaggactctgtacgaacccctaccttccctcaaggagatccagtcatgggtgctgaaaaacatcctgtccgaggttaaacccaacagattcgctaaggcatacatcaagaacaaaagtctgattgagaacgtgaagtatcacaaaggacgcgagggagtcctcacattggatatcctggacttctttggcagtattaagacggcccacgtagccgggatttttagcgaaatggggtactctgctaatatcgcatctttattggctaaactgtgtacatacgatggatacctgccacaaggcgcgccaacctccccgtacctgagtaatctctatctgaagaacttcgacgatatagtgtccaagtactgctcagagaacaatattaagtatacacggtacgcggatgacatgacgttttcagggaaagaagaggacctgaatatcactagctttatcgaggttcaacttttcaatattggcctgtatctgaactcagataaaagcaagcttatgaaacggaacgagaagcaggtcgtgacaggtatcgtagtgaacgacaaactacaggttcctcgtgaggatcgggactttattaggaatgaagtccatttcttgacaaagtttggactcaatgaccacctcaataggaccctcaacaaaaaagccaattacattgaacaccttctgggtaagattaactttgcattacatatcaacccagatgacttgaagatgaagagatataaggcaaaggtgatagaatatgccaaatccatcgaggaatga

SEQ ID NO: 9713 - RNA, 1032 nt, synthetic construct
  source 1..1032: mol_type = other RNA
atgaacttcgcccagtatgagaagaaattccgcttaaaggccttaaaatctgggttttctgaggataacatcgtggcctgcctcaattatgccaaacctattctggagaagggactgccggttatttacaacacggcaaatctggctgccttggtgggttaccggactacatacctgaagagagcagctaaattcaccaaattctactatcgcagctttaccataaaaaagtctaatggcaaactcaggacactcatggaacccctgccttccttgaaagagattcagacatggatattggaaaatatgctctcagaaatcccagtgtcaaaatttgcaaaggcgtacgtcaagcaccgttccctaaaggagaatgtgaaacatcacaacaacaaggaaggcgtgctcacgtgtgacattgcaactttttatgacagtgtcagattcaaggatatcgaaaagatctttaacgagctggggtattccgaggtgatgagcaatctgcttgccaagctgacaacattcaatgggagtctgcctcagggcgcgccaacctctccctatctgtcgaatcttgtcctgcgggagttcgaccagaagataagtgactactgcatcaataacaacatccggtataccaggtacgccgatgatcttacatttagcggcgaggtaaagtccctcaaactaaaaaacttggtagaagctgaacttaacaagctgggtttagagctgaacccagataagaccaaactcagaaagtttagccagaggcaaatggttaccggaattgtggttaatgagaaaactcagatacccaaattcgaaaggaacttcatccgaaacgaagtgcacttccttacccgctttggactcaaggaccatctgcggaagactaagaataagagagagaattacttgctacatctgctgggcaaaatcaactttgctctgcacattaatcccgctgacaagaagatggagtcataccgaagccaggtccaaaaaattatccaaactgatgccgggtga

SEQ ID NO: 9714 - RNA, 1041 nt, synthetic construct
  source 1..1041: mol_type = other RNA
atgacctttccccaatatgagaagaaattccgggtcaaggctattaaatctggctttagcgagtatgaaatctccgcatgcttgctgtatgcaaaaccactgatcgagtcgaacttgcccgtcatttttaataccgccaacttcggcgccctcgtagggtacaagacaaattacttaaaacgggctgtgaagtacactccatacttttaccgcgcttttactatccgcaaaaagaacggtgggtcaagggagctcgtggagcctttacccagcctgaaggagattcagacctggattctagaaaacattctcagagaagtgaaggttagcaagtatgccaaagcgtatgtgaaaagtagaacgcttctggaaaacgtgcgttatcacaagggaagggaggcagtcctcaccttggacattgaaaatttcttcggatccatcacactgctccatatcgaacatatctttctgggcctgggatactcaagcaacatctccaatctattagctaaactctgtacctatgagggtgtgctggctcaaggggcacctacgagcccgtatctttccaatttgtacctccgacgtttcgatgagatcatctctaaattctgcaaccagaatgatatcaggtacactagatacgccgatgacctgactttctcaggccagaaggacgccctcgacatagtggaattcattcgcaagacactgcaaaagttttcactgaagctgaacaaggacaaagaaaaattgatggtcagaaaccagaggcaggtggttaccggcatcgtcgtaaatgaaaaacttcagattccaaaagcggcccggaatttcatacggaacgagatcttctttatcaaaaagtttgggcttgacagtcacctggagaaaacagataacaagaaatctcactacctggagcatctgataggaaagataaatttcgcccttcacataaaccctaatgatctaaagatgcagagttacaagtctatcgttctgaagatttatcagtcccgagatgaggacaagatttga

SEQ ID NO: 9715 - RNA, 1020 nt, synthetic construct
  source 1..1020: mol_type = other RNA
atgacgaaccagcaactgtacgcaaaaaaattcaccgagaaggccatcgaaaacggatttagctctgattatatcgagaagtgcctttcatatgcctcccccctcctggaaaataatctgccagttgtctacaatatcaaccatttgtcgggactggtcggctacaatgttagctatctgaaaagggccgtgaaatttcctaagtatttctaccgtgagtttgagattgagaaaagtaacgggaaaaagcggaaactgcatgagccactcccttcattaaaagaaatccagctttggatactagacgagattctctataagctaaaagtcagcagatatgcgaaagcctacgtgcccaaacggagtattaaggagcacacaatataccacacagacgagccgttcgtacttaccctggacatcaaaaacttcttcaactccatccagtttgattcagtggagtccctctttaaaaagattggatactccgaaaagatggctaacctctttacaaagctgtgctttcgcgacgacgaactgccacaaggcgctcctacttccccctacattagtaatttgattctgaaggacttcgatttcgccgtgtcaaagtactgtatggaacacaatatcaagtacactcgatatgcagacgacttagctttctctggggatctcaacgctgaagaaattgagaaacttatcaaggatgaactgtctaagattggtatggagcttaatgatgagaagagaaagttgatgaaacccaatcagccacaactgataagcggtatcatagtgaataagaaggcacagctgccgaagaagatcaggaattctctacgaaacgaaatgtactatatcaagaagttcgggctgcccagccacctcgagagaaccaaccagaaaaagcctaactatttgaagcacctcatgggccggatcaattatattctgcagattaaccctagggataaggaatttatcgagtaccgcaaacatttgcatgagttaaaatga

SEQ ID NO: 9716 - RNA, 1020 nt, synthetic construct
  source 1..1020: mol_type = other RNA
atgaataatcagcagttatacgtccggaagtttaccgagaaggcttcagagaacggtttctcatcagattatattaagaagtgcctgtcctatgcaaatccgctgctggagaagaacctcccagtagtgtataacattaatcatttgtccggcttagttggttacagtgtgtcttatctgaagcgtgccgtaaagttccaaaagtacttctatagggaattccagatcgagaagcggaacgagcagaaacggacgctatacgagccactgcccagcctcaaagagatacaactgtggatccttgatgaaatcctttataagctcaaggtgagcaggtatgcaaaggcctacgttcccaaaagatccattaaagaacacaccatgtaccataccgacgaaccgtttgtgctgactctggacatcaaggaattcttcaagtctatcaagtttgagtcggtcgaaagcctgtttcgaaacatagggtactccgaaaaaatgtccaacttgttcacaaagctctgttttagagagaatgaattaccccagggagcgccaacaagtccatgtatttctaacctgatccttaaggactttgacaatgccatctctggatattgcatcaagaatgaggtgaagtttacacgctacgccgacgatttggctttttcaggaaatctgaatgctgaagaaatcgagaaactcgtcaaggatgagctgagcaagatcggcctggtgctaaacgatgaaaaacgaaggcttatgaaacctaatcagcctcagttgattagcgggattattgtcaacaaaaaaccccagctgcctaaaaaagttcggaatagtctcaggaacgagatttactacattaaaaagttcgggctaaccgatcacctggagagaactaaccagaaaaaacccaattaccttaagcatctcatgggcagaatcaactatgtgttgcaaataaaccctcgcgacgaggaattcatagagtataaaaaatacctccacgagctgcgctga

SEQ ID NO: 9717 - RNA, 1029 nt, synthetic construct
  source 1..1029: mol_type = other RNA
atgaataatcaacagttatatctggagaagttcacacaaaaagcattggaacacggtttcagctccgaatatataaacaaatgtctctcctacgccaaccctctactagagaataatttacctgtcatctactctatcaaccatctgtcaggattggtagggtatagcgtgtcctatttgaagcgggctgtgaaatttcaaaaatacttctaccgcgagtttgagatcaaaaagaggaatggtaagaataggacgctctatgagcctctgccatctctgaaggaaatccaactatggattctggatgagatcctttacaaactgaaagtgtctcggtacgccaaggcgtacgttcccaaaaggagtattaaggagcacaccatctatcataccaatgaacccctggtcttgactctggacataaaggagttctttaacagcatcaagttcgagagtgtggagtatctgttcttttcaattgggtatagccgcaaaatgagcaacctctttgcaaagctgtgctttagagaaaatgaactgccccagggagcccctacatcgccgtacatcagtaatcttatccttaaggacttcgacaccgaagtgagcaagtactgcatgaagaacaagattaagttcaccagatatgctgatgatctggctttttccggcaatttaaacgccgaagagattaagaagctggtgaaaaaagagctttccaaaatagggctggagcttaatgaagagaagacaaaactcatgaaaccaaaccagccacagatcatatcaggcattgtcgtaaacaaaaaggcacagctgccaaaaaagattcgaaactcactccggaacgagatgtactacattaagaattatggactggcctctcacattgaacgtactaaccagaagaaatctaactacttgaagcatctcatgggcaaagttaactacgttctccagatcaatcccagagacgtggaattcaagaagtacaaggagtatctccaggaacagtacaaaagttcctga

SEQ ID NO: 9718 - RNA, 1020 nt, synthetic construct
  source 1..1020: mol_type = other RNA
atgaacgaccagcaaatctataccaaaaaatttaccgagaaggctctggagaatggtttttcaagcgactacatcaagaaatgtctcaactatgccaagcctattttggcaaataatctgcccgtcatttacaacatagaccacttttccaacctagtgggctataatgtcagttaccttaaacgagcggtgaagttccagaaattcttttacaggaagtttgagatcgacaaaaggaacggtaaaaaacggatcctgaatgaaccattaccgagccttaaggaaattcagctctggatcctcaatgaaatcctatataagaacaaggtgagtagatacgccaaagcctatgtacctaacagatctattaaggagcataccatataccacacagatgagaagttcgtattaactttggatatcaaggagttcttcaagaatatcaagtttgaattcgtcgagtctctgttcaagtctatggggtactcccggaaagtttccaatcttctgactaagctgtgctatctggaaaaagagctgccacaaggggcttcaacctcaccctacattagcaacttgatactgaaggattttgacaacgttatctccaactactgcatttctaataagatcaagtacacacgctatgctgatgatctcgcattcagcggaaacctgaacacagacgaaattgggatactggtgaacaaagaattatccaagattggactggagctgaatgatgagaagacgaagctgatgaaaccaaatcagccccagcttattagcggcatcatcgtgaataaaaaggcccaactacccaagaaaatccggaactcgttgcgtaacgacatgttcttcataaaaaagtttggactcgtgaatcatatggaacgcacaaatcagactaagagtaactaccttaaacacctcattggcaggatcaactatgtgctccagattaatcctagagataaggagtttatcgagtaccgaaaatatctgtatgacttgaaatga

SEQ ID NO: 9719 - RNA, 1035 nt, synthetic construct
  source 1..1035: mol_type = other RNA
atggagaaagcctttgataagtataagaagcagtttgtcaccaaggcccgaaaaaacgggttctctgaagacaatattaataaatgcctcgactactccaagccgcttattacaaaggatctaccagtcatctataacacaacacatctctctcagttagtgggttataacttaatttacctgaggcgggcggctagattcactaagtatttctatcggtctttcaaggtgctgaagaacgataaaacctatcgcacaatatccgagccacttccctcattgaaggagatacagatttggatcctgaaggagatcctgtacaaaaacaaagtcagtaagtatgcaaagggatacgtgcctaaacggagtattaaagaccacgtgcggtaccacaccaaagagagcaaagttttgactctggacattaagaacttcttcgattccatcaagattgactacaccctgaaaatgttcattcaaatgggatattccaagagtgtaagcaatctgctcacccagttgtgttatctggagaaggggctgcctcaaggagcccctactagcccatacatcacgaatgttctgctgtacgaatttgacgaatcaatcgctaaatactgcaggcaaaaagaactcaaatacacgagatacgccgatgacttggcttttagcggtcagatcaagaaaaccgaattgataaagcttgtaagatcagagctgaggaaaattggccttaagctcaacaacgacaagatcattctgatgaaacgcaatcaaaggcagacaatctctggcatcgttgtgaatgacaaaactcaggtgcccaaatataagagaaacagcatccgtaacgaaatgttctacataaagaagttcgggttaaataaccaccagaaacgtaccaatcagactcgagataactatctgaaacatcttatcggcaagataaattacatcctgatgctaaatcccaaggataaggagtttctcgattacaagaagtacctctatgagcagaataaagcatcgcgctga

SEQ ID NO: 9720 - RNA, 1050 nt, synthetic construct
  source 1..1050: mol_type = other RNA
atgaacattaccttcaacaagtacaaaaagctcttcaccgaaaaggctattaacagtggctattctgaggataatatcgtgaaatgtctctcttatgccgagccaattatcaataaaggcttccctgtcatctataatacaagccatctgtcatccctggtgggatacaataaaaactatctgaaaagagccgtgaatcacacaaagtacttttaccggaaattcgaaatctcaaaaaaggatggtactaagagggttttgcttgagcccctgccttctctgaaggagatccagaactggatcctgaacgaaattctctacaagcacaaagtttcgcgttatgctaaaggatatattcccaacagaagcattaaggatcatgttcgctaccatacaaaagaagagaaggtgctgaccctggacatcaaaaagttctttgataatgtgagcttcgaattggtggagaagatctttattcacattggatactccaagatcatcagtaacctcttaactaaactctgctttcttgacggcaaattaccccaaggcgcgcctacatccccatatatcagtaacatcatactgttcgagtttgacgagaagatatcaaagtattgctccaacaataacctcaagtttacgcggtacgcagatgaccttgcatttagcgggaagatcaaaaaaactgaactggtcaaacttgtaagatctgagctgaaggccttggggctaaagcttaataatgagaagatcaagctgatgaaacgcaatcagccacagattattagcggaatcatcgtcaatgaaaaagcacaagtaccgaagaggaccaggaaccagatacggaacgaaatgttctatattaagcgattcggtatagactcccatatgcagaaaactaatcagaccaaatcaaagctcgcttacctgaagcacttgattggcaaaatcaactacttactgacgataaaccccaaggacaatgagtttattgagtacaagaacatcctacacaaagaaataaagcctgccgggaataatgtgtga

SEQ ID NO: 9721 - RNA, 1059 nt, synthetic construct
  source 1..1059: mol_type = other RNA
atggactataacaaatataaaacgcagttcagcgcgaaggccaaaaatgcaggttactctgaagataatatcagtagatgtctggcctatgcaaaacctattctcgaggagggctacccagtgattttcaacaccacacacctgtcttccctcgtgggctacaataagaactatctgaagcgagctgtagcctaccaaaagtatttctaccgggaattttccattaccaaaaagaacggggaactcaggacacttagagaacctcttccaagtttaaaagaaatccagtcctggattctgaacaacatattgtacaaacacgaggtgagccggtacgctaagggctatattcccaagcgaagcataaaggatcatgccaagtaccacacgaacgaactaaaagtcctgaccttggatatcaaaagcttctttgactctattagcttcggccaggtagaggccatcttttccaatatcggatactctaacatcgtttcgaatctgctggcaaagctgtgttttcttgagaagaatttaccgcagggtgcacccacttccccctgcataagcaatattcttctactcgaatttgacaatgtgatctctgcttattgcagtgagaagaaaattaagtacaccaggtatgccgacgatctggcgttttctggggacgtgaagaagactgctcttatcaaattggtgcgctccgagctaaaaaaactgggcctcagattaaacaaccaaaagatcaagctgatgaaacagtcacagccacaaattatctcagggatcatcgtcaataagaaagtccaggttcccaagaaaaaccgtaataagatacggaacgagatgttttacataaaaaagttcggattccagtcacatatggagaagacaaaacaaaccaagtcaaattacctcaagcatctgatcggacgcattaactatttgctcactttgaaccctaaggacacagaattcctggagtacaaaaagatcctgtatcagctggagagtactgccgataattccacccagatgtcgaataggcctagctga

SEQ ID NO: 9722 - RNA, 1083 nt, synthetic construct
  source 1..1083: mol_type = other RNA
atgaaggactttacgaagtataaaaagaagttccgcgaaaaggccgaagatataggttttagcgaggacaacatcgtgaaatgtctcaactatagtgagaagctgagcaacaacaatctgcccattatctacgattcaagccacctcgctgggctggtcgggtaccatcgatcttatctgactcgtgcactaatttccaccgaatttttttatcgcacgttcaaaatcccaaagaaaaatggcaaaatccgaattatctctgaacctttaccctccctgaaagagattcagtacttcatattgaacgagatcctgtacaaacagaaggtttctaagtactgtaaaagttacatcccaaagcggaagtttagagagtatcttaggtttcacactgatgaaaagcaagttctcacactggacataaaggatttcttcccttccattaaattcaaccatatccacgaatacttcctgaatcttggttttgcaaaggacgtgtcactgtatctcgcctgcctaagtacctatacccacaaagaaaatgactttattgagttcaagcggttccttcctcaaggcgcccccacttcaccatatctgtcgaatttgatcttaaccccttttgacgataaagtcgctgaattctgcttcgacaagaagataaaattcacacggtacgcggacgacatggcttttagcggggaatacatcgaccaggaggaacttttgatattcatcaagaacgagcttaatgtatacggactagagctgaacgaggaaaaaattaacttcatgaagcagaatgtgccacagataatcagcggagtgattgtcaataagaaactgcagttacccaaagcccagaggaacgagatcagaaaggtgatgtactttattaacgagtttggcattgataaccatctcgaaaaaacaaacgaaaccagggagtactatctgtcccacctgctgggaagaattcagtacgccctcaatttgaatccggatgattccgcaatgaaagagtataaaaaccagatcatcgagatcaagaatgagcaaaatttgaagttcctcattgagtga

SEQ ID NO: 9723 - RNA, 1077 nt, synthetic construct
  source 1..1077: mol_type = other RNA
atgaaggattttgagagttataagaagatcttccgggaaaaagcactgaactctgcctatagcgaagagaacataatcaaatgcctgaaatacagcgagaatctggtgaataacaacctccccattatatacaattcatatcacctcagcgggctggtcggatatcaacatgattacctttctagggcaattttgtccaccgaatttttttatcgtcacttcaagatcgagaagaagaatggcaaatccaggaagatttccgagccgctgccttccctgaaagaaatccaatacttcatcctcaaagagatcttgtacaaacaaaaagtgtctaagttctgtaagtcctacattcccaaaaagaagttcaaggagtatttacgattccatagcaacgaaaaagaagtcctcacactcgatatcaaggactttttccccagcattaagttcaacctaatccacaactatttctcaaagatcggttatagtaaggacgtggctttatatctgtcttgtctgtgcacttacacggacgtgaatgtggaaaagaaaaacaatacatccatccggtacctacctcagggtgcaccaacttcgccctacctgagcaatctggtcctcatagactttgataatgacgtagccaactattgctcagagaaaaagcttaaatacaccagatacgccgacgatatggcgttttctggagatttgattgttaagaacgagttagtggaatttgtaaatgcccagctgaaaaaatacaatctggagctcaacgatgagaaaattaattacatgaagcagaacgtcccacagatcatcagtggggtcgttgttaacaaaaagttgcagctgccaagaaaggagcgcaacgacatcaggaaggtgatgtacttcattataaaatacggcatcgagagtcatattgaaaaaacccaggaaacacgcgaatattacatttcatatctccttggcagaatacagtatgctcttaacctgaatcctaatgacgctgagctaaagaagtacaaagactttcttgtggagttgaagaagaatattctgatcctgtga

SEQ ID NO: 9724 - RNA, 1080 nt, synthetic construct
  source 1..1080: mol_type = other RNA
atggacctggaactctataagcgacattttcgtgagaaggctctgaatagcgggtttagcgaggagacaatcatcaagtgtctcaaatattcggaggtgctagcatctaagaatctgccagttatctacaattcgtatcaccttgctggtttagttggctacaaacacagttacttgagcagggccataatttccaccgactttttctaccggaaattcaagattcagaagaaaaacgggaaatatagggagatatcagaaccccttccatctctgaaagagatccagtacttcatattgaaggagatcctctataagcagaaagtctcaaagtattgcaagtcctatatacccaagaagaaatttcgggaatacttaaagtaccacagcaatgaaaaacaggttctcaccctggatataaaggactttttcccgtcaatcaaatacgagttcatctacacatactttatgaaccttggctacgcaagagatgtatcctatttcctggccaccctatgtagctatgtgccaaaagcgcccaaaggagaaaagacggatctctccaagcgattcctccctcaaggcgctcctacatccccctacttatcaaacctcatcttgtctaactttgatgaccttgtagccaaatattgcaatgagaataagctgaagtacactcggtatgccgacgatatgactttcagtggggatatcatccaagaagacgaactgatttcctttgtgcagagcgaactgaataaaatcggcttgaaactgaacattgataagatcaacttcatgaagcagaatgtgcctcagattgtgagtggtgtcattatcaataaaaaggtgcaactgaccaaagaggacagaaataaaattcgcaacgtcatgtactacatttctaaattcggcctggaggatcatttgaacaggactaacgagaaaagagactattttgtgttccatctgctcggaaagatccagtatggactgagcctaaaccctaacgaccacgaacttaaacgctacaaggagattctgattgaggaaaagaagaagtattacagtaagtcttga

SEQ ID NO: 9725 - RNA, 1077 nt, synthetic construct
  source 1..1077: mol_type = other RNA
atggtggatttcgagttgtataagaaacactttagggaaaaggccctgaatattggctttagcgaagagatcataatcaaatgtctcaactactcagaaaacctcgtttccaaaaagcttccaatcatttacaactcctaccaccttgcgggcctcgtggggtatcaacattcatatctgtctagagccatcaactctacagagttcttctaccgcaagttcaagatacagaagaaaaacggtaacttccgcgaaatctccgagccactcccttcattgaaagagattcagtatttcatcctggaagagattctgtacaagcaaaaggtgagcaggtactgtaaatcttacacccccaagcgcaaatttagggaatacctgaaataccatacgaatgagaaacaaatcctgactttggacattgaggatttttttccgagtatcaagttcaacaacatcttcaactactttctggcattgggatatgcaaaggatgtatcctattatcttagcaatctgtgcacatacgtgactaaagggaagaagggacagcgagtcaatataagcaatcgttatctgccccagggtgcccccacaagtccatacttatctaatctcattctgagcgaatttgacgattcagtcgctaagttctgcatccagaatcagctgaaatataccagatatgctgacgatatgaccttttcgggaggaaacattaacaaagaggacctcattacttttatcattgtggagctgaataagatagggttaagactgaacattgagaagacaaatttcatgaagcagaacgttcctcagataatcagtggcgttatcgtcaataagaaagtacagcttcccaaggccgaacggaacaaaatcaggaacagtatgtactacatttccaagttcggcttggaagaccatctaaaacggaccaatgaggagcggaattactacgtgtttcaccttattggcaagatacaatatgggctatctctgaatcctgaggacttagagctgaaacgatataaggaaatcctcatcgaggaaaaaaaaaagtactatagctga

SEQ ID NO: 9726 - RNA, 1077 nt, synthetic construct
  source 1..1077: mol_type = other RNA
atgaaagactttgagctatacaagaaacagtttagagagaaggctctgaacaacagcttttctgaggatatcatccagaagtgcctgaattactccgaaaacctcttttccaaaaatctgcccataatctacaattcgtatcatcttgcaggccttgtggggtatgaacatagttacctcacacgagccattatcagcactgacttcttctaccggaaattcaacatagttaaaaagaacgggctactcagagaaatatccgaaccattgccaagtctgaaggaaatccagtactttattctgaaggagattctctacaaacagaaggtgagcaggttttgcaaatcctatatccctaaacggaaatttagggaatacttgaagtaccactcaaacgagaagcaggtgctgacacttgacatagagaattttttccccagcatcaaatacaagcacattaacaactacttcacagagctgggttatgccgaggatgtgtccagtttcctggcctctctttgtacctatagcattagcaagaagaagaaagagaaagtagagttaaacgaacggttcttgcctcagggagcgcccacctcaccttatctctcaaatctgatcctcatgaagttcgatgatacaatagccaactattgtaaggaaaagtccatcaagtacactcgctacgctgacgatatggctttttcaggatccgacttcgacaaggaaatcttaattaagctcgtgcaaagtgagctgaacaaagtagacctgaaactgaataagagcaagatcaatttcatgaaacagaatgtcccacaggtcatctctggcgtcctggtgaataaaaaaatccaactgccgaaagagattagaaacgagattcgcaatactatgtatttcattaccaagtatggctatgaggaccacattaaacgaaccaatgaaacgagggattactatttattgcatctgttggggcgtatccaatacgcactaaaccttaatcccaatgattctgagctcattaagtacaaatctgttctgctggaatacaagaagaagtattataactga

SEQ ID NO: 9727 - RNA, 1062 nt, synthetic construct
  source 1..1062: mol_type = other RNA
atggaaaaaacaaactcctacaagaagaagttcacagagctggcgatcagcagcgggtactctgaagagtacattgagaaatgcttgaagtacagcgaacctctgctcaataaaaaccttcccgtgatttactccataaatcacctctcagccctggtgggttattctcagtcatacttaactaggtcgatgatttccaccagcttcttctatcggcacttcaaaataaaaaagaggaatggaaacctcagatcaatcagtgagccgctgccatccctgaaagagattcaaaactttatcctaaaggagattctgtacactcagaaagtgtcgaaatactgtaaaagctacattccaaagaagtccatcattgagtacctgaagtatcatgtgaacgagaaagaaatcctcaccctcgatctgcaagattttttcccaagtatcaagttcgagctgataaagaacttttttctgcagcttggctactctgatgaagttagctattatctgtctactctaacgacctattgtgacaagcaagaaaagtttgacgacagtcagagatatttgccacagggcgcaagcaccagtccttatctttcaaatctgatcctcaaggactttgacaataatatagggaagttctgcaacaacaagatcaaatatacacgttacgccgacgacctggctttttccggagataaaatcccctccgaggacataatcgactttgttaataaggaactcgagaaacttggtttgaagttgaaccctaagaaagtcaatttcatgaagcagaacatccctcagattatttctggcgtggtcgtaaacaataaaatgcagctgcccaaacaacagcgaaatgagatccggcagaagatgtatttcatcaataggttcggaatcgaatctcatttagaacgcattcaggagaaacgggaaaattacatcccgcacttgttagggcgcattcagtatggcctgaacctcaaccccgatgatctagagcttaaaaagtacaagaaggatctgcaagaaatttacaacaaagtcaagtga

SEQ ID NO: 9728 - RNA, 1032 nt, synthetic construct
  source 1..1032: mol_type = other RNA
atgaagacattcgaaatttacaagcaggagtttaccaaaaaggcgttggacgccggctattcagctgatgagctgaataaatgtctgatttacgcagagcctttatacaacaggagactgcccattatctacaacctctctcatttcagtgcctacgtggggtataacgctaaatatattagacgagcaatcaagactgattccaccaagtttttctatcgggagtacagcatactaaagaaaaatggatcacttagggtgataaatgagcccctgccgtccctcaaggaaatccaaaagtggatcctggataatgcactgaataacatggcaatctctgcttatgctaaagcctacacttttaataggagtatcaaggatcacgtaaagtatcataagaatcagaagtctctgttgacgctggacatcgagaacttcttcaataacattaccgccgacaaagttgagaagctgttcattaacaagggatacagcctcctggtcagtaatctcatgagcaaaatatgcacactcaaaaactgtcttccacaaggtgccccaacgtcccctcggatcagcaacatccttatgttaccattcgacgacaaaattagcaagtattgcaagacaaaagggaacatcaaatacacccgctatgcggacgacctggccttctctggagaaatcaataaagaagagatagtggaacttgttaccaacgagttgaaagaacttggtttgaccctgaatatcgataagacaatcgagaagaagcagtcacagcagcaaatcattagcggcattgtcgtgaacaaaaaaatccaggtgcctcgtaagaaacgcgatgaattacgacagtccatgtactacatagagaagtttgggctcgaaaaccacctggtcaaaattaaatgctccaagtcgaattatctcaagcacctactgggcattgccaattacattatctttattaaccccaaggacgaaaagactatagagatccggactaaattgtttaagatgatcgagtga

SEQ ID NO: 9729 - RNA, 1050 nt, synthetic construct
  source 1..1050: mol_type = other RNA
atgaatacattcaacatctacaagaaggaattcacgaagaaggccctcgagtctgggtatagtgcggatgaactcaataagtgtttggtgtatgccgagccactgttcaacaaaagactgccgattatctataatctgtctcactttgctgcacacgttgggtactctacaaaattcatccggcgagcaataaaaaccaacggaaccgagttcttttaccgcaaatattcaattcccaagaaaaatggctcatcccgtgtgataaacgagccactgcccagcctgaaagaaattcaaaaatgggtcctggacaatattctcaacaacatgcctattagcgcctacgccaaagcgtacacctttaatcgaagtatcaaggaccacgtaaagtatcatgagaatcaaaacgtcgtgcttactatggacatagagaacttcttcaacaacatcactagcgacaaagtggagagactatttatcgacaagggctacagccctctggtgagtaatttattgagcaggatctgcacgttaaacaattccttgcctcagggagcacccacctcccctcggatctccaacatcctaatgctcccatttgataacgagatcgctaagtattgtaagcccaagtttatcggtggtaagaaggtgcaggtaaaatacacaaggtacgccgacgatattgccttctcaggcgaaataaataaggctgagtttgttgagctggtgtctaatgaactccagaagctggatttatcactgaacgaggataaaaccatagaaaagaagcgcaatcagcagcagattatttccggcattatcgtgaaccagaaaatccaggttccaagaaaaaagcgggatgagcttaaacaagccatgtattacatcgaaaagtttggactggaaaatcatttggctcgcataaaatgcacaaaggctaattacgtctcgcatctccttgggattgcaaactatatcgtcttcattaatcccaaagacaaaaaaactctggaaattaggactaagcttttcgagatgaaggactga

SEQ ID NO: 9730 - RNA, 1035 nt, synthetic construct
  source 1..1035: mol_type = other RNA
atgaaaaactttgagagctataagtcggaattcaccaagcgggcttataatgaaggttttagcagtgacgagatttccaagtgccttaactatagcgaaactctcctgaaaaagaatttgcccatcatattcaacagttctcatctttcagcactggtcggatacaacaaggattatctgaacagagtgtccaaggtcaataaaacaagctacttctatcgagactactatatacctaagaagaatggcgagaagaggctgatccgagaaccccttccctctttaaaacagatccagaggtggttactagacaacttattcatcaagctgccaatctcaccttacgcgaaggcttaccgtgcgaagaaaggcattcgcgatcatgtgcgctatcacaagaaagaggaagtggttataaccatggacatagaaaagttctttgacaatctggagtctggactgatcgtgaatatcctcctctccaaaggctactcctttcaggtagccaacctcattacaaaaatttgtacgctgaatgatgtgttgcctcaaggtgcaccaacatctccagccattagtaatattctcctttacgagttcgacaatgaaatctccaaatatacaaacagcaagggactgaagtataccagatacgcagacgatctggccttttcagggagtattcaggatgttgataccctcatcaagatcgtaaaagaaaacctagccaaaatcaacctgaagattaaccactccaaaactcgggttatgagcaaaaaagccaggcaaattatttcagggattgtcgtgaatgacaagattcaggtgccgcggaaagaccgcgatgatctcagacaggccatgtattacatcgagaaattttctcttgaggagcacctgaagaagatcgactgcaataaagctaactacatagagcatctgttggggaaggctaattacatgttgaagatcaaccccaaagatgagaaaatcaaggtgatatacaacaagctgaaggtcatgaaaactggctga

SEQ ID NO: 9731 - RNA, 1056 nt, synthetic construct
  source 1..1056: mol_type = other RNA
atgagattctcatcctacgagaaagagtttaggcggatcgccgaaaagcgcaattatccttctagcgtcatagagaactgcctcaagtatgccaaagtgctgctcgataatggcgtccctgttatctataacactacacacttaagcaatctcatcggatacaccaagagttacattaagcgtgccactcatcacaccccttatttctaccggaaatacagcattttgaagaaaaacggttccaaaaggtttctgtccgaaccacttccctcattaaaggagattcagatatttatcctcactaacattctctcttcaatcaaagtctcacgctatgctaaagcatatgttagtgggaggaccctaatcgaccatttgaagtttcacaagggacagaagtgcgtcctgaccttggacattgagaactttttctcctctatatcaactgagagcatcgagaagattttcctggaaattggctataccgacatcgtgtccaatttgctggcacggctgtgtacacttgagaattcgttgccccaaggggcaccaacgagcccatacctttccaacctgtacctcaaaggctttgaccaggagctggctaaaatagtcagaccaatgggcatcaattatacgcgctacgctgatgatatggcctttagcggggatacaattgacaaagaggcgatcatcgaacatgtttctagaatgctatctggcctgggactggtacttaacccggacaagacactcctgatggtaaagcctagccggcaagtgatcagtggtattgtggtgaatgaaaagattcaggtgccccgcaaaattcgtaggtccatccgacaaagtgtgtactatataagaaagttcggattcgaaagccacaagcagaagaccaagatttacaaacgaaattacgataagcacctgctggggcttataaactacatcttattcatcaaccccaaagaccaggagttccagtcttacaaagaagaactggagaagatcattaaagacgctgataacaatggttatacacaggccggctga

SEQ ID NO: 9732 - RNA, 1029 nt, synthetic construct
  source 1..1029: mol_type = other RNA
atgacctttagcagctatgaaaaacgctttacggatctcgctaagaagaggaattattcaagtgaggtgatcacaaaatgtctatcctatgccgagccgcttatacggaagaaagtccccgtgatatataatatcgcgcatttcagttcacacgttgggtatacagtcaagtacatcaaaagggccatcaagcatacagactacttttacagacattatgagatcagcaaaaagaacggaggcaagagaaaaatctcagagcctttaccatcgctgcaggaaatacagaacttcattttgaccaagattctttacaagcagaaggtgtctcgctatagcaaagcttacgtccccggacgttctattcttatgcacgcaaagtaccatgtaaataaccacaccgtgctgacgatcgatctcaaggactttttcagctccattcgaacccaccatatcgaggccatctttaaggagatcggctattcccagattgttagcaatatgttggccaaaatttgcactctgaacgggggcttaccccaaggtgcgagcacatcccccgcactttctaacatcttcttctctaagatagacgaactgattgccaaagaagtgcggcctgaaataaactatactcggtatgccgacgatctggcattcagtggggaaaccatcgacaaagaggtcttggtggcaaaagtacaaagtattctggaaccatacgagctcaagattaatgcttccaaaactaagctcatgacccaacaccaacagcagatcattacaggaattgtggttaataagaagctgcagctgccttccaaagataggagaaaaattcgccaggaactgtactacatcaagaaatacaacatggcatcacatatgtctaagaaaaacatccacaacaagaagtacgctgcccgactactgggtaagatcaattttgctctgttgctcaatccaaaagataaggagttcatcgagtacaagaaagtgatgcacgagataatccagcacactatttga

SEQ ID NO: 9733 - RNA, 1017 nt, synthetic construct
  source 1..1017: mol_type = other RNA
atggaattcgagatttacaaaaagaagttcgaagccaaagcactcaaaaccggcttgacagacttagagattactgattgcctgaattatgccctgccccttatcgagaaaggactgccagtcatttacaatacaagtcacctttcaaaactggtggggctgcgcaagacatatgtaaaacgggctgctatttatacgaagagctattaccgaaacttcaccatcgcgaagaggagcgggatgcctcgtgaaataagcgagcccctgcccaacctaaagatcatccataagttcattctggaggaaatcctagagaacatcaaggtatctgcattcgcaaaagcctacaagaagaagtccaatattttggagaacaccaggtatcatatcaatcagaacaaggtggtcactctggacattgaaaacttttttccatccataacgacagataaggtggagaacatctttcgagggcttggatattccgatctgattagtaatctgctctcgaagctgtgtaccttaaataattcacttcctcagggtgctcctaccagtccgtacctgtccaacctgtttatgaagggtttcgactctaaactggctgacttctgcctcagcaagaaaatcagatatactcggtatgccgacgatataaccctgtctggcgacttcaatgaaaaagaggccatcgattacataagcgttttgctaaaagagttagacttggatctcaattgtaagaccaagataatgaagagaggacagcagcaaattgtgactggcattgttgttaatgaaaaatctcaggtgcccaggaaggagcggcttaaactcagacaagagatctaccatattaagaccaaggacctggactcacacaaaaagtttaaacagatcactcagcgcaactacctctaccacttgtatggcaaaatctcctacgtggtctttgtgaacccaaaagatgaagaattcatcgagtacaagaagtttctcaaaacactcatgaactga

SEQ ID NO: 9734 - RNA, 1020 nt, synthetic construct
  source 1..1020: mol_type = other RNA
atggagtataacatttacaaggagaagttcacaaagaaagcaatcaaagaaggtctgaccgaaacagaggttaatgaatgccttatatacgccaagccattaatagaaaatgggctccccatcatctttaacacaagccacttctcaaagctggtgggagtgcgaaagacttacattaagcgggcagcaatttacagccgctcttattatagaagcttcacaattgcgaagcgtaatggaaatcctagagagatcagtgaacccctgcctaacttgaaactgatccagaactatattctcagcgaaatcctgtacaatgtgaagatatctgcttttgccaaggcctacaaaaagaagaccaccattatcgagaacactcgttaccacgtgaatcagaagaagctggtcacccttgatataaggaatttcttctcctccattaagaaagagcaggtctacattatctttaacaaactggggtactcggagatcattagcgatctcttctcaaagttatgcactctgaacgatcagctacctcaaggcgctcccacttcaccgtttttgagtaacatttttatgtccgacttcgacatgtttgtggccgattactgtacgtctaagaacatcagatacactaggtatgctgacgacatcagtctgtccggcgatttcgacgaaaaggagatcatagaactcattatagagcgcttgaaagaaaaagggttggagcttaacaatgagaaaacgaaaatcatgctcagaaatcaacgacagattgttaccggcattgtagtcaacgaaaaaaatcaggtgcccaggaaagaacggcttaaactacggcaggaggtatttcatatacggaccaaaaccctggaggtgcacaaagaaatcaaaaatatcaagaaccgcaactatctctatcatctgtacggtaagatctcttatgttgtcttcatcaatccaaacgacaaagagttcattgagtataaggagtatatcaggacactgtttaagtga

SEQ ID NO: 9735 - RNA, 1032 nt, synthetic construct
  source 1..1032: mol_type = other RNA
atggactttactacctaccagaaaagatttacagaaaaggccaccagacagaagatgtcagattcggatatagccgactgcttggaatacgctaatgtactcttcaaaaacaatgtggtgaccgtctacaatacgtcacatctatcaaagctggtcggaattaggaaagcatatattaaacgcgctagcatatataccaaaagctactacaggtctttcgagattgctaagcgcaatggcaacccacgaaccattagcgaacccctgcctaatctcaaggttatccaagacttcatattagaagagatccttaacaaggtgaccgtgagcgctttcgcaaaagcgtacaaaaaaaattcctccatcaaggaaaacgtgaggtaccatgtagatcagaaaatagttctaagcctggatatccaggactttttttctagtgtgtcaattgagatggtcgagaaagttttcctggatcttggatatagcgaattgctgtccgacctcttctccaagctgtgtacgctgaacaagtgcctgccacagggggccagtacttccccttatattagtaacatcatcctgaaagggtttgacaaaaaaatcgccgattattgtctcgaccagaacatccggtacacacgctatgccgacgacatcactttgtctggcgattttgatacaggaactgcaattacattgatcgaggacgagctgctcaagctcaacttatctatcaaccgaaataagaccaaggtgatgactcgtaatatgcggcaagtggtgacaggcattgtcgttaacgagaagatacaggtatctggtaaagagagaaataagcttcggcaaaacatcttctatctcaaaaagttcgggttactggactatattgagcacgagaaaatcaagttcaacaattacctgtaccacctgtatggtaagctttcctacattgtctatattaatcccaaggatcaggaatttatcgactacaagatctacgtgaaggatctgattaagaagcactactattga

SEQ ID NO: 9736 - RNA, 1038 nt, synthetic construct
  source 1..1038: mol_type = other RNA
atgagcttcgaaatctacacccggaaatttcgcgagaaagccgaaaatcttgggtattctgaatccaatatagtgaagtgtatcgattacgcctcacccatttacgagaaagggttacctattatttacaatctgacacacctgtcacgccttgttggttacgaaaaaaactacattatccaggccgccatcgctagtaagcattccgaggcatattacagataccataaggtgctcaaaaagaacggagacgtgcgaaaaataaaggagccactacccaacctgaaagctattcagtactggctgttacacaacattctggaaaagatcgagccgagtgcatatgctaaggcatacgtgaaaaaacgaggcttgaagcagaatattagatttcacaaagggcagaaaaaggtccttagcattgatatcaaggacttctttcctagcatcacgttcgagaaggtcgagaacatatttctcaccataggctattcggtagagctctctaattatctggcgaaactgtgttgcctgaaggaaaagcttccccaaggggcccctacctccccctacatttcaaacctcattttcaagaacatcgacgagatcatcgctgtctactgcaaaaatctcaacatccgttatactaggtatgccgatgacctgacatttagtggcgattttgacgagactagcttgctgaactacatcaacgagattatgactgagaacaacttcatccttaataaggacaagaccaaattgatgctgtattctgaaaggcaaatcgttacaggtatcgtggtgaatgacaaaccacagttagacaaggagacaaggaaagaaataagacagcacctctactatattaagaagtacggcctggagtcacacatggaacggaataatattaatagcaacaccttcctgacgaatctgatgggaaagatctctttcggactctatttgaatccaaaggatgaacatttgcgggattccataaactatctatcccagctgtataagcaaatcatgtga

SEQ ID NO: 9737 - RNA, 1038 nt, synthetic construct
  source 1..1038: mol_type = other RNA
atgtcttttgaggtgtatgcgaaaaaattccgagtgaatgctgaaaacctcggctattccgaggaaaatgtggtaaaatgtatcaattacgcgcggcccatctacgaaaacggactgcctattatctataatctcactcacctgtccaagctggttggctttgaaaagaattatattatccaggccgccgtggtatctaaacacagtgaggcatattaccgttatcataaggtcctcaaaaagaatggggattttaggaagattaaggagcccttgcccaatctcaaagccattcaacactggatactggctaacattctggaagaaattgaaccgtctgtctacgccaaagcctacgtgaaaaaacgaggtttaaagcagaacattaggttccataaggcacagaagaaagtgttcacaatcgacattaagaacttctttccatccatcaacatcaaccagatcgagaagatctttatcgagacaggttacagcatcgaactaagcaactatctggctaagttgtgctgcctgaagaacacactcccccagggagccccaactagcccttacatttcaaacctcattctgaaggacatcgataactcaattgccatcttctgtaaagagttgaaggttcgctacaccagatatgctgacgacttaacgttcagtggggatttcgaggaggaatcgctttacgagttcgtcaacgcactgcttgagaaaaatggctttgagcttaataaagagaagacccggctcatgctcagttcacaaaggcagatagtgaccgggatcatagttaatagcaagccacagctggataaggaaacccggaagctgatacgccaagaaatttactacatcaagaaatttggcctggagtcccatatggagagagctaagctgtccggatctctttacctaaatcagctgatggggaaaataagcttcggattgtatctaaacccttcagacatgaagctgagaagctacataaaatatttggcaggcctttacaaagagttatattga

SEQ ID NO: 9738 - RNA, 1044 nt, synthetic construct
  source 1..1044: mol_type = other RNA
atggactacaagacttattctgaaaggttcaagattgaggcatataatgtaggatatagtgagagtagcgttgccttgtgccttaactatgccaaaattctctttgacaagaatctaccagtcatctacaatgtcacgcatctgtccaatctgaccggaattaagaagaactacatcatccaggccgctaccgtgagtaaacactcgcacgcatactatcgggatttttccatagctaagaagaaaaagggcgaaagaaggttcatttctgagcctctacccaaccttaaacaaatccagtattggatactgaacaatattctctaccaggtgaaagtgtcaccatatgccaaagcctacatcaagaattttggcttgaaacagaacttaagattccacaaaaacaagaagaaggtcttgaatctggacatcgaaaatttctttagcgccattaaattcgagaaagtggagaaggtattcctgaacctcgggtattctaataccgtttcaaaaacgctgagcaagctgtgtacacttaaggagcagttaccccaggggtcaccgacaagcccttacttatccaacatcattatgatgtccttcgacacagaagtgtctcttttcgctaagaacttgaacatcagttataccaggtacgcggacgatctgactttcagcggtgatttcgacgaaaacgtggtcgaggattttatcgaaactaagttgctggaaattggttttaccctcaacagaaataagaagaagctaatgtacgattcccaacgtcaaatcgttacaggcgtcgtggtgaacaagaagattcaactgtcaaaggagcagcgaaaaaaactccgccagattcattattacatcaaacggtttggcatagaaagccatctggagcgccagaaactgtccaaaaaaaagtacctctctaagatactgggacagatcaactttgggctctaccttaataaacaggacaaaaatctgctggagatgaaagcatgcatcctcaaatacaagaaggagtttgatctgtga

SEQ ID NO: 9739 - RNA, 1557 nt, synthetic construct
  source 1..1557: mol_type = other RNA
atggatttcaaagaatataagcagctcttctctgagaaggccaaaaacaaaggacgggacctcaattatatagactcttgcctggcttacgccgaaaggttatacgataaacaggtacccgtgatttatgacattacacacttaagtctgctggtaggcgtgaaggaagactacatccgaaggagcatcacttacactaagaagtactactggagctttgacatcccgaagtctaataacaagaaaaggacaatcaacgaaccattgcctctgctaaaagagattcagctttggattctccataacattcttgaaaagcaagctacccacccctgtgccaaggcttatgttccgcataagaaactcaaagagaacgcaaagtatcatactcgccaaaaaatagtgatatctttcgacgtacagaatttttttccctccatcaatcttgagggcgtctcaaagatattcaatatcatcggctatagcaaaaagaattcctatctcttggcaaaactatgttgcctggatgataagttacctcagggcgccccaacgagcccctacttgtcaaatctgtatatgttcagtttcgacgaaaacctaatctgctattgtagaaaaaacggaatgatctatacgcgttacgccgatgatattacaatctcgtcgcaaaaagatgtggacatcaatgcgttgactaagctggtggaggaagaacttagtaaaaagggtctgagcctgaatataagcaaatccaaagttatgcacaagtctgactcacaggtggtgaccggtattgtggtcaacgaaagaatgcgcctgcccaaaaagaaaagacagaaactacggcaggaaatgtactacctcatcacccgggggctggaagaccatataaactttatcaagtgcaagaagcgaaactatctgaaacacttggctgggaaggtgatgtacgcattgcatctggagccaagtaacacagagttcaaagactactacattttcctccagaggctgatcaatcccgattttaaacgcaagaagaagagactcattttagatagcaacgtgatccttaacgaggtgcttattgagaaactgccagaggactatactacctacatcgcgaacaacaactccataaaaaagatcaagaacctcgacctgtgttatggacctaatttatgtcacgccaattctctcctgtttgcaattatgcttaaggaacagtaccctacaatcgaggttaatatttccgagggcattgttgtccgcaccaatgggttcgcctacacccacttttgggtccacattttgcataataatgagcaggagttctgcgacgtgaccagagattgctttgagaaaaagattctgcaagccaaggaacgtcggtattacaaggtcaagaaccacactatcgatgagatgacccagaggatggcttccaataacgtctttctggattcaaaggagtacctgtccctgtactacaagaaatatcctaagtatttcgagctgtacaatacactgaacatcatgctccaccagcaatga

SEQ ID NO: 9740 - RNA, 1407 nt, synthetic construct
  source 1..1407: mol_type = other RNA
atggattttaaagaatacaagcgcctctttactgagaaggcccaaaataatggcagggactcagattatattaacctgtgtctatcctatgctgagaaactgtacaatcagcaggttccggttatctatgacattaaacacttgtcactgctggtcggtgtgaaggaagattacattaggagagcaattacctataccaacaagtattactggaacttccacattcctaaattgaacggcggcaagagaactattaatgaaccattacccctcctcaaagacatccagctgtggatcctccatcatattttggagaagcaagagacacacccctgtgccaaggcgtatgtacctcagaggaagcttaaggaaaatgccaaatatcacacccgccagaagctggtaatcagttttgacgtgcacaatttcttcccatcaatcgatctcgaggcaatctccaagatcttcattaacattggctactccaaaaagaatagctttctgctcgccaaactctgctgtctcaacaatgaattgcctcagggagcccccacaagcccgtacctgtctaatttgtacatgttctcctttgacgataacattatgcgatattgtcgggagaaagggattatctatactcgttacgcagacgatattactttctctagcaagtccgatattaatatcaaaacccttacggagttcattaagcacgaactgaggaacaaaaagctctcattgaaccccgcaaaaagtaaagtgatgtacaagagcgacgctcagatcgtgacagggatagtggtgaatgaaaggatgcgtctgcccaagaaaaaacgccaagagctgcgacaggagatgtactacgtgataaccagaggacttgaaaaccacataaacttcatcaaatgcaacaagaagaactacctaaaacatctcgctggaaagataatgtacgctctgtatctggagcctagtaatacagaatttcaggactaccatacttttctgcaacggctgatgaacccaaactacaagagaaaaaagaaaaagctggctctggactcgaacatcatccttaatgaggtacttatcgagcagttaagcgagaattacataacgtgcatcgagaacgacaatagtatacagcgggtgggatctctagaactgcactatggcttaaacctttgccacgccaacagccttctgttcgcgatcatgttaaaagaacagtatccaaccgtcaaagtgaatatatctgaggggatcgtcgtgctgaccaacggttttgcctatacacatttttggatccatgttgtccagaataataaggaggagttctgtgatgttacacgcgattgcttcgaaaagaagtattacaagcaaaagaacgtcgacatcattcggtga

SEQ ID NO: 9741 - RNA, 1038 nt, synthetic construct
  source 1..1038: mol_type = other RNA
atggagtttgacaaatacagtttccaattcgcacaactggccatactcaatggctacacaaccgaatacgtggattcctgtctaaagtatgccaagaaactagccgacaacaacttacctattatttacgactcagagcatttttctgaattggttggcttcaagctgtcttatatcaagaccgttgtggagtaccccaagtccttttactggatgtacaaaataaagaagcacagtggaggtatccgaaaaattaatgcacccctccccaaccttaaacagattcagtactggatattagagaatattctcaacacccagaaggtgagcccatacgcaaaggcttttgtgcagggtaagaagcttaaggaaaatgttaggttccacaggaatcggaaaattgtcatcaagtttgacgtacacgatttcttcgggagcatcagagaaaattccataaaagcgattttccgttccctgggatatatcaaccctgtggctgatctcctggctatgttatgctgcttggaccatgtgctcccacaaggagctcctacgagcccctacctgtccaacctctacatgttggactttgatactcacatcgcccagtactgcaaggaacatacaatctattatacccggtatgccgacgaccttacattcagctcagatagtaacatcgatgagtatgaactaacgtcactggtcaagaaagagctgaatattatcggcttgtacctcaataacgataagactaaagtaatgccacgcaacacaagacaggtcgtgactggcatcgtcgtcaatcaaaagcttcaggtggacaaagataagaggcgcaagattcgacaggaagtgttctatatcaaaaaatgggggctggagtctcacctccagaaaattggctgttcgaagaaaaactatctgaagcatcttctgggggagatgacctttatgctgtctctgactccgcagaacttgcagctgaaagccgacatcgaatatatcagaaaactgtgggaggagaatctgatgtga

SEQ ID NO: 9742 - RNA, 1065 nt, synthetic construct
  source 1..1065: mol_type = other RNA
atgaccttcgacgaatatcgaatcaaattctctactaaggcctatcagtatgggtactccgaagtctacgtctctaaatgcctcaattacgctgctcgcctttttgacaagaaccttccagtgatctacgacttcgaacacttctgccgtttggtaggctacagttcctcctatataaaaagagccgtgaacagtccgaggagcttctattacgactataacgtgccaaaaaagaacgggaatggtgtgcgccttatctcgcagccattcccatctctgaaggaaatccagtactggatcctgaacaatattctgtacaaacttgaggtttctccctatgcaaaggcatacgtacctcaccggaagtttaaagacaacctacgctttcataagaataagaaattcgtgatcacgtacgatgtggctaattttttcccttccattaagaaggagaaaatcgaggcctattttattgaactcggttacacagagctactgagcaacctgtttagcaaactggtcacccatcggggatatttacctcaaggagctcctacctcaccctatttatccaacctctatatgaagcagtttgacaacaaaattgcagcgtattgtaagtgtaggaaaatattctacaccagatacgccgacgatctcactttttcaagtaacgaggatgtcgatatcaacgacctgttcaacaccattaaaatagagttgagcatcctgaatctggagctgaatcaggacaagacacatattatgaattcttcaagtcgccagatcgttacaggcgtggtggtgaataagcggctgcaagttcccaaagaattcagaagcgagattcgaaaagagtgctactatattaacaagtttggactgtcagaacacctcgccaggatcaagcagacaaatgaaaagtactatatcaagggcttgttagggaggataaattacgttttgcagattgatcccactaacaaggagtttaagagctacaaaaaggagatgcaaagattcgtgatccgggatattaatctggacgattacgatgtcctctga

SEQ ID NO: 9743 - RNA, 1029 nt, synthetic construct
  source 1..1029: mol_type = other RNA
atgaactacaacgactacaagagagagtttaccgagaaagccctacgttccggtttctcctatgaggttctgcaggcctgcttgcaatacgctgaaaagctattttctaatgacctccctgtgatatttaaccttacccattttgcctcgctggtcgggtacaagcagacatatattcagagagcgatagtgtttacacatcatttttaccggaagttcgagattagcaaggccaatgggtcccaaagaaaaatctcagaacctctcccgagcttaaaggagattcagggttggatccttaaacacatcctgtacaaactgaaggtaagtaggttcgcaaaagcatattctcccggcatctctattaagcagaacctgcagtaccacagggatcagcccctcgttctctcaattgatgtaaaggactttttcacctcacttactagggacaaagtggaacaggtattcaaaatggctggatactcttctagcttaagcaatctgttttccaaaatctgtactctcgacggccggttaccacagggcgcaagcactagtccatatctgagcaacttgatcctgtacaagttcgacgaggagataggcagtttctgcaagcaacaatcgattcgatacacaaggtatgctgatgatatcacaatttctgggaatttcgatcccgatctcctgcgccagaaagtgcagatcgaactggacaagttgtcacttgttgtgaatgagaaaaaggtgaaagtgatgaaagctggagtgcgccaagtcgtcaccggcgtggtcgttaacaagaaaattcaggtcccaagaaacaagcggaaagagattcgccaagccatctattatatcacgaagttcggtctgcagggacacttgtcccgagaaagtgtgaatcggcgtaattacataaatcacctgttgggacaggttagcttcgtgctgtttctcaaccctcttgacaaggaatttatcgggtataaggatttcctggtcatgcagaagcagcaggactcctga

SEQ ID NO: 9744 - RNA, 1026 nt, synthetic construct
  source 1..1026: mol_type = other RNA
atggaactcgaactgtataaacgacgcttcaccgagaaagctcttgcaacaggctattctgccgagaagattgagaggtgccttaaatacgccgaaaaactgctctcatacgacttgcctgtgatttacaatctcgagcacctgtgcgctctcgttgggtatcacagcagctacctattacgtgcagtagaccatccaaacttcttttaccggtccttcaagatcaagaagaacaataaccagtttagggacatcgatgaaccccttccttctttaaaagagatccaggattggatactgacaaatatcctctatcagattgccccctccaagtacgctaaagcctatgtgcccggaacttccctcaaacagaacatcttgtttcaccgagatcaacccatcgtgctgaccatggacataaaggacttcttcccatctgtcaagagaagtcagattaccgccctgttcttccggctcggttatagcatcgccatctcagaccttcttgcgaagttatgttgcctcaatgattgcttgccgcaaggcgcctctacgagtccatatttgtcgaacctgatactggctagttttgatgatgcaatcgcggtgtactgtatccctctgggcattagatacaccaggtacgcagacgatctgacatttagcggtaagtttgattgtgaagtactgaagttgcaagtgatcaagcatttgtcaattcacggccttaaaattaacgagcagaagactcgcattatgcgctttggcgagcggcagattgttactggagtcgtcgttaataaaaagatgcaggtgtccaaggaaaaaaggatggccataagacagcaaatgcacttcattaaacgtttcgggctcgaggagcatatgaaggctcggaagctgagcaaagggaactacgtgcgccatctgctgggaaagatcaatttcatcctgtacataaatcctgatgacctagagtttatcaaatatagagacgacctgctgaagctagggattgaaaaatga

SEQ ID NO: 9745 - RNA, 1026 nt, synthetic construct
  source 1..1026: mol_type = other RNA
atgaggtgggatagctatgaaagaaagtttcgcgacttggcaggtaagtctggggcggcccaggaaaaaattgagagttggctgctttatgcaaaggagctgacatctaacaacctgcccattatttttgatcagacgcacctagcattgctgctcgggatagacaatgagtacctccatagaatgagtaatgccccagagtacttttatcgaaccttttacatacgcaagcgtaacgggaagcaacggcggatcgatgaaccactgcctgacctaaaaaaagtgcaatcgtggatcctcaccgaaattctgtacaaggtgccttgctccaaattcgctaaagcctacgtaccacatacctccattaaagacaactcccggttccaccgcaaccagaagatcgtggccggggttgatctgaagaacttctttccaagtataaagtccggttctgtgctttctgtgttcctgtcaatgggatacaatctgcccactgccgtgtttttaacaaggctgtgttgcttacgtgagagcctgccgcagggagcacctacaagcgcttaccttagcaatttgattatgagacacttcgacgaacagatttcagcctactgtatggaacggaagatccgttacacgagatatgcggatgatctcacattttcaggcgatttcgacgttgctgccttactctataggatcgacggagaactgaagtatcttcatctgcggaggaatcctcaaaagctcaaagtcatgcgcggcggcgatcgacagaaaaccactggaatcgtagtcaatgagaaacagcagctgcccagagagtatcgcatgaagattcggcaagagatccactacatccagaagttcggcctggacgaccatctcgctcacatcggtgagactcgaacccattatctacagcaccttatgggcaagatcgaatatgctttgttcataaaccccaaagacgagaaaatgaaagcctacagagaggtcttgcgcgcatacaggccgagggagtga

SEQ ID NO: 9746 - RNA, 1026 nt, synthetic construct
  source 1..1026: mol_type = other RNA
atgaggtgggatttatacgaacctagatttcgggatctagccgagcggcagggcatcctcgataaaaatatcaatgagtacctcgcttacgcagagaatctatataagaagaacctgccagtcatatttgaccatacccacctgagcctcctcatcgggatcgataacgagtacttgcaccgcatctctaacgcccccaaatatttctatcggacgttccacattaaaaaacgcaatggcaaactgagacgtattgacgaaccactgcccgacttgaaaaaggtacagacctggattctgaaggagatcctgtacaaaatcccgtgctcaaagttcgccaaggcttacgttccaaagacatcgataaaggacaatacacgttttcacaagaagcaaaagattgtgttaaccctagacattaaggacttttttcccagcattaaatccggatacgttctgaatttgttcctttcctgtggttataacctgcctgtagctgtgttccttactcggctctgttgccttaatgagtcactgcctcagggagcacctacgtccgcctatctcagtaaccttgtcctcaagaaattcgattacaacataagcgagtactgcaaaaagaataacatccgctataccagatacgcagatgacctgactttctcaggagatttcaacatcgcctctgtgctgtttctcgtcgacacagaactgaaataccttaacctgaaacgcaacaataaaaaggtgaaggtgatgaggaataattctagacagtgtgtgaccgggattgtggtcaacgacattcaacagttatgccgagagtaccgaatgaagattaggcaagaagttcatttcatagagaaatttgggttggacgatcacttggcgcatatcggtgaacagagggtgaattatgtggaacatctgagtggcaaaatcaactatgtcctgtccgtgaaccccaaagatgagaagatgcaggaatataagaagagcatagacactatcaagtatcagacatga

SEQ ID NO: 9747 - RNA, 1038 nt, synthetic construct
  source 1..1038: mol_type = other RNA
atgatggagtggaacgaatacaaggatagatttaccaaaaaggcagaacaatcaggatacaaagagagctacattgagaaaaatctggcctatgcagaggtgatcgtgaaaaagggatatccaattatctacgacgtggtccatctatcaaagctggtgggcgtttcgtatgagtacattttcaaagtaagcaatgcctctaaatacttttaccgccggtttgagattaaaaagaagaacggcaagaagcggacaatccacgagcctctacccctgcttaaatccgtgcagatgtggatactcaggaacattctggagaagaaagaagtgagcatctatgcaaaagcctacaagaaagaggtgagtctgaaggaaaacgtccgattccaccgcgggcagaaaattgtcatgaagctcgacgtacttgacttcttttctagtatcgaaccccggtttgttgataatttcttccgctctataggctatagcaaaaacttgtccagggttctcacgaatatttgcgtattaaatcatggcctccctcagggtgctcccacttctccatatttgtccaacatcgtgatgtataatctggatagaaagatctcatcctattgccgagtggaaaagatcagatacacccgttatgctgacgatatgactttcagcggagactttaagccggctaagatcatacacttcctgaagaaagagttatccaagctgaaccttgagctgaactacaaaaaaaccaagatcttgagacagaatgaccgtcagaacgtgacaggggttgtcgttaaccaaaagatccagattgatcggacaactcggaacaatttaaggctcgaaatgtacttcaagaagaaaaaccagaagaagcacctgagtaatgcctgtgaagcgggccaagagcgcaaatatttgattgggctgcttggtagagtcaattacggactccatataaacgagaaagataccgtcctgctcaattacaaggaaatcatctatgaagtgctgtcaaggtacaggatttga

SEQ ID NO: 9748 - RNA, 1035 nt, synthetic construct
  source 1..1035: mol_type = other RNA
atggaatggtccgagtataaggataaattcaccgaaaaagccaaacagtcaggttataccgagaggtatatcgaaaaaaacctggcatacgctgaaatcatcgcaaataaagggtaccccatcatctacgatgttgctcatttttccaaattggttggcgtgtcctatgagtacatctacaaggtgtcaaatgccagcaagtacttttatcgaaagtttgacgtcaagaagaaaaacggtaagaaacgggtgattcacgagccactccctttactgaaaagcctgcagatgtggattctgcgcaatattctggagaaaaaggaagtctccatctacgccaaggcctataaaaaaagagtgagcctgaaggaaaacgtccgctttcatcgcgggcagaaaatcgtccttaaactggacatcctgaacttcttcagtagcattgaaagcatttacgtttatgacttcttccggtcgatcgggtataacaagtctgtgtctcgggtacttactaatctgtgtacattgaaccgtggattaccccaaggcgcttccacatcaccatacctgtctaacattgtgatgtataacctcgacagaaagattagcaactactgcaagaaaaagaagatacgttacacccgctatgctgatgacatgacttttagtggcgatttcaaacctgcaggtattatacacttcgtgaagaaggagctgagtaagttaaatctggagctcaactatgagaagaccaaaattctcggacagaatgataggcaaaatgttacgggagtcgtagtgaatcagaagatacagatagatcgaatcaccagaaataatttgaggctggagatctactttcttaagaagaaccaagagaatcacctcaggaacatttgcgaagcgggccaggagtctaagtacctaatggggctacttggaagagtgaactacggcctccatatcaatgagaaggacacagtgctcttgaaatacaaggagatcatatatgaagccctgtcacactaccggacttga

SEQ ID NO: 9749 - RNA, 1032 nt, synthetic construct
  source 1..1032: mol_type = other RNA
atggaatgggaactgtataaagagagttacgagaaggaagcacagaaccacaacttaagcgatgagactatcaagtctaatctcaagtacgcctacaacctgtacaaacagaatgtgcctatcatttacgaccaattgcacttttcgctgcttgtcggtatttcctatgaatacatcctgaaggtcaccaatgcccctaagcaaagctacagacggtttagcattgccaaaaaaaatggggataagaggatcattcatgagcccttaccgactctcaaaataattcaggaatggatactacacgaaatccttaataacatcgatgtgagcccatacgcaaaggcttataggaaaaaggtcagccttaaagataatgtgaagtttcaccggaaccagaagaaggtgctgagactggacattaaggatttcttcgggagtattaaacagaaccaagtgctctccatattcttaaagatcggctacacaatagacgtaagtacgctcctagccaaaatctgcaccctttccggcaaactgccccaaggatctcccacctccgctgcgttgagcaatttggtcatgcgaggcttcgacaaagaaatctcactgtattgtaatgagaagaagatccgctatactagatacgctgacgatatgacattctcaggcgacttcaaggagcagaagctgatcaagaaggtgaagtcttatctgagttggattaggctcgagcttaacctagataagaccaacctcatgcgtaaacacaatcggcagctggtaacaggaataacagttaacgagaagatccaggttaacgttcagaaaaggcgcaaactgcggcaggaagtgtatttcattcgcaagtatggtctgtgctctcatctgcgacatagaggcttcgcagagtacgactcagagatgtacatcaaatccttgattggaaagattgggtattgtctgtttatcaacccaaaagacgaggaatttcgcgagtatttgaaatttctcaagtctgagctctcaaaatga

SEQ ID NO: 9750 - RNA, 1047 nt, synthetic construct
  source 1..1047: mol_type = other RNA
atgaataatgacgagtgggagaactataagaagatcttcgagaaaattgcgcgcaaaaacggtaaatcgcagaactacataaataagaaccttcagtatgcagaaatgctggtgaaaaataacatgcccatcatttacaatgccgaccatctaggactcttaatcggcatcaaaagttcctacttttataaagtgaccaacgaagataagctcttctatcgaaagtttagcattaagaagaagaacggtgatagccggattattcatgagcctttgcccaatctgaagatcatacaaaagtggattttggaaaacatcctatacaagttggaagtctcaaagtttgctaaagcttatataccgaccattagcgtgaaagataatgtgcgatttcataggaaacaaaagtacgtactcaagctcgacattaaagacttcttttcttcactgtccgagatccacgtctacaagatctttaaaaaaatcgggtacactgattccctatctgtgctgctgagtaaactttgcacacttaagggcgtactgccacagggggcctctacctccgcctacctgagcaatttaatattgctggacttcgataagagcgtcagcttatattgcctggagaggtccatccgctatacgcgttacgccgatgatctcacattctccggagaattcgaccacaaggctctgttgaactttatcgactataaactgaaagctctcggcctgaaactgaaccagtcaaagaccagactgcttagacagaatcaggcacaggttatcacaggcatagttgttaatgaaaagatacaagtccctcgggactaccggaaaaggatccgcctggaggtgtactatatcaagaagttcgggatttacaaccacctgaaaagtaatcactctaaggtggacgccaaaacttatctcaaagccttgaacggaaagatcaattattgtctgttcatcaacccaaatgacctcgatatgaagaactacagagatattattgaggacgcataccagaagctttcaatttga

SEQ ID NO: 9751 - RNA, 1062 nt, synthetic construct
  source 1..1062: mol_type = other RNA
atggactgggagtactataagaagaagtactgcctggttgcatttgagaataatatctccagtcacgaaatagaaaacaacctcttctacgccaaaaaattgtacgacagagggttgccaattatttatgacgagattcacttgggtcagctgatcggaattagccatgaatatatgttcaaagtcgccaacgacgcctcctacttctacaaatcctttaggatcaaaaagctgaatggagggagcaggaagataagcgagcccctgcccaatctcaagattatccagaaatggatccttgaggaaatcctgtacaaattgaacatacacccaagtgccaaagcatatgtaaaaggcctctcgatcaaagataacgttaagttccaccgaaatcaaaagacagtgctcaagcttgatatcattcggttttttaacaacgtcaaggaagacctgatttaccgcattttcaaggagattggctactctaaggaaatctcatggttattaacaaggttgtgcatacttaacggcgctctgcctcaaggggcggtgacatcaccttacctaagtaatcttgtgatgctcaacttcgatcggaaaatctattcctactgtaaaaagaaacgcattcgctatactaggtacgctgacgacctgactttctcaggtgagattaacaagcaccatgtcatctctagagtgaagaatgagcttttaaagattcacctgcagctgaatgaaagcaaaattcgggtgctcaaaaaccatcagcgtcagattatcaccggaatcgttgtgaataagaagattcagaccagcatcatctatcgaaaaaagataagacaggaggtgtattacatcaagaagtttggcatctataaccatatttccaagaccctggggataaccgatatcaatacggagctggagctcaaatacctaaagtctctaataggccggatccactttgtcatcttcgtaaacaagtttgataaggagatgagcacttatctgcatgacctgaaaatggtgtatgatgaactgtctaatacacacgaatga

SEQ ID NO: 9752 - RNA, 1059 nt, synthetic construct
  source 1..1059: mol_type = other RNA
atggattggagtatttataagcagaagtacacatcaatggcccttgatcaaggtatagaaaccaaaaccatagaggaaaacttgagctatgctgaggtgctctataataagcagcttcccattgtgtacgacgaggtgcatctagggcagctgactggcatctcacacgactatatgtttaaggtgtccaatgactcaaagaaattctacaagacctttaggatcaaaaagagaacagggggatataggaaaatttccgagcctcttcctaatctcaaaattatccaaaactggatcctaaatgagattctgtacaagatagttgcccacccctccgcgaaggcatatcgcaaggatatctccatcagagagaatgtaaagttccaccgcaaccaggagatcgtgctaaagctcgatatacaatctttcttcaacaacatcagagagaaatatgtctacaggatcttcaaagaacttgggtacaaaaaaaacatcgccaacctgctcactaaattgtgtacgctgtctggatcgttgccacagggtgccgtcactagcccgtacctgtctaatttgatactgcggaaattcgataagaagatctatacctactgccgcaggaagggcattcgttatacacggtatgcagacgacctgagttttagtggcgaatttaacaagagacatctgatttctcgggtggagaacgaacttagcaagttaaagctgaaactgaacaccaagaaaattcgagtgctgaggagccatcagcagcaaattatcacaggtattgttgtgaacgagaaaattcaggtttccaagaaatatcggaagctgatacgacaggaagtatactacatcaataagtacggcttaaacaatcacctctcagtcaaatacaatctcgaagagagcgatgagtttaagaagaccgtctacttaaaaagcctgattggaaaggctgaatacgtgctgtttatcaataagaacgacaaagaaatgccagagtacatcgctctcctccgcaatttgctggtcaaactgaaactggaaaattga

SEQ ID NO: 9753 - RNA, 1095 nt, synthetic construct
  source 1..1095: mol_type = other RNA
atgattttgaactgggaagagtacgagatcgcctttagagagaaaaactctgaactcaatagattctcccagagtgaattggagaacaagcttcgatatgccaagaaaatttatgagaatcgggcgacggtgatatatgacgccaaacacctggcagaacttgtgggggtgaaatattttgaggtctataagatcgccaacagcaatagcaggttcttttataaggaattcctcctgcagaagaaaaatggtggcgagcgtaagatcaaggcccccctgccaacactgaacatcattcagaagtggatttttgagaacatcctggcaaacttgaagtgcagtgtgtactgtaaatcataccaaaaaaacctgtctctgaaggataacgctaaatttcacaggcggcagcccattctcatgaaactggacatcagcagcttttttgataatatcagctggggactgatctacaacatcttcaaaaacctaggatactctgttgaagtctcaaccttgatcaccaaattggtgatgtacactgagaatggcaaggtcaagggcataccgcaaggtgctattacttcacctatgctgagcaatctcgttctaaaaaagttcgatgagaatattggctactactgcgtgaacaataagataagatatacacgctatgcagacgatttaactttctccgggaattttgacacgtacaagttaaaggcttttgtaaacaaggaacttcataagaatgggtttttcctgaataaccgaaagaccaaaattcttaagtccaatgataggcaggtggtgacaggaattgtagtcaatgagaaaatgcaggtttctaggaaatatcggaagaatttacgcctcgagatctatcatctgctcttccgcacccagcagcacttcgaatacaaaaagcttaaaaactacgacgagaagtcaatgtatctcaagacaatcattggcaaagttaacttcgtgctgcaagtcaattccagtgacaaagaattcaaaacctacaagaaagagatctacaagatcatagattccataaacaactcggaactgaacaagaacaattggaattga

SEQ ID NO: 9754 - RNA, 1059 nt, synthetic construct
  source 1..1059: mol_type = other RNA
atgaattgggaggaatacaagaaaaagttcatcgaaagaaacgaactgactaaaagatttagcgaatctgaactgaacgaaaagttgaactatgctaagaacttgcacaataacaagatgcccattatttacaatgtggatcatctgagccgactcatcggcgtttcgtattcagagatctacaaaatcaccaacagcgagtccaagtattactacaaagagttcaagctcaagaaaaaaagtggcgggtttaggaaaattaaggctccactcccgacactgaatataatccagaagtggatcttcgagaacatacttcaaaatacgaaagcctccatttactgcaaatcttattccaaaggagtgtccctgaaagacaatgcaaaattccataggcgccagaacattgtgttaaaactcgacatcgccaacttttttgatgagatctcttacgaggtcgtgtataaacttttcaaggacttcggctactcaaacgaaatagttattgtactagcacgtcttgtgatgtataccaataacaagatcaccaaggggatacctcagggagccagcacatcccccatcataagtaatctgatcttgaagaagttcgataatgaaatcgcttcaatatgtctgaaagagaacattcgatacacaaggtatgcggatgatctgacctttagtggcgatttcgaagtgacgttcatcgaggaaattattaaggagaaactacggttgctgggtctgaagctgaacgccaaaaagagaaagatcttgcacaaaaacaaccggcagattgttacaggaattgtagtcaatgagaaactccaggccccaaggaaataccggaaaaatctccgcctagagctgtactatattctgaaccacagcaagaatcactttaacaagaatggtctgtacaaccatgacgcacgcaagaattatctgatcactgtgcttgggaaggtcaattacgtcttacaaatcaatcctcaggactctgagtttattgacttcaagaagaagctctataagcttttaaccactcagttttga

SEQ ID NO: 9755 - RNA, 1071 nt, synthetic construct
  source 1..1071: mol_type = other RNA
atgaattgggaacagtacaaaaacaacttcatccagaaaaacaagatccacaagaaatttgacgagaatgaattaagcctaaagctgaattacgcgtataacctctacgaaaacaatctgcccattctgtataatgtcgaccatctttccaaagtcatgggaataaataaggagtacctctataaggtatcgaacagcaactttaaatacttttaccgcacattctaccttccaaaaaaaaatggtgggactcggaggattgatacccctttacctaatcttaagctagcacagaaatggatttacgataacattttgctcaagctggaaacatctatttattgcaagtcctacaaaccgaatttttctattaaggacaacgccaagtttcatcgtaatcagaatctggtgctgaaactggatatcaagaacttcttcaagaatatcaggcacaaagatatctaccttctgttcaaagagattgggtataacaatgatatctgcaatttgctcaccaaactggtcattctcaacgacgacaccaaaataaaaaaaattggtatcgctcagggggccattacctctccatcaatctccaatctgatcttaaagggattcgataacaagatagctgaatactgtaagcaatcaaagatcaggtatacccggtatgccgatgacctaactttttcaggcgactttaaccccaataacatcataaacttcgtggaaaagaaccttaataagcaaggcttcgtgctgaataagaacaagatcaagaagatctacaagaatgagagccagatcgttacaggcatagttgtgaatgagaaattgcaggtatccagacagtatcgaaagaatattcggctggagatatatcatctgctgaatcacactaaagagcacttgaacaaaaaagaggtgacgaactactttgagcaaagagagtatattttggcactcatgagtaaaatcaacttcgtgctgagcattaacaagaacgacaaaaagatgatcgaatacaagaacaagctgtataagctgctcagaagtctcgaccgcatgtga

SEQ ID NO: 9756 - RNA, 951 nt, synthetic construct
  source 1..951: mol_type = other RNA
atgaatgttaagtatctcaccatcgagaaactgctgacagattgtaacctgtccaagaaggattttttaaccctttgcgaccttgattctaagtacgtttacgatatcttccttatccccaaaaagacaactggatttcgcaccatccgtgtacccaatgcgcaactgaagattctacagtgttggattaacaagaatgtgttaagtaaggccgatattagtaagttttgcaagtcttatcgcaagaacatgtccattgtgacaaatgccaggttgcacaaaaaccagaaaattgtcctgaagctcgacatcgcagacttcttttcctcaatatcttggagccaggtgtataaaatattcgtcgagctcaatatcaacgaggagatctctgaatactttgctaaactcgtgacgatcaatgatggagaagtgaggctgggaattccacaaggcgcttgcaccagccctacaattagtaattgcattctcaaggactttgacaacaagctgggctcctactgtattaaaagaaagatccgatacactcggtatgcagatgatctgacctttagcggcgacttcaactataagaaagtgatactgttcgttaagaagttgttggacaaattcgggttcaaactcaacaatagcaagatccgggtaatgaaaagcgggcagtcacagatcgtgactggtatacaggtcaacgagaaaatccaagtgccaaggaaataccggcataaccttagactcgagatttaccacatcctgaatcatcctaatgaccacttcaaaatgaagaacttgtacaattcagccgaaaagtcccagtacttaaaatcggttctggggaaagtcaactatatactgcaggtcaataagaaagacggtgaattcatcaagtataagaacctgctacataaaatcttggtggaagtgctgacgatttga

SEQ ID NO: 9757 - RNA, 1041 nt, synthetic construct
  source 1..1041: mol_type = other RNA
atgaatgataagcagtgggaggactataagtccaaatttatcgagctcgctaagttaaacaacaagacacagaagtacattgaccagaatataaactacgcctttaacctgtttcaaaaaggcctgcctatcatctatgacacgactcatctcggtctgctgaccggaattaaaaaggagtatatctaccttgtggtcagttcaccccgacactattataggcacttcaagataccaaaatcaaacgggttcctgagagagatcgacgagccccttcccaatctaaaaatcatccagaagtggattctcaataacattcttcagaacgttcccgtcagcccatacgccaaagcctacttgcacaaaacaactctgatagataatgccaaattccacaagcggcaaaagatagtctataagctggacatccaaaacttttttccgagcatctcctctcacatgatttacaactttttctgtgaagcaggctacgatctcaaactgtccagggttctaagccgtattgtaacattgaataatggcttgccacagggagctcctacctcaccttaccttagcaatattatcttcaaggagatcgatctgaagattgcaaaatattgccagcagcataaaatcagatacaccagatatgcagatgacttgaccttctctggagacttcaactacaataaactgaagacctttgtggaatggaacattcagaagtcgggttttaacttgaacaacagcaaaacgaagatcttacctaagaataaacgccaaattgtgacagggatagtggtgaatgaaaagctgcagatttctaagaatgagcggaaaaagattaggcatgaactccattacctcaaacttgatactaacaaacacctcagtctgcgcgcgaacaacgagaaggctcaaataaagtatctgcagcagctgctgggcaagatcaattacggactccagattaatggcaaatccaaggaactactgttagggaagatcttcatccttaatatcctgaaacagttctga

SEQ ID NO: 9758 - RNA, 1089 nt, synthetic construct
  source 1..1089: mol_type = other RNA
atgatgtcctcctgcttcttctttgcgaaggaaatgaactgggaaaactacgcgacctctttcgagaatgccgccttgtccaacaactttgacgcaagttacgtaaaacgttgtctggcctatggcaaagttctgttcgataagtcactgcccattatttattcactggaccacctggctaatctcgtgggctacgactccgaatttattgttgcagtgagttttaggcagaatgggtactatcggaacttctttatcccgaagaagtcaggagactatagagagatcagcgagcccttaccttccctgaaaatcatccaacgatggatcacagagaatatcctgtataggataagtgccagccggttcgccaaggcttttgtgccaaccaggtctatcaaagataatgcccgcttccacaaaaatcagaagcttgtgctgactgtcgacatcaaggatttcttcctgtcgttgtccagcaaattagtgtacaagttttttctcggctgtgggtatagtaaacgcgttagctacttcctgacccgtctgacgacactcaacggatcgctaccacagggagcccctagctccccctacttgagcaatctcctcttttctgaaagtgacgaggaaatttccacattttcaagatcagaagctattcgctacactcgatatgcagatgatctaaccttctctggcgatttctctccctgcaaaataatcaccagggtccggcgggtgctgggtaagttggaccttaggattaacgaaaagaagacacgtgtgatgaagcctcaccagagacagatcgtgactggcatcgtcgtcaataacaaattacaggccgtaagagagattagacgcaaccttcgccagaacatacattatatagagaagtttgggttcgagtaccatgtggctcgaattagggagcaccgggctaattaccagtttcatctcatgggtcaggccaattttatactcttcatcaacccacgggacaaggacgctattttcgcactggaagtccttagaaaaaacctgcaacacagcgcaaatagcgagtctcaacatgataacaattga

SEQ ID NO: 9759 - RNA, 1047 nt, synthetic construct
  source 1..1047: mol_type = other RNA
atgaactggatcgattaccagaaggaattcactgccaaaagtatctccgctggctataagaaagactacatcgaaaggtgtctcacctatgcccaccggctctacgagcgcaatctcccgattatttatagtcttgatcactttgcctccctggtgggttatgagaaaagctacctgaactacattgcttatcgccagaaccctttttacaggaatttcgagattccaaagaagtcatcgggaaaacgagagattagcgaacctctccccaatttgaaaaaaatccaaaggtgggtccttgacaatatcctgtatcgggtcagcccttcccaatacgccaaagctttcgtaccaggacgctctataaaagcaaatgccagatttcataggaatcagaagatggtgctgaccctcgatattaataacttcttccctaggctgagctctaagctcgtgaagcagttcttcacaaagtgcgggtattccaagaaggtcacttattacttgacccgactgtgtgttctgaacggcggactgccacagggtgctccaacaagccccgcactggcaaacttgatgcttaaagatttcgacctaaatatcgccaagtactgcaagagtaaaaccataagatatacgagatacgctgacgatctcacattttccggcgtattcgcggaaaatgagctgataaaacaggtgaagaaggaactaaaaaagattgacctggaactgaagaacagtaagacccggcttatgcttaagcatcaacgtcaggaagttacagggatcgttgtgaataacaagctgcaagccccccgagagttccggagaaatttaagacaggccatcttttacatcgagaaatacggcttggagaaccatttggcaaaattaaacgagtttcgggcgaactatgtgtcacacctattagggcaggctaactttgtgctgtttattaatccccgcgatcaggatgccctgaaggcactggagatactcaaagactgccgttcttctaactttatgatcacttcagacgactga

SEQ ID NO: 9760 - RNA, 981 nt, synthetic construct
  source 1..981: mol_type = other RNA
atggactgggaaatttacagctcccgattcgccaaagccgcacaggacaggggtgatcactatattgagcggtgcctggcctatgccaagcgcctcaacgatcaatcactgcctatcatttatagcccagatcatctgggaaaattgacaggctatgaccccgcttatctaaggtacgtggcgtacaaacagcgaagtttctaccgcgagtttagcatccctaagaagagcggcggcgtgcggtctatctctgagcctctgcctaacctgaaatccatccagcagtggatactgacttcaattctctacaagctcgaaccctccgtctatgccaaagcctttgtgccgcagcgctcaatcaaagaaaacgctcgtttccatagaagccaggaaatggtgtttacggttgatatacgggacttcttcccctccctctcagtgaagagaataaacaatattttcctctcccttggctatgagcggcgcgtggcttactacctgaccaggctgtgcagcttagatggaggtcttccgcaaggagcacccacttcgccagccctctctaatatcattttttccccaacagacaatcgtattgcgaaatattgtaccccactgggaattcgttacacgaggtacgcagatgacctcaccttttcggggaatttttctgtgagtgatctgttgaagatcatccgacgggaattgtctgctcttgagctaacactgaatgacagtaaaaccagattgatgaagaagcacgagaggcagattgttactggcgtagtagttaatgagaaattaaatgccaccagagaactgcgccgcgggctgagacaaagcgcatattacatacagaagtacgggctggagaaccatatcaaccggatcgacgagaagaggggcaactacttactgcacttgatcggtcaggctacacttggggtcagtgaattcctttgtaagagagacttcgtctga

SEQ ID NO: 9761 - RNA, 1062 nt, synthetic construct
  source 1..1062: mol_type = other RNA
atgaattggaacgagtataaaaacaagttctactacttcgccaagttccataataaggacgataattacatcaacgactgcattaattacgcagagaaactcttcagtaaaaacctgcccgttatctatgacgtgacgcatttttcctatttagtgggctataaggaatcatacattatgaaagtcgccaactcccagtcaccattttatcgcgagttcctcataccgaagaagaataaggacgaatacagggagatctccgagcccctccctaatttgaaggtgatacagcgttggatcctggacgaaatacttcacaagctgaatcctagcccctttagcaaagcattcagaatcgggtattctatcaaagataacgcgaaatatcacagaaaacagaagcttgttctgaacatggatattaaggactacttcaacagcatctcaaacgacaaggtattcatgttctttaaaagcctcgggtatagtaaacaggtggcattggtactgtcaaaactctgcattctggataacggactccctcaaggggctccaactagtcccatgctgtccaatttggtgacacaacaaattgataaacgcatcgctagcttttctgctaagcataatttgcgatatacccggtatgccgacgatcttactctctctggcgactttgacgaaggatttgtcattaactgtgtcaaaagaatcctgaacagtgaaggcttctgtataaatgagaagaagacccgggttaggaagcagaatcagcagcaagaagtgaccggtattgtggtgaatgagaagctgcaggcctctaagaaataccggaaaaatctgaggcagaagatgcactacatcaaaaaatacggattcgaagatcacataagcaagctggagattgacaacaagatcaagtacctttatcatctgctgggtacagctaactttattctgaatgtcaacccatacgataaagaggccaaagattcctttgagtacttaaagcagctactattccactacaagttaaagacatccatctcggaatttgattga

SEQ ID NO: 9762 - RNA, 1062 nt, synthetic construct
  source 1..1062: mol_type = other RNA
atgaactgggacgattataagaacaggttttatcatttcgccaaatacgacaataaggacgataactacatcgactcttgtttgaattacgccgagaagcttttcctgaaagacatacccgtgatatacgatgtgacccatttcagtaaactcgtcggctataaagaagcttatatcatgaaggtgtcgaattctcagggcagcttttaccgcgaatttaagattccaaagaaaaagaagggcgaatatagagatatttacgagcctctcccaaatctcaaaaatatccagaggtggatcctggacgaaattcttaacaagctgaaaccttcaccttatagcaaagcatttcgggtggggtattcaattaaggataacgccaaataccatcggaatcagaaaaaattgctcaacctcgacattaaggactatttcaagagcatcggctacaaaaaagtctacaactttttccggtccctgggttacagcaagcacgtatcagttgtgctggctaatgtctgcacgttggatgatgagctaccccagggcgccccgacttctccaatgctgtccaatcttataacacagcgtctagatctgcgaattgctaaattcgcgagcaagaacaaaatcagatacactcgctatgcagacgacttaacattcagtggagactttgaggagggaattgtgatcaatttcgttcggaaggtgctgttaagtgatgggttccttatcaatgagcagaaaaccagagtacgcaagcagaatcagcaacaggaggtcaccggtatcgtggttaacgaaaaattgcaagcatccaaaaagtataggaagtccctcaggcagaagatatactatatcaagagatacggactggaagaccacatctctaagatcgaatttgacaacaagattcgatatctctatcacctgcttgggacagctaactttattttaaacgtcaaccccaatgatgaggaggccaaggagtacttcaactacctgaagcagctgctgtttcaatacaagttgaaaaagctggatcaagaggtggaatga

SEQ ID NO: 9763 - RNA, 1041 nt, synthetic construct
  source 1..1041: mol_type = other RNA
atgaactgggaagtgtacagggacaacttttatagctctgccaaaacaaaaggatacaaggagaattacatcaacaggtgtctcgagtactcaaaaatcttgttcgatcagaagctgccaatcatatacgatcaaaagcacctgtcgctgttaattggctatcaggagatctacctcattaaggtcagcaatagtcaggaacctttttatcgcgagtttaagatacccaaaaagaacaagaacgaattccggaaaattcacgagccgcttcccaacctgaaaaatattcagagatggatcctggaagaaattctcaatatacttgagccctccccttattcaaaagggttcagaaagggctatagcataaaggataacgcacgattccataagaagcaaaaaaaggtgctttcaatcgacattgagaactacttcggatctatcagttacgacatggtgtattccttcttccgcaacttagggtatagtaaacaggtgtccgtaatgctggccaatctgtgcgtccttgagggcaggctccctcaggggtcaccaacctcccccatgctatccaacttgatcaccaagcgactggataatcggattggtggatacgcgaagaaaagggggattcgttacactaggtatgctgatgacctgacctttagcggcgattttaacgaaggcgcattgatcaattttgtcaagaacgtctttgagtctgagggttttgtcatcaatgaaaaaaaaacccgggttcgcctgcagagccagcaacaagaagtgacaggtattgttgtgaatgagaagatgcaggcttctagaaaatatagacgggagtttcgcacaaagatgttcttcatcaaaaaatacggactagacagtcatctcgactatgtggaagaagagaagaagatcgagtacgtataccacctgctgggcactgccaatttcatcgtgaatgttaacccaaatgacttggagacgcgtgaacattatatttacctgaaggagttactctctgacctcaaaaagagctga

SEQ ID NO: 9764 - RNA, 1035 nt, synthetic construct
  source 1..1035: mol_type = other RNA
atggaatgggaggaatacaagtccaaattctaccattatgccagttttgagggcaaggatcccgattacattgataattgcctcaattatgcagagaaactgttcaacaagggcctaccagtgatatacgaccagctgcacctgagcttacttgtcggctatgaggagatctacctcataaaagtgagcaattcgcaggatagcttctaccggaagtttgacattcttaagaagaataaacgcgattaccgaaccattagcgaacctctccccaaccttaagaatatccaacgttggatcctaagcgaaatcttgtccaagctgaaaccttcagagtactccaaagcctttaggcctggattatcaataaaggacaatgctagattccatcgtaaacagaaaaaattgctcacagtggacatcaaagactactttggttctatcgacttcaagaaggtgttcatattctttcgaaacctgggatatagtaagcaagtgtcagtgatgctggcaaatatttgtactctgaacaacggcctcccgcaaggcgcaccaacatctccaatgttgtctaaccttattacgaaaaacctggaccagaggatcgccgggttttccaagaaaaataacctgcggtatacccgctatgcggatgatttgacattctcaggagacttcaacgaagggcacgttatcgaattcgtaaaggaggtctttaagagtgaaggttttactatcaacgattccaaaaccagggttcggaaaaggaaccagagacaggaggttaccggtattgtggtcaatgagaagatgcaagcttctagaagctatagacgcgactttcggcagcagatgtactacattaagaagtatgggctcgatagtcacgtaaataatattgaaggcggagacacactgaaatatctgtatcatctgctcgggatggccaatttcatcatcaacattaaccccaacaatcaggagactaaggaggactaccactacttaaaagatctgcttcagaagctgaagtga

SEQ ID NO: 9765 - RNA, 1032 nt, synthetic construct
  source 1..1032: mol_type = other RNA
atgaattgggaggagtacaagtttaaattctaccactatgcttcctttaacggtaaagaccaggactatattaacagttgtcttaactacgcagaaaagctctttaataaaggcctcccggttatatatgatcagttccatctcagtctgctcgtgggctacgacgaaaagtacctgataaaagtcagcaattcccaggagctattctaccgcgaatttaacatcctgaagaagaataagaaggactatcggacaatcagcgaacccctccctaatctgaaaaacatacagcggtggatcagcaaggaaattttgtctaatcttgagccctctgaatacagcaaggctttccgcacggggtattcaatcaaagataatgccaagtttcacaggcgtcagaagaaagtgttaactatcgacctgaaagactatttcggatccattgactataagaaggtcttcaccttttttagggacctgggatattcaaaaccagtatccgtgatgctcgccaaaatttgcacattgaacgatgggcttcctcaagggagtccaacctcgcctatgctttccaatttgatcactaaaaacctggatcatcggatcgcaggcttcagcaggaagcagaatattagatatactcgctacgctgatgatttaaccttcagcggcgacttttctgaggggtacgttatcaagttcgtgaaaatgattctgaacagtgaaggattcacactaaatgattcaaagacccgtgtcaggaaaagaaatcaaagacaggaggttacaggaattgtagtgaacgagaagatgcaagcctcacgaaaatacagacgggactttcgcaaacgaatgtactatatcaagaagtacggcctgaactctcacgtggagaaaatagaggccggtaattccttgaactacctgtattatctgctgggtatggcgaatttcatcatcaatattaaccccaacgataaagcaaccaaggaggattacaactacctgaagaacctcttactgaagtcttga

SEQ ID NO: 9766 - RNA, 1068 nt, synthetic construct
  source 1..1068: mol_type = other RNA
atggtgataggattgaacgaaaatggcgatatcatgaagtgggaggaatacaaaaagaagttctaccactatgccacgtataatcagaaatcagaggagtatattagctcttgcttggactacgctgagagactgttcatgaaggatttgccagtaatctatgatcagaaacatctatctcagctcgtgggataccgcgaagagtatctgtttaaagtggctaacgcatcagagctcttttacaggaacttcaaggtgctaaagaaaaacaagaaggactatcgcgagatttcggagcccctccctaatctcaaggacatacagcgatggatcctggaccagattctgtacaaacttgaaccgtctgagtacagtaaagcgtttcgtaaaggtgtcagcattaaggacaacgcaaaatttcacagaaagcagaagaaagtacttaccattgacatcgagaactactttggcacaatcaaattcaaagccgtcttcaagttttttaagtccctcggatacacaaaacaagtgagtatgatgctggccaaactctgtgttattgatgacgaattaccacagggggctcccacttcccctatgcttgctacactgatcaccaagaatatcgataagcggttatccgcgttcgcaaacaaagaaaagatccgatataccaggtatgccgacgatctgaccttttcaggcgatttcaatgaaggttacgtgatcaaatttgcagagaaggtgataaactctgaggggttcaaggtgaatccctttaagactagggttcggcttcagcatcagagacaggaagttaccggcatagttgtcaatgagaagctgcaagccagcagacagtaccggaggaagttccgtcaaaatatgtttttcatccggaagttcggcctggaaagccacatcatcaatatcaacgtgtccgatcctaaaagttacgtctatcagttgattgggacagccaatttcattcgcaacattaacccaaaggatattgacgtccaagtggactatgaatacctgaaggagctgctgcaaacttataaatga

SEQ ID NO: 9767 - RNA, 1044 nt, synthetic construct
  source 1..1044: mol_type = other RNA
atgatttgggaaaagtataaacgcaatttcactgaatcagctttgaaagcaggatacgatagcatgtacattgaagaaaacctgaaaaaggcacactccttgcatttacaggggatccccataatctacgatcagatgcacctgtcatacctggttggttatgacatcgagtaccttctgaaagtctctaacagccaaaaggggttctacagatacttcaagattccgaaaaaaaacgggggcttccgcaacatcgccgagccattgcctaaccttaagtctattcagaaatggatcctggaagaaatgttatattcttgcaagacttccgaatttgccaaagcttacaagaagaatgtgtccttgaaggacaacgccaggtttcatcggggccagaagatggttctgactatcgatatcaaagacttctttggatcaatcaggcacatagatgtctataatttctttagctcgctcggatatagtcaggatgtggcaaccctgctgacaaatctctgcaccctcaaaggtgcgctaccccagggcgccataacatctcccgccctcagtaacctgcttatgaaagacattgacaagagaattagtgcgttttccaagaaaaagaagatccgctatacgcgttatgccgatgacctcacattcagtggcgattttcaggtgggtgagattattaaatttgtcaccaccgtgttaagaagcaagggcttttcaattaacgataagaaaaccagggttaggttccctcatcagcggcaggaagtgacgggcataattgtgaaccaaaagatacaagctccatgtgagatgcgaaaagagctgcggaagaacatttactttatcaagaagtacgggctgaattcccacctcgagttcatcaagaaagacaaatatcagtatctgaagcacctactgggaatcgctaatcatatctacttcatcaatcctactgacagccgagtatacgagtacctgaattatctcaaggagctttggcaagtagagaaaatcacaagcgaggactga

SEQ ID NO: 9768 - RNA, 1017 nt, synthetic construct
  source 1..1017: mol_type = other RNA
atgaactggaaatcctactctgaagcattctccaaaaaagctaagcagaataagtacgatcagaattacatcaacgaatgcctcggttacgccaaacctctgttcgagaagaagattcctattatctataaccaggagcatctcagcctgctcgtggggtattctgaggaatatctcttgaaggtatctaacgctagcgatcggttttacaggaatttcagtgtccctaaaaaaaatggttctagccgacagatatttgaaccactgcccaatttaaaggatatccagagatggattctcgaagagattctctataagtgtcccatcagcgactacgccaagagttatgtgccccggcggagcacaaaggataatgccaggtttcataggaggcaaaaaaaggtattgactctggacataaaagattttttcccaagcatcaggttccacaaaatttacctgtttttcttcaaccttggatacaccgaatcacttagtatgatgctggcgaatctctgctgccttaacggatcattaccacagggggcaatatcctcgccggcactttctaacctgatatttaagtcattcgacaagagaatcagtgtcttctgtaagtcaaataacattcggtatacgcgatacgccgacgatctgactttttccggcgactttcaaccagggatgctgatcaagttcgtcgagaacatcctagtgcccgagggctttcagctgaacaacaaaaagacacgggttagactgcaacaccagcgtcaggaggtgaccggcattgttgtgaatcagaaactacaagccccgagaaaaatgcgtagagagttgcgccagaagatacactatatcgaaaaatatggactggactcccatttagagcgctcccagattacccgcgtgaactacatcaaacatctgttgggcattgctcactatatccgccacattaatcctggcgacgagaagatcaatagctacatcgaaaagcttaaggcttacctgtga

SEQ ID NO: 9769 - RNA, 1017 nt, synthetic construct
  source 1..1017: mol_type = other RNA
atgaactgggaaacatacagagtcaacttcacactgcgcgccaaggagttcgagtatgatgaagagtacattaacaaatgcctgcagtacagtaagaacctgtttgacagatcccttcctgttatctatgaccagcagcacctgtcagccttacttggctacaagtactccttcttattaaaagtgtccaattctgcgaagaacttttacaggaattttgctattagcaagaagaacggagggttcagaaaaatctcagagcctctgcccaacttgaaggaaattcagcggtggatcctcgaagagatcctctacaaaaacaatgttagcgagtttgcaaaggcttacctcaaaggcaagtcaatacgagataacgttcggtttcaccgggggcaaaaatatgtcattaccatcgacatcaagaatttcttcccatcgattagcgaagagaaggtcttcgtgctcttcattgagatgggttatagtaaaccagtaagcgtgatgctcgctaaattgtgttgtctaaacggcaagctcccacagggagcagtcactagtcccatgctgtccaatatcattatgaaacgcctggacaaaaggatagccgcatttgccgtgaagaatcgcgttagatatacgcgttatgcagacgacctgactttctctggcgatatcgagcccgggaaggtgatcaatttcgtgaaaaaggtgctcgatgcggacaattttaagatcaacgattccaaaaccagggtgatgacaaagaatcaacggcaattggtgaccggatctgtcgtgaatgagaaactgcaggcccctcgagaagtaaggcgtaagatccgccaggaactgtactatataaagaaatttggcttggcctctcatctggagaagctgaatagctataaagccaactatctgaagaggctgcttggtttgattaattactgccttctacttaacccgaaggatgctgagctgataaaagggaagaactacctcaaagaactgctatga

SEQ ID NO: 9770 - RNA, 1056 nt, synthetic construct
  source 1..1056: mol_type = other RNA
atgaactggaacgaatacgagaataactacattcggctcgctaagctgtcagggaagagcgatgagtactgcattaaacagctcgagtatgccaagcatctctttgaacaagacctgcccgtgatttatacccaggaacacctatgcagactagtaggttacgcgactgagtacgtctatgccatctccaacagtgcatcttgtttttaccgcaccttctcaatcaagaagaaaaacgggaaggaaaggatcataaatgagcccctgccgtctctgaaagagatccaggactggatcctcaaagagattcttgaaaggataaacatcagcccatacgcgaaagcctacgtgaagggaagatctattaaagacaatgctagattccacaaaaggcagaacaaagttctgacaatggacttaaaggacttttttccttccattactttcggtcgagtcctgaatgtctttcgtaaagtggggtacagggaaaatgtagcagtgatgttggcaaatctgtgctgtcttcataatgaacttcctcagggcgcccccacaagtccagccttatccaatatcatagtcagcggattggattataagattgccgagttcctgaaaggcaaagagattagatacacccgctatgccgacgacttgacattctcaggcgacttcattgaaggagacattattaaaagcatcgagcgcatcgtgtgtcggcaaggtttcaagatcaaccatagcaagactagaatcaggaagagaaaccagcggcaggaggtgacgggggttgttgttaacgaaaagctgcaggtgaatcgcgaactgcgacggcgaatacgcagcgatgcttattacatcgagaagtacggcttctattcccacgtggattatacctcgcaaaatcgttccaactacttgtattatctgataggcatcgcatcatacagtctctttatcaacccttacgatgataagatgcgggagtatctcgagatctttaagaaagaacttgctaggtgtaagcaggagggagtcgatgtgtgctctccatga

SEQ ID NO: 9771 - RNA, 1044 nt, synthetic construct
  source 1..1044: mol_type = other RNA
atgaaatggaacgaatatgagaacaatttcatccagattgccaaaatgcaaggcaagacagaggagtattgtatacagcagctcgaatatgccaagaagctctttgctaataacttccctatcatttacaaccaggtacacttctgcaagctggtgggatacgctgaggagtacgtgttttcagcatgtaatcagcctaaatcattctatcgcacttattacatccctaaaagaaatggcaagaagagggagatcagtgaaccactaccctccttaaaggaaatacagaattggatataccaggagattctttgtaatgtgaaagtctcttcctacgccaaagcatacgtgaagggaaaaagcatcaaggacaatgctcgctttcacaagagacagatcaaagtcctttctatggacattaaagatttctttccctccattggctttaagcgtgtgctgaatgtattccggaacataggatatagggaaaacgtggcagttttgctggcgaacctgtgctgcctgaacaattccttgccgcaaggcgccccaacaagcccagttctgtctaacattatcactagcaagcttgacgacaagatagtgaactatgtctccaaggaacggatccgctataccagatacgccgatgatttgaccttcagtggggatttcaatgaaggggacgtaatcaaaaacgtcgaaaggatcgcgaactcactggggtttaaaattaatgaggagaagacacgggtgcgtaagcggaaccagagacaagaagttacgggcattgtggtcaacgagaagatgcagttaagcaggaaaatcaggaagcgaatcagatcggatatgtactacattcaaaagtatggtgtcgagtctcatctggagcatatcggagaaagccgcgagaattacctgtatcatatgatgggtctggttagttacgctgccttcattaacccctatgatgagaacctaaagaaataccgactctttctcaaagaggaactcaataaacacgtggcactggtggacaattga

SEQ ID NO: 9772 - RNA, 1017 nt, synthetic construct
  source 1..1017: mol_type = other RNA
atgaaatggagcgactacgcaagcaaacttattgaggaagccatcaagcttgattacactaaagaggctattgatgaatacttgtcttacgccgagcacctccaccgcgcgaaattgcctataatattcgaccaaatccacctgagttttcttgtggggtataagtacgaatatctgctcggagtgagcaacgccccccagtccttctacaagattttctacataccgaaaaagaacggagaagtcaggactatctctgaacccctgaccagcctgaaagagattcagagttggattctgaaagagattctgtataagtgcaaagtctcttccaatgctaaagcctatgtcattggcaaaagtattagggataacgcccggttccacaagaaacagaataaggtgctcaccatcgacatcgaagactttttcccctctatcaagataaacaaggttatcggcgtattcaggagagctggttatagcaaggcggtttcaacattactagctagactgtgttgtacggataatggcctcccccaaggcgcaccaacatcccctgcaatatcaaacctcgtaatgtattacctggatatgaggatctttgggttttgcaggaagcgcgccatacgttataccagatacgctgatgatctaacattttccggagacttcgatgacaatgaactgatctcattcacacgctcgatcctcgaacgtaagaacctgtttatcaacaaccagaagaccagattacgaaagcgacatcagcagcaggaggtgaccggagtcgtggtgaatgagaagctgcaggtgccaagagactatcgcgagcggtttcggcaagagttgtatttcatcaagaaatacgggctggttggccatgtcaaacatattaatgcaggggatccagaccggtatatccgggtgttaattggtaaggccaattttatttcccagattaatcctaacgacacggagatcaaagactacctgaagatcctttacactttgtga

SEQ ID NO: 9773 - RNA, 1041 nt, synthetic construct
  source 1..1041: mol_type = other RNA
atgaagtggattgagtacaagtcaaagttcattgaagtcgcacagaagaataataagaacaagaagtactgcgatcgatggctgaaatatgcgcggaatctatgggagagggacgtgcccatcatttatacgcaggaccacctctgtgccctgctgggctacgaacctacttatgtatatgcggtgtccaactccccacacaatttttaccattgctaccagatttccaaaaaaaatggagggaagagatctatatctgaacccctgcctaacctcaaagaaatccagcgttggatcctcgagaacatcctttatcgctttgaagttagtccttacgctaaagcctacataaaggataagagcatcaaggacaacgttcggttccatcgaagacagcgtaaggtactgtcgctggacgtgaagaacttctatgaccatttaaccgattggatggtctatcagcttttcattgaggtgggctattctgagagcgtggctatgatgcttacaaacctgtgttgcctggagggatcactgccccaaggtgccccaacttccgctgccctcagcaacatcttgatgaaagacttcgattacaaaatcggggccttctgtaaaatgtacaagattagattcacccgctacgcagacgatatgacatttagtggtgacttcgacgaagtcaaggtgattagctttgtcaggaaatctctgaaagatttgcagcttaccatcaatgatgccaaaacaagggtgcggaaacaaggccagcagcaggaagttaccggcattgtcgtgaactataagccacaattggctaaatcagtgaggaagggcattcgcaaagacgtttactacatcaataaatacggactgcaaagtcacctaaagtatgtgcaggaggaaagaagcaattatttagagcacctctttgggctcataaactacgcactgtttatcaatccgaatgatgaggagatgaaacggtataagatagacatcaagtacttgatgaagaaggagaacgatgagtttaaatga

SEQ ID NO: 9774 - RNA, 1029 nt, synthetic construct
  source 1..1029: mol_type = other RNA
atggaatggattgaatacgaattgaagttcgccgaaatcgccaagaaacataataagtctcagaaatactgcaagcgctggatggagtatgctaaaaaactctgggatagaggcctgcctatcatattcacccagaaccacctatgtgctctgttaggttaccagcccgtgtacgtttacgcagtatcgaacgccccttgcaatttctatcactactataaggtgcagaaaaaaaacgggggcacccggaatatctctgagcctttacccaatcttaaggaaattcagcgctggatcctggaaaacatcctctacagatttgagattagtccatacgcaaaggcctatgtgaaaaacaggagcataaaagacaacgttcggtttcatagaaggcaacgaaaggtcttgtcccttgatgtcaaagatttcttcggccacctcactgactggatggtctatcagctcttcattgagagtggctatagtgaatcagtcgcaatgatgctgacaaatctgtgttgtcttgaggggtccttgccgcaaggagcaccaacctcagcggcgctgagcaacatcctgatgaaggacttcgactacaagattggagacttttgcaagatgtttaagatacggttcactcgttacgccgacgatatgacatttagcggggatttcgatgaaactaaggtgatctcttttgtgaagaagaatcttagggacatgcagttgacgattaatgacgctaaaaccagagtgcggaaacaagggcagcagcaggaggtgacaggcattgttgtaaactataaaccccaactggctcgctccattaggaaggatatccgaaaggatgtgtactatatcaaaaaatacggtctgcagtcccatctccagtatatccaagaggagcgttcacactacctagagcacctgtttggactgataaactatgccctctttattaactctgacgacaaggagatgaaacgctataagatggatatcaagtacctgatgagcaatgagaagtga

SEQ ID NO: 9775 - RNA, 1053 nt, synthetic construct
  source 1..1053: mol_type = other RNA
atggagtggaacgaatataagattgcatttatcgaagctgcacgtaaaagtggcaaaaacaacgcttattgtgagaaatacctgaattacgctgagcagctctggatgcatcatatgccggtaatttatactcaggagcacttatgcgcattgctgggatacctgcccacctatgtttacgcggccgccaacgcccctgaggacttttataggcaatttctgattcccaaaaagaatggtggaagcaggatgatcagcgagcctctgcccaatctcaaagagatacaggagtggatccttaagaatatcctgtacaaagccgagatctccacctacgcgaaagcttacatccccgggaagtctgtcaaggataatgtgcgcttccatagacgacaaaagaaggtgctttccctcgatataaaggccttctatgaccacctcacagactggatggtctttcaattcttcatcgagaagggctataacgaagctgtggctatgatgctcactggactgtgttgccttcgcggttgcttgcctcagggagccccaaccagcgcagcacttagtaacctgttaatggtcgagttcgatgaaaaggtgggcctgttctgcaaggaaaaaaagattcggtacacacggtacgccgatgacatgacattttcaggtgatttcgacgagctggaagttatacgctttgttcggcaggaactcaaatccattggactgagactgaacatgaaaaaaacaaggacccgtaaacaagggcagcagcaggaagtaaccggcattgtggtgaattacaaaacgcagctacctaagtctatcaggaaggaaatcagaaaaaacatgtactacatccagaagttcggcctggagtcacacctcgaatatattgggttggagtgtcgaaattatcgcgaacacttactaggccagatcgggtatgccttgttcatcaatccaaaggaccaagagatgaagagatacaaggagattattcacgacgtggacatatgctgtaaaaagcagactccagatcggtttgtctga

SEQ ID NO: 9776 - RNA, 1029 nt, synthetic construct
  source 1..1029: mol_type = other RNA
atgaattgggacatctataaagagaacttcatacacgaggcaaagaaacaccataagaacgagaactacattaataagtggcttgagtacgcccataatctgaacagtaagaaacttccgataatctatgaccaaaatcacctatgtgagctgatcggcttcgataaaaactacgtatatgccatctctaatggaggcaaacatttttaccgtacatttgagatcaagaagaaaaacgggggcacaagaattattcatgaaccactgcccaatttaaaggatattcagcactggattttgaagaatatcctcgactatgtggaagtttcaccctatgccaaggcataccggaagggatatagcgtgaaagataacgtcaagttccaccgcaggcagaagaaggtactgtgcctggacattcacagcttctacgattcattgaaatccaatctcgtgctggatgtgttcatcgaattgggctacaagaacgatgttgcgatcatgcttaccaatctgtgctgccttaactataaactacctcagggcgctccaactagcagttccctcagcaacataattatgaaaaacttcgactactccgtgtctgatttctgtaaggataatgccatacggtatacaagatacgctgacgatatgactttttctggtgactttgacgagatcaacgtcattaggttcgtcaggaacgaactcaaaaaaattaacctgcggttaaacaatcagaagacgagagtccgcattcagggtcaacaacagttaatcaccggaatagtggttaatgagaagacccagttgcctaagaaaaaacgcaaagagattaggcaaaccatgtactacatcaagaaatacgggatcaacgagcatatgaattttaagaacatcgacaagtcctactatctcgaacacatcatggggattgtgaattatgggctgtttctgaatccccgagacagtgaactgatcgaatatcgatcgatactccaggtgctgaagaattcacaggactga

SEQ ID NO: 9777 - RNA, 1029 nt, synthetic construct
  source 1..1029: mol_type = other RNA
atgagtgaagagaagaagtgccctcagatcggcagaccacgggagctgtgtagtttattgggacacaaagcagaatacgtttatggcattgcaaacgagacacataaatactatcagcattcccgcataccaaagaagagaggagggtttagggagctctatgagcctttgcccgagctgaaaaaaatgcagacatggatcctgcatcacatcctcgatctgttagagcccagcccctacgccaaagcttatcggaagggttactccgtgaaagataatgcgaagttccatcgaagacaaaaaaaggtcctctctcttgatattgaaggctttttcgatcacatacgcaggtacccagtatttcgggtttttctggatgccgggtacaagaaggacgtcgcaatgctcctggccgctctttgttgccggaatggatgtctgcctcagggggcccctacgtcagctgctttaagtaacctggtgatgctggggtttgatgctaaagttggcgccttctgtagagaacgcggaatccggtatacaaggtatgcggacgacatgactttctctggtgacttcgaagaaaccgaagccatccggtttgtgaaagaagagtgcggaaagttgtctatgaagctaaaccgtgagaagaccagagtaaggaaacaaggccagcaacaggaagtcacaggtatagtggtgaacgaaaagactcagttgccggagagcgagcgcaaaaaaatcaggcaggagatgtactacattcgaaagtacggccttgaatcccacctgaggcacctgcgagaggggcttgcatctggaaagaatcacctccaggaggcttcaggcaatgggaaggaaagctgcctgagagaaactggcacctcgcgtgacctaagcaaggagcgctatctgtcacaacttctcggtagaatttcctatgccctcttcattaaccccagggacgaggccatgcgcgagtacaaaaaggcagtgattgagtggatgaaaaccgacatcatcaagtga

SEQ ID NO: 9778 - RNA, 1041 nt, synthetic construct
  source 1..1041: mol_type = other RNA
atggattggaacaaatacagggaagattttctgatcaaggctaagaatcagaagaaggataagaaatactgtgacaaatggttgtcctacgctcacaatctctacgagcaagaactcccaattatttataaccaggagcacttttgcaaactggtcggctatatgcccgaatacgtgtacgcggccagcaattctgcagatcacttctatcggacctttttcattccgaagaagtctgggggcctgagaaaaatttgcgaacccctcccaaatctgaaggaaatccaaaagtggatactggagacaatacttagcaagatgcaagtctctgtttatgccaaggcatatatcaagggcaaaaacgtgaaggaaaatgccagatttcatagagcccagaaaaaagttctgtccctcgacatacaggatttcttcagtaaaatttccccttttctggtgtacgaaactttcatcaatgtggggtataacaaggacgtatccatgatgattactatgctgtgttgcaaggagggtggtttgcctcagggcgcacccacgagcgctcttctttcaaacatcatcatgaagaacttcgacaacgtcatcggggactacattatcaagaacaaaatccgatacacacgatacgccgacgatatgacattctctggagagtttgacgagttagaaatcataaggctagtgaggcatgagctaaagaaatatggattctgtttgaatggcaaaaagactcggttacgccaggagggacaacgtcaggaggtgaccggaatcatcgtaaataaaaaactccagatctcaaaggatcagcgcaagaagatacgtcaggagatctatttcattaagaagtatggcctgcaatcacaccttacctataccaacgagcagcggaaaggttatattgaacatctgtttgggaaaatcagttacgctctgtacattaaccctaaagacgaggaattaaaagagtaccgcgaatttctcctgcagtacaagagcaacagtgagatttcgttgaattga

SEQ ID NO: 9779 - RNA, 1050 nt, synthetic construct
  source 1..1050: mol_type = other RNA
atggaatggattgagtacagagagcaatttatcacaacagctaaaaaagcatccaaaaatagcggatacattaagaagaatctgaagtatgccgaaaaattgtacaatcagaaactgcccatcatctataacgcctcacatttttctaagctggtaggttatagtctgcaatatctttacgctgcatctaacgattcaagcaagttttacagagagttcgagatcaagaaaaaaaatggtggctcccggaaaattagcgaacctctacctagtttgaaggaaattcagaagtggattctggaaaacattctgaacaagatccagaaagagaaagtgagtaagtacgccaaggcatatcaaaagaagatctccattaaggagaatgtcaagtttcaccgggggcagaagaaggttctctctctcgacataacaaacttcttcctgaacatcaagatcgataaaatctacgaagtgttctacaatttgggctattccaaatctctctctacgctgtttagcaatctctgcactttaaattactcattgccccaaggagccccaacctcaccaatcctgtccaatatagtgatgctaaacttcgacaatgaaatcgagaaaatcgttcttgagaaacggataaggtatactcgttatgcggacgacatgacttttagtggcgatttcctggagaaggaaataataaagtatgtcaaggagaacctcaataagatcggcttaaagatcaacaacaaaaaaacccgagtgcgcaaaaattggcagcagcagatggtgaccgggatcattgtgaacgagaaaattcagatttccaggaaaaagagggatgagctgcgccagaccatgtattacattgagaaatacggcattgatagcttccttaagtacaaaggaattaagaacaaggtctactacttaagccaccttaaagggatcctggaatatgcttatttcatcaacaagaacgacaaaaagctgttcaattacatagagtacctcaagaacaatttcttcaaggaaaaaagctcgatctga

SEQ ID NO: 9780 - RNA, 1026 nt, synthetic construct
  source 1..1026: mol_type = other RNA
atgaattggaagaattactgcgtcgagtttcgcaaggaagcggcattaaaaggaaagaacgaagaatactgtgacacctggctgcaatatgccaaagtcctcttcgacaaaggcctgcctattatttacaaccaggagcacctgtgtttgcttctcggctataaagaagaatatgtgttcgctgtgtccaattcagcttcgaacttttacaggaactatgagatacctaagaagaatgggggagttcgggagatttctgagccactcccctctttaaaggagatccagcgttggatactggataatatcctatctagcataaacatctccgtctacgctaaggcctacgtgaaaaaaaagtcaatcaaggacaatgccagatttcacaaaagacaggaggtgttgctgaccctggacgtgagtaacttcttcgatagcattagcagtgataagatctataacctgttcctggaccttggctacaaagaggacgttgttgtcatgctgacaaatctctgctgcttgaacggatggctgccccaaggtgccccaaccagtccaatgctgtctaacattatcctgagacagtttgacaatgtcatgggaaaatataccaacgaaaagaaaatccggtatactcgctatgcagatgatatgacttttagcgggacatttaatcccggacagatcatatcagtagttcggaaggaactgttccgactcgggcttcagctcaatgagaacaagacaagggtgcgcaggaaggggcagtgtcaggaagtgacgggtattgtagtgaacgaaaaattgcagctcccgaaaaatgtgcgaaaaaagatcagacaggatctgtactacatcaggaagtacggccttgagagccatatggagtactgcgatatttccaaagagaagtatttgcagcatctgaagggtcggatccaatacggcctattcattaacccttatgactacgaattacaaggctatctatcctaccttgagaatatgtacgggcagtattga

SEQ ID NO: 9781 - RNA, 1026 nt, synthetic construct
  source 1..1026: mol_type = other RNA
atgaattgggacaaatactgcaacgaattttgcaaagaagcggagcacaatggtaaaaacgctacctactgtaatacctggctgcagtacgcaaagtcgctgtatgagaagaagctaccaatcatttacaaccagaagcacctgtgcctgcttctcggctacaaggaagaatatatatacgccgcttccaattctgcaataaacttctatcggacctataaaattcccaagaagaacggaggaacacgagagatcagtgagcccttgcccagtctgaaagaaattcagaggtggatcctggataacgtgcttgcccctgtaaacatttctgtgtatgcaaaagcctacgtcaagaaaaagagcatcaaggagaacgccaggttccataagagacaacctatagtactgtcccttgacgtggagcggtttttcgacagcattacttcagacaaaatctattccctcttcctaaaactcggctataaagaagatgtctccgttctgttgacgaatctgtgttgtcttaatgggtgcttaccacaaggtgcccctactagccccatgctcagcaacatcgtgttgactgagtttgacaatatcattggcaaatacaccaatgaaaagaagattcggtacacaagatacgctgatgacatgaccttttctggagacttcaagcctgggcagatcatctctttcgtgaagtacaatctcagtaacctgggcttaaagctcaatgagcgcaagatcaggacacgcaaaaaatgccagcgccaagaggtcacaggtattgttgtgaatgaaaagatgcagttaccaaagccggtccgaaagcagattaggcaggaaatgtattacgttagaaaatacggactggagtcacacatgcagtactgtgatatatcaaaggagaactatttgcagcatcttaaaggccgtatccaatatgggctgtttatcaacccatatgattacgagctgcaggattatctcggctacctggacaaagtgtacgggaagtattga

SEQ ID NO: 9782 - RNA, 1020 nt, synthetic construct
  source 1..1020: mol_type = other RNA
atggattgggaggattacaaaaacgaattcatcagagtagccaagaaaaatgaaaagaacgaggattattgcgacaaatggctgaagtacgctaagaagctttatgataaacgcttgccaattatcttcaatcaggagcatctgtgcctgctgctagggtacaaaaagcagtacgtctactcagtctctaattccccggcagacttttaccggtattataagatacccaaaaagaacggcaactttcggcagattagtgagcccctcccttcgctgaaagagattcagaaatggatccttgacaatatcctggtgaacgtcgatacaagtgtgtacgcaaaggcctacataaaaaagaagtcaatcaaggacaacgctcgatttcatcgtaagcaaaaggttctcctttcactcgacatcaagaactttttcgacagcatctcctctgataagattttcgatctgttctggaatttgggctataaagaggatgtggtggtcatgctgaccaacctttgctgtctcaatggtagtcttcctcagggagcccccacatccccaatgctgtctaacatagtgttagaagactttgacaatgagattggactgtataccatggaacagaaaatcaggtatacaaggtatgccgacgacatgactttttctggcgacttccaccctggtaaaataatctccaaagttaaacgccagttaaatgatctcggcttaaaactgaatgatgagaaaacgcgaaccagaggaagaggacaaaggcaggaggtgactgggatcgtggttaacgaaaagatgcagctgccccgccctgaaaggaagaagattcggcaagaaatgcactatattataaagtacgggatcgagagccacctggagtattgtaaaatcgaaaaggcgaactacctgagccatctcaagggcaaaattgagtacgggttgttcgtaaacccatatgattacgaattgaaggagtacctaagctacctcaataatattaaggactga

SEQ ID NO: 9783 - RNA, 1059 nt, synthetic construct
  source 1..1059: mol_type = other RNA
atgactatactgttggtgttggtagaaggctctttcttcatcatgcaatgggaaatttacaaacggaagtttacgcacaaggccaaaagcgccagatttgatgaggggtacatcgaacgatgccttaattatgcagagaacctgcataagcagggggttcccatcatttatgacatcgagcacttttctcatctggtcggctatgacgtgagctatcttctacgggcaagtaatgcccaggctaggttctaccgccattttaccataccaaagaagaacaacacagagcgatccatatcggagcctctgcctagcttaaaagaagttcagaggtggattctcgataacatcttggataagctggccttatcccgctttgccaaaggattcgttaaaaaccggaacattaaagagaatgcgaggttccatagaaaacagcgttacgtgctgagcctcgatattaagaacttcttcccgagcatcaagtacaaacaggtctttcacctcttttcctctattgggtattgtgaatcagtgagcaccctgttatcaaatctgtgcacactagataatagtctgccccaaggggctcctacttccccagctatctctaacttggtctgtcgacgggtggacagtagactgtcaggcttcgccctgaagaataaaatacggtacacccgttacgcagatgatattacgttctcaggtgactttgacccaggaaggatcctcaggttcacatctaaagtgctgagcgagtctaagttcactgtcaacaagaccaagacaagacttatggaacagcaccaacgccaggaggtcaccggcatcgtagtgaattccaagatgcaagcgcccagggaacttagaaagaaactccgccagcagatctattatattaaggagtttggtttggagagtcacctgaaggccaccaataataaacgcgctaactacctttcccacctcaagggcctcgctggattcgtgctgtttattaataacaaggactcggacgcaaaagaggccatcgactttctggaaactttctcctga

SEQ ID NO: 9784 - RNA, 1047 nt, synthetic construct
  source 1..1047: mol_type = other RNA
atgggcttagtcgaaaagaaattcaattgggaagactatagtgaaaagtttacagttttggcacgtaatgagggacgagacgccatctacgccgagctatgcctctcctatgcccaccgcctttattccaacaatatccctattatctacgacgttgagcacttgtgcaaacttgtgggctacgataaatattacgtgctgggagcctcttacgaaacagagaagttctacaggaaattcaaaatccccaagaaatcagggggttttcggactattcacgagcctctgcccagtctgaaggagattcagagatggattctggataacatcctctataacatcaacattagcaaacatgctaagggcttcatacatgaccttagcataaaggataatgcaaagtatcatcgcaatcaaccttgcgtgctgtccttagatatcaaagacttctttccctccatcatgcggcaccgggtttatgggatatatcggagcattggatatacccagctcatttcaaatatcctatctcgcatatgtacccttaacgaatctctgccgcaaggcgcgccaacttctcccgctctctcgaacatcatttgtttcaatctggatcgtcgactggctggcttcagtaagaaatacgactacaggtacaccagatacgctgacgatatcacgatttccggtaacatcgtagccgggcgcgtgataaggtttgtgaaaaagatcctcggggattacgacttgtttctcaatgacaataagactcgactgatgcaaagacaccagagacaggaagtcacaggcatcgtagtgaacgagaaaatgcagaccccaaaggagattcgccggcatgtcaggcaggaagtgtattacatcaacaagtatggaatggacagccacctggataaaattaaggatgtcaggagcaattacgtgaaacacattatcggtatagtcaactacatcaagtttgtgaacccaaatgacagacatgcagcgcaggccctgtcaattttgatggagaactacaacaagaagtga

SEQ ID NO: 9785 - RNA, 1038 nt, synthetic construct
  source 1..1038: mol_type = other RNA
atgcccagtagcctgatttggaagaaatacagtcaagctttcgccaagaaaggcaagaaggagggacacagcaaggagtacatacatacctgcttgaactatgcagaacaactctataagagatccgcacctattatttttgatccagtgcacttctccctgctagtcgggtattctccaaaatacatcatggccgtgactaacagtccggataatttttatcgacagtttagcatctccaagaaaaacgggggctcacggaatatcactgagcctctgccctcactgaaggagatacagcactggattctgaccaacatcctgaacaacattcctgtttcgaagtacgcaaaagcctacatcagcaaggaatccatcaaatccaatgctcggttccaccgaaaacagccaacagtcttatgtctcgatatcaaagacttttttggatccattcacggcggcattattttcaatctctttcgcaccatcggctaccgttcttctatagccagtttgctgaccaacctctgcatatatgatgatgcactgcctcagggtgccccaacttctccggcgttgtcgaatatcattatgaaggggttcgaccagcgcgcagccggtttctgtaagaaaagggagatcagatatactaggtacgctgatgacctgacatttagcggaacgttcttcccaaaggaaataatcagattcatcacatctgcgctgtcagaccttaagatggacttgaatcccaccaaaacgcgtattttaggacagggacagcaacagcgggtaacagggatcgtggtgaatgagaagatgcaggttccccggaaaaccaggagaaacctaaggcaatcaattttctacatcaagaagtacggtatcagctctcatcagaaccatgaaaaaatctacaagagcaactatgtccgccaccttcttggcatagccaaccatattctgtttattaatcccaaagacgccgacgctctcaatgctttatccgtgcttaaacctctgctcaataaaaagtga

SEQ ID NO: 9786 - RNA, 1026 nt, synthetic construct
  source 1..1026: mol_type = other RNA
atgaactggaagaagtatcggaaagagtttaccattcaggctactgccaagtctctcgacgagaagagcatgcagcacgcgctgagctacgctcgcggcttatacaaagccaatctccctatcatattcagtcagaaccatcttagcaggctcgtggggtacaatattgactacattagaaacgcctcatctaccaaaagtgatcagttttatcgatgctacaagattaagaagaagtcctctgataccatgcgtactatttgcgaaccgttgccctccctgaaggaaatccagaggtggatcctggacaacatcctatcccaagtcacaattagtaagttcgcaaaagcctatgttgtgggcttctctattaaagacaatgctaggtttcatctgagacagaaacaggtgctgaggatcgatgtaaaagatttctttccctccattaaagggcagaacgtattccacatctttaagaatatcggttacagcgctgaagtgtccgcaatgttgacagggctgactaccctgaaaaactgcttgcctcagggagcaccaaccagcccaaccctttcgaacatatttatgaataggtgtgacgctagaatagcaggatattgtttagcccgcaaaatccgctatacacggtattcagacgatctcacattcagcggcgaatttgacgttggaaagctgatctcattcattaatatggtcttcaaggattcaggacttctgctgaataagactaagaccaaacagatgtttaagcaccaacgacaattcacaacgggtctagtggtgaacgagcgtataaacgtctgtcgcgagaaaagacggaagctccgacaagagatcttttacatcaagaaatacggcctggatggccacttgatacggaccgaggagaaacgcacgaattacatcatgcatcttctggggctgagtaacttcattactcacattaacgccaatgacagagacgcgctcgaggccaaggaaatcttacggaaatatatcacatga

SEQ ID NO: 9787 - RNA, 1029 nt, synthetic construct
  source 1..1029: mol_type = other RNA
atggaatggcagcaatacaaggccttgctcatcgcagaggcccaggctaaagggtacagtgacgaaaagttgttagagacgctcgattatgccaacaacctgatcaataaatcattaccggtcatttatgacctgaaacacctgagcttacttgtgggctacaagacagcctacatccagcgggcaacccaccgcagtcaattcttctataggcggtttgagatacgaaaaaaatcgggagccacaagggttatattcgagcctctcccatctttgaaagaaatccaactgtggatcctgaaaaacattctgaacaattgtccgatctccaagtacgctaaggcctacgtaagaaagaaatctataaaggatgccgcacgatttcacaagaaccagaaatatgtggtgacaattgatatcgtgcagttcttcgagtttataaattatcccactgttcttggtaagtttattctaatgggatactcaagagaagtatccacgatcctcaccaagctctgttgcaaaaacgacagcctgccccagggtgctcctacctctccctcactgagcaatatcgtctttgcagacatcgatttcgaaatttccgagtactgctatgctaacaacatcagatatacacggtacgccgacgacctgattttcagtggcgatctggaacctaagcttttgataggaaaaattgaggggattctgctgaataatgggttcattttgaacaacagcaagactagaatcatgaggccatggcagcgccaaattgtcactggccttatcgtgaatgagaagagcaaagttcaggtgccaattgaggcgaggcgcaagctgcgtcaggaaatgtattacatcaataaattcggcctcgactcccatctgtcctacaccaagaactataaagcgaagtatctgatacatctacttggcgtggctaagtacatgttttttatcaaccccaatgataccaaggtcgcaaattacatctaccagctcgagtcttatattaacaattga

SEQ ID NO: 9788 - RNA, 1113 nt, synthetic construct
  source 1..1113: mol_type = other RNA
atgatgcctttgaggttacgcctaagagattacataatctcctacaaccactgcaatgccgctgtttcatcttctattatggtgtggcagacatatcaagccgactttactgccaaggctttagctgcacgacggcctatagctgaaacggaaatcctcctggcgtacgcaaaaaatattcatgacaaagggatgcctattatctatgacatcggccacttgagtcttctagttggttacaaggtcgacttcctggtggctgcatcaacctatccacgcgcttactatcgaaacttcaggatcaagaagaaatctggggcctcacgtgtgattagtgagcccctcccctctcttaaggctatccagacctggatcctcgaaaacatactggagaagttcgaggtgtccctttacgccaaggcctacgttaaaggcagaagtatcaaagagaacgcccggtttcataggaaccagaataatgtgctgaccattgatatcaaaaacttctttggatccatcactaaggtgcgcattatttccttttttagctcccttggatattcgcgtcaggttgcgctcctgctggcaaggttatgctgcaaaaatagtcgattgccacagggagcccccacaagcccaacactgagcaatatagtcctggtggccttcgatgagaagctgtttaacgtgtgtagcctgaacaaagtccggtttactagatatgcagacgatatcacgtttagctatgagaacaaaaacctcaccggccccttgatcgagtacgcacgggaactactccggggggaaggtctggtactgaatagagacaaaactagattgatggagcggcatcagagacaagaagtaaccggagtgattgtgaacaagaagcttcaggtgcctattgagatcaggaaggatctccgccagattttctactacataaacaagttcggcctggactctcacattgagcgcattcaagaaaaaaggtcacgttatctgtatcacgtactggggctgtgtaatttcgtcctcttcatcaatccgaatgacaaggaggtcaagggctacctgatcacagcccgcgattaccttaccagcgaagagtga

SEQ ID NO: 9789 - RNA, 1038 nt, synthetic construct
  source 1..1038: mol_type = other RNA
atgaagtgggaagtgctgaaagacaagatcataaaagagtgtaagttcgcaaacaagagtgagaagtatactagcgcttatctagagtactgccgaaagctttatgaaaaggagctgcccattatcgcaagtcctaaacattttagcttgttggtgggcatcgatcacgaatacgtgtgcaaaatggcctatagccaaaatttgttttaccggtccttcaagattaataaaagcaacggaaagaagcgggagatcaaagaacctctcccagacctgaaatatgttcagaagtggatcctgaacaacattctgaacaaagtggaggtcagtgattacgctaaggccttcgtcaaaaaccgtacactcaaacataacgcgaagttccataaaaaacagaatgtcgtagtcactcttgacataaaggattttttcccatccattaccctctatgacgtggctgacatctttaaagatctaggttactttgagaacgttgccttatttctcgcgaacctgtgctgttataaaaaacagctgccccaaggggctcctacatcaccatacctgtccaatctcagattccgcaagatcgacgactccatttctagttacaccaaagagctgaatatcagatacaccaggtatgccgatgacatgacattctctggagatttcaatccgcaccagttaattaaaaagatttccgacatcatccacaactctggctttaacataaattcaaagaagacccgcgtggcctacaagaacgcacgacaggaagtgacaggaatagtagtgaacagccacatgcaagtttcgaagaataagaggagggacatccggcagcaggtgtactacatcaagaaattcggtctggattctcaccttacgcatatacaggaaactagagccaattatttgaatcacctgctgggccagattaatttctgtctttttgtcaatcccaaggataatgagatgaaacagtactttgggcagattaaggatctcatgcaaaagcagaactcagatgactga

SEQ ID NO: 9790 - RNA, 1029 nt, synthetic construct
  source 1..1029: mol_type = other RNA
atgaagtgggaagtggtagagaaaaacatcaaaaaggagtgcaaggcaaggcacaaagatagtgtatacattcagaagtacatcgcctactcaaaaaacctcttcgacaacgatcttcctatcatcagctccccagagcatttttccctgctgattggaatggagcaccagtatgtgtgtaatatggcatatgcggccgacagattctaccgccatttcacgatccccaagagcaatggaaagaagcgagaaatagacgagcccctgcctgacctgaagtttgttcagtcatggatcctcgaaaacattttagaaaagtgcccaatctccgaatacgcgaaagcttattacaaaggccgcacactgaagcataatgcaagattccaccgcgctcagtcaatagtcctaaccatggacattaaggagttttttagctccataagcgtccgtgacgtgactaagatctttgaggacatgggttatttccacgaactgtcttgtttccttgcctacctgtgctgtttgaataacgtgctgccgcaaggcgcacctactagcccctatttgagcaacctgagaatgaggatccttgacaataaaatctctcagtacacatcccagaggaagatccggtatacccggtatgctgatgatctgacttttagtggggacttcaatccccaccacgttatcaaagacatttcgaagctagtttatgatgagggctttgtgataaaccctgataaaaccagggtggctcgtcgaaacgccagacaggaagttacagggattgtcgtgaactctcacatgcaaatttctaaagagaagcgcaagcaaattcggcagcaagtctattacattaaaaaattcggggtggagagtcatctcgaacggataaatgagtcaagggccaattaccttaatcatctcttaggtcagatcaattttgccctcttcgtcaacccaaaagatgaggagatgaaggaatacttcaacgtgattaagaccctgttggtggatcagaactga

SEQ ID NO: 9791 - RNA, 1041 nt, synthetic construct
  source 1..1041: mol_type = other RNA
atggaatggagtacactgagaaatgccattattcggaaatgtaaagaacatcgtaagggtgacgaatacagcgaggcactgctgtcttattccgaaaagttgtttgtccagaacctcccgataatcacctgcccggcccatctgagtcttctcataggattagagcacgactatgtatgccgaatggctttttcgccagaacacttttaccgccatttcaccattaagaaggcgaacggtaaagacaggtcaatagatgagcccttgccagacctaaaattcgtacagcagtggattctgtccaacatcttggaaaatgtccccgtgtctacctatgccaaggcttttatcaagaaacggggggtgaaggagaacgctcggttccacagggcccaaacagtggtggttacaatggatatcaaggatttcttcccatctatcaacttacagcagatcgtgaacatattttgtaccctcggatactcaaacgacgtgagcaactttatcgctcacctgtgttgctatcactattctttgccccagggcgcaccaacttctccttacctctcaaacatcagaatgcgcgagtttgacaaaaaagtggttgactattccagtcccctgaagattaggtatacccggtacgcagatgacatttcactgtccggcaatttcaatcctcacactgcaatcaagtaccttagtagccttgtcttcaaagaggggttttccattaatgccgaaaaaacacgcgtcgcctaccagaatgcccgacaagagatcactggcatcgtggttaatagccacatgcaggtccctaaagctcagcgcaaaaagatcagacaggaggtgtactacattaagaagtacgggctcgattcccatctgagccatataagcgagactagagaaaactatctcaaccaccttctaggaaaaatcaatttcgcgaggtacatcaatcctaaggatcaagaaatgcaagagtattacgagacgattaagaagattctgattctgttccgtaatgagagcttctga

SEQ ID NO: 9792 - RNA, 1092 nt, synthetic construct
  source 1..1092: mol_type = other RNA
atgtatgcaaagaattctttggtagtacagtccataaaatgctatgtagctttgctgggggattacatgaagaaaaactactacgacaagatcattctggagtgcaaaaagcacaacaagtcccaggagttcgtggatacttacctggcctattatgagaacctgacccagaaaggcctgcccgtgatatcaagtcctaaacactttagcatgctggttgggatggatcacgattatatttgctccatggcgtacagtccaaagcatttttacaggacattttacatcgaaaaggcaaatggcatgaagagaaaaatatcggaacccttaccagatttgaagtacgttcagaaatggatccttaaaaacatcctggagaaagtgaaggtgagtccatacgctaaagcttatgtctccaactcttcagtgaaacataatgcccgatttcacaggaagcaaaaggtcgtgctctctatggacatcaagagcttctttccttccgtgaaagtgaagtctatcgtggatattttcaagtcctttggctacaccgagaatgtcagctgctttctcgcctacctgtgttgtaataactactgtctgccgcaaggcgctccaacgtcaccctatctttcaaacctgcgtctgctaaagttcgacagcataattagccaatacacctcccttcggaagattcgctatactcgctacgccgacgacttaacattcagtggtgacttcgacccttctaacctcataaggtttgtgtctaaatgtgtgtgggaggaaggattcaaaatcaacagcgacaagactagagtcgcctatggaaatacacggcaggaagttaccgggatcgtggttaatgataaaatgcagatccccaaaaccggacggaagaagattcgacaggaggtttattacattagaaagtatggtgtcagcagtcatctctcacatattaatgagacacgcgtccactatcttaaccacctcttggggaaaattaacttcgcactattcgtgaatcctaatgatatcgaaatgaagggctactacgactatattatcagcatcatcgaagatgtcgactga

SEQ ID NO: 9793 - RNA, 1044 nt, synthetic construct
  source 1..1044: mol_type = other RNA
atgatggattgggacaaatttaagacacaagctatccaaaaggcacgtgtggatcgaattcgcgatatagagcttcggagctatctgtcctatgctgagaagcttgtgaaacagaatctgcctgtgatcgtagacgcagcatccctggcatcattcgttggcatcgatttgctgtatctctgtcaaatggcctatgggactgagtatttctacaggaggttccagataagcaagaagagcgggggtatgcgtgaaatcgctgagccattaccagatctgaaggctgtccagaattggattctgaccaacattcttaattacacttcagtgagtaagtacgccaaggcctacgtcaagaaccagtcaatcaagtctaacgcccggtttcaccgggaacagaaagtgctcgtctccatggatgtaaaggatttctttccgagcatcaaaatagaggacgtgtttaagattttcgtcaacctgggatatattgagaacgtgtcttggtttttagcccatctttgctgcctgaatggcgaactacctcagggagcccccacctctccctacctctccaatctaagaatgaggaacttcgacagcgaagtgggcacttacgccttggaaaacggctggagatacactagatatgccgacgacctcacgttcagtggtgatgggaatgtgaaggaactcatccggacagttagtgggttgctgctgaaaaaccacttgtaccccaatacaaagaagacgagagtcgctcgccaaaacaccaggcaggaagttaccggcattgtggttaataaaaaaatccaaaccgcgaagcagtatcgaaagaaaattcgccaggaggtgtattacatcaaaaagtacggattggactcacacctgaccttttgtcagatctcccagaaaaactacctaaatcatctgcagggaaagatactgtatgcgctgttcgtaaaccctaaagacaaagagcttctcgagtacaaagagtttattagcgacctcctgatcaagacaaaatcgtctttaaaatga

SEQ ID NO: 9794 - RNA, 1035 nt, synthetic construct
  source 1..1035: mol_type = other RNA
atggattggaatgagttctgcaatcatgccaaattccaagcatccgtggatggaattaatgaagaggaactgaaaaagtaccttcagtatgcaaaacgcctggttagaaaggacctccccgtgattgtggacccatactcactggccaaattcatcggcatcgacttccactatctgtgcaacatggcttatggaacagagcatttctatcgaaactttctgatccccaagaaaagcggtggcacccgggagatttctgaacccctacctgacctcaagcaagttcagcactggatgctcaacaatatcctgaactacatcgagatctctaaatacgccaaggcgtatgtaaaaaaacagggcgtgaaatctaatgcccgcttccatagggggcagaaagtccttgtgtcgatggatgttaaagacttcttccctagcattaagaagatagacatctttcacgtattccacggcctgggttacgatgaaaacgtgtcctggtttatggcctacttatgttgcttaaatggtgagctgccacagggagcccctacctcaccatacttgagcaacattatcatgagttcttttgacaaggacgttgccagttacgcaatcgaaaagaagtggcgatatactaggtatgctgatgatctcacattttccggcgacggaaacgtggaagagcttatacgggtagtcagcgaattgctcctgaagtatcacctgtaccccaataccaaaaagactagagtggcttaccaaaacgctcggcaagaggtcacggggatcgtggtcaataagaaactccaggctgcacgtcagtacaggcgcaagatcagacaggaggtgtactacataaagaagtatggcattgagagtcacattgcgttttgtcagatttcacagaagaactatctggaacatttgcaagggaaaatagggtacgccctgtatgtgaacccgaaggatattgagcttttagagtaccagaagtttctacatgaagtctccgatagcttgcagaatcagtga

SEQ ID NO: 9795 - RNA, 1056 nt, synthetic construct
  source 1..1056: mol_type = other RNA
atgcagaataaaaactgcacttgggaccaataccgatctgcattcatcgaattagctcagaagagtaacaagagcaagccgtacatacgaaggtgtctggaatacgccgaacccatttttgaaagaggactgcccatcatctttgatgttcaccacctttcaaagctcaccggcagaagcgcaaaacacatcttctccctgagtaggtttgcccgctgccattaccgctccttttcaattacaaagaagagcggaggagagaggaggattgatgagccagtggaggatttgaaatatatccaacggtggattctacacgagatcctggagcgcttaccagtgagcccatacgccaaagcgtacgtgcctgggcttagcgtgcgggacaacgcacgcttccatcagaaccaagacaagatcttgaccgtagatattaaagactttttccccagcgtgcggagtaagtcagtgtttttcgtgtttcggaatgctggttatagcgacacagttgcaacgattctatctaatctgtgttgcctggaacatcgcttgccccagggtgcccctacatcgccaatgctgtctaatcttgtgttctcagatctcgacaaggtcatagcggatttctccatacagcgggggctcagatatacccgttatgccgatgacctgaccatctctggctctttagacatcagagagactctccattttctttatccgctgctgaacaacaggggcttccgtctgaaccccgagaaaactagggtgctctcccgaaatatgagacaggccgtcaccggaatcgtcgttaatcaatacctgcaggtccctctcaacattcgcaagaacatcagacaggacgtcttctacataagaaaattcgggctcaaatcccatatggaacacatcgacgaaaccggcgataattatattgacaggctgattggcatcgtggggtacgctatttttgttaatcctcacgacaatgagatgaaggattatttctcctacctgcggagtttgaagaacgatgagaaagtacagacagcttga

SEQ ID NO: 9796 - RNA, 1071 nt, synthetic construct
  source 1..1071: mol_type = other RNA
atgaaggagtcaaactattcatggaacgagtacaaatttcggttcgaacagaaggctatcgacttcggccacccgctgtctaagatcgagggtctgctgctctatgcacagaaactttttgccgcaaatctccccgttatttacgacttacgtcaccttagctacctgactggataccgtgaggaatatatgctgcgggccacgagccgaccagaaaatttctaccgatactttaggatagcaaaaaagaacggccatagtagagagatttcggaacccttgcccggactaaaagagatccaatattggctgctcgacaatgtgatcaaaaaactgcctccaaacaagctgaacaacgcctatcttgagggcagatccattatatccaacgcgaagttccacactaaacagcagaagctcctgaacattgacatcgagaaatacttcaacaacatcaccaaaaagcaggtggaaggcttcttctctagtctcggatacaatttagaggtgtcatctctcatagccggtctgttgactatgaaggatgggcttcctcagggttcgccttccagcccatacttgagctctatcatgaccgtccaaatcgatgtaacacttctcgccgagtgcagggcattggggctaagatattcccgctatgccgatgatatcagtatctccggagaatttaataccgaggaagtggtcaaaaaggttaatgccgtgctgttagcgaatgggttcaaagctaatagcagaaagaccacagtgaaaaagtctcaccaaagacagatggtaacaggggtggtcgtcaacaagaagttgagcgtcaagaaaaaagtgattaaggaactgcgccaggagctgtactacattcataagtatggcctggaacaacatctgcgaaggaaggagatacagaggcgcaattatctgaacgttctcgaaggcaaactgaattacttttgttctgtgaagcggaacaatgctgagctatcatatattcggaggatgctctccgaaatcaagattcgcgagagcgctgagcagcttcggagtgcttttgaatga

SEQ ID NO: 9797 - RNA, 1044 nt, synthetic construct
  source 1..1044: mol_type = other RNA
atgcaggagtcaatcttctccaaaaacgaatacctgttcaaacttgagaagaaagctcaagagctggggttaccaaatcagtccgtgctcgggctgctcagttacgccaaaactctgcaagagaagaatctgcccgtgatcttcgacatcaaacacctgtcttacctgacaggtttcaaggtcgattatatcctgcgcgccattaagtctcctgacaagttctataggaccttttttatcaggaagaagaacggcagatctcggcagattaaggagccgctgccaggattgaagtctattcagtactggatactcaacaacattattaagaaggtccccacgtcgcgttttaacaatgcttattcgatagggaaatccaccgtcagcaacgcgaaattccatactaaacagcaattcgtgctaaacctagacatcgaggcttttttcgacaatataacggcctcaatggtaagcttgttcttttccaatttgggttataacagcgatgttgtttccgtattgagtagtctctgcacattaaatggaagtattcctcaaggatctccttctagcccctacctctccagcatcctgaccatcgacatcgatgaaaatctgtacaagtactgtcgagaacggaatcttcgctacagcaggtatgcagatgacatcaccattagcggctcatttcacgcaggagtggtcatcgccggtgtgagaaaactgctgaatagccttaacttctccattaatgactcaaagacaagggtgaagtcacagcaccagagacagctagttacagggctggttgtgaacaaaaagatagccgtcaaacgatccgatttgaaagaatttcgccaggaaatgtattacattatgaagttcggcatcgagagccatgtaataaagcagaacgtgactaaaaacaactatatcgatcatctcctgggcaaggcaaatttttatctctttgtgcggaagaaagatagtgacctttttaagtacaagacctaccttattgacgtgttaaaaggcaaaaagtga

SEQ ID NO: 9798 - RNA, 1044 nt, synthetic construct
  source 1..1044: mol_type = other RNA
atgaattacaacaagtactccataatcttcaagcaggaggcgaacaaccagggactgtctgaggacgagattgaagtgtacctgacatatgccaaagttctcctggacaaatccctccctatcatttacaatcaggatcatctctcgaaattactcggcattcacccgatctacttgtatactctgactaatagctccgacaaattctacaggaagttcaaaatcaacaagaagaacggcaagaaaagaaatatagaagagccactgagtatcttaaaagaagctcagtactggattcttgaacacattttgcttaagtgctcatgtagcaactataccaaagcatttaaagccaactcatccatcaaagagaatgccaagttccacaaaaagcagaatatagtgatcaatctggacatcgaagattactttggcactatcaagggccacaaagtctacgaattttttcgcaccttggggtataacaacgaggtaagcatcatgctgaccaagatatgcacaaataaagattctctgcctcaggggagcccaacttccccctacctttctaacattataacggagaacttggacaataagctggctgagctggccaagaaggaggaatatggactgagatatacccgatatgcagatgacatcacctttagtaccaacaacaagattaacattacgaatctcatcatcgatacaaaatacgtcctaaagcaagagggtttcaagattaactataagaagaccaaggtcatttctagcaataagcggcaaatggtaacaggcattgtggttaatgacaaactccaggtgagtaagcaacagcgcaggaaggtgaggcaggctatgtattacatcgagaaatatgatctggagtcacatattcggaacattggttggcaaaagggaaaggataaatatttacgtcatctgctagggaatatcaattttgtgcttttcatcaatcccaaggacaaagaacaccttaagtacaaatcacagctcatacagaaactgaaagaaatctga

SEQ ID NO: 9799 - RNA, 1041 nt, synthetic construct
  source 1..1041: mol_type = other RNA
atgttcacgaccaaacccagcctgagcgagtacaaactctccttctcaaaggaggctcgccgcaaggactacaacgattacgacattaaagaattcctggactatgcggagatactgtatctcaaagacctgcccataatctacaacatcaaacactttagcctgttagtgggctataaggagacatatttagcacgagctgccgaaacaacatttaacttttaccgctcttttgacatcagaaagaggaatggaaaactgcggaaaatcgatgaacctctcccctctctcaaggagatccaaacctggattctgactaatatcctgtacaaactcgactgcagcaaatacagcaaggcatataagaaaaagaactcgatcaagaccaacgccaagttccaccgggatcaggatgtcgtattgtccctggacgtcaaagattatttcgggtcaattcgtgtagaggacgtggagttttttttcgcagaccttggctacgaagaaaatttgtcaggcatgctcgcatctctatgctgtcttaacgggagcctgcctcaaggctccccaaccagtccatatctgagtaacctcataactatcgagctggacaacgatctttctgaattggccaagttatataatgtccggtacactaggtacgctgatgacattacttttagtggaacctttacagttggtgtgctaattaataaagccaaggaggtggccaccagatatggcttcgaaattaacgataagaagactagggccatggggaaacatgaacagcaactggtgacgggaatcgtggttaatacaaagaagttgcaggtgtccagagagcggagaaaggatttgcgtcagcagctgtactatatacagaaattcggtttggagaatcacctggcgaagcgaaacattaataagaggaactatcttcagcatctgctcgggctaaccaatcatatccttatggtcaatccgaaggatgaggaagctctgcgctacaaacaggttattttctcctacatgaacgactga

SEQ ID NO: 9800 - RNA, 1041 nt, synthetic construct
  source 1..1041: mol_type = other RNA
atgaattttctgacatacgagcagaaatttaaggaacaggccgagctaagcggcaaatctgagtattatattgacgagtgccttaattatgccaggaacctcaacaagaatggtctgcctattatttacgacgatgtccacctgagcaaactgttgggcatccgcttggatttcctgatcagtattagcaattcacagaaagactactatcggtttttctccatttctaaaagtaacgggaagtcacggaaaattgcagaaccactgcccctgctgaaagaaatacagcatttcatccttgacaacattctacttaaagtcccatgttctgtctattcaaaggcctacaaaccaggcgctaaattaaagagcaatgccaaatttcaccgcaaccagcctgtcctgatcaagatggatctcaaagactattttccaagtctggacgaacatagagtgtataagttcttccatcaccttggatacaaagattctgtgtccgtgttgctcgctaagttgtgcacattgaacaaggcattaccgcaaggagcaccgacctcaccctacctcagcaacctcctgacaagggagctggatgaagatatctacctgttttgcaaagagaatgggaatctaagatacactcgttacgccgacgatatttccatctccgggaatatgatccccactaatataatcaagggtgtggtaaagatcatcgctaaacacggcctcaagattaacaaagaaaagaccgcggtgatccctaacagtaataggcaggttgttacgggcgttgtggtaaaccaaaagcttcaggcttctaaaccctatagacactccatacgcctcgagatgcattactgtatgcggtatggaatcgaggaccatataaagaagtcgaagaagattagcaacaacaccaacaagcgaaagtactgtcagcaaatgctgggaaaggtgaatcactgcctccagttaaaccctaatgacagcgaaatgaagtcctaccgagatttcctgctgcaaaagatcgtggagtga

SEQ ID NO: 9801 - RNA, 1056 nt, synthetic construct
  source 1..1056: mol_type = other RNA
atgaatttttcaacctaccagcgggaattcatcgccgaagccagaaagcatgacaagaatgatgaatacatagagaagtgtctcgcatatgccaagaatttggtagataaacgccttccaatcatttacgacgagaagcacttttcccagctggtagggattgacttagattaccttctttccgccgccaatagcccaaagcacttctatcgatattttaccatcccaaaaaggaacggaaagatccggcggatatccgagcccctaccggtactgaaggaggcgcagtactacattctaaacaatatcctcaagaaggtgccttgctctatctatgcgaaggcctacaaacctggggctactctgaaaggcaacgcaaaattccacaggaaacagcccatcctggtcaaacttgatctgaaggactattttccgtctctgcacgagagtcgcgtgttccagttatttcatcagagtttcgggtacggcaagtcggtgtctattttaatgagtaagttgtgcacgctggatggaggcctaccccaaggtgcccccaccagtccatacctctccaacctgctcacctcagagatggatgacaagatataccaattttgcagctctaacggcaacctgcgctatacaagatatgctgacgacattagcattagcggatccatgaaccctagtgatataatctccggggtgtcacgaattgtgagcgagcatcatctgcagatcaacaaatcaaaaactgcagtgttcagacctcataagagacaggtcgtcacaggagtcgttgtgaacaataaaatccaagctcccaaggactaccggcgcagcatcagactggaaatgcactattgtatgaaatacggtattgagtcacacattttgagggctactaagaggtcttccgacgcagttgaccgtgttaaattctgccagagcatgttgggaaaaatcaactattgtctgcaactgaattctaaagatacagaaatgcagaggtatcgtgattacatgctcgaacagctccacggcaatgctcagtga

SEQ ID NO: 9802 - RNA, 1083 nt, synthetic construct
  source 1..1083: mol_type = other RNA
atgaactttataacttacgagaagatgttcacagaggctgcccgtaaggctggcaaatctgatgattacatcaagaactgcattaactatgccaaagcacttgccgataagcatgtgccaattatcttcgacatccaccattttagccagctgatcggtatcaggctggacttcttgctcgctatttctaattccccaagaaacttctacagatatttcaccatccctaaagcatcgggcaaatttaggaaaatagcagaacctctgccaatcctgaaagacatccagcactacatcctccataacatcctgaaaaagattccgtgcagtatttatgcgaaagctttcaagccccgcgcaagtctcaaggggaatgccaagtttcacaggaatcaacagacactaatcaagctggatattaccgattactttagtaatctgcacgaatcaaaggtcttctacttgttttttcacaccgtcggatacagcaagagcttgtctactctcctgacaaagctgtgtactctgaatggcgggttgccacaaggggctcccacatccccctacttgtctaacttactgaccattgacatggacaccgccatttttcagttctgcagcgaaaacgggggactgcgctacacgagatacgcagacgacatatctatttccggagctatgaacccctccagcgtgatccacgccgtaacgaaaatagttagtgacaatggcctgaaaattaacaagctcaagacagccgtgataaaacaccacagccggcagatcgtcaccggtgtggtggttaatcagaagcttcaggcccctaaaaactatcgaaaatcaatccggctagagatgtattactgccagaagtacggcctgatttcccatttacagaagtcaggtaaatcgtctactcctcttgatgcagcgaattattgtcagtcacttcttggaaagatcaactattgtctacaactcaatgcctatgatactgagatgaaaaagtatcgggagtacatgctgaagcagttccatcattataatcaatccctctattccgccagccaggctttaaagtga

SEQ ID NO: 9803 - RNA, 912 nt, synthetic construct
  source 1..912: mol_type = other RNA
atggagttcaccatttacgacgtattaaagtttaaccccttcatcatcaagaaaattttggctaacaaggacaagtactacaagatattcattatcaagcagaggaatggaaagacacgtcagattactgccccagtgagggagcttaaagtgttacagaagaacattctgaagagcttgctagaaaagatggaatattcaaagttcgctaaggcctatactaagcagaaaagcattaaagacaacgcaaactttcaccagaaacaggccttggtcatctgcctcgacataaagaatttcttcgacaatatcaggttcaacagtgtgaaagatgtctttcagaaaatttccattggcaaggccgagattctggcagaaatctgtacttaccacggaaaactgccacaagggggtgttacatcgccttacctgtccaatctaattatggaacccatcgacaaaaagatatccaacttctgctttaagtacgatctgaattatacgcggtacgctgatgatattaccataagcacccatcttctgtctaaaaatgagcgcgaacgctttgttaagctggtcattgagaatatcaacaacattctgtcagaatacagttttacactcaacgagaagaaaatcaaagtacagtatgcgtaccagcaacaaagagtgacaggcatcatcgtgaataataccatgcaggtgcctaaagaatatcggatgaaaatccgacaggagatctattatataaagaagtatgggctcgattctcacctcatgagaaaccatcaagagaaacagaaatacatcaacatccttaagggcaagataaattacgtgctgtttgttaatcccaaagatgagaagatgaaagaatacctgcattatatcgagaaccacctcagatgttga

SEQ ID NO: 9804 - RNA, 1041 nt, synthetic construct
  source 1..1041: mol_type = other RNA
atggatttaaacgagtatatcgagcagttcaccaaaaacgcaattcacaagctgaatccagaagaaataaatgtgtgcgtccgctacgccaccaatttgatgaataaaggactgcctattatctacgacctaaagcacttatcctaccagaccaaatatgagacaggctttctctatctgtgtatcaactttaaagacaaggtgtatcgccagttttccatcaaaaaacgaaatgggtctgaccgcaatatttccgagcctctccccaatctgaagaacattcagacgtggatcaaaaaaaatatcctggaaaagctgtcggttcacaaggtcgctaaagcatttaggaagaaccagtctatcaaaaacaacgcctatttccacaaaaaccaagatactgtactggccctcgacattaaggacttcttcaataatattgacggcaagactgtgtatctcctgttcaggcggtgtggttacagtagacgtgtgtccaacattttgaaggagttgtgcacctttaatgattgtctgccgcaaggggcacctacaagcccaatcattagcaatttgattttcgctgcgattgacaaccgaatttacaattttaccaggaaggagaatctctactatacacggtacgccgatgatataaccatatctggaaacgacatcaaaatcaagaaggtcatcagcttcatatcaatggtacttaaggagaataacttcgagctcaaccaagacaagatcaaaatcatgcggaagaacagttgccagctggtgacagggattgtgagcaacaactcagttcttaatgcccccaaatacaagattaaagacttaaggaaggagatctattacattcggaagtacggaatagatgatcatatggcctacgttggcatcaaaaaggcgcattatatcgaacacctgatgggtatagcaaacttcatactgttcatcaacaagaacaacaaaatcgctactgaagctcttgattttctaagagaacttcagaagcagagaaatcatcccttttga

SEQ ID NO: 9805 - RNA, 1041 nt, synthetic construct
  source 1..1041: mol_type = other RNA
atgaactggaccgactacaaaaagcagttcgaactgaagtgtgatttgaaaaaaatccctcaggtacaggtcgatgtgtggatcacttacgcaaggtgcttatgggagaaaagctttcctatcatatttgataaggcccacctgagtaaacttctcggctatgagtgtagcctgctagacaagataatccacagacccgggaaattctacaggtcattctcaatttcaaagcgaaacggagaatttcgagagctcaacgctccctacccaacacttaatgagattcaaaagtggatacttgtcaacatcctcgaaaaaaaaaaggtgagtccttatgctaaagcctacattaagagaaagaaaatcctggacaacattcggtttcatacaaatcacgaggtggtgatcaaattagatgtcgatgacttctttggatccatccacaagagcgccataatcaagatcttcaactccatgggttattctcggcagttgtcttttgacctggcttccctctgttgcctgaagaaaagcctcccacaaggtgcgccaacctctccctgcctgagtaatattttctgcgaacaaatcgatgcccgtctatcgaaatacctcaagaaacttaacctgtgctatacccgctactccgatgacattacaattagcggaaatatttccgacgtgcagatcccgcagattatgagcttctgtaagtacttattgtctgactacggcctgaacctgaacgaaaagaagaccaaggttctaaggcagcaccaaaaacagtatgtgacgggcgccgttgttaataagaagatgagtgcagacattaagctgaaaaaggatcttcgccagcagatgtattacatccagaagtatgggctgaattcacatatggtctacaagagaatagaccagcaaaattatgtgtaccatttgatggggaaaatccagtgggtactggcactggagaaatctaatcaggagttcttgcggtataaggagcatctcactgaaattctgaagaacctcaaattttga

SEQ ID NO: 9806 - RNA, 1041 nt, synthetic construct
  source 1..1041: mol_type = other RNA
atgaactggattagctacaaggagaagtttaaggagacatgtcaaaagaagaatatcagcgagattcaaattcagaaatggttggggtacgcaagcgtgctgtatcaaaatggactgcctataatctttgataagaagcacctggccggacttctggggtttaaatgggaactcctgaggaatataatccactctcagacgaagttctatcgaaccttctatatcccaaagaaaagcgggggccggcgatgcctaaaagagccgtatccttcccttaaggaaatccagaactggataaaagacttcattctcaaaaagtgtagcatctccagattcgccaaggcttacgcaccaaaaaggtcagtgtacgaaaatgtacgcttccacaaaaaacatgcggtggtaatgaagtttgacgttgaggacttctttggtagtataaacaaatggcaggtcacttcactgttcgagaaaatgggctataatcaagaccttgcagaaatcctggctggtctatgctgcctcgacaaccatctgccccagggagcccctaccagtccctacctctccaatattttcgccaaagatatcgacaacagactgtctaagtacttgttgaagagaggtctttattacacacgctactcggacgatattactatctcagggaatatttccgataaacaggtgccacagatcattagtttctgcaaatacttactgtctaactacggcttgaggctgaacaatgaaaagaccaaaatacttcggcagcatcagaagcagtatgtgacaggagccgtggtcaacgaaaatgtctctgttgagtcaaagaccaagaaaaagctgcggcaacagatgtactatatccagaagtttggcttagagtcccacatgaatcatctggaaatcaagaagcagaactatgtctaccacttaatgggcaaaatttgttgggtgttgactctcgaaaagaagaacgaggagtttaaacgttataaagatgttctcaaggagctgctcgatgctcccaaaaactga

SEQ ID NO: 9807 - RNA, 1041 nt, synthetic construct
  source 1..1041: mol_type = other RNA
atggactgggggaattatcagaagagattcaagatttctgcgaagaaaaggaatctacccgattcattcatctcagaatgtctggactatgctaagaagctgtatgacaataaggtgcctataatctttgatactgagcatctctctttgctactcggatgcaagattcagtttctctacaagatcacgaacaacttgaataagaactaccgcatctacaaaattccaaagcataacggcaaaatgagaaccataaccgagccttactctgacctgaagaatatccagcaatggattctggttaatatcctgcaaaaaatgcctgttagcatctacgccaaagcttacatctcgaataccagtctgaaatccaatgtccggttccacgtgaagcagcccgtcattattaagcttgacgtacaggacttctttccgagtatccaccaaatcagcttagtgaaactgtttaggaaatatggctatgagctgaacttatccaggatgctctccagactgtgtacctacgagggggttcttccacagggagcaccaacatccccctatattagtaacctgtactgccgccgaattgataatcgcatcggtaagtacataacaaatgcaggcttcaggtatacacggtatagcgatgatatcaccatcagcggtaatatctcagacaaacagatagggaccattattcagttttgtcggaaatgccttgccgaagaaggcttgaaactgaatgaagggaagactcagatattgcgtagccaccatagacaactggtgacgggtgtaattttaaaccaaaagatatccgccggaactaagaagaagaaagatatccgaaaacaggtgtacttcatcaaaaagtacggcctcgaatctcatattgagcacgagaagattgagaaacagaactatatctatcacctcgccggactgatcaactgggtgctttttctcgagaacaacaacaaagaattcctggaatacaaaaagttcgtcaacgagatcataaagcagattaacagctga

SEQ ID NO: 9808 - RNA, 1053 nt, synthetic construct
  source 1..1053: mol_type = other RNA
atggacttctttaagtacatttcagactttacactggccgctaccgagagcgggtacaatgaggaggaaatcttatccttcctgcagtacgcccggacgctgtacgacaagagcctgcctattatctatgaccaggagcacctttccctcctggtcggcttcgattattactgctgtctcttaccaatttcaaattggcaggttgacttctacaaaaagtacgaaatacccaaaaagaacggcggtattcgcattatcgaagagccttatccagccttgaaggagatacagacatggattctgaagcatatccttgagccagcaagcctgaggtatgtttcccctgtggccaaggccttcatgccaggcaaaaatctacgagagaacgcaaggtttcacagaaaacaagaactggtcgtagcgttggatctccacgacttttttggtagtgttaaggcagtctctattttccagctgtttcggaaattcggatacaacaagagtgtgagcatgatgctctcgaagctatgcactctaagaaattctctgccccaaggagctcccacgtccccgatgttgagtaacttgatcttctacgaactggacaaaaaattgttccggtattgtcaagctcgcaatatcagatatacacgctatgcggatgatatgacattcagcggagattctttttctgtctcccatctgattgcctatgtgaaaatgctcgtggggaccaggcattataagttaaacgaagagaaaaccaacgtaatgcgtaaggggtgctgccagaaggttactggagtggtggtgaatgataagatccaggtatcaaaatcatacagagataagatccgacaggaagtgtattactgcataaaatttggggtggctgatcacatgcggaaaatcagcctgccgggctggatcactacccctaccatctacctgcaccatctccttggcaaagtcaactacgtgctccagataaaccccaaggacaaggtgtttcttgagtataggaagtgtctttgtgacctgctgctcaattga

SEQ ID NO: 9809 - RNA, 1038 nt, synthetic construct
  source 1..1038: mol_type = other RNA
atgaattttaaaaaataccgctctgagttccttaaacgggccctcgagcacggctaccaacgctcagaggtggactcgctgctggtttacgcaaaggtgcttttcgacaagaacttacccattatctatgatcaggagcatctgtctctgcttcttgggtatgactatgattatctcttggcactgtgtaatagccagacaatgttctacaagcagtacgaaattcctaaaaaaaacggagccaaaagattgatcctcgaacctttcccaaacctcaaagatattcaaacctggatcctgaaaagcatactggagccggcctcagtgaagatggtgttcccgcaggctaaggcctttatgcccggcaagaacctaagagataatgccaggttccacaggaataccaatgtggtggtcgcgctggacatacacgacttttttggatctgtgaaggagaaatacatctacaacgtgttctacacaatgggctacaaaatgccaattgtggtgatgttaacgaaactgtgcactttgaacgggttcctaccacaaggcgctccaactagccccatgcttagtaatatggttttttccaacatcgacaacaagatcttcaagtattcccgtaagcgatctatcagatatacccgttatgcagatgacatgaccttctccggtaaggaaattgacgtcgagaatctgatccgctatattcggagtctcattgggcacaagcagtttctcttgaatgaagaaaagacaaaggtgatgaggcgcgggtgcagacagatagtcaccggagtagttgtaaacaaggtcctgcaggtccccaagaaatatcgggataaagtgcgacaggaagtctattacagtatgaagtacggctttacttcacacatgagaagcatagagctgccttcctggattagcacagttgaagtatacaagcatcatctgctgggtaaagttaactacatcctccagatcaatcctaaggacacggagtttttgaggtatagggattggttacgggcttga

SEQ ID NO: 9810 - RNA, 1050 nt, synthetic construct
  source 1..1050: mol_type = other RNA
atggacttcaaagagtataagaaagcgtatatcgagcaagccctggccttcggtatctcgacaaatgcaatcgatattgctatcgaatatgccgagcatctgcacaacagaaagttgcccattatatatgatcagcagcatttcttccagctggtcgggtacgatgaagcttacgttatggccattgtgaaccagcctaaaagcttttacaaggagtacagtattcccaaaagaaacggcgacagaaggatcattcatgagccgctcccctctttgaaagagattcagacttggatacttaagtacatactgaatcccggagccaagatctttgtttcaagtgtagcgaaggcttatataccaaaacaatctgtgcgagacaatgctcgttttcacaagcgccaaaagtatgtgctttgccttgatctgaaagactttttcgacagtatcagctttcagcaggttttttccgtgtttcggaatatgggatattccaaggccctcgcaaccctcctctccaatatctgtatcctaaacaatagcctgccacagggtgcacctacatctcctatgttatcaaacatggtgttcaagtactacgatgataaaatctttgactactgcaaaagccgcaacatccgttacacacggtatgctgacgacctaacattttctggagacttcaattgtaaagccgtcgtgtcctttattaggaaggtcctgtcaaagaccagcttcgctattaacgataacaagactaagttcgtgagtcgcggcaacaggcaagaagtcacgggcgtggtagtgaacgaaaaactgcagactgcagccatataccggaaaaagatccggcaggaggtttactatattataaaattcggggtcgacaagcatctggaggcaattgagtggaaaagaccaattatcgagtacttacaccacttgctggggcgaatcaacttcaccctcaccattaataagaatgatagcgagatgaggaagtactacgaatatatccactccgtgctgaaggaatataaagaagaatga

SEQ ID NO: 9811 - RNA, 984 nt, synthetic construct
  source 1..984: mol_type = other RNA
atggagctgctgcttaactatgcacagagcttaaactctcataacttccccatcatttatgaccagtcgcacttctccaaattggtgggatataggtatgggtacatcctctgtatttgcaatagtcctgacgtcttttacaaggaatggaaaatcaccaagaggaatgggaagcttcgcaccatccacgaaccgttgccttcactgaaagaaatccagaactggatcctgaaagaaatactaaacaccgcggttaatgagttcgtgtctccagtggctaaagcatatacacctgatcgcaatattagagacaatgccagatttcacaagaacaaaaagattgttgtctgcctcgacattgtagatttcttcggaactgtaacgtacaagcaggtgtacagcatatttcgacaatttggttacaacaagagtatcgccacactactgtcaaacctgtgcatattggagggatctctgccacaaggcgcacccactagtccaatgctgagcaatctgattttctatcatatcgacaccgctatttttaagttctgtaaggagcggaagataatgtatactaggtacgccgatgatcttagcttttctggggatttcaatgtgggcctgttgatcagctatatatccaaccttctgtcctatcacggcttttccataaacgagaaaaaaacaaaggtcttaagccgcggccggtcccaacagattaccggcatcgtcgttaatgagaagattcaggtgtctaggcggtacagaaaaagaattcgacaggagatttaccatattatcaagtacggtctggaaaatcacctcaaaaagatcgcctatcccaaaagtagcatccagtatctgcaccatctcatggggaagattaacttcgtgttactcatcaacaaatcagacaatgaggctatccgttacatggaatacctcaagtcaatctacaattcctacaagacactcatctga

SEQ ID NO: 9812 - RNA, 1032 nt, synthetic construct
  source 1..1032: mol_type = other RNA
atgaattgggtcaaataccagaccaatttcatcaatagagctagtgatcggggcctggacgaaggcacaatcaattttcttcttgcatatgcgaaagcgttgtatgacaacgagctccccataattttcgataagtatcatttggccaacctggtgggttataaagtatcatacctggagcgtgctacaaaaaatacgtcaagattctacaagacgtacgaggtgccaaagaagcaaggtgggaagcgtatcatatctgagcctttacccagcttgaagcacatccaaaaatggatcctggtagagattctcaacaaactaaagcctagcaaatatgccaaggcttttatcaagaggcggaatactaagagtaatgccgtgtttcataggaataagaatatcgtccttactatcgacattaaagacttcttcggaagcatcaaggcccctgccataatagatctgttcaaaaagttggggtacacaaaccacctatcctgtctgttgggagatctgtgtaccctgaacgggaaactcccacagggcgcttcaactagccccgcattatccaacctgattttcttcgaggtggataacaaaatctccgactactgctcgtctaataacatcttctactctagatatgccgacgacttaaccttctccggcgattttaacgtgggcaagatgatcacatttgtccgcgaatgctttaatgaggccaattttaccattaacgaagaaaagctgagaactcgacgaccgcaccaaaggcaggaagttaccggcatagttgttaatcagaaactgcaggcaccaaaagattatcggcgccattttcgccaggaagtgtattatattaagaagtacggactgcagggtcacctcgagtttattaaggagaagaggaacaactatctcctccacctcattggaaaagggaactacatctacttccttaacaaaaacgacatttacgtgaaagagagtcttattttcctgaaggaactgtactttaagatgatgcggtga

SEQ ID NO: 9813 - RNA, 1029 nt, synthetic construct
  source 1..1029: mol_type = other RNA
atgctaaattttcgcttcagtaaagagtacgtccagcttgacttgtttgatgatttcggaaacgaggacagaggtgctgttgtccagcagtacataaaatgcattagcgataacaaagccaagccaatcctggacacacaacacctgtcaaagcttgtaggatacactgagcagtttctgttctccgtgagcgcctcccccctgcacttctatagagagtacaagatagccaagaagaacggcggggtgaggaccctgaatgaacccctccctaccctgaaggctgtccaaaaatttatcgctggcgaaatcctgaatgatgttgaaccccataaagtggccaaagcgtttcggaagaaccacacattgcgtggtaatgctgtgattcacaggcgccgccccttcatgttaaagatcgacattaaggacttcttctcgaatatcacagagcatgcgatttatacaatgttcttcgaaattggctacacgaggcaagtgtcacggctcctgactggattatgcaccctgaataacggtctaccgcagggagcacctacctctcctatgctcagcaatttagtcatgcgggagttcgaccatacggtgtttgaacactgtgtgcagaatgacatattttacaccagatacgccgacgacatggcattttctgcaagcgatgatcgagtcaagtccctgatacccttcatcagatccgagctcaaaaaatacgggctcgagatcaaccagaagaaaacaagttatagtggccctggggcaaggaaatatgtaactggcatcgtggtgaatgaacggctcaacgttctgcgaattgaccgcaagaatatccgacaggaaatgtattacatccggaagtttgggattaacgggcatctgagaaaaaccaacaactcttcaccaaactatgtggataggttgatgggccgtctcaactttgccttcttcgtaactaaggaaccacactttcttgaggatatgcgctatctgaaggagttgaagaaagttctttga

SEQ ID NO: 9814 - RNA, 1029 nt, synthetic construct
  source 1..1029: mol_type = other RNA
atgttgaacttccggttttctgaggaatacattcagctcgacctgtttcatgactttggcttagcggatcgcgagagtgtcgtttcagaatacatcgaacggatcagttctaatcgcgccaagccaattttcgatactcagcacctgagccacttagttggctacagcgaacaattcctgttcagtgtatctgcttcccctgtgcacttctatcgagagtataagatagcaaaaaagtccggcgggttgcggaccctcaatgaaccacttcctactcttaaagccgtccagaaagtgatcgtgcacgacatatttagagacgtggaaccacataaagccgccaaggcttttcggaaaaaccacacgctccgcggcaatgccgtgatccacaggcgacgacccttcatgctcaaagtggacatcaaggacttcttctctaacatcgatcagcatgctatttatactctcttttacgagacagggtacaccgagcaggtcgcaagactgctcaccgggttgtgcaccctgaacgggtgtctgccgcaaggagcacctacctcacccatgctgtcgaacctggcgatgagatccttcgataacgccgtctttgagcactgtgtgcaaaacgagattttttatacacggtatgctgatgacatgaccttctccgcagtagacgaacgcgtcagaaatattatcccctttattcgtagcgaactgaagaagtgcaggttgcagataaacgagaaaaaaacatcattcagcggaacgggagcccgtaagtatcttactggcgttgtggttaatgagaggctcaacatcctaaaggaggataggaagaatctgcggcaggagatgtactacataaggaagtttggtatcaacggtcatctgagaaaaacagagaatcacagctccaattatatcgaccgcctggctggaaggctaaatttcgcatttttcattaccaaggaagcccattttcaggaagatatgagataccttcaggagttaaagaaagtgctgtga

SEQ ID NO: 9815 - RNA, 1029 nt, synthetic construct
  source 1..1029: mol_type = other RNA
atgctcaaatttcaattcgcccaggaatacgtgcagctggacctgttttcagacttcgggagcgaggatagatatgagatcgtccaagaatatatcgacggcatagccatcaataacgccaagccggtcctcgactctctgcatctgagtaaaattctcggactttctgagtacttcctgcactcggtgtccgcaagtcccgaaaacttttaccgcgagtacaaggtccctaagaaatctgggggcatgaggattatcaacgaacctttacctactctcaaactagtgcaaaaaagcattgtggacgatctgctgcggaatgtggagcctcacaaggcagctaaagcgtatcgcaagaatcacacgttgagagggaatgccgtcattcaccgcaagcggccctatatgctaaaggtggacatcaaagatttctttcccaacattgatacccatagcatctatcagctgtttttcggattaggatacactgcccaggttgcccgccttctgaccggtctatgcacactgaacaacggcttaccccagggtgcaccaacctcaccactcctttccaatttggttatgcgaggcttcgatgcagctgtcttcggccactgcatcgagaaagaaatattctacacaagatacgccgatgacatggctttttcatccaaggctccggatctgccaagcctgcttccatttttgcgtcaagagctgaaaaagtgtcgattgcagataaatgacaagaaaacagacttcgcaggaaagggggcgagaaagtttgtgaccggtatagtagtgaacgaacgactgaacatcctgaaggatgagaggagaaagttgcggcaggaaatgtattacatccgcaggtttggactgaatgggcatctccggaagactgataacgactccgctaattatatcgataggctcctgggccgtcttaacttcgcctacttcgtaacaaaagaggctaaatttcaggacgacatgaggtacattattcagctcaagcgggttgtgtga

SEQ ID NO: 9816 - RNA, 1038 nt, synthetic construct
  source 1..1038: mol_type = other RNA
atgagcaagtttaaaataacgcagtctctgactcacacccagctggatttgttcaataacagctcattcttagatcacgaagagatagtgacccgatacggaaataacattaggtctaatggcgctgttgtgatctatgacaccaagcatctctccaggatcatcggatatgcagaaagccttttgcatgccatttccagcagcccgcaacacttttataggacctttgagatacccaaaaagtcaggaggggtgagagtgattaatgaacctctgcctactctgaaggaaatacagcggtttatcattgactatatcctgcgtggcgtagaaccccataaatctgctagggcctttcgcaaaaactacaccctgagaggagctgctgtcattcacaagagtcgcaactatatgctcaaactggacatcaaagatttttttgggtccatcaagtccttcggcgtctatgatatctattacaatctgggttacacctcacaggtagccggcctgttgagcgggctgtgtactctcgacggggagctccctcagggtgcaccaacatcaccattgatcagcaatttattcctgaaggatttcgatgagtacattttcgactattgcaagaacaactctattttctacacacggtacgcagacgatatgaccttttcttccaacgaggatacaatgaagcacataattggaatcgtcagatcgcgcctaagtaagcacggtctgaagttaaaccaaaaaaagacttccctgtctggcaagggagcccgtaaattcgtgaacggtatcgttgtcaatgaaaaaccaaacattctcaggagtgagcgcagatcgctgcggcagactatgtactatatcaagaattacgggattgacggccatattcgggtggcgaaaattgacacgcccaattacctagaccatcttctcggcaaacttacattcgcccacttcgtgacaaaggaggaggtttataaaaactacatcgactacatccgaagtataaagtccatccttaagtga

SEQ ID NO: 9817 - RNA, 1029 nt, synthetic construct
  source 1..1029: mol_type = other RNA
atgcccgatttcagattctctcaggagtacgtgcagctggatttgtttaacgactttgggagcctggatcgccgggaaatagtcgcaacatacgtgaccgagctgactcgcaacaaagccttggtacttttcgacgtgtcacacttcagccggctcgttgggttctctgaaggtctgctgcacgccatttcggctgcgcctttttacttctatagaagattcgatgtccccaaaaaaagcggaggcctgcggaccatttgtgaaccatttcctacattaaagttgatccaacgctttattgctgaacaggtcatcgccaactccgaaccacacaaggccgcccgagcatttcgacagaatcatagtttaaggggtgccgcagtgattcataaagctagaccttatatgctgacccttgacatccgggacttcttccccaccatctccggattttccgtctatcgggtgttttttgacctaggctataccgctcaaattgcccgcttgctttctggcctttgcaccctggagaacgggcttccccagggagctccaacaagtcctgcattatccaacctcgtactacgtcggttcgatgaagttatcttcaatgagtgcaaaagtaggggagtgttctacacgaggtacgctgatgatatgacattttcttcaagggaggacaatctggcggatctgataggggtcgtgcgcaaagagctgaggactgacggattgaagctcaatagcaagaaaactgtgatggccggcaagggcgcgagaaaatacgttaacggtgtagtggtgaatgagcgtccaaatatcctgcgagagaagagaaggaacctccgcaaggacctgtactacattaaaaagtatggcattaacggccacgttcgtttttcaaatatcgacatcccgaattatctcgaccacctcatcgggaagctaacatatgcccatttcataactaaggatcagaagtataaggaagacgcagcctacctctacgagctgaaaaagctgacgtga

SEQ ID NO: 9818 - RNA, 1032 nt, synthetic construct
  source 1..1032: mol_type = other RNA
atgtcaactttcgcttttgacaaggatctgcagcagcttgatctgtttgacagttttaagaacgagaaccgtgaggtgattgtcgctgagtattcccgaattattctggaaaatggcgccgcagtcattttcgataccgaacatttgtctaggcttctggggttctcacaggagctcctcttcagtataagcgctgcctcaaataagtactacagagagtacaccgtgctcaaacgatctggggggcgacgggttattaatgaacccctgcctacgctgaagatgatccagcgttttattctagccgagttgcttgacggcgtacgcctacataaggctgcccgcggataccgcaaaaaccacacactgagaggcggggccatcatccacagaggtagaccttatatgctaactttagacgtgcaagacttctttcccagcatcaatcaataccaggtgttccaggcgttgctcaaactgggctacacaaaacagatcagcagactgattactggactgtgtacactccacgatggactgccacaaggggctcctaccagcccgttactgtccaacttggtcctctatcaggcagacaaagccatctttgaccactgcgtggttcggggtctgttctacacgcggtacgcagacgatatgacattttcttcaaaagaggataacgttgtagaaatcattccagtagtgcggacacagttatccaatgtcggcctgcgcatcaacccacgcaaaactaatgtgagcaggagaggttcccggaagtatgttaatggcatcgtggtcaacgtcaaacccaacatactcaaaaccgaacgtaggagtcttcgccaggaaatgttctacattaagaagtatggcatagagggacatataaggtggtctaaggtggaggccccctattatgtggataagctcatcggacggctgacctttgcgttgttcgtgaccaaagacaagaggtattcgcaggaaatcaggtacctttccgccctgaagaaggcaatgcaatga

SEQ ID NO: 9819 - RNA, 1032 nt, synthetic construct
  source 1..1032: mol_type = other RNA
atgaccccttctgccttgaatattagattcgacgatggcgtggatgaaaaccatagggaactcgtctacttatacgcttccagaatagagtctaagggactgactgtgatcctgtcacctgaacacctgggccatctgctccaaatgagactggaggacatctatgctatatcaaacgcacctcagcacttttatagagaatacagagccaagaagaaatccggcggtacacgcaagatctctgcccccctgccactgctgttgtcgattcagcggtgggtgctgaaaaacattctagagccgcaagcaatccacccagcggccaaagcatatcttaagaagtcctctattaagcagaatgcacggttccaccgcggtcagaggcacctgtttaagagcgatgttcgtgactttttcgggagcattagtagccgctgggtgtattcccattttcagtcattgggatactcgcgtgctgtgagcatggttctcacagctatttgctgcaaagagaatgctcttccacagggcgcccccacatccggatatctatcaaacatctacatgacgagctttgacaaggccgtattctcttattgtactgagcgcaagttccggttcactcggtacgccgacgacatatccatctcaggatccggaatcaatttctctgagctgagtgcgtttgtgaaccgggaattacgagatattgatctgaaaatgcacagtggaaaaacccgactcatcaggagccatcaaaggcagaaggtgaccggggttgtcgtcaatgaaaaactcggccccggccgggatttcatccgaaaactgagacaggagtattactacattagtaagtatggggtggaggagcagagtagggtcagcgggtggaacaatagcatcgcctacctcaacaacattcatggtcgcatcgctcacgcaatatttcttaccgggcacgacgcccgtttgttagaaatgaagaatgccgtagaaagcctccttcgcaaatccgagtacatcaggggctga

SEQ ID NO: 9820 - RNA, 1032 nt, synthetic construct
  source 1..1032: mol_type = other RNA
atgaacttcagtgacctgaagatcaaattcgacgatggcgtggaggacgggcacaaggatctggtgcatcagtacatctcacggctggagtcccaggggctctcagttattttgagccccgagcactttggtcatcttttacagataaggcttgagcatatctacgccatctcaaatagtcctaggcacttctatcgcgaacatcaagccaaaaaaaagggcggaggaactcgcaagatctctgcaccattacccctactcctcttcattcagcgttgggtgttgaagaacatcctggagccccaggccattcaccctgctgcgaaggcatacctgaaaaaatcctccataaaacacaatgctagattccacaggggccaggcacacctttttaagtccgacgtaaaggacttttttggcagtataagctctggatgggtgtataaccacttcctcgggctggggtattctagggctgtcagcatgctattgacagctatctgttgcaaggaaaactgcctgccacagggtgcacctacatctgggtacctgtcaaacatttacatgacaaatttcgatcaggtggtctttagccattgtttgaaacggaagttccgatttacccggtatgcggatgacatttctatcagcggctctgagattaacttcaaggaactcagcacgtttatcgaccgagaacttcgcaatattgatctgaagatgcatacagggaaaacccgtctcatcagatcacaccagagacagaaagtgactggagttgtcgtgaacgaaaagttgggcccgggccgcgattttatgcggaaactgagacaagagtactattacatcagcaaattcggagtcaacgagcaagccagggtttcgggttggaactccagtactgcctatttaaataatttccatggcagagtgacccatgccctgtttctcaccggacacgacgagaagctgtccgaaataaagaatgccgtagagaatctgctgcaacggtccgaatacattcttggttga

SEQ ID NO: 9821 - RNA, 1020 nt, synthetic construct
  source 1..1020: mol_type = other RNA
atgacaagctcagggatcaaaatcgttttcgctgaggcaatgaagccggagcagtcagccgctgtgagagcgtacatcaagcatttcgaagaaaaaaatctccccgccattttgtccggggaacatctgagccttcagctcggaatcaagcagtctactctgtacgctatcagtaattctgctaacgctttctatcggaccttctatgtgcagaaaaagaatggtggtaagaggcaaatatctgcacccctacctcttctcttggctacgcagcagtggatcttgtcaaaaattctccaaagtgtaacggtgcatcccgccgctaaagcctacaagaaaggcagctcaatcaaggagaacgccagatttcacaaaggacaggagagtttatttaagagcgacgtcgaggatttcttcggttccatttcccagttctgggtctatgagtttttccactccctggggtacactaccgcaatctctaggctgctggccggcttgtgttgcaaggatggcgtgctgccacagggagcggcaactagcgggtacctgagcaacatctatatgtgtgtgtttgatgacgccgtttttacctattgccaaacaaatcgtctgcggtacacccggtatgccgacgatatagcaattagtggagccgggatcgactttgataagaccaaggacattgtgtctacacttcttgaaaaccacaaactgagaattaaccttcgcaagactcggattcaacggagaaatacaaggcagaaaataaccggcgtagttgtgaacgacaggctggggccagaccgccagtttctccgacgcatccgccaggacttacactacatacgaaagtttggagtccatggccacgcacgccaacgaggcttcaaatcgcctctgttttgcattaacaatctcctaggacgtatcactcacgccaaattcttgttaggcagaaatacacctctcgagggcgagaagaagtacctggaaaggctgctggatcagatttcctga

SEQ ID NO: 9822 - RNA, 1020 nt, synthetic construct
  source 1..1020: mol_type = other RNA
atgtcactcttgtcagacaactttgagtttggtgggaagatagggatagcagaaagggaagcggtagagaaatatgcccagcgactaatagacaagggcctgcctgtgatcttttcccccgagcatctttctcacattacaaatatccggctggaggctttgtatgcgatgtccaattctcaagagtcatactatcggagctttgacattcccaagaagtcaggcggcaggagaagaatcgatgccccattaccttccctcgcattcctgcagagatggaccctggataacattcttaatagcgtccctttacacgccagcgcaaaagcctaccgtaaaggaaacagcatattcgataacgccagattccatcggaagcagcgcgttgttctcaaagtggacgttaagaatttctttgggagcattgaagaacactctgccttccttatcttcaaagggctgggatacagcaagaggctgtccaaactgttatccatgaccgcgagtctacacggttccctcccgcaaggggctccaacttctggtgctctggcaaacatttatatgaagaccttcgacgatgccgtgtttaatgcatgtaaggaaagtaaagtccggtatacacggtacgccgatgacctcacattctctggaagtgactttgatacggacgcccagatcaggctggtggacaaacagctgagtaaaatcggcctcagcgtcaacgcaagaaagactcgagtgcttctgccacatgtgaggcaagatgtaaccggcctcgtcgtgaacgaaaaaatctcggttccccaggattaccgacgccgtttgcggcaggagtgctattttatccagaagttcggaatccacggccacgctcgcgaagtcaacgctgctaatcctcgcgtgcgcctggaggaggtgattggaatgttgagctacgtgaagtctatccataagaatgagccctactggtcagacgctcatagtagaatgctggagattagggcctccttcttttga

SEQ ID NO: 9823 - RNA, 1020 nt, synthetic construct
  source 1..1020: mol_type = other RNA
atggattttcaagtggagagaatcgagttcggcgaaaaaatcggccttgcagagagggaggctgtcaataagtatgcgcaattcttggcttctcaatcattgcctgtcatcttctcccccgggcacctgtcctatattacgaacatgcgtatcgagtctctgtatgcaatgagcaactcccaggagtccttctaccgcagatttgaaatccccaagaaatcggggggacgcaggagaattgatgcgcctctgccatcactggctcacattcagcgctggattctagacaatatacttcaaggtgtggcactgcaccctagtgctaaagcttaccgaaagggttactctacatttgacaatgctaggtttcaccgcaagcagtccatagtgctgaaagtagacgtcaagaacttcttcggctcaatcgaggaacattctgttttttcaatctttcacgacctcggatacagtaaacgactcagcaagctgtttagcatgatagccacccttgatggcgtgttaccgcagggggccccaactagcggagcattgagcaacattttcatgcgtgcctttgacgaaaaaattttcgccgattgtaaacggcagggaatcaggtatactaggtatgccgatgacctgaccttcagcggtgacgccatcgatctgagagagcatattcggctcgtcgacaaggaatttagcaaggttggactgacattgaacagtaagaagacacgcgtgctcttccctcacatgcggcaggaagttaccgggctagtggtaaatgactccgtgagtataccccaggcattccgaagacagctcaggcaggaatgctactttatcaaaaagttcggcattcatggccacgccagagaagtgaacgcacggaatccccggatactgcttgaggaggtcatcgggaaattatcttacgttaaagccgtgcatgccaaggatccatggtgggctaagaaccatgccattatgctggaggtgcggaagaatctcatctga

SEQ ID NO: 9824 - RNA, 1080 nt, synthetic construct
  source 1..1080: mol_type = other RNA
atgcagaaatctgaattgatctctcggaacatcaacgtgatttttgacggtctaacggaagcacagattgccgcagtgcaaagttactcagccagcctggcagatcgcgaccttcccaccatctatagccccgtgcacctgtgtcaggtagtcggcgtgtctccacagtacttgtttgctgtcagtaatgatcctaaacgtttttacagagggtttagtataccgaagcggaacggcggcagacgtttcattcaggagccgctgcctctcctaaaagccgtccagcgatggctcttggctaatatacttgagaaagtcggagtctcccccttcgtgaagtcttacatcaaggggattaacctgaaacacaacagccggttccacattggacaggactttgtatttaagctagatctcgagtcatttttcgatcgcatcctgacaaaggatgtcgtggaagtgttttacaaggccggatacacaagagacgtttcgattttcctcgccaaaatttgcgtgtccaatggccggttgtgccaagggtcacccacttccggcgcaatctccaatatagtgctcctcgaatttgaccttacactgttcgagttctgccggtcccgtgggttccgctatactagatatagcgatgacattaccattagcggaaagatggacgccggtaccaatttccatgagatcctgctgttcatctcagaacttgcgagcgctaacggccacaaaatcaacaaagggaaatctcaggtactgtataggcataataggcagaaggtcactggtatcgtagtgaatgagaagctgaccgtgcctagacctgtgcggcgaaggttccgacaagagttattttacttcgaacgctatggaccacgcgggcatgccgaaaggatcggagagggcttagatcagtgtgttgctaggttaataggccaagcgagtcacttgctcttcgttaggcccgacgacgagttcgttagagtgaagaaggacctgctgcttagagttctgcgccagatggatgctgacccacagtttggttttgatctggggggcaggccactgtga

SEQ ID NO: 9825 - RNA, 1065 nt, synthetic construct
  source 1..1065: mol_type = other RNA
atgttgatcacaagggaaatcgacctcgtcctggatgagaatcttggtgtcgccgcgaaggaaaacatcagcgcttattgtggtaaattgtctgaaaggggacttcccgccatcctgagtgccgatcacttttcattaatgattggggtagacggacggtatatctatggtgtctctaacaatgctgacaggtactatcgcgtgtttcagttgccaaaaagacgtgaggggtttaggactatttgcgaacccctcccaattttgaaaatgatccagcggtggatcctggataacatcctgagcaaaatcccccccgcaaagtgtgtgaacagctacatagtcggccgaagtattaagagtaatgcgcgactgcacttaggccaggagtccctgatcaagctagatgtaaaagatttcttcgggagtatttctagccatcacgtgtacaagctcttcttcgatctcggctataccaaggccgtgtcagtttttctgtcccgcctctgcacctataagggctttctgcctcagggttcgccaaccagcgggtccatatcaaacttagttctaaggggagttgacgaggccctcctgactttctgtacagagagaaagattcgctacactagatacgccgacgacatgtgcttcagcggcacaaacatagctgcacctgacctaatcgaatttgtacgtaagaatctcggagagctggggctgaagctgaataacgacaagatgcgcatactcaaacaatctcacaggcagatcgtcacaggcattgtggtgaacaaaagactggcagtgccgcggttgagacggcagagacttcggcaagagatctactacctcaagaaattcggattcgtgtcccatgctatgaataccgatgactccgaccctgttgccctgcttcgccggttgattggggagtgcgcattccttatgcacattcattcaaaggacgtggtggacataagagatattgaatttctgaaagctctgctgcgagaggaactggcccgccagaggcattggacgaatggcgatgaggatcttttttga

SEQ ID NO: 9826 - RNA, 1029 nt, synthetic construct
  source 1..1029: mol_type = other RNA
atgaattggagtgaatacgaggccgccatcagaagggcatgccgtgagatacacggcatcccccccgataggacacgcttactgctcgagcgggccagacgcctctacgaccaggagctgcctgtgatccttgaccaaaagaacctcgcgtggttcctggggtttgatatctcactcgtcatgtgcattgcaaatcgcccccacaaatactaccgatgtttccgaattccaaaaagaaacggcggcttccgagaacttcacgaaccactgcctaccttgaaggagatgcagcgcgtcattcttgacctgattctcgcaagactgccagtggaccccgccgctaaggcttatcagccagggtcctctgtgaaagacaacgctaatttccatacaaggcagcctctgctgcttaagctcgatgtgagtgacttcttcgggagcctgcgggaatatcaggtttaccaagttttccacggtgtcggatatcaccctcaggtggccaccttactggctaagttgacttgtctgaatggaagcctgccccagggggctccgacttcaccaacattgagcaacctgatttttagagaagctgaccaacgcatcttccatttttgccgacaggccaacatacgctatacccgttatgctgatgatctgactttttccggagactttaagcccgggttggtgatccggagagtggcctctgttattgaaaccttgggccttcggcttaatcctgagaaaaacagggtgatacggcgtcacaggaggcaggaggtaaccggagtcatggtaaataatggactaagagcagcacggagccggaggatgcatctccgccagcaactgtattacctatctaggtttggtctagcggaccaggccgcgaaacatggcacgaagacgcacctgtggatcaaccatttactcggcctcgccggctacatccggtttctggatccgtccgatagggaggccgccagagctattgcaatgctgaaaactttgcgaggttcgacatga

SEQ ID NO: 9827 - RNA, 1056 nt, synthetic construct
  source 1..1056: mol_type = other RNA
atgaccgcccactccttacagagccttcctgactttaacgagtacagtgcaagattcacagaggccttaattagcagggacggtgaggactacgatccctcctacttgtcacggtgcctaagctatgcgaaaggcctcctcgagcgtcgactcccggtgattttcgacagggaacacctctgcgccctgaccggctactcttctcggtttattgagagcgctgtcggctcacctcatttattctaccggaatttcgagattccaaaaaaaagcggcgggtttagggaaatatccgaacctctgccaagcctgaaggatgtccagcgctggatttatcaaaaccttttgctccgtatccccgtttcagtggctgcaaaggcttttgtgccaggcaagaagctgagagacggcgtaagatttcacgtgggacagaagtttgtgatccgggttgatatcgctgatttcttcccctccatcacgagagggagggtcttcggattgtttaggtccctggggtatagttccgaagtctccggggacctcgcatcactgtgttgcgtgtgtgactgtcttccacaagggggcgtgtgctctccttacctgagcaatatcattatgcgcagtgccgatcgccgcctgcttgcctatgcaagggagaatagcttgcgttacacccgatacgcagatgattttacagtgtccggccagaagttctctaaatctataatcgaagaggtaatgtctgtgataaaatcagaggggttcactgtgaaccagaagaaaactagagtctctaggtcgggaggtcgccaggtagttctgggacacgtggtgaacggtaaggttaacgcccccagggaatatcggagagagctgcgaaaggttgcgtactacgtcgatcgatttggactggataaccatctcgcctatctgaatgaaagacggagcagtgcctcggactattatctgggaaaggctagtttcgtgctatcagctaatcatcgggaccgcgacgccctggatcttaaaagaatcttgctggacgaagtcgagtga

SEQ ID NO: 9828 - RNA, 942 nt, synthetic construct
  source 1..942: mol_type = other RNA
atgaaatactccaaaaagttgctggataaggggctgccagtgatcttcaatagggagcatctgtgcgccctgactggctacacccctcactttgtggaaagtgcagtgggtagcccgcatctattctatcggcacttcaacgtgcccaaaaaagcaggcggggtgaggctcatctctgaaccattgccttctctgaaggacgtgcaaagatggatatatgaaaatatcctgctacgggttcaggtgagcgtagctgcgaaggcttacgtgccaggaaggaagcttcgcgatggcgcgcgctttcatgtcggccagaagttcgtcgtacgagtggatatttccgattttttcccttctattactcggaagagggtctttggcctgtttagggccatgggttattcaccctcagtttcagcagacttgagcaacctttgttgtagtgaggagtgcttacctcaggggggcgtttgctccgcctatctgagtaacatcattctccgaagcgctgacgcccgtctgctcaagtatgcccgagcacgcggcctcagatacacgagatacgctgacgactttaccatatctggagaggccttctccccatcgattctgaatgacatccagtgggtaatccggagcgagggattcgaaattaaccccaaaaagacagctgtcatgagagctgggggacggcagatggtcgttggtcacgtggttaattcccgggtcaacgcccccagagaatacagaaggggtttacgccaagccgcacactacatcgagaaatttggccttgacaatcacctggcaagactgggcgaaacacgtggatccgctcgcgagtactatttgggaaaggtgagcttcgccctcagcgcgaaccgcagtgatagggatgccctgaaactctcagaggtgctttcggtcggggggtctgagtga

SEQ ID NO: 9829 - RNA, 1065 nt, synthetic construct
  source 1..1065: mol_type = other RNA
atgaacgcccactcactccatgcactcccctccttcgaagagtataagaaactgtttgtggagcgctatgttatgcgctatggaaacggaagcgacgacggtttcttggaacggtgtctggagtattcaaagaatctgctgagcaacgggttaccagtaatattttcaagacagcacttgtgcgctctgcttggctacgaggagggctacattgatgcagtggccaatagcccacacctgtactaccgcgagttcgaaataccgaaaaggagcggcgagaagcgactaatttcggaacctctcccttccctgaaagaggtccagcggtggatctacaaggagatcctgctaagggtgcctgtgtcctccgccgctaaggcattcgttccccggcggaaagttagagatgcggcacggtttcacgctcggcaaaaacacgtccttaagatcgatattgcagatttcttcccctctatcacaagagacagggtgtttggaatatttcgcctcatcggttacagttctgaagtgtcatccacgctcgcgcgcctttgctgcgtgaatgagagcttacctcagggaggtgtatgtagtgcttatctgtccaatgtggtcctgcgttctctggatggggatatcctgaaatactgtcgggggagaagcttacgatatacaagatacgccgacgacttcatcttcagtggagactcaatcgattacggttttgtcaagttcatttcgagccttattgtgtctcatggctttaacgtaaaccccaaaaagactaccgtgatgggcagggcctgtagacaagttgtggtcggccatgtcgtgaatgatagggtaaacgctccaagagaatatcgacgccgtctgagacagattgcctactttatagccaagcacggcatggactcccatctgagccatatcagtgagaataggtctggggcgcgggaacactatttggggcgagctagttttgtgatctctgccaatccaagggaccgcgacgccctcttcctccgtaacgttttgacctgcaggatggtcgacattgaatga

SEQ ID NO: 9830 - RNA, 1059 nt, synthetic construct
  source 1..1059: mol_type = other RNA
atgatttcctctatccgccacgtgaaacaatcaagcaactatgaaaccgagtggagacgctacgcagcagcctttctgagtgccgctaaggccaagaaactgtcccaagatgatattgatgcctgtctacagtatgccaagcctcttactctcggcggattcccggtgatatacgacacagaccatttttgcgggcttgtagggtataccccccattacgtcctgggtgccatcaagtccacagatcggtactaccgacagttctcaattaagaaaaagagcgggggggacaggactatcctggaacctttaccctccttaaaggaaatacaacattggatccttcgcaacgtgctagagcgggtggccatccacagagccgcgaaagcgtttcagaagggcacgtccatccgtgacaatgcgagatttcacaggggacaggcttgtgtactgaccattgacatcaaagatttcttcccttcaattgggatcaatcgcgttttttcagtgtatcacaggatcggatactctaagcaaattagtagtttgttggcagacctgagctgttttgagctgagcctgccacagggtgctcccacaagcccatatatcagcaacctgatatgcagaagtctggatgaaaggttcttcgcgtacgcacgatccgctaaactgagatatacacgttacgctgatgacctcaccttttctggcgctgacattggaagttcttttgtctccaacgcctacgagatcattcgggagtacggcttcgagccaaacctcagcaagacccgcctcttgcggcagcaccagaaacaaatggtgacgggtgtggttgttaattctaagcttcaggcagacagagctttacgcaggcagataaggcagtacgcctattatatcgaaagattcggcctggagggacatgcagctgccacttctgtccagaggcgaaatttcgaacggcacttgatgggcctggcacagttcgtctgctcgctcaacccctatgatcgtgacgcccggaatctgatagagctcctcaaaattgattga

SEQ ID NO: 9831 - RNA, 1035 nt, synthetic construct
  source 1..1035: mol_type = other RNA
atgaacgctgacgagaaggaaactgaatggcgcatttatagtgcctccttcttcgaagaggccttggacgtcgggctcactgctaatgagattgagatttgtttggcctacgcacagcccatcttcgaaagaggacttcccgtgatctacgacaacgaccacctgtcaaacttggtcggctacaaaatcaagtacatacagagagccgcaaaagccccagtgaatttctacagaaacttcaccatcagcaagcggtctggaaaaccacggaccatctctgagccgctcccttcactgaaggaaatccagctgtgggtgctgcgtaaccttctggataaaatgccagtgcatcctgccgcgaaagcgtttgtggccggtcgctcgattaagaataatgctcgctttcaccggggtcaaaggcgcgtcctgacagttgatgtcaaggacttcttcccaagcatatcttccgatcgggtaaaagctatttttgtaaaggctggctataattcccggattagttccctgctcgctaacctgtgctgcctaaacggcaagattccccaaggcagtcccacgagccctgccattagtaacatcgtctgtctggatatggacgaggagttttttcagtatgcccgttcaaggaaactgcggtatacacgctatgcagacgatatgacatttagcggcgatgtgattagacatagcgacatcaagcacatctacaggataatgcgaagctatcactttgagcctaacttagaaaagacccggctgatgaggccgcatcagagacagcagattaccggaataatagtgaataaccacatgcaggtttccagagaataccgaagggagcttcgtcaaaacgcatacttcatcgggaagtttgggatcgaggagcacgccgtggttaatgagatcactcatatcaggttccgagatcaccttctcggaagagcgaatcatgctctccacgtgaattcttcagaccgcgatgcaatccgactaaaagaagcattaaaaaggttctga

SEQ ID NO: 9832 - RNA, 1035 nt, synthetic construct
  source 1..1035: mol_type = other RNA
atgcaagatgcttccaccgccccctcctttgaggagtattccgccatcttccggtctaccgctggggcagacgcattacagcctgagtacgtggagcgttgcctccagtacgccaggaaacacctccaggatgggcgggccgtggtatatagtgctaatcatctgtcatcacttgtgggttatgacatcagctatctgtatggggtcgcgaattctggaggaaactactaccgcacctttagtgttccaaaaaaatcgggcggaaagaggaggatctccgagcccctgccctctctcaaggaaatccagcgatggattcttacatacatcctgagccctgttcaggttcacacgcacgtcaagtcctttaggatgggctacgggctccgcgctaacgccaggtttcatagagctcagaagattgtgttgcgtctggacgtactagatttcttcggctcaataagagtgaaacgcgtggccgacttcttcctgaagctcggatacgcgaaaccagtcgcaacactcctggctggagtttgtacgctcaacgggaaactgcctcaaggggcacctacaagcccggccttgtctaatcttgtgccctggccggtggatgtaagattgtcaacttttgcccgcaatgagggaattcggtacactagatacgcggatgatatgaccttcagcggcgaattcaaacctggtaaggtaatatctatggccagccgggtgctgagggagaacggctttcagctaaatgtcaagaagacaaacgtcatgggtgaacaccagcgccagctggttaccggcgtcgtggtgaacgagaaactgcaagtgccaagaggggtccgacggggtctgaggaaggaagtctactatatcgaaaagttcggcctgactgaacatgtgcgacggatgggcgtgagcgacccaaagtatgtgagtagacttcgcggaatggctgcacacattttagcagttaaccccaatgacgaggaagctaaaaatgccttaagatttctgggcagtttgtga

SEQ ID NO: 9833 - RNA, 1065 nt, synthetic construct
  source 1..1065: mol_type = other RNA
atgcgaacgcatcgagatcttgcttcttcttgggctgcctacgaggcagccttcatcatagaagccaggagacgggggtattcagatgacgacgtccgcacatgtctatcctatgccaagaagctgcacctgagtaacctccccgtgatttatgatcaggcccatttcagcgaccgagtgggatatgatattagctacatccggcgggcaagcaacgaccctgaacacttttaccgcacctttaacgtgcccaagaaaagcggcggggtccgtcaaatcaatgagccactgccctcgctgaaagagatccagcggtggattctcgacaatattctgggcgcaatgtccgtgaacccatgcgccaaggctttcgtagtgggaagagatgtgagagacaatgcgaggtttcaccgcaatcagaggatagtaataaacgtcgacgtgaaggactttttccccagtatcactcatcgtcagattcgcatgatatttcttaaagccggctattccccagaggtaggagagctacttacacaactgtgttgtttggacggggtattaccgcagggagccccgacttctccttatatctcaaatctcgtgtgcagacctctggatgagaggctgttcggttacgcgaagaagaacggtttgcgctacaccaggtactcagacgatatttccgttagcggcgatatggaacccgctgaagtccttcagttcgttaaaaaagtgtgccgggagcacggtttcaagatccaccctgacaagatcagggtgttaggaccagggagacagaaaagggtgaccggcattgtcgttaataaacatttgcaggtcccacgcaaaaagcgtagggttctcagacagagtgtgtactacatcaagaaattcgggctggatgaacacctgtctaagacaaaaaacaatcggcggaactttctcgatcatttgatgggccaagttaactacgtcctgtttgtgaaccctaaggaccgagaggctcaagattggctcagacagctgagagaaattaagaatggcgcaatcgactatcgcgattga

SEQ ID NO: 9834 - RNA, 1065 nt, synthetic construct
  source 1..1065: mol_type = other RNA
atgaattcactctacacccccgagtacttcgtgaaggttgctgagcactgcagcaatgccggttttgcagcagacgccatcgaagatgtgctggtgtatgcgattcagattgccaatcaaggcctgccaataatatacgatgatcaacacttcagtcaacttgtgggctatgacttgcagtatatctacggggttacaaacgaccaaagcaagttctataaatcctttacgaagaagatgaggagcgggaaaaagagggaaatcgaccagccatacccctctctaatggagatccagtactggatactccacaacatactggaaaaaatcgagtgctctccttacgctaaggcgtatattaaaggtcggacactaaaggataatgcccgctatcacgtcggcaagaacttcatcgtcaaggtggacattaagaactttttcccctcgattaagacgggctccgtgtacaagctcttttacgattgcggatatactaagcagcttgctaccttattttctagagtcctgactttgaatgggcatctccctcagggggctcccaccagtccagctatctccaatctggtctgtcggtccctggatgaggtactgtcaaccattgcacacgaccgaaaactgtcatacacacgctatgccgatgacatcgcctttagcgccaacgagtaccctaaattcctgattagagagattcgctcatgtatgcgagatcatggattcgagctcaacgaaaccaaaacaagggttatgaggcagagcggcagacagcaaatcacaggcatcgtggtgaacaaaaaaatgaatgtatccaaggaacgtcggaggcgtatcagacaggaactgtactatatcgagaaatatggaatcgaagaccatatacgctatattaatgagactcggaaaaacaccatcgcacatcttgccggaagcttgtcctacgcaatttggattcagccgagatctgccgaactgaagaaatacagtaagatgttggctactttacacaaggaccttgagggtgaagacgatatccagactgagcagtga

SEQ ID NO: 9835 - RNA, 1044 nt, synthetic construct
  source 1..1044: mol_type = other RNA
atgactacattggacctaccttacgttactgatcgctataaggaaatcgccctacaatgcgggctgagcagtaaagacatcctttccatagagcgatacgcccagaaactcgaagcgaacggtctgcccgttattttcgacgagaaacattttagcgcgttagtgggctacgatatatccctcctgtatgcaatttcaaacgaccagagaaagttttacagatcttttaacatccccaagcgcaatgggaagcttaggcagattgacgagccacttcccacgctgaaggagatccagcgatatattctcgacaatatcctgtctaacgttgagattagcaaagcctccaaggcatttagtaggcattccgacattaagaaaaatgccaggattcacatcagacagcctgagatcttgaaggtggatataaaagatttcttcccatctgtgaacatatcatcagtgtataaggccttgtatgctctgggctacaccgatagcctcgctatgctgtttgcacaaatctgttgtttggacaagagtctcccgcaaggcgccccaacatcgcctgctctggctaatatcgtctgcagggacctggatcatgacttacttaaatattgcacggataggaacctgaggtacacccggtacgcagacgatataaccatttccggggagcgtatcaaaaaggagactatcaccgaagtgcgatttatgatcaagagcttcaaattcaagctcaatgaagagaagacctctattatgagatcaggcagccggaaggttgtgacaggaatcatcgtgaacactcggatgcaggcccccagagaaacacgccgggaattccggaagaacgtatttttcattcgcaaattcggtgtggatggccacattagtcagatagaggaggatcgtaataattacctgcggcacatcattggagtcggagaatttatcctgtgggtcgataataaaaacaaggaagtcgtgagcgacctgaacttcctcaaacgcttactgaaatccgagtctgtcgtatga

SEQ ID NO: 9836 - RNA, 1122 nt, synthetic construct
  source 1..1122: mol_type = other RNA
atgaaacgcaaataccgtcatgattggacggcctatgcagctaggtttaagcgcgcagctaagtctatcaacaaagacgacgaatatatcgccaattgtctgagctacgccaaaaagctctatgagaagaatctgcccgtagtctactctcaagagcacttttccttcttatgcggctatgagtataactatattttgagtgcatgcaactccgaaaaatacttttaccggaagatcgtcattaagaagaagaacggagggaatcggatcctcaacgagccattgcctagcctgaaggatatccagcgatgggtggttgagaacatcttggagaaagtggaagttcatccagccgccaaggcctatgtgcctaaaaagtctatcaaggataacgccagatttcatgtcaatcagaacgtggtgatatcagtggatattaaagatttcttcccatctatccacatatcgagggtctataacattttctcatccttaggttacagcgctgcagtgagtaaaatgctcgcggaaatctgctgttataagaattgcttgccccagggggctcccacaagcccttacctgagtaatatcgtgatgcatgaccttgatgatgaccttttcgcgtacgcccgcaggaatggcctgagatacacccggtacgccgatgatataacattcagcggcgatattaaaccttccaaactgatcgcaaccctataccagctcattactgagtacgggtttaaactgaataaacagaagatttccgtgatgagacgtggcgctaggcagatagtaactggcatcgtggtcaatcagaagatgcagtttcaacgggttagacgaaagaagctccggcaagacgtttactatattaacaaatacgggctgaacagtcactgtattcgcgaaggaattaacaagagaaattatctaagccacctcatcggagtagctaactctattctgttcataaatccgaatgacaaagacgcgcaggacgcctaccagatcatcattgaccttcttaaggatgagtcaaagctggacggacaaggtcgcctggacctgcgagtgtccgtcgaagacagcaggaccgagtcacccaagacacactga

SEQ ID NO: 9837 - RNA, 999 nt, synthetic construct
  source 1..999: mol_type = other RNA
atgatctccggtattacagttgagaggatcgccgaggaaacaggtctgaatcgccgattcctcctgctcctgtccaacaacattccagactactatcggatttaccgcattcccaaaaaaaatgggaactttcgcacaatagaggccccggcttcggtcctcaagcgaattcaacagtatatcctgtggaccatcttaccccggcagatcccgtgcacccctgagaaactggcagaaaccgctgaaatcctcaagggaaatgggatctctttccatagaagcaatcttgcaaggatgctgagtgccgccaccgcattcgagcctcggtcctcaattaagaagaatgctcaggagcactgcggcaagcccgtggttgtgagcctggacgtaaagaacttctttcccagcttgaaatatgacttggtgcgttcattatttcagcgcatcgtgcacgaggatggtgtggcggttatgctgtcaaagttttgtacgcttaacggccacctaccacagggagctattacttctccacatctctctaacctactcttgcacgacttcgacatcaaactgcgacagtactgtctcgcccacaaactggccttcacacggtatgccgatgaccttacttttagtggagatccaggaaatgaggagattactgggcttatcagatacgtgaaacaagaactgggcaaattgggccttaggctgaaccatgagaaaatcagaatacaacgtcaggggatgcgtcaggaggtcaccggcgtggtcgtaaacgcgaagactagcgcacctcgcgaagtgagaagaaggctgaggcaacagatgtactacctgaacaagcactgggaaagagaatggaggaagttggatgagcactccctgaatgtcttactcggccaggctaatttcatatgggatatggaccgcgataatcctgaatttacggaatatcggcggcagctgctagagataaagcatttctttcataactga

SEQ ID NO: 9838 - RNA, 954 nt, synthetic construct
  source 1..954: mol_type = other RNA
atgaattctaagttcttatatctccttgggaaccacatcccagatcactatagaatttaccggatccctaaaaagaatggtaactttcggaccatcgaggcacccgctccgattctcaagctgatccagcggtacatactggtgagggtcttgcccgttaggctcccgtggggtgagtccaggttacgtgagactgaggctagattgcgcgagaacggcatcagattcaggcccggcgagatacccagaatgctatccgcagcgagggccttcgaacgcggatgtagcatcgggaggaacgccgcagcccattgtgggaaacctattgtcgtaagccttgacgtcaagaacttcttcccatcacttaaatatggccctgtccgagctattttccaggagttggctgaggatgatgccagtgctgttatgctggccaagttttgcaccctgaatggacatctgccacaaggcgctgtgacgtccccccacctgtctaacctgctcatgcgcgactttgacgcggcccttgccgagtattctctgctccatggcttggcctacacccgctacgcagatgacctgacattttcaggagatcctagcaacgaggagatcactgaacttattagacgctgccggtcggaattagcgacactgggactgcggctgaaccgtgacaagatacggatccaacgaaaaggtatgagacaggaagttacaggcgtggtggtgaatgcaaaagtaagcgcccctcgcaagattcgcagagaactgagacagcgaatgtattacctcaataagcattgggagactgagtggcgtaaactggatgaacacagtctaaacgtgttgctcgggaaggcaaatttcatctgggacctaaatcggaacgacccagaagtggccgaatacaggaggcagctcctggaaattcgacggttttttcacaattga

SEQ ID NO: 9839 - RNA, 1362 nt, synthetic construct
  source 1..1362: mol_type = other RNA
atgaacggggatggggagtccctctccctgacagggagttgccggaaaggtatgtctggcaaacagatgtttacacgcatcccctgcgctcctctggctagaactagcacacccatcatttgtgtaatatccccgtggaattttttaggaggacatactttgagatgcgctcaggttcggagcgcggctgtgaatagtaagagtctgtgtcggaaggcttctgaatatctgttccgcgccctctttgcgaagtttgtcttctctgacaagaccgccgtaagcggttttttacgggtcttcatgaaacagaacacattcacaattcagaaaatggcagaagacttaggcataaatgtgaagttcctatacctcctcagcaaccgcacccaggaattttacaagatttaccggatcccaaagaaaaacgggaaattcagaaccattgaagcaccatgcgctatcctgaagagaatccaggagtacattctgcgtttcgtgctgcctgataagatttcgttggggggtacgagatgtaccaaggccctgcagtcccttcggcgacaggatccagaagctgacgttacccgcaacgagatcacgggccttatgtcagcggcgactgcctttgaaccggggacatctattaagggcaatgctgaaaaccattgtggccgaccagtggtgatagccctagacgtgaaggattttttccctagccttaagtattcccgggtgctcgccctgtttcgcagatatactgaaactgagaacgccgctgtcatgctggcaaaactgtgtacactttacggccacctgccacaaggcgccgtgactagtcctcacatctcaaacctccttctgcacgatttggatttcaccctcaaactctatgccctggaccataatcttgagtttacccgatacgcagacgatctcacgttcagcggtaatcctgacaatggagagatctccggactcatccagatttgcaggcaggaactgcgaaagtctggactgcgcttaaacaatgataaaatccggattatgcgtaaaggcatgcgccaggaagttaccggaatcgtcgtcaactcaaagatgaacgcacccagggaggacagaaggcacctgaggcaacagatgtactatctaaataagcactgggagcacgagtggaggaagctggacgagcattctttgaatgtgttgttgggcaaagccaacttcatctgggatcttaacagagagaatcccgaaattgccgagtataggaggcaactgctggagataaaaaggtcgttccaacgtgaggccaagaaagcaatctgctcagcaccccaagacagcgcagagcaggccaattga

SEQ ID NO: 9840 - RNA, 954 nt, synthetic construct
  source 1..954: mol_type = other RNA
atgaagatggcaaccttcctgctgacaatgtactgtaaaattcccaagactctgtcggagcttacgcagtgcctggggtctaccactgagtttctttattggctgtccaaccacatccaggagcagtacactatctttcagatccctaaaaagaatggaaaaacacgcacaatagaagcgccaagccaactgctaaaaaagatccaacggaggatattaagcaagatcctcttccagagagccgaacgcagcgcaatggcctttgagaagcgacgcaacattcggaaaaatgcctccgctcatctgggcgcagccgtggttctctgtatggacgtgaaggattttttcccgtcactcaaattctctcaggtcacagattacttggagtccctcggcatgcaaaggaacgtgtcagtgttagtagctaaaatctgtaccctacagggccacttgccacagggggctgttactagcccccatctcagtaatctgctattggcacctctggacaaggcgatcagaaacttctgcaaagtcaaaaagtaccactttaccagatacgctgatgacttaaccattagtggtaagatgaatgacgaagacataagggaggccattgccgtctgcaagaaaaacttcatgacaatcggattgaagctgaatcctgataagacccatgtgatgcggaacgggaatcggaaaatggtgacaggtattactgtcaaccaaaagctgtcagccccaaagtctctccgaaaaaggttgcgccagcggatgtattatctgaatcacttctgggagaaggactggcacagactgacggaagaagaactcaacaatcttcttggacttgtaaatttcgtgtggtccattgatagagagaaccaggaattttctcagtatcgtacccagctgctggagattaagcgtttttggaacagtgttcccaggtga

SEQ ID NO: 9841 - RNA, 945 nt, synthetic construct
  source 1..945: mol_type = other RNA
atgattaatgggaagctgagcgaaaaactcacatccgttaatatgttagcccggaagctgggtctgaccgtcaagcagctgttttttatagtgtacaacctcgagaagttctacactgtgtatcaaattcccaagaagaacggaaaattccgcacgattgaggctccagaccctttattgaaaaagatacagggacggatcttgcaaaaactggtgagtagacacaccagcaaaacagctaccgccttcgaaaagaaacgaaacatcattcagaatgcgcagattcacctcaatcaaccagtcatcgttggcctggacgtgaaagacttctttccttcactgaaattcgagctcgtgtggaagtatttccgcgaccagaacattgcccgggaacccgccagactcatcgcaacactctgtacgtttaaagggcatctacctcagggggctgtcacttctccgttccttgccaataggttgctgcatgacttcgatgaagtcatgtcccagcattgcagacaggtaaaggtcaattatagtcgatacgccgatgacatcacactcagcggcaacatttctgatgcacttaaggagaaattgatctccttcgcaagggaaggcttatacttgtacggcctgcagctaaacaacgaaaagatccgtatcctgcgtaggaataatagacaagaggttactggaatcgtggtaaatgagaagctccaggctccccgcgaacttaggcggattctgaggcagaagatctattaccttaacagattttgggagaacgattggcaaaaacttaccgagaatgatctagacaagctgctgggtcaggtgaactttgtgtggtcgatagataagaccaactctgagtttaccgagtatcgcaaacagctgctggaaataaagcactactttactctgtcaacaaaggagaaatga

SEQ ID NO: 9842 - RNA, 987 nt, synthetic construct
  source 1..987: mol_type = other RNA
atgggcggccctctgctgtcatgtgctttctcactcttcttcgtcggggggtctgtcatggtcaggtttccagatgggagtttgagcatcgcaacagtggaagccatcgccgacgttctgcaggtgagcccgaagtttctgtattatcttagcaacaacgttggtaaacactacagaattaccaagatcccaaaaaagaatgggaagttcaggaccattgaggcccccgactcttacctgaagcacattcagcgaatgattctggataacctgctcccacagtcagtcggagaaattgccaccgcgtttgagcctggcgtgggactgatggataatgttgtgcagcacgttggaaatcctgttgtgctcgcactcgacctcaaagatttcttcccatcgttaaggctccacagaatcgttagagtgctgcgcgagcttgacttccctcgagccagcgctgtattattggctaaactttgcacgctcaacggccatctaccgcagggagcccccactagtccccatctggcaaacctggctatgagaacttttgatgacagactttccctactgtgcaggcaggagaatctggcggtgaccaggtacgccgatgacataacaattagtggcaatatagaccgacattgtgcagaaagcctcatcgcctcctgccgcgtgatgctgaaggaaataggtctgcggatcaattaccgtaagcttcgtattctgaggcaaaacgcacggcaggaagtgactggtgtggtcgtcaacgagaagccatccgtacctcggcacatccggcgcgagttgcgaaaaaagatgtactatttacggcgccatggcgttgtggggtacgaacccgtgacattggaggctctacggtctttgcttggatccgtgatgtttgtgaattatgtagatcccgacaactttgagttccgccaatatgccgaggaactgaaagtcagaatcaaagagtgtgcttga

SEQ ID NO: 9843 - RNA, 921 nt, synthetic construct
  source 1..921: mol_type = other RNA
atggaaaccctacccataattaggacggtggatgagcttgccgagctgctgtgcacagacgcaaggttgctgtatgctatctcaaatgagactcctgcttggtataagtgttttcagatcccaaaaaacaacggttctatgcgcaacatcgaagcccctcgcccctatctcaagacaatacagcgcagaatccaaaaaaaaattcttagctgcttcaccgtgcacgattgtgccaccgcttttctccccggcaaaaatattcgacgcaatgccctgttccatgtgaataagtccgtggtcctgaattgcgatatcaagaatttcttcccaagtcttaagtcccgtgccgtttttgagttctttaggcggaggaccgggtacgaacctgacgtctgcatgatgctgtcacggttatgtacattatatggccatttgccacagggagcaccgtcgtcacccatgctctctaatctgctcatgtttgagattgacgaaaccatatgccaatggtgtgcgaagcactacctgtcctactccagatacgccgatgacatgacgttcagtggtgaaatcgatgtacgagtgcaggcagacatactgcagatggtgaagcggaacctgaccctccttcacttgaagctgaacatcgctaagactaaagtgtatcgttctaatcgcagacagctcgtcacaggactggttgtaaacgagtacgtcggggttcctagagaaaaaattcgggagttcaggacttggctgtattatactgagcttgacattatcaacgagaacttttactacgacagcgatgagatcgaaagcagactcggcctgttgaacttctactacagcatcaactgtaatgagaacttattgcggtggcgggacagactgctagaaattaggcgaatgtacagctga

SEQ ID NO: 9844 - RNA, 993 nt, synthetic construct
  source 1..993: mol_type = other RNA
atgttcgagaaggtccactgggagtactctgagtttctgcccgtgctgccaaccgtcagagacttagctgggtgccttgatgccgacccacggctcctgtaccgcattagcaatcactccgccgagttttatacaatacataccatccctaaacgcaatggggggtgtcggacaattgaagcccctcacccaattctaaagcggatacagcaacgaattctgagaaaaatcttgatgcaggtcagcacgcaccctgccgcaactgcattcgaacccggcagatccatccgggacaatgcaatcagacatgtgggccggcctgtggtaatctcgctggatatcaggaacttcttccccagcttaaaggctggcgttgtatacgcgttttttaggaaactgggctacgacgttcccgtcgccgtgctcttgacccgactgtgcaccttatacggtcatctgtctcaaggtgcgccaacaagcccccgattgagtaacctgctattgcttccggtggattgtggcctggccgcctggattgggaccaagcctgtcgtgtatacaaggtacgccgatgacctgacgctctccggagccctagagcgcgaagatgtgtcagaagctataggagtgtgcagggctgcactggctcgcatgggccttaggctcaactcccgtaaaactaaagtgagaaggcgcggaagtcgtcagacagtgactgggctggttgttaacgaatctgtgagggtccccagagagactaagcgagcactcagacagttcatgtattatttggattgcttcggatgggagtcatgtcgcgaacacttcggaccgggcgacgagatgttgcttgaccgggtcatcggtttcgtgaattttatgtgggacatggataagaccgatctggttctgagggagtggcttgaccggctcctcctgctgaagctccatcccgaacaggtacctccaccagcgtatcgtgcttttcagtga

SEQ ID NO: 9845 - RNA, 966 nt, synthetic construct
  source 1..966: mol_type = other RNA
atggacgccgaggagactgcgagtggccttccggagcttccagacgtggaagctctgtcagaactgctgcagatagcgccgaagtggctatacagaatatccaaccacacacccaggttctaccgagtttatgctattcccaaaaggaatgggaaattccgaatcatagaggcccctagacccttgctcaagcgcttgcagagacgcattctcacttccttgctgaatcctgtggaggcctcaccttacgccaccgccttcgagaggggtaggagcatcgcggacaacgcaagatttcacctcaaccagccagtcgtcttgaaactggacattagaaacttctttccttccctgaagtctccccctgtgtatagacttttttttgaactgggacatccaccgccagtggctgcactactcactcggctgtgttgtttatgcggccacctcccacaaggggcaccaaccagtcctcgcctcgctaatctgcttctccgccccgccgattataggatcgccgcctggattgggagacgccccattcagtttacccgttacgctgatgatattaccctgagcggagattttggccccgaacacattgccgaggcaatccaggtttgcagacacgaactgggccggctaggacttcgacttaataggggcaagattcgcatagagcgacggtgtcggcgccaaacggtcacaggattgacagtgaatgagacactgcacgcccctcgacaaatgatcaggaagctcaggcaggagatgttctacatccggaaatatggctgggaagatcggcccgaaagcgagctgcatcggctgatcggtatcgctaacttcatccgtgatgtagacccaggtgacgccgcatgcaccgcacatttagaaaaactgcatgctatcctgtggaacaggagacagaagcagctgtctgagcagttccgtcgggggttatga

SEQ ID NO: 9846 - RNA, 4275 nt, synthetic construct
  source 1..4275: mol_type = other RNA
atgaaagaaaggatcagtcctgaggtgctggaaaggcaggttctcgacgctagcgtctttgaagacttgtttgccttcctgtatcttcttgacatagagtctcccctggatgagaggtattacctgcagcacgtgattcctagatctgatggaactaagagagttctgtacgagccaaaacccgtgcttaaggccctccagcaaaaactgttacaagtcctttacgacgtgctcgagaagcctcagccttatacggagtactaccggtttcagcagaaatacctcttatcaccttgcgccacagcgtaccgacccaagatgagtgtgatccaaaatgccaattttcaccagggcaatgaagtcgtgctgaaggtggacattcatgacttttttgggtctattcccgccgccaaaatgaaatccacatgggtcgaactgctctatttctgctcaaatcgcctgatacagtctggactcttggtgcatcgaatgaagcgagagtttgtagcccaggtgatcaacactcttgccgataagatcatatatatcacatccctcaatggtgctttgccccagggatctccaacatccggggcaattgcaaacctatacatggttcagcttgatcggaagatactgcactacagcgtgcgcaacagactcaattattcaaggtacagtgacgacatgactttctctggcgaggctgaggatttgaagaccggtaagatactccatttcctgaacggattacttgggagaaatggccttcggctgaagagatcgaaaacacaggttctccggaagcataagaggcagacagtcaccggaatcgtggtgaacgccagcaaaaatgcggggcgcacctatcagcgttccgtaaggcagtctatgcactacttcaaaaagtttggtaaagagcacgctttgagaacgcacaggaccctggatgcctttctgcgtgaaatcacaggacaggtcgcatggatcctccaagtacagaaatccaataccgagttcctgagatacaaggctgagcttaacattattagccggttccatcggcagggaaagcccgtggccgaagctatggactatttacgcaatttggcccagcaggcggaacagtggaaggcgaacgaaactgtggtgatcggcgggctggagtggaagaaggaaagtgaagtttatgaaggggaagacatggatggtatatatacctttcagcgcaggggacaaaagcgctcattctttaccaggaaagccctggagaagtatgttaataatcaccccgaatggcgtctacccactctgcacgaatacgagagatacttcgatgagactcgctaccatgaccgaatccagctcggactgacgctgccgtccgatcctaggtataacggcattgtgaacggcacagagtttctgcattttaatagggtcggcgcctattggacctgcgatcttagacccagaatgacactacggatggccaaaaaccgcctcggtagaaaagtcctgtgtgtagccgcaaagaactggccatttcagcatcacctggcgaaaatccgatgcgacttaagctacgtgcgccacgatcacgtgatggacctccgcgtacccgttaacgttccaggcaccatggagtattccagcagctctgacgacacccaggtcctcctgccagaagaagccttcagtgttaaactcgtgagggagatcaggcccaacgagcccatgaccaattttcaggggatggacttcgcccttcggaagttgtctaatagtcggttcagcacaaattttaaagggctgcaactcaccgagatcccaaaagaggtgctggcctcatggcagagttcttccatgctgtttgcaaacaaccagattgaacacttcgacttacgtaatgtccctccagtcaaacttctaaacctcgagaataatagactgaagggttttgacttctccgcgctgcacccgggccttagacaccttctgctgaaaggtaatcctgggttgaagggagtggaaattccctggattcagctgatgcgacagcttcatgaactttcactggatgacttacctgaccttgtcggcactatgcctttggagtccatctacctgcaagcattaggaggggaggtctggactatcctagaaaacgagcaggaactggacgctctcattggtcaacagaaaccggtttcccacctgttggtacgctacagggttggcattgatacgctggatagccggaccctatttgagaagctgaacagaatcgccccaaagcatctgtacgtttgcttcgagcctcaagacgagggactgcgtcggcgactcgatcgtctcaagtatatgaccgcatcatgggaaaaagagatcgaagagctggatgggtacataaagaatctctccttgagaaaggatatcgaaactagggtgaccctgtttccgcaacacttagacaacaatcggatcaagcacctgatgatcgacttcagctggctcccaaacctctgcttcgaaggcgattttagaattaagcctgatagttaccacctactacaccctggaatccccactttgctacttccagcaataagtcagcggttccaccggccaacagtgttgatgaaaatcatcggcaataagattgtgccaacccagcacgaattcccggaagctgtgagtctggacgtgtgttatcccctggctaaaaagcatcgcaaaatccggctctctaacctccatactttagtgcccatgcaccaggagcatgtcggggacctggtactagtgttaagcgaggatgccggcaaacaactggagcaaggccgcatcgaggaggtctatccccgggcatacgaactcagaagcggttcgcaattttggcatgacgtaatggcccatagcaagagtgaaaagacgacatttaggcagcggattagctctatccctctgctcggcctatctatgcagtttgacgtttatagcttgtctctaccaattgagagcgtgccaaaaattaaccgctttggagtgctgaatctgactgaagtgggcgagaacaacactatgacttacaatgataccgatcttaagcagtttctcgagagatcctcgcctagcacagagtttgcatatctgtccattttcgctcacaaaaccccggctattttacagttggtgcgggattcgaagcgcaaacgcaacgccgacctgccatatgtcatccgcaaaaatatctacgctaccgagccactggaacgctcacagacgattgacgctctcagagcaggagagctattagctatatctctgtccaagcctaatcgacgggaccgtgagatcatgctcgcagcggtcgaggccaacccctttgcaatggcctttgcccataaagcgcttaagcaagacgctggctttattctggctgcaatgaacatttcgttgcggaccttggttttcctgtctaaagatctgttcaagtccaggaaccatcctaatagcgcactgcaacaggtgttgaaagctttgatggaaaggtacaatccggaagatttcaacttcatcgtaggaagactcagccgacatataaacatcgagaaagaaccagtgtacaggttcgtcctggagcccaagcccctggattcaagcgccgtgctgatgtcattcgagcaggagaagaagatccttaacaacagattctgtcagcgcagtgggatgtacaaaccaattcgtaactacttcttcaaagaagctgaaaggcggggcttcattaatgtcaatgggtacttcaacgatatattcaaggctctgtcacagaacacctccgtccgattcttggacctgtcattcgccggcggtagaaccttgtacgctctcgatcgactgggtgatatccctggcctgaggaagctgaagctgactgaatgtaagttcatcaatagtctccctgggttgaagacactggaggtgctgaacatcaaccgaacatccaatttctggtcatatcacgacggcaagacaatgcatcaatccctgcccaaccttaaaaggttagaagcaaagtacattcacattagcatgcaggagattgaggatctgatggtgcaccacccatgtctcgagtatcttgccatcagcgttacatatgatgacgagttggcagagataaatgctataattgagaaggtgtctgcccaaggaaaagtaatagaaattgtgctggacaaatccgaatatatcggggagctccccttttga

SEQ ID NO: 9847 - RNA, 4254 nt, synthetic construct
  source 1..4254: mol_type = other RNA
atgatcgatcagaataatcagatcgtccagatttccgtaaatgacttcctgaagacagactttaatgttacacgtctgaagttcaatgctttgaagctgcttcatgagttggaactgtcagaggagctcagtgaggagtgctacatcaaacatgtcatccctaagcacgatgggacaaaaagaatattgtacgagccaaaacctttgctaaaagagattcaaaagcagttgctgaacctgttatacacacttaagaagcatagagactatcctgtgttgtctcggaacattaagtacaagtaccttccaacccggagcagcacagcatacctgaaaggctcgtctgtagtgaagaacgctaattttcacattgggaaagatgtggtggtgaagcttgatatctcaaacttcttcaacagcatcccaaaaaacaaaatagaactgttctggttcgatatccttaatctgaaggtcaagtacttgattcaccttggcataattgagaaggatgaaaccgaagacaaaaagcagctgattatatccggcctggcgaagaaggtactgagcagtacaaccttgaatggatttttaccccagggttctcccacaagcggctacatcgctaactcatatctggtcagttttgacaagaagatgctcgagttttgcgtaaacaaaagtttatgctacagcaggtacagcgacgatatcacagtgagcggcagcaactccgagcttgtcagtaaacaggtcataaagtttgttcagcaccagctatataagaagagcctcaagttgaagaagagcaagactaaagtcctgaaaagacacaagcggcagactgttactgggattgtggtaaatgaaaagagaagtgccgggagagcgttcaagagggggctgagaatgcagatgtactatctcaagaaattcggcctggatcatgtgagccggactcattccaatatcaattcattcctcctggagcttgcaggcaaggtgaattgggtgctgcaggtgaacaaagtggatccagaattcaagcgctacaaaggagagttgagcattattaagaggttcctggccctgggtaaaaccgtgggcgatgctaccaactacattagtgagctggaaaacaaggacttcaagatcaagaacaattccgtctttatagctggactgttctggcggatttccgatgacgatacccagacggattacccttccatagatcgaaaaaacaaatcggtgcaactattcactgaggaaagcatcgagttagctctgaaaaacaatcctggctggaggctccccaccatggacgagttcaacaatttcatcaaggaaactaacttcgaagatcgcagggttctgggaatccgatacccctttgacccccatttcaacggtctagcggatgagaatgggtatcgctattataaccgcgtgggactgtattggacgagtgacctggctcatctgtctaaagagaggtccactaaaggaagaattgctcgtaaagccatctgtttcctgagctttgaccagagaattaagaagaagatcaaccataacaccgcgtgctatatttcaagtaagacattctccctgagcgtaaacaaaaaacaaaagttcgagcttacgaacaatcggtccatcgactactatctgaatccgccactgaatgaggactttcaggcaattgttggagcctgttccattcgattggttatgtcagaagaaatgaccaaaaaacccatgatatctaagaccctctgggactccatccaactatctaaattttcagtggacctgtctaacttgaacttcgaggaatttagtttctccctcaagaatgttaatgcctcttctatactgctctacaacaacaatctcaaacacgtgaacctgacggaaattgcacctgtgaagcgcatcgacctacgaaataataagcttgagtccatcaagcttaacaatctccccaagggcgtgaagcatattaggctcgaagagaataaagaccttaagctgctcgacatcccttggaagagactattacagtccagccacgaactcacggccgaccagttgatttttgagcgtcagaaatcgcttggggaaatatacctgagcgctctagggggcgagtcttggaggactgtctcctcagatcatgagttgaacgagctgatcgattcaaaaaacgccgtggaattcctcaaggtaagattcgaaatcgggaccaataagatcgacagtaaagagctgtttaacaggttgagcaaacttgaagccatccacctgtttatagaattcgagactaaccacgagcaaatcaatcaattgatccaccgtttgaaaatgtcttttggctcaattaccccgctcaatgaacaccttaacagcctggaacgcgataacaaccaccaggagaacatctttctcaagcagtacgtgtttaatgctagcgatttgaagaatatccacctgaagtcactgatcattgattttagctggatccccaacataaagttcatcggagactttcatgttaagcccgacttatatcacctactgcatccaggaactagttttacctcactgccggcaacctctgtcgagtttcaccgccctaatattctggtcaaagtcttaggcgagaagcgcataggcaatgaacagacctacctccacgtaacctatccttttgactcaatcgaggaaaggcaccagaatatccagacaatcatcccaaagaatcagattttcatcgacgaactcattttggtgttatctaacgaaaatgagaaggagttgaaaaaaggacagattgaggaacactttcccaaactatacgcaattaatagatacaacagcaaaccacatgcatcaaagttaactaccaacctcatctattccaaacgcgtttctggtttccctctgctgggattcgcccttcagtttgatgtgcacaaactttccgtgcctctcgaatcgttctacaagaaggacaaattactgtttaacccagagcgtttcaagcgggagaaggggccaatcatggattggaccgaggttaatttcaaccaaaagattcactcggaaaaaaaaactcgcctcggaaaggaaaaccttctcagtgatctggacattttttcacacaagaaggaatcgaaaccgcctactataccaccctccgatgacaggcccctcaaccgaccttatatcataaaacacggggtgttcgccaaacataaactgtacagcgcctctgataacagtcggaacaaagtcatgactatgctcgccagcggcgaaatcgccgctaagcacctccccagtaagctgaagaatgatgaggaggtgatgttaatcgccataaagcggaacccttattccatggtctttgcgagtaaaaggttgaaagaaaaccctgcctttctgctgaaagcatgtaagatctccgcccgaaccctcgtgtttctgccaaagaaactggccaccaaacaagtgaaatctgacagcatctttaaccagctcattgactatctcctgtcttttctgacaccggcagaattccatttcgttatccacaaattaggtacacatatttcccagagtgacggcgagtaccggtattttacatgtgaggagacagccctggaaaaatcacatgtgatctcatcattcgagtccgaagtgttttaccaggaatctaccacaagagcagggatgcccaatattataaggaaaactttcctatccgaggcaacaaaacagggtatattcaattctaacgggtactataactccttggagctcgccaagcaaaacaaggagaactgtcgatatctggatctctctttctctggctaccaccatgacctaacggctctggaatctttcaagaacttaaagacactgaatctcagttataccagcgtcaattgcaaactcccaaacattccatccttagagaatctgtttgttgataatacccggaattttttcagctacaatacgcccactctgctgaatccgatattccccaatctgaagattatttatgcccgggaaacgggttatctcagcctgaaagagattacttctctgctgaatcttcttaccaagatcgagattatcgaccttagaccatacttttatatcaacgagaaggagatccttgctctccagcaacaactgattcaacagggtcgcacactggagattcccatcaaaacacccaagtga

SEQ ID NO: 9848 - RNA, 3696 nt, synthetic construct
  source 1..3696: mol_type = other RNA
atgaataatagcgaattgacccacaggtccttcacggcagattttcttaaatccgacaagatcgaatacactttcaacgcgttaagactcattcatgacctcactctcccagagcattttgacgaaagctactacaacaagcatgtcatacccaagtctgatggatcaagcagggtgctcttcgagccgaagccggtcctgaaggagatccaacaccagttgcttgaatttttcaacagcatcctcgagcaggtgcctagaggctatcgccagaaagaccggattcgcaaaaagtacctgccttcatcctgcgccaccgcatacaggaagggcaagaacgtcgtcactaacgccaactttcatatcggaaatgaagcattgctgaaagcagacatcgagaacttctttgatagtatcgacgtctccgaaatgtcctctatgttcatggacttcctgtacattaagtccgggtacttatctctaattggtatcctcgatgagaattggtctgacatcgagaaagctaaagtgcggctgagcctggccaaaaaaatcgttaccgtaagtagtctgaacgggggtcttccacagggctccccaacaagtggcattttagcgaatttctatctggccaagtttgaccggaaatttcttaactattgtatccgtcacaagctcaactacagcaggtactcggacgatctgaccgtcagtgggaatcaaaaggacctggctcccggagctttgcttcaccagatgaataaactgctcaaaccactgaagctaaggcttaagaagagtaagacaaagatactgcgacgtaacaagcggcaggttgtcaccggcattgtccttaacgaaaaacgaagcgcgggccgcctcctaaagagaagcttgcggcaagagatttactatctcaaaaaattcggagagtcacacgtttcaaagcatagcagtagtaccaagaagtacctgcgggagctgtctggtaaggtttcttgggttcttcaggtccaatctgcagacaatgagttcaggcgctatagtggcgagctgcagataattagcagaatggtaaggtcagggaagacccttgctgatgctgcaagttatatccaattcctggagaataaagctaaggagctcaaggggcctgagccattaatggtctgtggcctggagtggcgtaagaatgatctcttctatgcccgtgacctgtacaatttgtttgaaagagagatgtatgctgggagagtgggagggaacaaagaggaacccggactggtattcaccagaaggggcgtcgaaaaaaagctgtatacagaagagatgatgcttagagtagtaagcaggctcattaagtggcgtctccctaccagcgaggactttgctgactatattcgggaaactttttacgaggaccgagcccttctgggtctgagagtgccaagcgacccgcagtataacggaatcgccgagaaccatggcttgtgcttttataacaaaatgggtgcatactggacagcagatatggtgcatgttaaagatcctaagagttccgtgcgagctaaggtgggacgaggagtgttctacgtgaaatcccgccattggtccaccaagaatcgcctcgatctttttgggggggagtggatgagtaaaacaactgggatcaagccagtgaacgctgtctactacttcttggaccagcgctttcacaagaatctggcgacgaatgtgcccatcaaggataggccatgggttgagtctactcagctggcctgtagcataagactggtccgcacccagtccatagagtgggaagcgcaccatattagcgataaattttggcaaagcgtgtcatccacacggttttcctcagatttaagtgggaagcacatttcttcagtgcccacaacatatctgaagaattggaacagcagttctctgctgctagcccgcaacaaactggatcagttcgacctgacagcttgtcctcctgtgaaaagaatagatttgtcgggcaataaactgaagcacttcgacttttcgtctctccccaagggccttagacacttattaattgatgatatggacgccctcgagggagctaagctcccctgggacaagctcttttcttcccttcatgagttaactatcaagaaccctcacgatgaaccccaactgaccgatattagcgaactgtacgccctaggttttgggtactcagattgcgtcgaggtgacctcagacgaagagctacaggcattaatccagaacggcgagaaaataaagttcctcaaagtgaaggtgctgctgggctcgggtgcaatctccaatgagggcctgtttgggttgataaaccaaatcgctcctctcacggtcttgattactttcttgtgcttggaccagggccttcagcagactctggatcggctaaaaatggcatccggcaacattcagccttacatggaggagctcgaggcttatctccagactgtttattctacgagcctggaagagtacaactggctgcacaagccactcgttctgaatccggatcagttaaattctaacagaatcaggcacctgattctcgacttatcatggttccccaatatcgtttttaacggggacttcggcattaagcctgacctctatcatatactgcatcccggggtggactcattacagctgccttccacctctacggaatttcatcgccccgggatcctgatgaaaattctggccgattcttatcagcctgtgccacaggaatatccctttattgtaacctatcagcctctgaatcgatggaataagcgagtggccaaaaaacacatgttgaccttgttgcccgccaatcaaaaccacgtgtcagagattgtcatcgtggtggccggaaaaagtgccaaagaatttcagatcggccgtatcaatgttaattttccgagagccgcccacgtgatgtttgaaaaggagttcctgttctacttcacccgggagaaatacagcttcactgtgtcgcgaaaaacatttgaattcccactcctcgggtatagcaggcggtttgatgtgcacaagttgaacttcccacccgaatcaatctttaggaacggtcgctggtctagccttatatcagacgtgcttgaacaagactccgagcacgaatccgccgtgcattggctagacttctattcccagaatatgggatacttcgaaggcggcgaacctaataataacgtgccccacaaaagctttaacaacaacttcgaattcgcgatattcccggcctttaaggatccagatttcagccgcctgaactcacggaatctcgagaaatttggatttccatactccgtgaaagacggagttaggttctccggcgtggattacagaagcctgtctcgggaagagctacttacaggtctgaatagcggtgaactcaatccaaagtacctgccctccaaatataaaaaggatgctgagctaatgctggctgccatcaggttcaacagttttgcctttctgtacgcacataaaggtctgaaaggagactctgatttcgtaatcaaggcaatgcaaatctctctgcgggtactggtcttcttgacaaaggacacattcaagaaccgcctgcaccctaatggattgctgcagcagatcttctcgattctttccgccaagttctctccctga

SEQ ID NO: 9849 - RNA, 4359 nt, synthetic construct
  source 1..4359: mol_type = other RNA
atgagagtgaggagggttagtcaggttagcctggtaaattatcaggacctggggaaagaagttctatcatttgataacatccccaacttacctacctttaatgctctctgtctggtgcaccaattggagattgacggcccactgacagaggagttctatacgaagcacaccattaagaaacagaacggaaagctgcgcatattacatgaaccaaaacctgtgctcaaggaagtgcaaggacaactactgcagttcatatacaccaacgagaacaaggagtggaaaaatcgtagataccctaggaaagtgaacaaattcatcctgagagactgtgcagtggcataccgacccggaatttccgtggtacgcaatgccaattttcatgtcgcaaacgagttagtgatgaaactcgatatcaaggacttctttgggagcgtcaagaccgataagttgttgcccttttggctcaatttactgtccaccaaaagccactatctctatcagctggggatattggccagggaactgtcgcaggaggagaagctggtcgagctgacgaaacttagtaagaaactcgtgaacgtcatctctctcaacggattcttgccacaaggctcccccacaagtggaatcctggccaatcattacctagtgcggttcgataaattcttcctggactattgcattagaaatggactgaattactcacggtattcagatgatatcaccgtcagcggatcaaaagataagttaaagccacaggcggtcttggggactataaaccgattgattaagctcgagcagctacagctcaacaggaccaaaacacgtgtgctccgcaaacaccagcgtcaaatagtgacaggcgtggtagtgaacgaaaagaagtcagtgccaaaaaccctgaagcgggggttgcgccagcagatgtattacctcaaaaaattcggcgaggaacatattgaaaagttgaaaaccacccgccctaagtaccttcagaagattaagggagagattagctgggttctgtcagtagagaaagccaatgccgagttccaccgctactttggagagctgagcattattattcggttctgcgaagcgaataagaagattacagaagcagtggattacatagagtctgttgaagcgctcgcagctaagctcaatacccaggagtttacaatcattggcgacgtcgaatggaagaaagaggacgagctcgctgtcgaacagtcagggactgccactgaggggctggtgcagttgagtaagtggggcaaaaacaggacactctacactgaagcctcaatgatagagatcgtttctaagctgaatgatggatggcgtctccccagtaccgacgagtttgaactctaccttaaggagactctgtacgaggaccgccaacggctgggcctgagaatcccaatggatccccagtataacggcttttttaacagcattacgcatgctagagcgttcaacaaggtggctgcttattggacctcttccatgacccatctccctcatatgtctcagagtaataccaggctggggagaaacgtgttcctgttccttccaaaaaaaggggggtataaagcctctctgaatagacggtttaagaaatgtagccggacttcagggtatattcccgtcaatgatttcctgtccctaagtggaacagtttcagatggagatggccacttttatcctaggctgttttctctctatcgcaaaactcagacgtattcatctgctttcagcctcaggctggtgcgctctctgaatatcgaggccaagctaaaaacaatcgatctgtccgtgcatttttggaattccgtgtccacggcgaagcacagtaccgacctgggtaatcttggcattgcaagtgtcccgagcaatgtgctgatcaattggcagtcttccagcattctgctcgccaataacaaactgaccagtatcgacctggagcagctggctcctgtaaatagaatcgacttaagcaacaatgagctcgagaatttcgacgtgaaccttttgccgtcgtccgttaagcatctgatcctgcaccagaacaccaaactcgttgatatggttgttccaatcaagaaacttatcccccgcctacatgaatttacccttgacgctccagagctccctaccctggacttcagcgaattgtacgaaaatgctctagaacttatgttctatcggtgcgattccgatgaagaactagaccagctcatacaacagcagatcactgtggttgcactgcaggtgactgtccagatcggttccaacaagattgaaagtaccaggctgtttgaaagattgaatcaggtaaagggtttagagacactcagtatcctgtttgagccctttcatgaagacctcagaaatcgtctcacaattttgaagaacgctgaggtgtttcacctgagctctttgctggaacttaacgaattcgtagggttagaccagagccaatctgaactcttcgttgaccctatcgatgccgagcttctttcaaaaaagcacgtgttttatcctgaacaccttcagagcaactgtatacactctctcattattgacttttcttggttacctaacctggtctttaatgggaacttcaacgtcaaacccgaaaagtatcacctgctccaccctggcatccaggtcacagatttgccagctacaagtgaatcctatcaccggcccaatctgcttctcaaaatcatcggcgtacggggagcttgcccgtctgactacttctcaaacggtcagtttcagaacctgactatattttacccgttaaacagtctgttgttcgagcaggagacaaatgtgctgtttgacatcttacccactaagcaatttcacgtggagaatttcgtgctggtctgcgccaacaatgaaaaaagatcagtgagacggggcaatgttttgagcttatttcccggttccaaggccttcaagggagtagcccagagccaggggcgatcttataacaaaatcgtgggccttgggaaatcaaagaccttcttcaatttcccacttgtgggctacagcctgaaatacgatgtttacaagttgtccgtcccttttaggactatgttccgggtggtcagtgagtacaggaactcactggtgctaaacgaagagacaggtctactgaagcgcatgtccgagggcagaacggaatttagcgtattccactctagtacaaagtacgacctctctcagatgaaccaactaaatcggatatcgatcttccccatgctatatgacgacgccgccaagcggctgcaagttctcccatccatcctgcgcaagaagtacgtgatcaagaggaagcaacacgcgaatgatcctatgataggttcgctgaaccgcgaagatttactggcaaacctgaaacaaggcgcaatcgacccctttaagctctcccgacgaatgttcaaggatgaagagattatgctggctgccatttatggtaaccctttcagcttcattctggcacatccctccctaaagcttaacagcagctttgtccttgcggccctggagcgttctctgagaatcctggtgttcctgaaccagactatccgagaggagaaaagacgaaagaacgccgtgctgccagcagtggccaattacctgacagaaaagtacgcagctcaagacctttactatatcctcaatcaaatctacaggcgagtctcctatgatactaagggcatgtatacctttgtgcatgagggtaacgagcactccaagctgtctgacctgcagtctattgaacaggagttgttcacatttttcctgggcaaccgagccggaatgtccgtaaagtactacgactactttgtgaaatacgcaatcgagaagaagtactttaatgccaacggcttctacatgagccttaatatcagcgacgaagccgcattggattgtgtctgtttggacttatcgtatttgaaattgtcccagccgctgactctgccaagtatgcccaatcttaaaacccttaaactgagctttacgcggtttttcaatattgccaatgtccctctttttccatcctgtgaagagttatacttcgatggtctgaacgcttcgaacctgggcgatatcaacatcttctgcagcaagtttccgaagctcaaaaaattgtatgcccgctgctcaaattttctcatgcccgagcatttcaagactattattgagcactgcctcgagcttaacttcatcgatgtctctcatttcaacgaattcgactccatggggaaagagctgagggagctttgcaaaaaactggacaggactatagagatacgggaggatattaagaaatga

SEQ ID NO: 9850 - RNA, 1227 nt, synthetic construct
  source 1..1227: mol_type = other RNA
atggggacgtattgctcccccaccacacgcgctcaagtgagagcacagctcgtagcgaccctgtggcccgcagataaatttttcatcagagagaatctcgaccagaacattaaagcctcatttaatgtggttggaaaggcagcccccaaaatgacggccaatagcgaagagctccttcggctggtaggcgccacatacaagtcccagaagaagatttcccagtacaaaaactatatcaacactcttaccaaccggggtctgcctgtcatattttcttttaggcacctggcagatgttttgggcgtcgctcccgcaaccctacacacaatgagcttccgcacagatctgtactacaagcgattcgacatccctaaaagaagtgggggaattcggaaaatctctgccccacacgagacactggccgcgatccaacggtggatcctcgaaaatataatctccagggcctatcagattatttcaccgagtgtggtgggatacgtcaagaataaatccatcaaggaccacgtgaccgtacatgctcagtcgaagcagcttgtgaaattcgatttaaaggacttcttcccaagcatttctgtggagaacgttaagcacatatttagtgagattggctattcccattctgtgagcaggactctcgccgccttagtgacactggagggcggtctgcctcaaggcgctagcacctcacctgctatcagtaacgtttttatgcagtcgttcgataacgcaatgacgactttctgtgacgaaaagtgtttcctgtacactcgctatgccgatgatattgtcgtctccggagagagcggtgtgaccgaatcactctttgacctcaaggctaagttcagtgaatttgggttaactcttaatcatggcaagacaagggtgtacgctgatctacagagggttaaatttgtgaccggtcttatactctgcgacggcaacgtgcgtttgcctaaaagcatgcgcagacggatccgcgtccaatgccatctgttcctgacacagttggaacggatgactgggctgggaccaaccgaggacaatgtttcagtaccatcttcttggcgatcccgtgaaagagtgtttgacccaacttttcccgagagagtcttggggaaactaaactattggttgttcattgagccggacaacgcttacgcgaataggatgaaggccagcatcctggagcgactggaagcactgtga

SEQ ID NO: 9851 - RNA, 1077 nt, synthetic construct
  source 1..1077: mol_type = other RNA
atgctctcaaatgctgatctgctcgagcttgtcaaggcaaaatacaagacagagaagaagataaacctctacgcagagtacatcagtaaactggaagaacggagtgtcccagtgattttttctttctatcacttcagcgatatcctcggaatctccccaaagacccttagggctatgagtttcgacactcacctgttttacaagtcctttgagatccccaagcgctctggaggcatcagaaacatctatgccccttacccttcgcttgaaagcgtgcaacgctggatcttaacgaacattctcgagaaggcgttttgtgattttctacccatggtcgtcgggtaccagaagaacaaatctataaaagaccacgtgtctcctcatgcctctagtgagtgcatcctcaaatttgatctgaaaaacttcttcccttctatcctgttcgaccacgtgtatctcattttcaagaatatagggtactgtcattcagttagcaaaattttgagcagtctggtgacctttaatggctccttgccgcagggcgcctcaactagcccctgcttgtcaaacatttacatgaagatctttgacgcagaactgaccctttattgtgagcagaaaggttttttttgcacacgctatgctgacgatatagccgtgagcggcggggtggagctcattaactgcttaaagtccatcaaaaagctgttcaatgataatggactgtccctaaaccatgccaagaccaaggtgtacgaccgtgccaaggaagtgaggttcttaacaggcttggttgtcaacaaaggtgtagtacgaattcccaaagaaatgagaagacggatccgagcgcagtgtcacctgttcattaaggagatagactgcttggtttccaatctgcccaggccagaatataaactgccatccgagtcatggaaaaataaggaactggtgttcgacccaatttttccggagcggattctggggaaactaaacttctggcttttcattgaacctgacgataagtatgctctgagcatgaagaagatgatcgaggagaaactgaatgaaatcgtttga

SEQ ID NO: 9852 - RNA, 1053 nt, synthetic construct
  source 1..1053: mol_type = other RNA
atgctagaaataaacgaagagatctatgaacatctcagttctcatatggaactcgatcagagagacgatctgctgaagctcatccagaagttcgatgacatgcagatcccagcaattataactttcgacatttttgcaaggaccgtgaatatcaataagaaaagcttggccgctatgtgctacggagccgagaaattctatcgtacctttaaaattcccaagcggtctggtggcatgaggcagatagattccccgtttcctagtctgtctctggtgcagaaatggatttccaacaatatcctggagaagcttgacatcgacaacgagtcggcttgtgcgtacatcaaagagaaatccatcaaaaatcacgtcgaaaagcacatcgatagcgcattcattctgaagatcgacctacaggattactatcccacgatttcaacaagagacatcatttacactttctccgagattggataccccgtcaacattagtacctcaatcgcccacatacttagcctaaacggcggtctgccacaaggcgccccttcatcgcctttactgtccaatattatcacattggggctggatgttaaaatcaaggagtattgccagaagaacaacttcttatactctcgatatgctgacgatctggccataagtggcgagaatatcagcgaagataatatactggagatctacagactcatttcaagtgaagggttcatagttaatacctccaaatcaaagctctatacacccaaacagccagtacgccaccttacaggactcattattaacaatgggaagatccgaattccgaaacagacccggaaaatggtgcggcaaaagcttttttacatccgcaactactatttgtccgacttggagtcttctagcaaccataacctgtttagccttcacgaccctctgttgctcgagagggtgctgggctacctgaatttttggctgtggattgagccagacagcgaattcgctactgtgtctatccaagagatcaagtccattaagaccaagctcttagaaagcatctga

SEQ ID NO: 9853 - RNA, 1029 nt, synthetic construct
  source 1..1029: mol_type = other RNA
atgaattgggaggagtataagagcaaattccaggatcaggcgattatcgtgggtttgcctctcggggacgtggaagaatgtctgtcttacgcctttggtctgtacgaacgcggccttccagttatttatgaccaggcccatctttcatatcttgtcggctacgacgtgaaatttatcctgaaagcttccaactccaatgggccgttctatcggacctacgagatacctaaaagaaacggaggattgcggataattgatgaacccctgcctactctgaagtcgattcagagatggatcctggacgaaattctcagccaagttgagattagcgaacacgcacatgccttcgctaagaattgctccatcgtaaaaaacgctaggccccacctggcttcaaagaagattcttagcctggacattgagaacttcttcggtactatagactttccccgagtgtatagcctcttcacacggctcggctacaatagtgtggtggccactaccctcagtcacctggtaaccatcaggggcgtactgccacagggagcacctacatccccagcgatcagtaacattgtgacgttaaaaatggatagaaggttcagtggatacgccaagaaattaaagctggagtatacaaggtacgccgacgatatcactttttctggtgagtttaccagcgggaccgtgatttcttttgctaggcgcgtcgtggaggaggagggctttaagctcaatgaggcaaagacaagatccatgggccgccaccaagcacaggaaatcacaggaatcatcactaacgtgaagctacaagtccccagacaaacccgccgaaagctccgtcagatagcataccatatctctacatacgggctagatgatcatttgcggatgacgggcgaattacgtgtcaactatatctcacacatcttggggctggcctcccatgtgctgcacgctaatccacaggataaagacgccatgttcctgaaatctgtcgtttgcgttaatcagaccgactcattctga

SEQ ID NO: 9854 - RNA, 1092 nt, synthetic construct
  source 1..1092: mol_type = other RNA
atggactttcctcgtgactcttttatcaaggagatcaacagcgccagaccagagtacaagaaagcagtgctcgattatgcagacaatctgttgtcgaagaacctacccgtcatcttcagtttaaaccattttgcggagctgttcggaatcgatattaatgaactcaggttcatgctcaacaacatagatgaattctatgcctactacttgataaagaagaagcacggagggaaaagacgcattgtgtctccctataggaaccttaagcgcattcaagagtggattttgcatgagattctggacaagatacaggtccatccccagtgtaagggctttgttcgtggcagcagtacactgcagaatgccaaaccgcacatcggacagcagtacattcggaaatttgatcttaaggactttttcgagtcaatcaccatcgatcggatatatggtatattccattcaatcggttacagtcccgctgtcagctatgatctcgccaccatttgcacgctgaaactatccgactataaatacgtgtctatgtccagactgcagaagaattggtttggttacctgtactccaaggagaagccagtgttggcccaaggggcaccaacatcacctgcactcgccaatattgcttgtcgaaggcttgacgctaggttttggaagtacgcactgagcaacaatgtacagtatacccggtacgctgacgatctgacattctctagtgaacagattagatccctcccaaacacagctttcgtaaacaaagttattcaagaagaggggctgactttaaattatagcaaaactgggacctacgggagatgctcacgccagatggttaccggcatcctcatcgacggcgaaaagcctagggtgcctcagaaatttaaacgacaaatttatcgccatctgcacttctgcaaaaagttcggcgctaaaaatcacttcgaacacatcatgccccagcacactaacgcccggcagtggctttatggcaaaatcatgtacgtgtacagcatcgaaccggaggaagccaaaaagatgctgaagctggcggagtccttagagtggggaatcatgtga

SEQ ID NO: 9855 - RNA, 1092 nt, synthetic construct
  source 1..1092: mol_type = other RNA
atggatttcagccgagacagcttactgaaggaattggagaacaccaatgtggaatataagaaggtaattatcgagtacacggacaatctgctaaaaaaggatctccccgttatctacagcttgaaccattttgcaggtattctgggtcttgatctgtccgagttgaaaaccatcatacataacattgatgggtactatgcgtactatttgatcaagaagaagcatggcggaaagcgccggatagtgactccatataggaacctcaagatgatccaaacctggatactgcatgagattctgaacaagatccccgtccactcccagtgcaaagggttcgtgaaaggctcgaacactctccagaatgctaagccccacatctcaaagcagtacattcgcaatttcgatcttaaggactttttcgagtctatcaccattgaccgggtatatggcgtttttctgtctctaggttactcaaccgcggtcagttttgacctcgcctcactgtgtactctgaagattagcgactacaagttcgagaacctatccagatacaagaaaaactacttccgctacctgcatgtgaaacctcaggccgtgctcgcccaaggagcaccaactagtccagctctcgccaacttaatctgtagacacctggacgagaggttctggaaattttcacttagcagggggatacagtatacccgatatgcagacgacctcacattcagttctaatcagctggaacttttgccgaatacaagcttcgtgaataaaatcgtcaacgaagaaggactgcagcttaactatcagaaaattggaacatacggaaaaagttctagacaaatggtgacaggcatcctgattaatggcgagtcccctaaactgccccagaaatttaagcggcaaatttaccgtcaccttcacttttgcaaaaaatttgggacgtacagccacttcaatcacatcatgcctaattatgctcacgccaggcagtggctgtatggcaagatcatgtatgttaactccatagagcctgatgaagctaaaaagatgctctctatcgccaattccttagattgggggctcctgtga

SEQ ID NO: 9856 - RNA, 966 nt, synthetic construct
  source 1..966: mol_type = other RNA
atggctggtatagtgtctgtcgaatactctgagctcatctcgatcaaagatcacatcgatgggtactatgcctactttaccatcaagaagaaacactcatccaaacgcagacgtatcgtggtgccctatcaaaatttaaaatgcattcagaggtggattctacacgagattctggataaaattcccgtgcatcctcagagcaagggctttgttaaggggggaagcactttccagaatgcctcccctcacgttgggatgtccttcattcgcaagtttgacttcaaggacttcttcgagagcataaccgtccagagggtgtatggcatcttcttagaaatcggctatagtcccgcagtaagtcacgacctggccacgttgtgcacattgaaacttaaggaagagaagtaccagagtctgagaggttacaaacagagctgtttccgatacctgtataataaacccaaagcagtgctggctcaaggagctccgacctcaccagcacttgctaacctgatttgccgcggccttgacagcaggctggccaaatttgcagatctgaatggcattcactatacccggtacgccgacgatctcactttctcagcgaacgagctggagaagctcccaacacagtccttcctgaagaaaatagtggaggaagagtccttgaagctcaactactctaagacaggaacttacgggcctgagagcagacagatggtaaccggtatcctcattgatggcgaaaagcctcgagttccacaaaaatttaagaggcagatttatcggcatttgcatttttgtgaaaagtatgggacacaggcccactttgaccatgtcatgccaggatactctcatgcgcggcaatggctgtatggcaagatactttacgtctactcaatcgaaccggagatcgccaaagacatgatcgccaaggctaacgcactggactggggactcctatga

SEQ ID NO: 9857 - RNA, 1095 nt, synthetic construct
  source 1..1095: mol_type = other RNA
atggagttcccgagagactccttcatacagcaactgaacgggtgtacacctgaatatcggtcagctatcattcaatacactgacaatctgcttgccaagaaactgcctgtgatttttagtctgaagcacttcgctgggattgtcggaatggatgaaggtgaaataaggaggatcttggatcatactgacggatactacgcgtactacaccatccagaagaagcactcaaagaaacgtagaagaatcgtggtcccatatcaaaacctaaagcggatacagagatggatcttgcaagagatccttgataaggttgcagtacatcgccaggcaaaggggttcgtgaaaggtggtaataccttacagaacgcactccctcacctgggcaaaaaatacctgcggaaattcgacttcaaggactttttcgagagcatttcggccgaaagggtgtacggactgttttatgagctgggctactctccagcagtctctcacgatctggccgctctctgcacattgaaactctccgattacaagtatattagtttgaagggctacaagcagcgctgttttaagtatctgtatgacatgaacaaggcggttctagctcagggggctcccacatctcccgctatagcaaatctgatctgccgcggactagatggacgctttgccaaatatgccgatcttaatggaatccagtacacgcgttacgccgatgacctcaccttttcagccgattccctggaccttttaccgtcttttggcttcgttaacaaggtggtccgggaggaggccctcaaattaaactatagtaaaaccggtacctacgggccagagagccgacaaatggtaactgggatcctcatcaatggggttaagcccagggtgcctcagaactttaagagacagatctacaggcatctgcatttctgcgaaaaatatggcgcgcaggagcatttcagccacgtgatgccaggctatagccacgcccgacagtggttgtacggcaagattctgtatgtgtatgccattgagcccgaagtcggcaaagacatgctcgtgaaagcaaattcccttgactggggcctgatttga

SEQ ID NO: 9858 - RNA, 1092 nt, synthetic construct
  source 1..1092: mol_type = other RNA
atggaatttccccgagactcgtttttgtcccttattaaggatagcccagatgagtacaaaaaggccaccactgagtatgccgatcggttgctttccaagggccttccagttatcttcagtctgaaacatctaggtgtgctgttgaatgtcgagtatagggatatgtgtatgctggtacacttccccgatggctattacgcatactttctcatcaagaagaaaaaaggcggatatagacgcatcgtggtgccttatgacaatttaaagcacatacagagatggatccttcacaatattctctctaaaatccctgtccataagcagtgcgtaggtttcatgaaaggaaaaaatacgctcgacaacgcgaaggcgcacgtgggcaagaagtacattcggaaattcgactttaaaaacttcttcgaaagcatcaacgcacgccaggtatattatgtgtttcggaacgtggggtactcaccgagcgttagcaggtgcctcgcatctctctgtacactgaagatcgaggataataagtacgattacctccccccctacaaaaaaatatggttcaaggacctgcatgacactacaattgccgtgctgcctcaaggggctcctacttccccggctctggccaacattatctgtaacaatctggataaacgctttttcagctacgctttcaagaaaaacttaacatacacgcgatacgccgacgatgtgaccttctcctgcgacgacccctcactcctgccaaacgtctctttcgtcaagaaggttgttgagagtgaagggttatcattgaacgagaaaaagaccggtacctacgggcaagacagtagacagatggtcaccgggatactgattgatggcgaaaaagcacatgtgccccagaagtttaagcgtgaaatctatagacacctacacttttgcaagaagtatggcacacacgaacattttaggcatatcgccccagacaagtctaatccaagggcctggatatatggaaagattcactacgtgaatgctattgagcctgaagaggctaaaaaaatgtttgcactggccgacgagctggattggggaatcctgtga

SEQ ID NO: 9859 - RNA, 1104 nt, synthetic construct
  source 1..1104: mol_type = other RNA
atgaccatggagtttcctcggaacgacttcattacaaaagccaaaaaagcgggccattctgctgatttcatcaaggccactcttcgctatgccgatagtctggatgagaagggcctccccgtgatcttcgatcgaaaccatctggcctttctcctgatgatggatattcaagaacttctgtgctttgtgcgggaatcctcctgcttttacaaatacttcgccatcaaaaagaagcgcggagggctgaggaggattatagccccatacagcaacctccgcaaaatccaggtgtggataaaagagtgcattttggacaagatcgagcagccctattacgtgaccgcatttgcaaagaatcgtaacacgctgaagaatgctcgcatacatgaggacaagaaatacattctaaagtttgacatcgcagacttcttcgaaagtatctgtttcaaacaagtgaactctgctttttgcaatatgggctatctgcccgaagtttcgtcctgtctcgctagactttgcactagcaaaatcgacgaatacaagtattctcagttggaggagcaaaaggatattcaggccttatttgacgacctgaaaaccaagaatgaggcattcttaatccagggagctccaactagccctgctcttgcaaacattgtgtgttacagaatggatcgacggattataggactctcaaagggaataaagttcaactactccagatacgccgacgacatgaccttcagcgccgatcgtctgtcagacctccccaaggtcgggatgattagacgcattgtcgaatcagaggggtttcacttaaatgaccagaagacacagctgctacacgtcgggaaaaggcagatcgtaacaggtctgttggttgatggccacgtgcgggtaccaggcaggtataagaaagatatttggagacacatccatttctgtttgaagtatgggggccgggatcacttcaatcgaatcgcgccgggactggcgtatggcaaagagtggatcgagggtaggatcaggtatgtccacagtgtggagcctgacgtcgccaagaagatgtgggttgaatttgaaaaaatcgattggggttactga

SEQ ID NO: 9860 - RNA, 1098 nt, synthetic construct
  source 1..1098: mol_type = other RNA
atgggatttcctagaaatgactatctcaccgctgctaaggataagaaacattctgacgaattcatctccgagacactctcctatgctgatgggctggattccaagggcctcccggtgatatttgaccagcaacatctgagttacctgctgtgtatggaacacagaaacctcagacaactcgtcaaaagcgccagttcctactataagtacttcgctatcaagaagcgcaggggtggccttagacggattatgagcccctatagcgagttgagggatgtacagatatggatcaaggagaacatccttgacaaaatagaactgccaaattgtgtcaaggcctttgtgaaaggacgaaatatcatggagaatgccaaaatgcacgagggcaggaagtacattttgaaggtagacattaccaatttcttcgaatctatcggcgttcggcaggtgtacgtcgccttcagaaagatgggatatgaccgctcagtcgcagcatggttggcgaacctgtgcactgccaaaattgaagattacaagtacgagcagctggaagatcaggaagagatccagaaattgttcaacgatctgtaccacaaaagcgaaccatttctagtccaaggcgcccccacttcgccaggtttagcaaacataatttgcaaccgaatggataagaggatgatgggacttgccaacaaacatggatttacgtacagtcgttacgcagacgacatgaccttttcagctgataaaaaggacaggctgcctaaagtttcaatgatccgcaaaattgtggagacagagggttttcaccttaacgaggagaagatcgaattactccatgagggaaatcgacagatcgtgactgggttactggttgataatcacgtgcgggtgcccgggcgttataagaaggacatcaaacggcacattcatttctgcctgaaatatggcgggcgcgaacactttcaccggatagcacccgggaaagccttcggcaaggagtggctagcgggcaggatccgctacattcattctgtggaacctgagacagccaagaagctgtgggctgagttcgagagaattgactgggggtattga

SEQ ID NO: 9861 - RNA, 1098 nt, synthetic construct
  source 1..1098: mol_type = other RNA
atgggcttcccgcgaaatgacttcatcacagaggcgaccctccagggacgttcccagcagttcataaccgaggctttgcgctatgctgacgtcttggacgggaaggggctccccgtgatctttgataccagccacctagcctttatgcttaatatgtcccaccgagacttagtgcacattgctttcatggccagcgtcttctataagtacttcgcgataaaaaaacggagcggggggtatcgcagaattatggcaccatacatgcacctccgacagattcaggtgtggatcaacaaaaatatcctttctaaggtgcaacagcctgaatacgtcacagccttcgtaaaggggcggaatactcagatgaacgctaaaatgcatgaaaatcgtgcatacgtgctgaaggtggatctgtcgaacttttttgaatctattaacgtacggcgggtttgcgctgcctttatgtggatgggctatgaatcatccgtggcctcatgtctggcaaagttgtgcacagccaagatcgatgattacaaatatgatatgctcgaagagcagcctgaaatccagacgctgtttgatgagctgatgcaaaggcacgaaccattcctaatacagggagcgcccacctcacccgcattagccaatattgtttgcggtagactggacaaaaggatgaagcggctgagtcaagagatgggattcaactacagtagatatgcagacgacatgactttttctgccgacgaccgcgcaatgctccctaaaataaggctgatcaggaagatcgtgaaggaggaaggatttaccctgaacgagaaaaagacagagctggtccatcaaggtaacaagcagatggtgactggtctgcttgttgatggcagagtacgtgttcccggcagctacaagcgcgatattatgcgccatatccatttttgtcagaaatacggaggcaggggccacttcgatagagtgatgcatggcaaggcttatgggagggagtggcttgagggaagaattcggtacgtgtattccgtcgaaccagaggccgccaagaaaatgtgggctgagttcgagaaaatcgactggggctactga

SEQ ID NO: 9862 - RNA, 1089 nt, synthetic construct
  source 1..1089: mol_type = other RNA
atgaattttccccgcaatctattcattgagaatgccaacgcagaaaaacggtctgcagaatatctgacaaagaccctcaactatatcgatagattgagcgcccaaaatctccccgttatattctccactaaacacctcgcacagctgctaaatatcgaatatcacgagctgaataacatcattgagaatcgcacatacttctacacctattatctcatcaagaaaaggacgaagggacatcgacgaatcatagccccatattcaaacataagcgaagttcaaaactggattaagaacaacatcctggacaacttaacgaccaacataaattctacagcttaccagaaaggcaactccatctccaacaacgctaagatccacgagaacaatcaagtgatcttcaatattgacctggaaaacttctttgaaaccattactgagagaaggatttacggggtttttaaatccatcggctataccaagaatgtagccattgaccttgcgaaaatctgtaccaccatcatcagtcaggaaaagtttgatgacttaaatgacgatgtgaaaacacattttgaggactacattaagctgaatgagtgcgtgctgcctcagggcgcttgcactagccctacattgagcaacctgatttgtagaaaactcgatattaggctttcaaagcttgccaataagttgggtatccagtacagtcggtacgctgatgacattacattttcgggatcactggagaaactgccgaacattaaactcttgaagaagatcattgaggaagaaaagttcaaggtcaatgacaataaggtaaagctgctgaaaaaggggaacagacagatggtgactgggttactggtcgatggaaaagtccgtgtgccacagaaatacaaaaaggaaatttttcgccatctcaggttctgcgagaaattcggtggctttactcacttcaacaagataaaccctgagaaatcttttcggaaggagtggctgcacggcaagatctgtttcgtgcatagcgtggagcccgagatagccaaaatcatgttccagaagcttaaggatatcaattgggaaaaatga

SEQ ID NO: 9863 - RNA, 1089 nt, synthetic construct
  source 1..1089: mol_type = other RNA
atggacttcccacggaacctgtacattgaaaccgctaataatgaaggccactcacctgaatttctgacctccaccttgggatatatagacaatctgacgtccaaaaacctccccgtcatattttccctgaagcatttctcgctcctgattgggatggaactgtcagatgtgatcaagatcattcataatcggaattactactacagtttctatctgatcaagaagaaaaagggtggctatcgtaggatcgtcgccccgtttaaaaagttaaaactgatgcagtcttggattaaggaaaatatcctggataagctagaggtgtcacagcacgcaactggctttatcaagggacgatccattctgaataacgcgaaatctcacgagaacaacgatgtgatcttgaatctggacctttccaatttcttcgaaacaattgttgagagacgggtctacggtatcttcagttctctgggttacagcaaaaacttagcagttgagtttgcgaagatctgcactgcccagatgcctaaagagaagtatgatgagatagatcccgaaaagcaggagtattttaacaaactctacaggttgaaggagtctgtgctcgtgcaaggagcacccacttctccaacactaagcaaccttatttgtaggagattagatctgagactaagcatgctggccaacaagctcggacttatatacagtcgctatgctgacgacattacctttagcggcaaagcaagcaacctgccctccatcgaactgcttaagaagatcattgaggacgagaatttcgagattaactgggaaaaagtggggaaatacaaaaaggggcagcgacagatggtgacaggccttctcatcgacgggaaagttagggtaccaaaaagctttaagaaggagatctatagacatttgcacttctgtagtaagtatggcgctttctcacacttccaacgcatttgccctgacaaagcctaccgcaaagagtggttgctcgggaagatctactttgtatatgccatagaacctgaggaagctaagaaaatgctcaagatagccaacgccatcaattgggagatttga

SEQ ID NO: 9864 - RNA, 1089 nt, synthetic construct
  source 1..1089: mol_type = other RNA
atggactttccccgcaatatctacatcgaagctgcaaaaaacgaaggccacacctccacattccttgagaatactctctcttatatagacaacctcagaagcaaaaacctgccagtcatcttcagtcttaagcacttcagcattcttattggcatggaactgtctgacgttattaagatcatccagaaccgtaacaactactactcctattacctgatcaaaaagaagaagggaggacttagaagaattgttgccccgtataaggacctaaaattcatgcaaagctggataaaggaaaatattctggacaacctggaggtgcaccagcttgcaacaggcttcatcaaaaagaagagcatcctgaacaatgcgaagaatcatgagaattccgatgtgattttgaatttggatctccgcaactttttcgaaacaatcaacgagaaaagggtatacgggatcttcagttctctgggatactccgccaatctgtgcgttgagtttgccaaaatctgtactgcccagattcctgaggacaaatatgagatcatgtcaagcgaagagcaggagtattttgaggaactgtacaacttaaaggagagtgtgctggtgcagggagctcctacgtctcccatcctgtcaaatctggtctgtagaaggttggatttgaggctgtccaagttagcaaacaagttagtggtgaattattcaaggtatgccgacgatatcaccttttcgggcgatcggaataatctgccaaacataggcattctcaagaagatcattgaagacgagaacctcaagataaattgggataaagtcggtaaatacaagcgaggtcaacgccagatcgtcaccggcctgctaattgatgggaaagtgcgggtacccaagaaatttaagaaggagatataccggcacttgcatttttgcagcaaatacggggcttatagtcatttcaagcgaatctgcccagaaaagtcatacgggaaagaatggctactcggtaaaatttatttcgtgtactccattgagcctgaggaggctaaaaaaatgctcaagatcgccaactctataaattgggaaatttga

SEQ ID NO: 9865 - RNA, 1089 nt, synthetic construct
  source 1..1089: mol_type = other RNA
atgaattttccgaggaatacctatttggagttggcgaacacctcaggaaagtcgccagaattcatcgaatcaactctgaattatgccgataacctaatccactacaatctccccgtcattttcagcctcaagcacttttcacagattataggagttgactttcatcagctgctgaacgttatcgaaaatcggggacactactacagttactatttgatcaagaaacgaaagggcggatataggagaattattgctcctcacaagaacatacgctacctgcaagactggattaagatcaacatcttggataaggtgaagatccactcatccgctactggctttactaaagggaagtctatcctcgataatgcaaaatctcatctggattctgaagtacttctgaacatcgaccttgaaaactttttcgagagtattaccgagaagcggatttatggcgtgttcaagtggctcggttatcacaagaaccttgctatagagtttgccaaaatttgcacggtgaagatgcccgaagagaaattcgacaatctaaacgatatcagccaagaatactttttcgactactacctgttaaaagaagccgtcctcgtgcagggcgcacctacaagtccctctctgtccaacataatttgcattaagctggacaatcgttttaataagctcgcgaataaacgcgggatatcctattccaggtatgctgacgacatcacattcagcggtaacaaggatagtctccctagctacaacttagtgaagaagattatcgaaagcgagaatctgaaaattaactggacaaaagtgggccgatacaagaaggggcagaaacaggtggttaccggcttacttgtcaacgagaatatccgggtgcccaaaaaattcaaaaaggaggtcctgcgccatctgttcttctgtgaaaaatatggtgcagcctctcatttcaacagaatcgccccagataagtcctttagaaaagagtggctgattgggaaaatcctgtacatcaattccatcgagccagaggtagccaaaagcatgtttgagaggatcaagaaaataagctgggagatttga

SEQ ID NO: 9866 - RNA, 1089 nt, synthetic construct
  source 1..1089: mol_type = other RNA
atgaattttccgcgtaatctctataaacaagaggccatccgcttgaaacgctcagcaccatttattacatccacgctgaactacatcgacaatcttattagctgcaacttaccagtgattttctccaggcaacatttggcgattctcaccggtatgagcaggtatgatatggataagatactagaaaaccgggagtactactataagtactacctgataaagaagaagcgggggggatttcggcggataattgctccttataagcagcttaaagagctgcagaggtggatcaaggaaaatatcattgaccaggttgacatcaaccagtttgcaactgggttcgttaaagacaagagcatttatcacaatgcgaaaatccacgaggacgccaacgtgatcctgaacattgacctcaagaatttctttgagagcatcacagaaaagcgggtgtacgggctattcaaatcgctgggttatgcccataacctcgccgtggatctggctaaaatttgcacatcacccatctgtgacgaaaagttagatgaactggacgagtcagctctgccttactttcaggacatacaaatgcagttcgaatctattctgatccaaggcagcccaagttctcccgccatctctaatctgatatgtcgcagacttgataggcgcttgtccaagcttgccaactctaccggcgctaattattcccgttacgcagatgacataaccttcagtggaagtgaggataacatccccaaagtcagtctcatcaaaagaatcattgagggcgaaggcttctcaattaactgggagaaggtgaagcgacacaaaaagggacagcgacagatcgtaactggactgttggtagataatgaaatcagagtccccaagaagtacaagaaagacatatataggcacctccacttctgcgagaaatggggttcccgatctcattttgaaaaaattaaccctgggaaggggtacggcaaacagtggctgctgggcagaatcatgtacgtgaatagcattgagcctaccgaggcaaagaaaatgatggccttagtcaagcagatcgattgggatagatga

SEQ ID NO: 9867 - RNA, 1053 nt, synthetic construct
  source 1..1053: mol_type = other RNA
atggcttttttgcgctcattattcatcaacgaagcaaagaagaaaggtaggagcgaagagttcttgaagactacccttgaatacgctgattttctggacggcaaaggcctccccgttattttctctcctctccatttctccttgctggtgcagacagattatcattatctgaaacacctcataagtgtgaggtctgacttttacgccaactattatatcagaaaacggcgagggggcaagagaaagatctccgtgccctttgtccccctgcgcattgttcagaagtacattaacgactttatcctgaacaaggtggatgtacaccctaaggcgttcgcttttgtacgtaacaagtccatcgtcgataatgccaaagtgcatgtgaatcaagagtggatccttaacattgacattaaggacttcttcacgagtatcggagtagacaaggtgtataccacattccgctcattaggatacgtcgacaatctgtgctacgattttgcaaagctatgtactgccaaactggaagcaaagagcaagagagaattcctgccccagggggcccctacctcacctaatctctcgaacatcataatgaggaatgtggataggagattcgagaacttcagcattaaaaacgacatctgctacagcaggtacgccgatgacatcaccttctcagggaagaagtccaagctaccaaaaatctccttcctccgtaaggtttttaaagaggagggtttccaactgaatgagaagaaaacacagtattacggcccgaatagcaaccgacggtttgtcaccgggttgatagttaaagacgacgtgaaaatcccaaatcggtttatcaactctacttctcgccagatatatatgtgtgagaaacacggcgtggataaccacattgactggctgaagaaaaaccacggaattacaggcaattattactacgagtggctgatgggaaaaattgcctttattaatatggtggaaccaagtgaggctaagtttctttacgatcgggtcaatcggatagattggggtcttaaatga

SEQ ID NO: 9868 - RNA, 1095 nt, synthetic construct
  source 1..1095: mol_type = other RNA
atgagctccccacgcaatctgataatacaagaggcagaggaaacacaccattcaaaggagtatctcaatgacatcctggcttactacgataagctttataatcagggactgcccgtgatctatagtatccatcacctctgcttacttatgggggatctggacaaaaaggtacccaagattattacttcccgaaacagcaactacgcaacctttaaaattaaaaagaggagcggcggcaagcgggaaatatccgccccgtttgtgcccttgagaaacatccagcaatggatatatcagaatatcctgagcaaggttcctattcaccctagtgcctacggctttgtgaagcacaagtcaatcatggacaacgccaaggtgcacgtgaatcaggatttcatactgaacattgacctgctcgatttcttcacctcaattccagaaaaacgcgtctatggaattttcaagtctctaggataccaccctaatctggcagtctacctcgccaaagcgtgtactaaaaaccttgtgaaagagatcgatatcgaggtcctggattggctgaatcaagccccgttccatcagaataattcagtactaccacagggcgctcccacatctcctcagctctccaacttagtttgtaggagattggacaaaaggctgaataactacgctgtcaagaacggttgcaaatatagccgatatgccgacgatatcactttctcgggtagcgaagttaacaacatcaagttgggtgtgatttttcggattatcaacgacgagcagtttaacgtgaatctggacaaagttaagttctttcacaagtcctctaatcgcaagatcatcacagggttaatcgtgtctgacaagattaggatcccaaaaaaattcaaacgggaaatcgctagacatctccactttacaaccatgaatggaacccagaaccacattcaacatctcagacagtaccataacttcgacaaggtcaattatcgtgattggctttacgggaaaatctgctacattaagatgattgagcccgattttgggctgaaattgatgacgaagttcaagagtatagactggggcatctga

SEQ ID NO: 9869 - RNA, 1095 nt, synthetic construct
  source 1..1095: mol_type = other RNA
atgacattcaacaaagatttgttcatcaaggtttcccgcctgcggaaccattctaacgaatttataaaagagacggtggactatgcaaataatttgctggagaaagatcttccagtaatcttctctctgaaacactttagcctcctggctaacgtggattacgacgaacttgtgaagattattaacatcaggagtagcctgtacaagttctatcagataaagaagaagaacggaaaagggtttcgacaaatagtggttccctataacaacctacgctgtatacaggactacattaaaaccgagatcttggacaaagtccagatacatgataatgcaaccggctttgtgaaaggcaagagcatatacgataatgccaaaaaacactcaaaccagcaggaaatcctgaacattgatctcttcaagttcttcgacagtattacggagaggcggatctacggaatttttaagagcctaggctatgcgaaaaatctggcgctggattttgccaaactgaccactgttgccctcccagaagaatatctgagctctttcaagtttgatgaaagacgcttatacgacgagattgtccgaaagggggagtgcgtgttaccccagggtgcacctacatcccccatcctgtcaaatctcatcaccagaagactagatctgcggatgtctagcctcgctgacaagctcaaggtaaattattccaggtatgccgacgacttaactttctccggtaactatgggactgtgcctacattcacattgctggacaagatcatcaatgatgagggattccgtattaattggtccaaggctaaaatttcgaagaaaggcagacttcaaatggtcaccggccttactgtcagtaatgatatccacgttcacaggaaatttaagaaggaggtgaagaaacatatctacggatgcctgaactttggcgtcaataatcatctggcccacattcagaaggacgacattgggtactacaaagaatggttggccggtaagatctactttatttactcagtggagccggactatgctaagaaactccttgacgattacaacaagatcatctggcctctctga

SEQ ID NO: 9870 - RNA, 1095 nt, synthetic construct
  source 1..1095: mol_type = other RNA
atgccttttagccaggatgaatatatagccaccgccaagtcccacggacacagccaggagtttatcgatataacagttgcctacgcccagaacctggtggctaaaaatctcccagtaatctttacaaccgaacatttgtcctcaattttggacatgcctattcttgagctcaagaccattattaaccaccgatcctccttctacaagttctatcagataaagaagagaaacggaaacggctttcgccaaatcgtgagcccatacaacaacttacgagtcatccagcagtacataaatgaggagatcctgtcgaaaatcccccttcacgagtctgcaactgggttcaccaaggggaagtctatcctcaataatgctgtgccccataaaaataagaaggccatcttgaacctcgacttgctcaagttttttgacagcatttgtgaaagaagagtgtatggtatcttcaagtctcttggctatgcgaaaaatctaagcattgacctggccaaactcactactgtggagctgccagaagattacctgaaaaccttcgaggaaaaggaactcaagtcatacagggaactcgtgcccaaggacagttgcgtcctgccccaaggcgcacctacgtcaccaacactgagtaatattatcctgcgccggctggattttaggctgtccaaacttgcagagaaattaaaggttgactatagccgttacgctgacgatattacattctcaggagatctggagaatctgccgaagattaagctgcttcggtctatcatacgcgatgaaggcctgaacataaactggaaaaaagtcgggatctacaaaaagggccggaagcagctggtgactggtctgacagttagtaatgacgtccatattcacagagatttcaaaaaggaggtgaaaaaacacatctatgcttgctgtaatttcggggtcgaaacgcatctaaggtttatggaattggagaatacccatctatacaaagagtggttactgggaaaaatctactatatcaacagtatcgagcctgagactgcgaaaaagatgatgaacgacttcaacaagattgtatggaccatttga

SEQ ID NO: 9871 - RNA, 1095 nt, synthetic construct
  source 1..1095: mol_type = other RNA
atggccttcccgttcagtgagaagagcacttctgagcccgttaatcattctgatgagtttctgaccgacatcaacaattatggcgacaacctcaaaaaaaacaagctccctgtgatctataccctctaccacctgtgccagatggccgaagtccccgtgaaggaaattctccgtgtgtgtgagagcacacgcatcgagcactacaaacgcttcaaaatccgaaagaaaagaggggggtttcgggtgatacaaaccccttctgactccctgaagtacctgcagaggtggattctggttaatatcctgaatgagctggatagccacgaaaggtgctttggtttcgagaaaaaatcctccatattgaagaatgcttccgtacatcttaatcagcccgccatcttgaagctggatctgcaaaggttttacgactcgattaatgagaaacggatctatggcgttatccagagttttgggtaccacagcaatcttagtgtctacatggcaaaactgctgacagtcctacctaacgattattttttcgagtccttcaagaaaactgaaagcaatctgaagaacaagctacagaagctcaatcagggagtattatcccagggcgcccctacaagcccaaaaatttcaaacctcgtgtgccgcaggcttgaccagagaatgtatgagcttgctattaagaatgggctgaactactcacgatatgcagatgatattactttctctggcaacattgaagtcttgagaaaggtaaagaaagccgcgtactatatcattaacgacgaaaagttcttcgtgaattacggtaaaaccaagttcataaaggcaggcggaaaatttttggtgacaggcctgaacattgaaaatggttcagtgaccgtgccaaagaaaaaaaaaatggagatcgaacaccatttgtaccattgtcttaacaacggagtgatcaaccatttaaagacgtctaagatgccacaacggaattttaaggactggttactcggaaatattgcttttgtgcactcaatagagaaaaacgttgctaaggtctatttcgaacagtttaacaagatcaactggcccatctga

SEQ ID NO: 9872 - RNA, 1056 nt, synthetic construct
  source 1..1056: mol_type = other RNA
atggaccacagccaggaatttctttccgatatcaaggaataccgggagagactcgatgagaaggggcttcccttggtgttttccatccaccacttatgcttactagccggtgtatcagtaaccgagattttagaaatctgtaaaagtgaccgcatacgctattataagcgcttcaaattgaagaagaagcgaggcggctttcgtgtcatacagacacccgaaaatacactcaagtttctgcacaggtggatcctcaagaacattctgaatcgggttgagtctcacgagaaatgtttcggcttcgacaaggagtcatctattgtcaagaacgcctcagcgcatctcggtcagccagccatcctgaaaatcgatctacaaaggttctatgattccatcaacgaaaagagaatctacggcgtgatccttagctttggttatcatccaaatctcgcagtctatatggctaaattgctgaccgtccggcctgacagttattttctatccacctttaagaagaaggaatcttcactgaaagacaaactggagatgctcaacgagggagttctgagccagggagcaccgacaagccctaaactggctaatttggtctgcagaaggctggacgagcgtttgaataaacttgcactgaagaatcagctgaattactctaggtacgctgacgacattacctttagtggaaacctggtgcagctcgagaaaatcaaaaagacggtgtacttcattgtgcgggatgaaaacttttacgtgaattactccaagactagattcattaagagcgggggaaactttttcgtaactggcctgagtatcaaagatggcgtcgtgaaggttcccgggaagaaaaagaaagagattgaacaccatctgtaccattgcctgaaaaatggagtgattaatcatctcaagagcgccggggtgtcgcaacgaaacttcaaagattggctgcttgggaacatagctttcgttcacgccgtggaaaaagacgtggccaaagattatttcgagcagttcaacaagattaactggcctatatga

SEQ ID NO: 9873 - RNA, 1098 nt, synthetic construct
  source 1..1098: mol_type = other RNA
atgacctatcctttttatcatataaagcgcaatcaggaaccgattgtgcactcatccgagtttaaccaggacatcaagatttactcagatctgttggccaagaaagggctccctgtcatttatagcgttccacacttatgcctgcttgcgggggttcatatcgagcgtatcctgactattaccaaatctaaccgaatcgaatcgtacaagagatttaagctcaagaagaagagagggggctttcgggtgatacaaactccaaacgatgagcttaagtatctgcagcgctggatcctcaagaatatactagaaaaagtgcccagccatccctcttgtaagggcttcgacaaaaacactagtatcaaacacaacgctgacacacacctcaagtccgaagccctactgaaactggacctgctgcgattttacgactccatcaatgaaaggaggattttcggcattttcaagagcctgggctatcatcctaacctcgctgtttcattagcaaaaatatgtaccatcgtcccagatgagatgtttatcagtagttttcgcaagaaggagactgaacttaaggagtatattgtaagcaagaatgagggtatcttggcacaaggatctcccacgagtcccaaactttctaacctgatcaccatcaatttagataaaaggctggccggtttggctaacaagaatggactgaattacagccggtacgccgatgatctcaccttttccgggaacttcaaacagctgcaaaaggtaaagaaggtcgtgtatcggataatcagagaagaatctctgttccccaactacagcaaaacaaagttcattaaactcgggggaaagttcctggtcacaggacttaacattcagaataatgtgtccacagtgccaaaaaaaaagaaaaaggaaatcgagcaccacttgttccattgcattgaaaatggcgtggagaatcacatcaaaacggcaaagattaacaacaggaactttaaagactggttgtacggcaatatttgcttcgtgttctcaatcgaggagaaaaaaggtatccagtacttcaaggagtttgagaaaatacagtggcctatttga

SEQ ID NO: 9874 - RNA, 1083 nt, synthetic construct
  source 1..1083: mol_type = other RNA
atgacatccccattaaataaaacattggagaatcacagtgcggagtatcagaatgaaattaaggcctatcagcacgtcctcgagaaaaatggtttgccagtcatttatagtctcaatcatctgtgcttaatggctggcgtgaatctggagcacattaagaactgttgtataagcaaccggcaggagaactacaagcgcttcaaactgaagaagaagagaggaggcttccgggtaatccagacaccccaggacgaactaaaatatctgcaaaggtggatcctcgagaacatcctgaacaaaaagaattctcacaatgcttgtaaggggtttgacccagacacctcgattaaactcaatgccgaaaaacacttaaagcaagagggtattctgaagatcgacctgcttagattctacgatagcatcaacgaaaagagggtctatgggctttttaagtccctgggatatcacccaaacttgtccgtcagcctcgcaaaaatctgcactatagtgcccgacaacacctttctgagttcttttaagcagaaagagcagcacctgaagcagaaaataaagcaggatggcttgggagtggttcctcaaggcgccccgtcatctcctaaaatttccaatctcatcacgatctctctggataaccggcttcagaatctggcagataagcataatctaaactacactcgatacgctgacgatcttactttttccggcaccattgaaacgctctcaaaaataaagaaagtggtgtaccgtatcattagggaagagaacctgtaccccaactacagcaagaccaagatccttaaacgcggtaacccttttttcgtaactggactaagcgtgcataatgacacagtgactgttcccaagaaaaaaaagctggaaatcgagcaccatctgcatcactgcattaaaaatggcgtgcaaaatcatctcacaacctcaaagatcaccaacagaaacttcaaggattggctgttggggaacatagccttcgttaatggggtcgagaaagaactgggaaagaaatacttcaagcagttcaacgagattcagtggcctatctga

SEQ ID NO: 9875 - RNA, 1095 nt, synthetic construct
  source 1..1095: mol_type = other RNA
atgacaagtccccttgataatatctccgaggaaacgcctccaatccatagcgttgagtttctggctgatattatggcatacgacctcaaattgaactcaaagaatctgccagttatttactccttgcaacatctatgtctgctggctggagtcaacatcaagaatattactaaggtctgcaacagcaccagaatttctgagtacaagcgctttaagctgaggaaaaaaagagggggctttagagtaatccagacgccgactgacgagcttaagtatctccagaaatggatactggtgaatatcctggaaaaggtgccttcccactcttcgtgtaagggatttgacaaaacactgtccatcaagttgaatgcagaggtgcacttgaacaaagagagtattctcaaaatcgacttgctgaggttctatgattcaataaacgagaaacgcatctatggcgtctttaagtatataggataccaccctgatctagccgtgagcctagccaagatttgcaccatcgttcctgataacaagttcctctcttcctttaagaagaaggaattagacctgaagtgtatcatcataaagaaaacagaggggttacttccccagggggctccgtctagccccaaactctccaacctgattagcatctctctggataacaggctgagcaaactcgcgctcaaaaacgaactggggtacagtcgatatgcagacgatcttaccttttctggctcacttgaaaccctgaaaaaggtcaagagtacaatctatcgtatcgtggaagacgagaatctgttcgttaactacagcaagactaaactcctgatcaaaggaaatcccttcttcgtcaccggcctgtcggtaaataatgaccacgtgaccattccaaaaaaacggaaaatcgacatagagcatcacttatttcactgcattaagaacggtgtggaggcccatattacacggtgcgaaattaagaacaaaaatttcaaggactggcttttgggtaatattgccttcgtgtactcagtggaaaaggagctcggcgaaaagtacttcactgatttcaacaagattcagtggccaatatga

SEQ ID NO: 9876 - RNA, 1104 nt, synthetic construct
  source 1..1104: mol_type = other RNA
atgacaattcctagcatcattaaaaacagcatccccaaagaaataccagctccgcccagccccgaatttttgaacgacatagctcaatacagagcacacttaattgaccagggactgcctgtgatttattccgtgcaccacctgggcctgatcagtaagttcaacatcaacaacatgattcacctctgtaacatgccccgggacggcttttacaagaggtttaagatgaagaagaagaaagggggttatcgcgtaattcagaccccctcaagcgagttgaagtacttgcagcggtggatcttaaaaaatatactcgagaatcgtccttcccatgaatgctgcaagggctttgacctcaaagcctcaataaagaataatgccgaatcccacctgaacaaagaggccattctgaagatcgatttccttagatttttcgactccatcaacgagaaacagatatatagaatcttcaagggcatgggataccatggaaacgtcgcttttgcactagctaaaatctgttccgtagtgccagataagatgtttttcaagtcgttcaagaagaacgaaaagcacctgaaaaaggttgtgctggaacacgatggagggatcctgccacaaggcgccccaacatcccctaaattgtctaatctattctgcctgtctctggatcatcgccttacacttctcgcaagcaaaaataacctgtcatacactaggtatgcggacgatttgacattttcaggtgattatgagactctgatctctgtgaagaaaaccatctacaaaatcatcaaggacgagaaactgttcgtcaatatgggcaaaactaagattcttaaacggggtagtctctttttcgtcaccggcctcagcgttaacaataaaaaggtgaccattcctaggaagaaaaagaaggatattgaacatcatctccaccattgtatcaaaaatggggttgagaatcacatgcagaagagtaatatcacgaatcgaaactttaaggactggttattcgggaacatagcctttgtctactctgtggagaaagagctgggggccgagtatttcaagattttcggatctattcagtggccgatttga

SEQ ID NO: 9877 - RNA, 1101 nt, synthetic construct
  source 1..1101: mol_type = other RNA
atgacgtttccgtttaataagctgatccccatttctaatgaagagattgttcatagcgaagagttttatgaggagatccgcaaatacggctcattcttgagcgacaagaaactaccaataatttacagtttgccacacttatgtctcctctctggtgtgaacattaacaacattaagaaactctgcggctccaatcgtatagacgattacaaaaggtttaagctgaaaaagaggcggggaggattccgggttatacaaactcccaacgaagagttaaaatatctgcagagatggatcctgttcaatattctagacaagataactgtacacgatagctgcaccgggttcgaaaaagaaaagtctatcaaacagaacgctgagatacatcttaaaagtgaggccgtgttaaagatcgatctgatgaggttcttcgacacaatcaacgaaaagcgaatctatgggttgtttaagaatttcggctatcacaaaaacctcgccgtatcttttgctaagatatgcactatcgaacccaatgagaagttcatgaaatcgttcaaaaagaacgagatcggtatcaagaacttcatcattgaaaacgaagagggaattcttccccagggctcccctaccagccctaagctttcaaaccttgtcgcgtttaagctggataaaagactgtacggtctggcactcaagtccaaactgaattacagtcgttatgccgacgatatcaccttttccgggaatctggacaccttgaagaagatcaagagcattatttacaagatcatcaacgaggaacggttcttcgtgaatcacagcaagacaaagctcctgatcagaggcaatccatttttcgtgacaggactgtcagtgaacaacaattacgtcacaattcctaagaaacgcaaaatcgatatagagcatcatctctttcactgtcttgagaatggagttgaggagcacatgaagatctgtgagattaagaaacgcaactttaaagactggctgttggggaatattgcatttgtgtactccgtcgaaaaagaactgggccaaaaatatttcgactcgttcaataagatccagtggcctatttga

SEQ ID NO: 9878 - RNA, 1098 nt, synthetic construct
  source 1..1098: mol_type = other RNA
atgacctattccctggacatctacaaaaaacgcgccgccgagctcaaacggagcgaggaatttattaaggaaacaagcgagtatatcgagctcatttctaaaaaggggtttcctcccattttcagtctgccccacctgtgcctgactagctccgtgtcaataaagaacaccatcactatctgtgaatcaaaccgaagagttttttacaaacgattcaagctgaagaagaaaaaaggtggatatcgcgttattcaaactccagtttccgagctgaaatttctacagaggtggatcctagacaacatacttgaaaagatcccttcccatcacagctgcaaaggcttcgacaaaaacacgagcattattaagaacgcagagtgtcatctgaatagtgagtgtatcctcaagatcgacttacttcggtttttcgattctatcaacgagaaaaggatttacgggattttcaagagtttgggctacaaggaaaatttatgcgtcagtttcgctaaaatctgcacgatcgaacacgaagagaagttctacgattcttttgaaaagtctgagcaaaaactcaagagctatcttaccaataagaaagagggagtcctgccccagggagcaccatcttctcctaaactggctaatctgatcctgcggaggctcgatcatcgtctcagcaagctttgtgagaagcggaaaataaactattcaagatacgcggatgatttgacattttcaggcaattccatcgaattgcagattatcaaaaagatcgtgtacaagatcatccacaacgagaatttattcgtaaacttctcgaagaccaagtttctcaagagaggtagtcccttttttgtcaccgggctgtccgtacacaattccgaggtgaaggtgattaggagaaaaaaaaaagaagtggagcaccatcttttccactgtctgaagaacggcgtgatgggacatttgacaaaggccaagattacaaatcgcaatttcaaagattggctgttcgggaacatatgctttatatactcagtcgaaccgattataggccaggagtatttcgacaagtttaataaggtggactggccaatttga

SEQ ID NO: 9879 - RNA, 1098 nt, synthetic construct
  source 1..1098: mol_type = other RNA
atgacttttctgctcgataagtataaggaacatgcccttgcgagtaaccattcgaatgagttcatctccgagacaatccagtatgctaacttcctgtcttccaagaacctgcctgttctattcagtttaccacatttatgtctggctagcgcagtgagcataaaaaacaccctggagatatgcaactcatcccgcatagaatactacaagcgcttcaaaattaagaagcggaggggaggttaccggacgattcagacgccaacaaatgaactcaagtatctgcagaaatggatcctgaggaacattttggaaaaatttccgagtcataagagctgcactggctttgacaagctgtcatctatcaagaagaatgcagaaatacacctcaatgccgagtgcattctgaaaattgatctgttgcggttttttgacagtattaatgagaggagaatctacgggatctttaaatcattcgggtatcagaataacctgtgcgttagcctagcaaagatttgcacagtgaaacaaaatgaaaccttctacaacaccttcaagaagaatgaagacaatcttaagcaatacttgctttctaaagacgaggggatcttacctcagggagcccctacaagcccaaagctggccaaccttatcctgagaaatctggataaacggcttgaacgtttgtgttctaagtataatgtgaactactcccgatatgctgacgacctgaccttctccggcaaaaaggagaatttgctgtacctcaaaaagatcatctacaagatcatctactccgagaacttatttgtgaacattgggaagaccaaatttatagtccgaggcaacccctatctcgtaactggactctctgtacacaatgaggaagtgaaggtgattagacgcaaaaaaaaagagattgagcaccacctctatcactgtattaagaacggagtcattctccacctcatcaaaagcaatatcggcaacaggaattttaaagattggctgttcggcaatatctgttttgtctattcaatcgagcccaaggttggtcagaactacttcaacgatttcaacaaaatagagtggcccctatga

SEQ ID NO: 9880 - RNA, 1098 nt, synthetic construct
  source 1..1098: mol_type = other RNA
atgacttttcccctagacaatttcattacaaaggcaaagttccaaagacactccgatgagttcatcgacgatgccaaaaactacatacagaaactcgagaaagctgagcttccgattctgtttagcattttccacttgtgcctttccgcgaaaattagtatcaagctgatcctagccctctgtcggtcagatcgcattcattactataaacggttcaaaattgccaagaagcgcggtggatataggatcattctcagccctaataacgaacttaaatacttgcagaagtggatccttattaatatcctggagaaaataccttcacataaaagctgtcagggtttcgacaagaacaagagcattaaaaagaacgctgaaatccatattgggtcggagtgcatcctgaagattgacctgctgcgtttttatgattccataaacgagaaacgagtgtacggcattttcaagagtttagggtaccataagaatctcgccgtatctatggctaagatctgcacggttgaggtgaaagagaattttctgaaggcatttacaaagaacgaatccgacctcaaaaataaaatatcctctcagaaggaaggcatcttaccccagggcgctccaagtagcccaaaactttctaatttgatcctgcggaggctggaccaaaggttacattgcctggccaaaaagaacgggattaactattctagatacgcagatgatctcaccttctcaggcaaggaggagaagctgaaagagttgaagaagatcatatacatgatcatcaaggacgaaaacttcttcataaactatggaaagaccaactttctgaaaagaggcaatcgcttttttgtcaccgggctcagcgttcacaatgagaaagtcactgtgccaaagaagtttaaaagtaacatcgaacaccacctgtatcactgcataaagaatggagtgatcgcccacacaaaaaagaacggtattgaaaaccgaaacttcaaagattggctgctgggatgtatctgttttatcaattcagtggaacccgagttgggcgaagacttctttgaaaagttcaacgagatcaattggcctatttga

SEQ ID NO: 9881 - RNA, 1098 nt, synthetic construct
  source 1..1098: mol_type = other RNA
atgacataccccctcgatgtgtttttcgaatatgccaaagagatggaccattctccacagttcactgaggaagtggagaagtatgtcagctcactcctcaataggaatttacccgtgttcttttcgcttccacacctggctctggctgccagcttctctatcaaccacgttgagcgtatagtgaaatctaaccggcgcgactactataagagatttaaattggccaagcgccgaggtggtttccgaatcattcagacccctgaccaggaactaaagtatctgcaaaagtggatccttcttaatatactgaacaaggtcaattctcaccctgcatgcaaaggattcgaccccaaaagttcaatcattctgaacgcccaagaccacctgaataaggaggccattttgaagatcgacttgttaaggttcttcgattccatcaacgaaaaacggatttacggggtctttaaagggttgggctaccatccaaatctggctgtgtccctggcaaaactctgtacactgaaaccggacaacaccttttttattgcgttcaagaagaacgaactcatgctgaaagagcttatcaagaagagagatgagggcattcttccccagggtgcccctactagtccaaagctgagcaatctcatcgcacggaatctcgacattaggctcgataaactatgcaagaaacacggcatatcatatacaaggtacgctgatgacctgacctttagcggagaaaaaacgaagttgatgctgctgaagaaagtggtgtataaaatcgtgaagacggaaggcttctacataaactacgggaagactaagttcctgacccgcggcaacaaatattttgtcaccggattgtccgtacacaataagacactgaaggttccgagaaaaaaaaagctggatatcgagcatcatctccaccattgtctaaagaatggggttcacgtgcatatgattaaatccaagatcaagaaccggaactttaaagattggctgttaggcagtatctgctttgtctggagcgttgagcaggagcttggacagaagtacttcgatgaatacaacaagattgagtggcctgtatga

SEQ ID NO: 9882 - RNA, 1098 nt, synthetic construct
  source 1..1098: mol_type = other RNA
atgacctttcccctggatgactttctgattaaggcccaggctgccgggcactccgacaaatttatagcagagacgacagcatatattcacaagctatctaaggacaatctcccagtacttttctcacttgagcattttgccctggaggcccaggtgaatatcggacgattaggtatgattgtccggtccgaccgtaccttttactataacaagttcaagctcaagaagcgcaatggaggcttcaggactatccagattcccaatagcgatctcaaatacttgcagaagtggctactgatcaatattctgaacaagataacctctaacgccgcgtgcaaaggctttgatcctggaacaagtattaaaggaaatgccgaaatccatctgaataagcaggctattctgaaaatagatttgctacgcttctacgattccataaatgaaaagagaatctacgggatctttaagtcaattggctatcacgctaaccttgccgtgtatttagcaaaagcttgcaccatcaagccagataacacgttcttcattgcgtttaaaaagaatgagctgctgctgaaacaggtgattgaaaaacgagatgacggcgtgttgccccaaggtgcacctacatctccaaagctgtcaaacctgatcgccagaagtcttgataagagacttcagggactctgtgacaagcacgacgttaattactcgaggtacgcagacgatttgacattcagcggtgacaaggctactttggccaaaatccagaagattatctatagcatcgtggagaaagaggggttcttcataaattacggtaagaccaaaatgctggttcggggcaacaaatatttcgtaactgggctgagcgtccacaacaacgctgtcaaggtgcctaagaagcaaaagaaagaaatcgaacaccatctgtatcactgtcttaagaacggagtgcatctccatatactcaaaagcggcctcaaaaaaaggaacttcaaagactggctcttagggagtatctgctttgttaactccattgagcaaaacctgggctctaaatacttcgagctgtttcagcggatcgaatggccgatctga

SEQ ID NO: 9883 - RNA, 1095 nt, synthetic construct
  source 1..1095: mol_type = other RNA
atggattatccccttgacgatgtgcttgaggccgccagagacgagggccacacaacattgttcgtggcggatatagaagcatatgtaaaatacctcaccgcacggcaactgcccgtgatatacagcctggctcatctggccatctctatgggcatgaacatcgatatgatggtgaggttagcagagagcaatagaagggactattacaaaagattcaagctgcagaaaagggccggcggatttcgaaccattcagtcgcctgacaatccactgcgttacattcagaggtggatcctcgctaacattctcaataaaattcctagtcacccggcttgcctgggattcgacccaacaacctcaattctgaagaacgctacggtccacgtcaaccagaaggcgatcctcaagattgatctgttgagattctttgacagcatcaatgagaaacgcgtgtacggtatattcaagagtattggctttcaccccaacttgtctgtgtctctggccaaactttgcaccatcgttcatggcaaaaattttttttccgagtttcgcgagcatgaagtggaaatcagagataggattataagtgacagcactgggattctaccccagggggggccgacttctccaaagctagccaacctggtcgctcgccgcctcgattccagactccagggtctgtgtgagaaaaacggtctgaagtactcccggtatgccgacgatttaactttatcaggggacaaagatatcctcgaacgggtccggaaaaccgtgtacaagatcattcgagacgaaggattctttccaaatttgagcaagacgcggcttctgctgcgcggtcagaaattcatggttactgggctggacatatcaaacgaaaagccccgggtatcccgaaagaagaagaaagaaatcgagcatcacctttatcactgccagaagggagttcaacgtcacatccaaaaggcaaagatcacacagaggaattataaggattggctactgggcagcatttgtttcgtccatggaatcgaaccttcagtgggcaaattgtacttttccgagttcgctaagatcgagtggcctctctga

SEQ ID NO: 9884 - RNA, 1110 nt, synthetic construct
  source 1..1110: mol_type = other RNA
atgaacggggattttcccaggaatgactttatacaccaagctaaagccgagggacactccaaggagttcattcaatctactaccgaatatgccgaaaagctggaaaacctaggcctgcctgtcctttattcgctcaagcacctggcactcaccttggatatcccctatattcagctgcgagagattatcaggaatcgtcggaagtactacggtttatttaagatctccaaaaaggtcaagggttatcgggagatcagatgcccccagaacacgctgaaggatattcagcactggattctgtattcaattctggcgaaagtcagaacgcacaagagttgcatcgggttcaaaaaaggggactccatcaaaaaaaatgccacaatacaccttggtcagccagctatactgaagctggacttatactgctttttcgacatggtaacagaaaagcaggtgtacaatgtattcaaaagcctaggctatcatccaaatctcgcagtcgatctggcaaaattgtgtacagtgcctgaaactggcgagtacgtgaagaagctgtatcaggacacctgtcccactaactttatataccatgataaccccttcttgccgcagggcgcgccatcaagtcctgctttggccaacctcgtcctctaccatctggatgtgcgacttaaagggcttgccgactttctgggtattcaatacacacggtatgctgatgacatcaccttctccggagaggatgatagactgcctaaaatcagcctgattgacaagatagtgagggacgaaggattctacctcaatcactctaagattttgttgcgcaaaaagggccagcagcaaaaagtgaccggcctaatcgtttcaggaactagcttacgcgttcctcggaagtacaagagagacatctggaaacatcttcttttcctgaagaaaaggggcgtgaaggagcatctcgaatacatcaagaacaagaacggatctaacaagagtgcctatcgcgattggctgctcgggaaaatcatgttcgttaaaagcattgagccgaccgtggggaataagatgctctttgagtttaatcagatcaaatggccattctacgactga

SEQ ID NO: 9885 - RNA, 1098 nt, synthetic construct
  source 1..1098: mol_type = other RNA
atgaataacatctttccacgggatgcctttgagaaggtggccgaagctcgaggccattcaaaagagttcatcttatctgcactggaatacgcagacaagctgattaaaagtgagctgcccgtcttattttcaaccaagcatttttgcgaggtgattgatataacgtatggagaattgaagaagatcatcctgaatcgcacaaatcaatacggcaatttcaagatccgtaaaaagtccggtggttttcgggaaatccgctctccaaaggagaagctaaagaacattcagaaatggatactcaacaacattctgagcaaggtgagccctcatggcagctgcattggatttaaaaagggggactccattataaagaacgctttacctcacctcggtaaagaagccattttgaaattcgacctgttccatttcttcgacacagtcaccgagaagagggtgtattccatcttcaaatctctcggctatcacagtaacttggcggtagaccttgcaaagctttgtaccgttccgagcttcccaagccacaagaagaagtttctggagaacttcaacataagcgacaatcccttcccttttgattcgtttcttccacagggagcgcctacctcccccgcactagctaatctggtggctgggcacatggataaaagatttaaaggacttgccgattttctggggcttgactacagtagatacgccgatgatctgactttctcaggcaattacgaatgtttgccgaatgtcaacttcgtgaagaagattatcctggaagagggcttttatatcaacgaaagtaaaacgtgcctcaggcgggaaggacagcagcgcaaagtgactggaattatcgtctctggtgacacatccaaggttcccaaggcctacaaaaaagacatctggaagcacctgtacttcctcaataagtttggggtaaaaaaacacctccgaaacatcaaaaacaataagtcctcattccaggattggctgctggggaggataatgttcgttaggtctgtcgagttcgaggagggcaatagaatgctctacaaatataaccaagtgaattggcccttttatgagtga

SEQ ID NO: 9886 - RNA, 1134 nt, synthetic construct
  source 1..1134: mol_type = other RNA
atgaactgcgagtttcctcgcaacgacttcgtgaaggaagcaataaaacaaggccacagccaggagtttattaatgaatgcctcctttatgctgataatctcacttataaaggtctgcctgtgatcttttctactaaacatttctgtgaactgctggatatttccttcaagcagttgaattacattctagataacagggaggatttctacggaacatttaacctgaggaagaaacgaggcgggtatagaaggatacagtatccgctgcccattctgaaaaatatccagagatggatcctcgattacattcttacgagggttccactgcattcatcctgtaagggcttccgccgtggggagagcattttgactaatgccactccccacctgacaaagaagacgattcttcatctggacatcgaagactacttcgggagcatcactcagaaacaggtctttaacgtgttcagtaaattgggctataataagtcgctcgcccacgacctctccaagctttgcaccatacacaaggttgagatcgagaagacaatagagacagactcattcctcgccacagaacaaaaggagtttctggagagcatcaaacggtacagccagaaaaagattgacttcatcttaccccaaggtgctcctacctctcctacccttgccaacttggtcagcgtaaagttagacaaacggctcttttcactggcagaaaagctgggcgtaacctacacccggtacgctgatgacctaacattttccaccgataccgagatactgccaagactggccattatcaagaaaattctgagtgaggaaggtttccagctgaacaaatctaaaacagcaacccggaagcaggggcagcgccagatcgtgaccggattgctcgtgagtggcgaaaaggccaaggtgcccaaaaaatataaacaggacatcctgaagcacttattttacgctgataagtatggaccaaaggaccattctatggaaatccagaaaaatccagcgactttccaagaatggctgcttgggcgaattatgtttgtcagatccatcgagctagaaacgggaaacatgatgctcgagaagtacaatcaaatcgagtggggattcaacttgaagtga

SEQ ID NO: 9887 - RNA, 1053 nt, synthetic construct
  source 1..1053: mol_type = other RNA
atggacatccgtttccctagagatgcttttgttcaggaggcccagaatcaagggcggtcgcagctgttcatcgaggaatgcctcttgtacgcagatggtcttcaatacaagaacctcccggtgatcttctcaaccaagcatctgtccctgttgttagaattggagtacaaggagctgaacaacattatcctaaattcctaccggtattataagaccttctccatcgccaaaaaacgcggcggcgaaaggcaaattaagtgccctaaccacattctgaagagtcttcagcgatggattctcaataacatcctcataaatgtgcgggtcagttctgcttgcaaaggcttccgtaaaggagagtcaatcatcacaaatgcagatacacacctgggttgtcaggccattcttagagtggatctggagaacttctttgatacgattactgagaaccaggtgagaaagtctttcattaggataggctactcaactaacctgagcgtagacctggccaagctgtgtgtcactagccgattggacagcactaccggggaatatgtcagttctctgccacaaggcgctcccacctcccctatgctcgcgaatatagtggcctatcgcctcgacaaaaggctgagtagcctggccaataagcttggagtgcgatacagccgctatgccgacgacttagttttttcaggtaatactacccagctgcccaagatagaactcttgaagaagatcattacagaagaagggctgaagatcaataaccagaaaacgctgctaaggcgggaaggccagaagagaatggttacaggaatcatcgtgtccggggacaaactccgcgtacccaaaaagtacaagaaggatatttggaaacaccttcattatgctcttctctatgggcccgatggacatacctctagaatcaaagtcaacccagcgacatttaaagagtggctattaggacggataatgtacgtcaggagcgtggagaaagacgcagcagaggacatgctgaaagtgtttaacgagatttcttggggcttttga

SEQ ID NO: 9888 - RNA, 1035 nt, synthetic construct
  source 1..1035: mol_type = other RNA
atgaatttcccgcgcaatgactttgagaagtacgcccgtgatgagggaaaatcccagcaatttatagatgcgactctgtcatacgtagataaattgaatagcatgcagctgcccgtcatattcagcattaagcatctggccctcacactcgactacccctacaataaaatattggacatcgcaaaccactctgaaaagtactacaagagtttcaagatacggaaaaaacggaatccgcaacagttcagaagaatcctggcacccaacccagacctgaaagtgattcaacggtggatttacaataacatcctgaagaacatcgagcccgatgagtccagcgtgggcttttcccaggggtgtagtattcagaaggccgcagctatgcacactaatcaagaggtggtgctgcgagttgacctgagtaactttttcgagaacatcacccagaagcaggtttactatgtgttcaggaaccttggttaccacaagaacctcgccgtcgaccttgctaagttgacaacgatttataccaaggaaggttcatatttaccacagggcgcacccacatcacctgcgttaagcaatcttgtcgtgagaaaaatggacaagaggctcaggtgcctgtctgaaaaactcggagtgaactatacccgctatgccgatgacctaataatttctggcaataagaaggacatccctcggttgggcctaattaaacagatcatcaaggaggaaggtttcaagctgaactccgagaaaaccgccatccagcgcgctggcaataaacagcttgttttagggctcactgtaaccaacggagtccatgtgcctaaagacttcaagaaagaaatttggacacatctgaggtattgcaaaaaatatgggccaatcgatcacctgcgatacattaataagtcggataagggggcctttaaagattggctctttggcaagatcagctttgttaagtctgtcgaacctgctgtgggagaaaagatgatgaatctgttcaacgagatcaactggccactgtga

SEQ ID NO: 9889 - RNA, 1035 nt, synthetic construct
  source 1..1035: mol_type = other RNA
atgaactttcctagggacgtctttgaacaacaggcacgcaaggagggaaagtcagacagctatataaagtccgccttggtttatatcgatcgactgaacagcatggagatacccgtgatatttagtctgaagcacctcgcactgatactggacttcccttataagaagatcagcgacatggccaacaaccctaatacatactactcgacgtttaagatccgcaaaaagagaggaggcttccgggagattcaagcccctcagcccgaaatgaaaattattcagaagtggatctaccagaccattctcaaagaaattcggactgattcttcttgcatgggatattcaaaagggagctccattagggaaaacgccaatgtacacaagaaccaggaagtaatccttagagtggacatttacaagttcttcgagaatatctctttcaagcagatctactatgtgtttaaaagtctaggttacaccaagtacgtggctatcgatctagcgaaactcaccaccgtcaaaagcgaaggctctaatgtgaggtatctgccacagggagcaccgacatccccagctctgtccaatcttgttgtgcgaaaactggacaaacgcctcagaagtttatcaaataagttgcaggtgaactatacacgttacgcagatgatctgatttttagtggcgagaaaggttgtcttccgcagataggcctcgttaccaaaattattaaagacgagggcttcaaaatcaaccccaataaaactgccatccaaaaaaaggggaaccggcaaatcgtgctgggcctgtccgtcactaacggagtccacatcccaaagaaatacaagaaggagatatggacacatcttaagtattgcaaaaagtttggtcccattaagcatttggagaacattggggagtctaataaggcggcctacaaggattggttattcgggaagatctgttacgtgaaaagcatcgaacatgaggtcgggaaaaagatgatggctgctttcaatgacatctcatggccactgtga

SEQ ID NO: 9890 - RNA, 1041 nt, synthetic construct
  source 1..1041: mol_type = other RNA
atgtactttcatcgagatattttcgaggaaaaagcacgagagcagggcaagtcaaacgcctttattgaatcttctctcgcatatgtcgataagctaaattctatgcagttgcctgtgatatttagtctgaagcacctggctgtgacgttagatatatcctacaagaagatcagccacatgattaagttcccaaacgagtactataacaccttccgtttgcggaagaagagcggcggagttagaatcatccaggctccaaagcccgagctgaaaattattcagaaatggatctacgttcacatcctgaaaaacatcaaagtggacagctcatgtaccgggttcacggtaggctcctccacaagtaaagtcgcccgcatgcatcagaataaggaggttgtcctaaaactcgacctggaaaacttttacgacaatatcgatcgcaaccaggtatactatgtgtttaagagcattggctacaaggaccatgtggcgatcgacctcgccaaacttactactgttaatcccataaagacacagaggaacgtttttattcttccccaaggagccccttccagcccgtctttgtcgaacctggtcagcagaaacctggacaggagacttcggttgctgtcagagaaagtgaacgtcatctatacccgctatgcagatgatctgacattctccggggagaagaaaaatatgccctccttaaaactggtgacaaagattattagcgaagaggggtttcaagtgaataataagaagacctcataccagaagaaaggcaataagcagatcgtgcttggactcaccgtgtctaacgatgtacatgtccctaagaaattcaaaagggaaatctggactcacataaaatactgcaagaaatatggtcctgtgaaacacctgataaatatcaatcaagctaaccgggccagttataaggactggctgtatggaaggatttgctacgtgaagagtgtcgaactcaaagtgggtgagaagatgatggaggaattcaatctcatcgactggccattctga

SEQ ID NO: 9891 - RNA, 948 nt, synthetic construct
  source 1..948: mol_type = other RNA
atggctggcgtcgatcgcactcggctgctcaggatcacagagcagagggaccggaattatcaccggttcttgttggaaaaaagggctggaggattcagagagatccttacccccaagccgctcctgaagcggatccagagactgatctacgtgaatattctggctaccgtggaattagaccagtcctgcctgggattccgcgaaggccgatctatcaaagacaatgcccagatccatgccaaccaggatgcggtgatgaaggtggatctatatcggtttttcgacaccatttccgaaaagagagtttacggcatgtttaaaagcctgggctaccacactaatcttagtgttgattttgccaagctcaccaccctgcacccatcagagcaatattacctggagatcatgaacgacaagaatcttccagatcattaccctgatcctcattttgcccgcttaccccagggggcacctacaagtccagtgattagcaacataattgctaggaatcttgacttccgactgaggaagctagccgagaaactgggggtcaactattctagatacgcagacgatattaccttcagtggggtgcttactaagctccccaaaatacacttgataaacgacattgtccgaagcgaaggcttctttataaacggatcaaagatctcactccgcaagaaaggaacaaaacagttagtaactggcctcacggtttcgaacggtgtgcatgtacccaaaaagtataaacaagagacgtggaggcacctgtactattccaagaaatacggtgccaaggatcatctgcgtcgtatcggcaaaacaggtattagcgggttcgaggaatggctgctcggtcgcatccactttattagatccatcgagcctgaagtcggggacgcaatgctggagaagtatgaggtgattgactggtctttgatctga

SEQ ID NO: 9892 - RNA, 1101 nt, synthetic construct
  source 1..1101: mol_type = other RNA
atgtccacaaacatcccacgtgacgaatttgtcttagtcagcaaggaatctggacactccaaagagttcatttcaaaggcactgtcgtacattaatacgctggagaataagaacatgccagtgatctttagtatcaagcacctttcacagattctcaacctcaactattcgttggttctcgatattattaagacccgggaacaatattaccgggggtttaaactcaaaaaacgaagaggggggtttcgatatgtccaaagccccaacagcaacttgagagagatccagacttggatacacaataatatcctgctgaacgtgcccattcacgaaaattgcttctctttcatcaaacagaagtctatacgggataatgcctccctgcacgctaatgccgaggccattcttaagctggacctgtacagatactttgagtctatcgatcagcgcaaaatctacaaagtcttcctggactttggctacacaaaaaacgtggccatcgacctgagcaagctgaccacaattctgcccaatcagtattacgaggacataatatcaaaggataagctaactcctgagaagtttgtgttgtcaaagcacggtttcctgcctcagggaagcccgaccagccctatcctgtccaatatcgtggctgaaaaattagacattaggctaaacggtttagctaaggcgttgaatgtaaaatactccagatacgcagacgatatcaccttctctggcaaaagggataagctcccaaaagtaagcttcgtggaaaagattctgaatgaagaggggttctatctaaacaacaagaaaacaaagctccgggtgaaaggacagaggcaaattgtgactggactgtctattagtaatggtgttcatatccctaagcattataagcgcaaaataaggcagcatctttattactgcaaggttcttggccccaaacgccatctccagaacattaacctggaaaagagtaacttcaaagactggttgtacggcagtatctgttatatccgttccatagagaagaacctcggcgataaaatgctggaggattttgacaagatcaattggcttttctactatgactga

SEQ ID NO: 9893 - RNA, 1209 nt, synthetic construct
  source 1..1209: mol_type = other RNA
atgacgctgccgctgaagcacatactgaagaacatcaaattcaacattcaggagagggtaacagccacaatgagctttccatttaatcagtttgctttggaggcaaaggaacagaataaaagtcaggagtttatcgatgcatgtctggcctacgcgagcaacttatccgagcagggctatcccgtgaccttctctattgaacaccttgccatgcaaatcggtgtgcaatcagattatttgcggaatctcatcggcgatggcaaacgagacatcacttacgattacgaacacaaatacaaacggtacaactactttaagctgaagaagcgggatgggaactttcgtgaaatcatgtcgcccgcgaaagacctcaaattcattcaaaaatggatcctcgtgaatattctgtctaagtacagactggccgagtcttgcaagggatttcggaagagaatttcaatctacgacaacgcaaaggtgcacgagaattccgagatcatcctgaaggtcgaccttctcaagttttatgacaccattaccgaaaagcgcgtctacggactattcaaatctcttggctatgcaactaacttatctttcagcttggccaagattaccactgccaaacacagaaaaaattattggagggatttcaacaacagctccaaagaaattctatctgagttggtacagactaagcctgctatcctgcctcaggggagtccaacatcccctatgataagcaatatcctggctacaaagatggactatcgatttgagggaatggccaaaaaacagaatttcagatattcgaggtacgccgacgacctgaccttctccattacgaaagagggaagcttaccctcccttaacgtgatatcaaagattatcacccaggagggttttttcatcaatcacaagaagactcagtatctcaaaaagggttgcaagcagtatgttactggcctgacaaccaccaatgggataaacgttaataagaaataccgcaagcaaattagtgagcatatttacttttgccgcaagtacggcgttaagtcacatctcgctaggcgtaagaaagatttcccaaactcaaattcccttagcttccataactggttgtatgggcatctgtgtttcatcaatagcgtcaacagtaaagctagtaaaacactgctcgaagaattcaataagataaactggtccgtgtga

SEQ ID NO: 9894 - RNA, 1137 nt, synthetic construct
  source 1..1137: mol_type = other RNA
atgtcctttagtttcaaacagttcgaaatagaagccaagaagcaagagaaatcgcaagaatttatagacgcatgcttggtgtacgccaaaaaactgacccagaatgactatccggttacttttagcttagaacacctggcgatgcaaattggtatacagtctgattacttacggaacctgatcggggatgacaaaaatgggattacaaacaactacgagcacaaatataagcgatacaactacttcaagcttaagaagaggcacggaggttttcgagagattatgagccccgctaaggacttgaagtttattcagaaatggatcctggtgaacatcctctccaaatacaagctcgccgattcttgtaaagggttccgtaagggaatctctattttccacaatgcaaatgtccacgagaattcagaattgatccttaaagttgacctgctaaagttctacgatactatcactgaaaagagggtgtacggcgtattcaagagcttggggtatgcgaagaatctcagttatagccttgccaaaatcaccaccgcaaaacatcgggacaaatactggcgcaatttcgatgatgacagcaaggagcggctcaaggaactggtaatggctaaacctccaattttaccacagggcgctcccacttcacctatgctatcaaatatcctggccaccaagatggactatagatttgaggcacttagtaagacacagaattgtagatacagcaggtatgccgatgatatgactttttccatcaccaaagagggaaaactgcccagtctgaaactcattacgaagataatatctgacgagggctttttcatcaacgacaaaaagacacgctatatgaaaaaagggtgtaagcagtacgtcacaggactgaccaccacaaacggtacgaacgtgtccaagaaatatagaaaggaaatctccgagcatatctattattgccgcaagcacggcgtggacggacatctggagaggagagtcgatttctcaggctacaacaacattaagtttcataattggctgtacggccatctgtgctttattaagagcgtgaatgaggaggcttctaaaaagatgctcgattccttcaacaagattaactggtatatctga

SEQ ID NO: 9895 - RNA, 1140 nt, synthetic construct
  source 1..1140: mol_type = other RNA
atgtcatttccattcaaacagttcgaggaacaggcgagaaaacaagagaagtcccaggagtacatcgatttttgtcttgcctacgctcgtaaacttagcgaaaacgggtatcccgtcactttttctctagaacacttggccatgcagattggagtccagtctgactaccttcgaaacctgattggagatgacaagaataacatcgaatacaactatgagctcaaatataagcggtacaactacttcaaactgaagaagcgagacggcggtttccgcgaaatcatggcacctgcaaaagacctgaagttcattcaaaagtggattctcgtgaatattctgagtaagttcaagctggccgattcttgtaaaggttttcgccagggcgttagtatctacgacaatgccaaggtgcacgaaaatagcgagattatcttaaaggtggacctcctgaagttttacgataccatcaccgaaaaacgggcctatcgggcattcaggctgattggctatgtgaagaacctgagctatagcttagctaagattaccaccgcgaagcatcgggactcttattggagaaatttcgacgatatctccaaagagacactgaaagagttaatcattgtgaaacctcctattttgccgcagggggctcccacatcacccatgataagtaacatcttggctactaagatggattatcgtttcgatgccctcgctaaaaaacaaaactgcaggtatagcaggtacgcagatgaccttacattttccatcactaaggagggaaaattgccaagtctgaaactgatcacgaagattatcactgacgaaggctttttcataaacgacaaaaaaacgcgctttatgaaaaagggctgcaagcagtacgtaaccgggctaacaacaaccaacggtatcaatgtatccaaaaagtacagaaaggagatatacgagcatatctactattgcaggaagtacggggtttcgtctcacctcagcaaaagagaggaagagttctcaggctttaattccataaagttccacaattggctgtatggacatctgtgtttcataaagtccgtgaataaagccgcctcaaacaagatgctcgaggattttaataagatcgattggtttgtctga

SEQ ID NO: 9896 - RNA, 1140 nt, synthetic construct
  source 1..1140: mol_type = other RNA
atgtcctttccttttgaacagtttattatccaggctcgagagcagaacaagtcacttgaatttatcgacgcgtgcctaagctatgggaaagccctcgaagaaaaggagctccccgtgattttcagcctggagcatctagcaattcagatagggatccagtccgtgtatctgcgcaatctcatcggagacggaaagtgggacataaattatgaatacgagcacaagtacaagcggtacaactacttcaaattgaaaaaacgtgacgggaaatttagggaaataatggcacccgctaaagatcttaagtacattcagaagtggatccttgtgaatatactcagtaaatacgtgctggccgacagctgtaaaggcttcaggaagggcatttctatcaaggataacgcgaaagtgcacgaaaatagtgaggttatcctgaaggtagatctgttaaagttctatgacactatcaccgagaagcgcgtgtgttctgtttttaaaagcttaggctacgtgtcaaacctggcctactcctttgcaaaaataactacggcaaaacatagagagtcctactggaaagactttgatgagaatagcaaggagattttgaacgagttggtcgacaataaacctccaatcttgccacaaggcgcccctacatctccggccatctcaaacatcctggccactaagatggattacagattcgaagccctgagcaggaaacttaattttagatactcccggtatgctgatgatctgacattctcgattaagaacggcggcaaattaccatctctcaagctcattaccactatcatatccgacgagggattcttcattaactcaaagaagacgaagtatatgaagcgaggttgtaaacaatatgtaaccgggctgacaacctcgaatggtaccaacgtcagtaaagaatatcgcaaaaccattacagaacacatctactattgccggaaatatggagttaactctcacctggagagaaggaaggaagagtttcccaagtacaataatatcaagttccacaactggctgtatggtcatatgtgcttcattaagagtattaacgagaaggctagcaagaagatgctggaggatttcaataaaatcaactggtacgtctga

SEQ ID NO: 9897 - RNA, 1140 nt, synthetic construct
  source 1..1140: mol_type = other RNA
atgtcctttccattcgaacaattcattattgagtctaaggagcagaataaatcgcaggagtttattgatgcatgtctgacatacggaaagaaattggatgacaaggagtttcccgtgattttttcccttgagcatttagccatgcacatggccatccagtccgactacctgagaattctgataggcgacgacaaaaaaaacctagtgtatggttccgaatataagtatgagcgatacaactacttcaaattaaagaagcgagatggaaaattcagggaaataatgagccccagcaaggacctgaaatatatccagaagtggattctagtcaacatcgtaagtaagtatgtgctcgctgacagttgtaaaggctttaggaagaatatcttcattgcccacaatgccaaggtccacgaaaatagcgaggtgattctgaaagtggacctcttgaagttctacgacaccatcacagagaaacgcgtctatggactctttaaatcactgggctacataaataatctggcttattctttcgcgaaaattactactgccaaacatagagacagttattggaacgatttcgatgaaaattccaaggaaatcctcaaggagttaattgagaacaagcctcctatactccctcagggggctcccaccagtccaatgatatcaaacattcttgccaccaaaatggattatcggtttgaggcactggctcgcaagctgaactgcaactacagcagatacgcagatgaccttaccttttctattaaacgtgagggtaaattgccatctctcaagctgatcactaaaatcatctcaaacgaaggcttcttcatcaatgataagaaaaccaagtacatgaagaaggggtgtaaacaatatgttacagggctgaccacgactaacgggacaaatgttagcaagggataccggaaaacaattacggaacatatatactactgcaggaagtacggcgtgaattctcacttggaaaagcggatcaaagactttccgaagtataacaacatcaaattccacaattggctgtacggccatatgtgctttatcaagagcatcaatgagaacgcgtcaaagaagatgcttgaagatttcaacaagatcaattggtacatctga

SEQ ID NO: 9898 - RNA, 1140 nt, synthetic construct
  source 1..1140: mol_type = other RNA
atgtcctttccctttaaagagttcactgaaaaagccaaagaagaaaaccgaagtcaggaattcattaatgcctgtatacagtacgctaagaagctgtcatctaaaaagctcccagtgattttctccctagagcacctagcaatgttaatgggggtggagtctaactatttgcgtacgctcatcgacgacggaaaaaacgacttcgtttattcgtacgaacacaagtacaaaaggtacaactactttaagcttaagaagcgcgatggaggctttagagagatcatgagtcctgccaaggacctgaaatttatacagaaatggatcctggtgaatattctcaataagtataagcttcgcaactcctgtaaaggtttccggaaggaaataagcatctaccataatgctgaagtgcaccagaactctgaaactatcttgaaggtagatctcctgaagttctatgatacgatcaccgagaagcgggtttatggtttgtttaagtctttgggctatgcgaataacctggcctatagttttgcagagctcaccactgcaaaacacagagactactattggcgaagtttcgacgcaaattccaaaaaagtcctgaatactctgtacaatcatagaccacccatcctgcctcaaggcgccccgacaagccccatgatttctaatattctggccgccaaaatggacgtacggttcgagaaattagctgagaaactgaactgcaactattccagatacgcggatgatctgacatttagcatcaaaaacgagggcaaactgcctagccttaagctcatctataagataatcagcgacgagggattctttgtcaacgagaaaaaaaccaagtacatgaagaaggggtgcaaacaatacgtgaccggtctgacaaccacaaacggagtcaacgtgagcaaagcttatcgcaagtcaattaaggaacacatatactactcaaggaagttaggggtgaagaagcatcttaaaaataggaacgaagagttcggcggctacaataatattcagtttcacaattggctgcttgggcatctctgcttcatcaagtcagttaatcaggaggcctacaagaagatgattaaggatttcaacaagatcaactggtatatttga

SEQ ID NO: 9899 - RNA, 1140 nt, synthetic construct
  source 1..1140: mol_type = other RNA
atgtccttcccgtttgaaaagtttatcatcaaggcacgcgagcacaataagtctgaggagttcattaacgcttgcttggtctacggaaaaaacttagtcgagaagaagttgcctgtaattttctccctggaacatctgtctatccagattggggtcaagagtgactaccttagaaatttggtgggcgacggaaaaaacgacatcatttacaactacgaacacaaatacaagcggtataattacttcaagctgaagaaacggaacggcacctttagagaaataatggccccagctaaagatctcaagtacatccagaagtggatcctcgtgaacgtgcttgaaaattatcccctggccgagtcctgtaaaggctttcggaagaaagtcagcatatatgataatgctaaggtgcacgaaaacgcggaggtgatcctcaaaatcgacctcttaaaattctacgacaccatcaccgaacgaagggtttatggaatttttaaaagcatgggttacgtggagaatctggcatttactctggccaagataaccacagcgagacaccgggagtcatattggattgattttgaccgtaatagccaagagatactatccaagctgcttaaggaaaagcccagcattttaccacagggcgcccctactagccccatgcttgccaacatcattgctaccaaattggattaccgctttgaagcactagcaaggaagattaacttcaactacagtaggtacgccgacgatctgactttttccatacaaaagaaaggtaaactcccccctctgaagctcattaataaaatcatctcagaggaggggtttttcgtgaatacagagaaaacgaagtatatgaagaagggatcaaaacagtatgtaactggcctgaccacaacgaatggggtgaacgtgtcaaaaaaatacagaaaggaaatctctgagcatattttctattgcaggaaatatggtgtcgtttcgcatctgaagcgacgcgagaatgaattcccaaaatataacagcatgaacttccacgattggctctatgggcatctgtgtttcattaagagtatcaatgagacagcctctaagaacatgctggaggacttcaacaaaatcaattggtttgtttga

SEQ ID NO: 9900 - RNA, 1146 nt, synthetic construct
  source 1..1146: mol_type = other RNA
atgagcttcccctttaaggaatttatctcaaaagctaaggaggagaacagatctcaggaattcattgaggccaccatcagctatgcggacaagctcgataagaataattttccggtcatcttttctgtcgagcatttagctatgctgatggggatacaatcatcctattttcgtcacctgatcggtgaacccaaaaaacatcactaccaggacgaacctcataagatcttccgctacaactattttaagctcaagaaaaagcgggagggctaccgcgaaataatgagtccatcgaaagacctcaaattcatacaaaaatggatcctcgtgaacatcctcgagaagaaaaacctacagaattcctgcaagggcttcaggaagggcatcagcatcaaagacaacgccatgccccacgagaacagcgacctcattctgaagatcgacctgcttaagttttacgatacgatcaccgaaaatagagtgttcggtgtgtttgcggacatgggctataggaagaacctggcagtgtctctagctaaaataaccacagcaccccacagattccagtattggaagaatattccaaaggccgagctggatatcatgggctataaacacaacaacttcccaagtattctgcctcagggcgcccctacatcaccgatgttggccaacattgttgcatccaagctggatttgcgctttgaaaaattgtcagagaagatgggattcaattacactcggtacgctgatgatctgactttcagtattaaagggaatcagcggctgccaaacttgaagctgattcgaaagattatttccgacgagaactttttcatcaacgagactaaggtcaaatatcttcggaaggggggaaaacaatacgttacaggattaaccaccgcaaatggaatcaatgtgtctaagaagtacaggcaggagattgattcccacatatactactgtagaaaatacggggtgaaagggcaccttagctggataggtgaagaaaatgagaaaagccagcgagtattaccctttcatgattggctgtatggacatatctgcttcatcaagtctattaatcctaaagccgccgaaaaactgctcaaggacttttccaggattgattggcttttcgactga

SEQ ID NO: 9901 - RNA, 1152 nt, synthetic construct
  source 1..1152: mol_type = other RNA
atgaaaccgtttccttttgagcagtttattacgaacgcaataaaagaggatagaagtaacgacttcattgaggaatgcctcagatatgcatacaaactggaagtcaagaactatccagtgcttttttccattcaacacctcgctatggcaatgggcgtcaagtcccagtttctgctggcgttaattggagaagataaacgcaacattttcgattatctgactgacaatagagctaccattaagcactacaatcacttcttcatcaaaaagaagaggggcaactatagggaaatcatggccccacacaaagatttgaagtacatccaaaagtggcttctgttcaatattttgagcaagttccccctggctgagtcctgtaagggtttccggtccgggatttctatctacgataatgcctctcttcacaacaatgcgaaaataatccttaaagtggatctcctcaagttctacgatacgattacagagaagcgcgtgtacggtgtgttcgccaaaatggggtacgctaagaatctagcctattctctggcaaaactgtgtactgccaagcaccatgagaaatattggtcggactttaacttaaatgacaaggaggtcctgagctactacctggagtttaagcccccaatcttaccccagggagcccctagcagtcctacactagctaatatagtggccacaaatatggacaaaaggtttgaagggctgtcaaaaaagttgaagtttagctacagtcgatatgccgatgatctgactttctcaatcaaagacatcgggacactcccttctttggacttgatccgaaagatcataaacgaggagaacttctatatcaatgaagacaagatcacctatatgcatagaggctccaaacagtatgtaactggcctcaccgtaaccaatggagttcacaccagcaagaaatatcgtaagaaaattgctcggcatatttacttttgcaggcggtacggcgttgaaaaccatctgatcaagaacatcgatcatttcccaaattacaacatcctcaagtttcacgactggctatacggacatatctgcttcattaattcagtggacaaggaagcatcaaagcgcctgctgaacgactttaacaaaataatatggcccctttga

SEQ ID NO: 9902 - RNA, 1149 nt, synthetic construct
  source 1..1149: mol_type = other RNA
atgaaatccttcccatttgagcagttcatcaagaacgccaattcagaaggtcggactcaaaatttcatcgaggcgtgcgtgcagtacgctcacaatctagaagatagggactatcccgtgttttttagtattcagcatctggcaatggccatcggaattcagagcgactttttgaccgctttaattggcgagaacgaaaacagtcggtatttgtacgaaaacgagggtgtcaaactcaagaagtacaaccacttcttcataaaaaagaagcgagggagttatagggagatcatggccccccataaagacttgaaatacatccaaaaatggctgctttttaacatcctcagcaaggttccattggctgaatcttgcaagggctttcgctctggcattagcatctatgacaatgcaagcatacattccaatgccaagataatcctcaaggtagatctgctgaagttctacgacacaatcaccgaaaagcggatttatggggtcttcgaaaaaattggatacgcaaaaaaccttgcatattccctagcaaagttatgtaccgctgagcaccacgacaaatactggtcagactttaatcagaacgataagaagatcctctcctattatctcgagttcaagcctcctatcttaccgcaaggggccccttcttcccccacacttgctaatattgtggcgaccaaaatggacaaacgatttgagggcctgggcgaaaaactgaagttcagctactctagatatgccgatgatctcacgttctcaattaatcatatagggacactgccccctctgaacctgataaggaaaatcatcgaggaagagaatttctacatcaacgaggataagattacctacatgcaccgtggaagcaagcagtacgtcactgggctgactgttacaaatggcgtgcatacgagtaaaaagtacagaaagaagatagccagacacatttacttttgtcgcaaatatggagtggagaatcacctgctgaaaaacattgagcagtttccaacctacaactctctcaaatttcacgattggctgtacggtcatatttgctatatcaatagcgtggataaggaagcctcgaagaagatgctttccgacttcaacaaaattacttggtcaatctga

SEQ ID NO: 9903 - RNA, 1149 nt, synthetic construct
  source 1..1149: mol_type = other RNA
atgtctttccccttcgagcaattcatacagaatgccagagaggagaaccgatcagaaaagttcatcgatgcctgtgtgaaatacgctgaaaaactggaaagcaacaactatccagtgatcttcgcgttgccccatctcgcaatcgtgatgggcgtgcagtcggatttcctgaaagccttgataggcgaaagtaaagatatccgctatatactgcaaagcaacgagggattcaagatcaagaaatacaaccacttcttcatcaagaaacggaacaagggatttcgtgagattatggccccccacaaagacctcaagtatattcagaagtggctcctgtttaatgtgttaagcaagtatcctctaactgactcctgcaaaggctttcggaaggggatctccattcgcgacaatgcactcgttcattccgacgccaaggttgtgctcaaggtcgacctgctgaagttttacgataccatcactgagaggagggtctttggggtctttgagaagatgggttatgccaaaaatctttcttatagcttggccaaactgtgcacggcaaagcaccacgacaaatattggctcgacttttcttacagcgacaagcagacattaaccgaactctacaaagagaggccttccattctgcctcagggcgctccatctagtccgacattagctaacattgtagcaaccaaaatggataagcgtttcgatgcgctggctaaaaagatgaatttttcctacagccggtatgcagatgatctgacctttagtatcaaagatgaaggaagacttcccaatcttaaactgatcagagagatcatatcggacgagaatttctacatcaacgagaataagatcagctatatgtataaggggtcaaagcagtacgtcacaggcctgacagtagctaacggggttcatactagtaagaggtaccgaaaggagattgaaagacacattcatttttgtcggaggtacggagtggaagaacacctttctcgcaacaagaaaaagttcccatactacaattccctaaagtttcacgattggctgtacggtcacatctgctttattcattcaatagaccgcaaagcctcagagaaactgttgaacgacttcaacaagattaattggttcatttga

SEQ ID NO: 9904 - RNA, 1149 nt, synthetic construct
  source 1..1149: mol_type = other RNA
atgaagagtttcccaatagaacaattcaaggaagtcgcgatcaaccaggggcacagtcaggagtacatcgatttctgcttaaaatacgcgaatcaacttattgacaagaactaccccgttattttcacaatcgaacacctggctgtggtgatcggagttgaatctgactacttaaggtttctggtgggtgatatcaaacacgagcagtttgagtttgacagatttgagtataaagagaagcggtacaattatttcaagttcacaaagaagcgcgggggctaccgtgaaattatggcccctcacaaggatctcaaatatattcagaagtggctcctattcaacatcttggacaagtatccctttaaaaattcatgcaaagggtttagacaggggattagcatcaaggacaatgccctgcctcatgaaaaaagcgacgtcatcttgaaagtcgatctgctgaagttctatgatactatcaccgaaaagcgaatatatggtgtgttcaagacaatgggctttcacggaaacctggccgtgtcactggccaagctctgcacagccaaacaccagtccgattattgggagaactttacggagaaggagaaacttattctctccgagtttatcaaaacctcgccatcaatacttccccaaggcgcaccctccagccctgcattggccaatatcgttgctacccgaatggacggtcggtttgatgctctttccaagaaaatgaatttctcttactccagatacgcagacgatctgacgttctcagtgaaagagaaggctgtactgccaccgctgaagctgatcagtaagattattcaggaagagggcttctacattaacgaagataaaatccagtacatgaagaggggaaataagcaattcgtgaccggactaactattgccaacggagtgcacacctctaaaaaataccgcaagcagattgctcggcatatacatttttgtaggaaatatggggtcgagaatcatttggataagaacaacaaagagttcaagggctataatattctcaactttcacgactggctgtacggccatatatgttatatcaatagcgtagacaaggaagcaagcaaaaaaatgctcaacgacttcaacaagatcacttggtctatatga

SEQ ID NO: 9905 - RNA, 1149 nt, synthetic construct
  source 1..1149: mol_type = other RNA
atgaagagttttcctattgaacagttcaaagaggctgctaaggagcaagggcactccaaggagtatatcgacctctgccttaagtatgccaaccagttgatagataaagattacccagtgatcttcacaattgagcaccttgccgtggtgattggtgtggagagcgactatctgaggtttttagttggtgacattaagtgggaagaagtggagtttgataggtttgagtacaaggagaagcgatacaagtacttcaaattcaaaaagaagcgcagcggctatcgagagattattgccccccataaggatctcaaatacattcaaaaatggctgttgttcaacatcctcaacaaatatccactcaaggagagctgtaagggttttagacagggcatatccatcaaggataatgccaaaacccacgaaaaatccgacattatactgaaggtagatctactgaaattctatgacacaatcacggagaagcgggtttacggagtctttagagccatgggatttcacgggaacctgtctgtctcactggcgaaactttgtacggccaagcaccagcccgattattgggaggccttcactgaacgtgaaaaactgattctgtcggaattagtcaaaaccaagccgtcaattctacctcaaggcgctccttcttccccagctctggcaaacatcatcgcgactaaaatggacagcaggtttgaagcactctcaaaaaagatgaacttcttctatagtcggtatgcagacgacctcaccttttccatcaaaggcgatggcatgttgccccccatcaaacttgtgctgcggataataaatgacgaagggttctacatcaatgaagacaagatccagtatatgaagaaagggacaaagcagtttgtgaccgggttaacaatcactaacggagtacataccagcaaaaaatatagaaagcagatcgcaaggcacatacatttttgccgcaagcacggagttgagaatcacctcaataagaactacaatgaattcaagggatacaacagtctgaatttctacgattggctgtacggccatatttgctacatccattctatcgatgagaagtactctaatcgcttgctgaacgacttcaataaaattaactggttcatctga

SEQ ID NO: 9906 - RNA, 1152 nt, synthetic construct
  source 1..1152: mol_type = other RNA
atgaatagcttccctatcgaacgcttcaagattctcgccaaagagcagggtcatagcgacgagtatatccgcatttgcttggagtacgcactcaagttgactgagaagaaatatcccgtgctgtttactctagaacatctggccattgcgattggcgtgaaatctagtttcctccgattactgattggcgatcttaagacagaggagaagatatccaaactgaagtaccccctcaaagaaaaacggtacaagctgttcttcatcaagaaacgcaggggtgggaagagggagataatggcccctgataaggatgtcaagtacatccaaaagtggattctattcaacatccttggcaagtatcccctgcgtgattcttgtaccgggttccgtccaaatataagcattaaggacaatgctctgatgcacgaaggagctttcaagattcttaaaatcgacctgcttaagttttacgataccattactgaggaacgagtgtacggcgtcttcaaatctatgggatatagatcaaatctggccgtatctttatccaaactctgtacctataaacacaagcctgagtactggaattctttcaactcgaaagaaaaagaactcttggcttattatgtgaaagaaatgcccgcaatcctgccacagggatgcccaagtagtcctatgctcgccaacatcatcgccagcaagatggattatagatttgaggaactgggaaagaagatgagtttctcctactcacgctacgcagacgacttgacgttttcaatcaaaggaaacggcatcttaccgaccctttcctttattaacaagataataaccgaggagaactttcacgtgaacaccgacaaaaccaggtacatgctgaaggggcagaaacagtacgtcacgggcctcacaatcactaatggggtgcacacaagcaagaagtatagaaagaaaatcgctagacacatacatttctgccggcggtttggcgtagaagttcatctgaataggatccggaaagattttctaggttactccacattgaactttcatgactggctgtatgggcacatctgttttattaatagcgttgacaaagagtactcacaaaagctgctgacagactttaacaagattaactggttcatctga

SEQ ID NO: 9907 - RNA, 1131 nt, synthetic construct
  source 1..1131: mol_type = other RNA
atggaatttccattaaacgagttcattgaacttgccaagaccaaagacaaatcccaagaatatattaactccgttatccactacgtcaagaatctggaatcaaatgacttccccattattttcacccgtcaacattgggcaagcatgatgcagatacagtccacctttattgactacttgcttaatgactatggcgaggacttcgaggatgtgttgcagagtaaatactcatgcttcactctgcgcaagagaaacggcggcgagaggctgattatggctcccaaggaggatctcaagtacctgcaaaaatggatccagttcaacatcctgaacaactacaagtttgaagactcttgtaccggattcataatcggcaaatcgattaaggataacgcaaagaaacacgagtttgccgagacgattctgaaaattgacctgctacaattcttcgacacaatcaaagtcgagcgcatctattactgcttcaaaaaaatgggctacattgggaatgtgtctcacgactttgccaatctgtgtactgtggtccatcccaaggaatattggaagaaggtggacagtgaggtgaagtctgtaattggtcagacaatcaattcctccagtagagtgctccctcagggagccccaaccagccctctgctagctaatattgtggcgtctaaaatggataaaaggtttggtggactttcaaagaagctcgggtttaattatactcggtatgcagatgatttgacatttagcatcaaaaaggggcagaagctcccgtcactgaatgttatctatcagatcatagagagcgaagggttctatgtgaacaagaagaaaacgaagtttatcaacaagggctgcgctcagtatgtaacaggattgaccatcgccaatggagtcaacgttaataaaaagtaccggaagatgatcgaaaggcacctgtacttttgtagaaaatatggggtcgataatcatctcaacaaaaacaagaagactctctttggtttcaaccgacttagcttccatgattggttatacggccacatatgctacatcaaaagcatcaacgagaattgttacaagaagctgatagaagagtacaaaaaaatcacctggacaatatga

SEQ ID NO: 9908 - RNA, 1116 nt, synthetic construct
  source 1..1116: mol_type = other RNA
atgccttttgacttcgaggaattccgaaaaattgctaaaagtaacaaccactccgaggagtatattttcgagacaattaaatacgcagagaagcttaacaagaaggacctgccggtaatcttttctaccgtgcacctagctatcgagctgaaaatcccctcgaatattctcaacagcctgctgaaatcctacaactacacgtttttcaatttgcataagagatctggaggcttccgtgagataatggtgcctaacgagaagctgaagtatgtccagaggtggatcaatttcaacattctgcagaagttgccactcgaaaaggtctgcaccggctttaggcccaactactcaatcttaaccaacgcaaatattcacgccaattcaaaaatggttctgaaagtggacctcctaagatttttcgatacaataaccgatcgccgggtttatggttatttcaagtcccttggctacctgaaaccactgagctacgatctggccaagctggtgactgccagacacaagaaaagctattgggactttgtgagcaaggataattgcccccagttggccgatatagctaattccaatagcccggttcttccccaaggggcccctacgtctcctatgctcgcgaatttactggcatcccgcatggatgaaaggtttatcattctctcccagaagctgaactttaggtatagtcggtacgctgacgacttgacttttagtattaccgaagaaggacagcttccctttacccgcgtgattaagaagataattgaagaggagggcttcttcatgaatgatagcaagactaaaatcttcagtcgagggatgaaacaatatgtgacaggccttacagtcacccatggtgtacacgtctctaaaaaagaccggaaagacatcttcatgcacctgcatttttgtaagaagctcgggccaaatgagcatttgaaaaactggtctaagaagaatggattaaacagagaaccatacggtttccaggattggctgctcggaaaaatctcgttcatctacagcatagacaaaatcatcgggactaagatgtttaaggaattcgacaagatcaattggtcatttgagaactcaaactga

SEQ ID NO: 9909 - RNA, 1134 nt, synthetic construct
  source 1..1134: mol_type = other RNA
atgcctttccctctcgaactgtttatcctggaggccgagaaacagggcaaaagtaaggaatacatcgacgtctgtgtggaatatataaagaagctggattcaaatggcttccccgtaattttttctctccatcaccttgcccaagaaattggtgtgcagtacaaatatctgaggttcctcattggagagaacgacaacaagtacgagcataagtacaagcgctataactacttctctatcaagaaaaagcgtaacgggtatagagagattatggccccatcaaaagatttgaagtacatccagaaatggatactgctgaacatcttgtacgtgtataaactagaggactgttgcaaagggtttatgcccaatcaaggcatccttaataatgctattgtgcacgagaatagcgagaaaattctcaaggttgatctgcttaaattctatgactccattaccttcgatagggtcgtccaggtgttcgaaagcgtcggctatattaaaaacctggcaattagcatcgccaagatagtgacggcctctaatagagaaagctactggaactgctttgatgaatattccaaactgaagttgagttcgatccgcaatgctaaaactccggtgcttccccagggcgctccaacatcacctatgttagcaaatatcatagcaaccaatctcgacaaaaagatcatcaacctgagtaagaagttgaactttcgatactcccgctacgctgacgatctgaccttttccgttaaaaaaaatgaaggagttctcccatactctaagctgattatcaaactgatcgagtccgagggattcttcgtgaacccctccaaaactataatcaagaagaaggggcagcgacaatatgtcacaggtctaactgtgacaagcgatgttaatctcagcaagaaatatcggaaggaaatttttaagcacctgcattactgtcggaaattcggagtgaataaccatttagagaggaacaaggactttagaaagtacaacatcattcagttccacgattggttatttgggcacatctgctataccaactcaataaacaaggacgtagcgaataagatgttcgacatttttcggaagatcaattggtctatcagtgagtga

SEQ ID NO: 9910 - RNA, 1182 nt, synthetic construct
  source 1..1182: mol_type = other RNA
atgatttattctcctgaaacatttgccattagcgcccggaaccagggtcacagtgaaccctttatcgaactgtgtctggcatacctcaataaattgaacaacaggggctatcccgtcctgttttccatccaccatctggcccaggagatcggaatacagacttcttttcttaacgagctaatcggcgatacctactatttttatgacggcgaggaaaaaattgtcgtgaggtcaaaagtcgactattttgatcaggggcggtaccgctattacaaaaagttcaaaatcaagaagcggaccgggggctaccgcgagattatggcacctcaaggcgagttaaagtacatccagaaatggatctacattaacattctgctgaagtaccaactaacagataattgcacaagctttcgtaagggaagatccatctatgataatgccaaaccacatgagcgcaagaaatacatattgaagatagatctcctcaagttctacgacaccatttcagaagaacgtatcttcgggctgttcaaagctatgggctacgttgaaaatttaagcttcgcactggcgaggatctgtaccgcgaaacactctagagacttctggaattcaatttctggagattcggctaaaatccttaagaccttgattgagaacaagcctgccatactgccccaaggcgctcctacgtcacccactttggctaatattgtggccaatcggatggacaaaagatttgtgaagctggggcagatccgagactttgaatatactagatacgcagacgacctcacttttagttccaataatttcaacagccttccgagtatcagtttcatcaaggagattgtgaaggaggagggtttcttcgtgaatcagaagaaaacgaaactgtttaaagctggtggaaaacaatatgttacagggcttacagtaaccaacggggtaaacgtgtccaaaaagtacaggaaaaacatattccagcatctgtattatgcaaagaagttcggcccacgaaatcacctcattaagtgggctaaggataataagaagaacccagacattatggcctttcaggactggctctacggacacatctgcttcataagctccatcaacaagatcgccggaaagaaaatgctgagcgagttcaacaagatcgattggactattttatga

SEQ ID NO: 9911 - RNA, 1134 nt, synthetic construct
  source 1..1134: mol_type = other RNA
atgcccttcctattcgaggagtacattgaagaggcccggaaaaaacagcggtctgaagcctttatcgaatcaaccgtgcagtacgctaagaagctcgacgacaacggcctgccggtgattttttccagagcccatttcgcttcattagttgggatgcctagccgcgaaattttcacaatcctgcactaccgcgtgacccagtatgtgcagtttagcatcaaaaagaaaaacgggggactcaggcatatcatgacaccagagaagaaactgctctacctgcagaaatggatcaataaaaacatattgcagcaggtcagcgtcctggactgttgtacggcgtttgtgcccggcactagtctcgccaccaatgcatacacgcaccgaaacgcacatagaattttaaaggtagacctcacgcgcttcttcgatactataaatgagaaaagggtctttggactctttaaatatctgggatatcacccaaacgttgcatacgatcttgcccagctgaccaccgctttcccaagctatcagtactggaagtctcagtcattgaaggatttgagacaaactgtcgagaaaatcactttttacgacgcttttctccctcaaggtgccccgactagtccacagctggccaatttgattgctaagcctctggactctaggctgctaatgctctccgagaagtttggctgcaggtattctcggtacgccgatgatctggtgttctccactaacaagcctgaaggaaagctgcccccccttcacctggtaaagcgtatcatagaaagcgagggattcctagtcaatgaagataaaaccgcatatcttaagaaggggatgaaacaatacgtgacaggcctgaccgttacccacggcttccatgtgagtaagaagcagaggcaagaaatctacaaacatctttactatgcgcgaaagtatggtcccttcgagcacttgaagcggtggacaacagataattggggtgatgagagaaaaacaccttatggcttcaaggactggctgttagggaagatctcgtttattaactccatcgaccgtaagaacgggatacgcatgcttgacgagtttaataaaattcactggggcttcgagtgcgaagacggttga

SEQ ID NO: 9912 - RNA, 1092 nt, synthetic construct
  source 1..1092: mol_type = other RNA
atgtcatttgatcgcaagctgttcattgaggaatgtaaaaatcaggagaaaagcgagcagtatattgtcaacacccttaagtacgccgacaatctggtgaacaggggttttcctgtcctgtttagcctgaagcacatggcttatgaactgggaatcaactatgaggacctcaaaacaattgaggatcaccgcgagaattattacaagcacttccacattaagaagaaaaaggggggcctacgacatctctctgtccctttcactaacctcaaattaattcagtcctggatctaccacaatatcttactccatcatcaccctactagtagtgcatacggctacatcaaaaatcgatctatcaaagagaacgccgaccaacacgtggctaaaaggtttattctcaatgtggacctgttgaagtttttcgaaacgataactgagcacaaggtcttcaaactgtttgtagaaatcggctatactaaaaccctttcttggtccctttcgaaattggtgacagtaccaataaaggaggattattatctccaactgtcacatatcgagcagaagctgttcaacaaaacattcgaacaggaatacggggtgttaccccagggtgcgccaaccagcccctctatttcaaatctggttctccgtaacctagacggaaagatggtggaactagccgagctgaagggaagtacatacacccgctacgcagacgacattaccttttcaggcaacgatattaagaatataccaaccaagacggaaatcatgcgggtcgtgatgagcgaaaatcttctgatcaactggaataagtggacactgcggaaaaagggcatgagacagaaggttaccggactgaacacaactcacgggttgtccgtgcctaagagctaccggaaagatgtgaaaaggcatatccacttttgcttgaaatacgggcccgagtcccatcaaaagaagatcggtgttgataaacagttctatagatactggcttctcggaaggatccattatattagattcatctcccccgagataggcaacaagatgttgaaggacttcaataacatacagtggccgctgtga

SEQ ID NO: 9913 - RNA, 1122 nt, synthetic construct
  source 1..1122: mol_type = other RNA
atgagcaatgaaattgtaaacagcgtgatgagctcgagcctgtataaaattgtggagcagatctctaaatctaatcacggagacgactataagaaatccctgatagaatactcacagaacctttcctctaaaaacttaccaatcattttcgatgcctaccacctggcctatagtattgggattcagccctacagaattattaatatcatcaaagaccgggaccatctgtataatacctaccgagtcaggaaaaaaaccggcggccatagatggatcatgagccctatagaagagctcaaaactatacagacctggataaagatcaacatcctggacaaaattcaaacccacaactcagccaacggctttgtaaaggagaagtctattgtgactaatgcggagaagcacatcaacaaagaaacaattctcaacattgacctgtaccgtttttttgatacaattacggaaaagcggatatatcaactgtttaagaagttaggctacactaataagctgagttacgatcttagtaggatcctgtgtgtgaatcctccaaagaagtactggaaagaattgaagaaagagaacaagctgaagaaaaagttcatcaagatgaaaccgtccatccttccccagggagctcctacatccccaattatctccaatctcctgtgtatcaagcttgatgagattctattcaagtattgcgagaagtctcacctctcatatacgcgctatgctgacgatatcacaatgtcaggggataataagaatatgcccgagttgaagaaaatcaaatcgatcatcagacataacgggttcaccgttaacataaaaaagatccgcttcatttccaaacacaagaagcagactgttaccggtattacagtgaacaatggactatttgtggacaagaaaatcatcaaagagatctctcaggaattgtactattgcataaagtatggctacaagtcccatctcgagtataagttcaagaagagcaagattaaagcaaactacaaagattggttgtacgggaagatctgctttgtctacagtgtcgagaaagaaaaaggtgagagcttcttcaagaaattcaacatgatcgactggaatatatga

SEQ ID NO: 9914 - RNA, 1122 nt, synthetic construct
  source 1..1122: mol_type = other RNA
atgtccaatgaaatcgtgaatttcattatgagcaccagtcttcacaagattgtggagcaaattaatcagagtaaccacggtaacgattacaaagagaagcttattgagtattctcagaacttatcaagcaacaacctgccgatcatatttgatgcataccatctggcctactcgatcggaatcgaaccatatagactgattaatctgattcgagatcgagatgatctgtacaatacgtataaagtgcggaagaaaagcggcggatatcgctggatcatgagtcccatggaggagctcaagatcgtgcaaacatggatcaaggtaaatatactggacaaagtcaacatccacgagtccgctaatggatttattaaagaccggagcatcgtcactaatgctaataagcacgttaagaaagagacaatccttaacattgacctgtaccggttctttgatacaatatcagaaaagagggtctaccatctatttaagaaactgggttacaccgagaagctgagctacgacttttccagattgctctgtgttaatacccctaaaaagtactggaaggagatcaaaagggaaaacaggctccgtaaaaaggtgatcagaatgaagcctagtgttctaccacagggcgcgcccacttctcctattatctctaacctcttgtgcttaaaactggaccaggtgttatacaaatactgtgagaaaagcaacttggattatactagatacgccgacgacatcaccatatctggcaacaaaaaatccatgcccaaacttaagaagatcaagtcaataattcgccagaatgggttcactgtaaacattaacaagattaggttcacaagcaaacacaaaaagcagacggtcaccggcctgacagtgaacgatggggtttatgtggataagcgcattataaaggaaattaaccaggagctgtattattgcatcaaatatggctacaagtctcatctcgaattcaagttcaaagactcaaagatcaagtccaattataaggactggctctatgggaagatatgctttgtctactccgtggaaaaggaaaaagggcagcaattgctgaagaaattcaatatgatcgactggaatatctga

SEQ ID NO: 9915 - RNA, 1095 nt, synthetic construct
  source 1..1095: mol_type = other RNA
atgagcacaagtctctacaaaacagtcgaattgataaacaactcagatcattccctcgaatataaaacccttctcattaactactctcaggaccttacctcaaagaatctgcccatcatctttgatgcctttcatttagctgtgatgattgggatccaaccttacaggataattaatttgatccgggaccgcgatgctttgtaccatacatacaagattcgtaagaaatccggtgggtacagatggattatgtccccgcagaatgacctgaaaaatatccagaactggatcaaaaccaacatcctggaaaaagtggaaatccacgagtctgctaatggctttactaaggataaatccatcattaccaacgccaatgagcacatcggaaaggagatcgttctgaatatcgatttgtaccgcttttttgacaccatcactgaaaagcgagtgtatgggctgtttaaaatgttgggatataccgagaagttaagctatgacttagccaggctgatgtgtgtgaatgcaccaaaaaagtactggaaagagatcaaaaaggagaataagcttaacaagaagatcataaagctgaaatctcctgtgctacctcaaggagcgccaacgagccccataatatccaatcttctggcaaagaacctggatattagcatattcgagtactgcaataagtcaaacctgagttatacgcggtatgccgatgacatgactattagtggggacaaaaaagatctccccaatctcaagctgattaagggcatcatcagaaaaaacggtttcacagtcaacatcaagaaaatcaagtacatttccaaccacaaaaagcagactgtcactggcattaccgtaaataacggcctgttcgttgacaaaaaaattctgaaggaagtaaaccaggagctctactattgtattaagttcggctacattaaccacctaaagttcaagtttcagaacagcaagataaaatcgaactataaagactggctgtatggaaagatttgcttcatctatagcgtggaaaataagacaggtgaggagctcttcaaaaagttcaatcttattgactggtctatctga

SEQ ID NO: 9916 - RNA, 1098 nt, synthetic construct
  source 1..1098: mol_type = other RNA
atgagctcacccctgctgcacatattggagcaggtggagaattccaaccactctactgaatataaaaggctgatcaaggactattcaatccggctggcttcgcggaatctacctattatctttgacatctaccatctgtcctatctgatagggatccagccctataggatgattaacatgattaaggatcgacactcactctataacgtctacaaaatccgcaaaaaggcaggcggctacagatggatcatgtcgcctatagacgacctgaagcgtgtgcaatattggatcaagctgaacattctggataacatcaacatttgcgacagtgcgtgcgcattcattaaaggaaaaagcatcagggataatgctcaaaagcatgtggggaaagagctcatcctgaatgttgacctctaccgattttttgacagtataaccgagaagaggatatatggagtttttaagagtctcggatacaccgagaagctctcttacgatcttgcccagcttgtaacggctcagccgcctaaagcctactggaaggagatcaaaaaggaaaaccggttcaagaaaaagcacataaagagcactcccgcaatcttgccacagggtgccccaaccagcccatcactctctaacattatcagcattaagatggacgagattttcgataagtatgcgaatgaatgtaagatttcctactctcgctatgccgacgatttgacattttctggtgaaagaggctccattatctccctgctggctgtcaaaaaaattattagacaacagggcttcaccatcaacttgaaaaagacaaaataccttcgcaatagtggaaaacagtccgtcactgggattacagtaaataatgggcttttcgtggataagagcgtgattaacatgataaaacaagagctgtactactgtctaaagtttggctacaaagcccatttaaaatacaagcaggccaaaggcgaatctatcaaaagcggatataaggaatggttattcggtaagatatgcttcatctactccatcgataagaatcggggggtgaacttctttaagatctataaccagatcaactgggacatttga

SEQ ID NO: 9917 - RNA, 918 nt, synthetic construct
  source 1..918: mol_type = other RNA
atggtgaacgataccgccaactactacaagacctttaagttgaggaagaaaacgggcggatatcggtggatatctgtcccgaacgaggaattgaaactgctgcaccgcaagctcaacctgatgatttttatgcgcattagaccaagcgaatctgtccactcattcgttaagaaaagctccattaggactaatgctgaggtgcatgtaaatgctaagacatgcctgaatgtcgatctttacaggttctatgagtccatcacagacaagcgggtgtttggatatctgtgtaaactgggttaccaccccaatgtatcgtatgtgattgcagccctagttacgatacagttacctaaagcgttctggcaggaggtgagaaaggagaataagttcagatccaagtatatacggaggaaacctaaagcccgggttctgccccaaggctctccatgctctccttttctgtcaaatcttgtcctgacacatttagacttcagaatcgagcaagcttgtaagggcctaggctttagctactcacgctacgcagacgacattactatcagtagcaaaggcgacaatttctttgcactgaccaccctcaaaaaaattattcgaagtgagggtttcaccatcaacatccagaagatatcctttcgacgttctagctcccgtattcaggtaacagggatcactgttaataacgggatctttgtgaacaagtcactctacaaaaaagtcgtgagccacctctactattgcaaaaaatatggggtgcgcgatcatctcgaaaaggtgaagcttactaacaagagtaactacaaggactggctgttgggaaacatccttttcatcaactccgtggaacccgataaagccaagaagttgttcaccgaatttaatcagatcgatttcctcctgtga

SEQ ID NO: 9918 - RNA, 1101 nt, synthetic construct
  source 1..1101: mol_type = other RNA
atgacatcaccccttgataacatcctcgacaaagccaaagccgaagagcactccccagaatatatcagtgatatcactgcatacgctaagaacctaatagacaaaaagctgcccgtgatttttagcaggacaaacctggccctgagcatcgggataccccggtcacatctcgagttcttgttagccaacagggagatgaagtacaagttctataagctgcggaaaaaacacggtggataccgttggatctcttctcctgagaaggaactcaaatacatacagggatggatcaaagtcaatattttcgacaacatcgagatacacccggccgcgtgtggcttttccaaaggtacgtccatcaaaaaaaatgcaaccgcacaccagaagcaagacttgattctgaacatcgatctgtatcgcttctttgattcaattaccgagaatcgagtgttcggaatccttaactggcttgggtatcataagaatattgctatcgacatggccaagctgctgtgctatcagcccacagataaatatttcgaagaggtggcgaaggagggaatattctccaaatccattttggaccagaaaccttcaattttacctcagggcagccctgctagtccagttattagcaacctgttaagctataagctagatgttagactctctaaaatggctagtaagctcgggattaattattctagatacgccgacgatattacctttagtggcgaaaggaagaatatggtttcgctgaacaccgtaaagaaaatcataactgaagaaggcttctacatcaacaaggacaagattaagtatctcgctcagaatcgcagacaggatgtgaccggcattgtcgtgaataagggcctgaagattaacagcaagtacaaaaaaaaggtgctcactgagatctacttttctgagaagtacggtgtaaagaatcacctgggctacttgattgaccggaagggagccgaaaaaaaggcaaattacaaagatcatctgcttgggaagatctactttatctattccgtggagccagaggtcgggaagaagatgctggagaaatacgaccaaatcaaatgggaaatctga

SEQ ID NO: 9919 - RNA, 1101 nt, synthetic construct
  source 1..1101: mol_type = other RNA
atgccctcacagctcgacaatataaagaactctctagatgaggcaaacgcttcaaaggatttcaagattgagatcatcaactatagccaaaatctcgagaaaaagggcctgcctatcatattctccctccctgacttaagttttaagattggtctgccattccatgtgattcaggaaattctgaagaataagagtaaccactacaagaccttcaagatacagaaaaaaactggggggcatcggtggatcacaagtccagacgaacaactaaagagaattcaacggtggatctacgaaaacatccttaagaatgtgcccgagcatgactgtagctttggctttgtgaacgagcgaagcatcatagacaatgccaagaagcacgttaatcaggatactattctgaacattgatctgtacagattctttgatagcatcgagcagaaaagggtggcaggcgtattcaagcacctcggctatcagcccaatttagcctattccatggccgaattgttgacagccaaaatgtcaagggcctactggaaagagattgaagatgaaaaggttctttcagacacatttatcgaggagtgcccacagattcttccgcaaggatctccggcgagtccccgtattgcgaatttcatcgcccactccctggacacaagaatggccaaactggctaaaaaactggacgtgaattattcgaggtatgctgacgatttgagcttttctggcgactataaaaaattgccttccatcaagaccttacgcaagatcatcatgaatgagggattctttctcaacgagaaaaaagtcaagtactttaaacgctcccatagacagatcgttactggagtggtggtaaacgataggatatctgtcccccgggaattcaaggaaaagctccgcaccgaactgtaccattgcattaaaaaagggccagctgctcacctgaactggcttatgagcaacaaggatttcaaaatcaagaccaattaccgagatcacctgctcgggaaagcatgtttcgtctacgcagtcgagcctgagacgggtaaggactttctggagatgtataaccagattaagtgggaactgtga

SEQ ID NO: 9920 - RNA, 1050 nt, synthetic construct
  source 1..1050: mol_type = other RNA
atgacaatgacggatacttgggagtccctcttcaaagagcgggccgtggaagagaagcactcagaggaatatatcgcccagtgtattgagtacgcaggaaaactacatgaaagaaacctcccagtcatctttgacttcgttcatttggcttactacctcggtatctattccgacaagttacggggcatcgtagctaatgcggagacacactaccgagcctacgaaattaagaaaaaaaccggaggcaccagggaaatagaagcacctgatgaaatactgaaggatgtgcaacgctggatctatgccaacattctgtgtagagacaagtccgtccagtcttgcgtgcacgggtttgtgccccgacttagcgaggccgataaggtccggggtgtgctgagcaatgctgtgccccattcaggccacgactggctgatcaatctggacttgaagaactttttccccaccgtgactctcactatggtgcgggactactacgacagccttggatatgaggaagaggttagtaagacgctgaccgcactgtgtacatacaaatctaggctcccacaaggtgcccccacttctccgatgttgagtaatattattgccaccaagatggacatagctctcttagagtactgcaagaaatacggaattacatatacccgctacgccgatgacctgactttctcggcaaatctggatgtggaggtacctcctttgaaggacttatatgcgatcgttttcaaacatggattcatcgttaacagacagaaaacaaagattcgtggccgtgggtataaaaaggaggtgacagggctgaccgtcactgaaggcgtgcacgtcccaaaaaaatatcgcaaggaggtgtggagggagctgtatttttgcaaaaaattcggcgtctacgaacattatcacaacatggggaccaataaggggctgtacaaggattggctgaggggcagaatcatgtttatccgccagatagatcctgcttgcggtaataagatgcttgaaaagtttaacgagcttaactggctagtatga

SEQ ID NO: 9921 - RNA, 1044 nt, synthetic construct
  source 1..1044: mol_type = other RNA
atgacagaaacatgggagagcctattcaaggagcaggccctcgaggaaaagcactccgacgaatacattgtgcagtgcttggaatatgccggaaaacttcatgagcggaacatgccggtcatttttgactttttgcacttggcctcctatttaaaatgcctcgctaagcagctacagggcatcgttgcaaatgtggagtcccattaccaggagtacgacatcaagaaaaaatcagggggtaagcgtcgaattgaggcacccgactacctgctcaaaaatgtgcaacggtggatctacgtaaatatcctttgtcgtgacaaaagcctgcaaaactgcgtccatggcttcgtgcccgtcttaaccgagaacgatcgcgcgaggggcatactgaccaatgcaatgcctcatagcggacacgactggatcatcaacctggatctcaagaacttttttcacgccgtgacgcttgatatggtgaaagattacttcgattctctgggctacgaggaagaggtgacaaagaccctgacagccctctgcacactcaaaagtagattaccacagggggctcccacctctccaatgctgtcaaatcttatcgctgccaaaatggataaagctatgctggaatattgtaaagaacgcgggattacttatactcggtacgcggacgacctgactttcagtgccaatcttgacgttgaaatgccacctctgaaggagttgtacgctatcgtctttaaacacggtttcatagttaatcgacagaaaaccaaggtgcgcgggcggggctataagaaggaggttacgggactgactgtcaccgatggagtgcatgtacctaagaagtacaggaaggaagtgtggagagagctgtacttctgtaagaggtttggtgtatatgaacactatcacaacatgggcactgataagggcctgtataaggactggttgagaggaagaataatgttcattaggcaaattgatcccgcatgtgggaataagatgctcgaacagttcaacgagctgaactggctggtgtga

SEQ ID NO: 9922 - RNA, 1044 nt, synthetic construct
  source 1..1044: mol_type = other RNA
atgaccgagacgtgggaaagcctgttcaaagagcgagcattggaggaagggagatcagaagagtttatttcacagtgcattgaatatgccggaaaattacacgagaagaatttacctgtgatcttcgactttgtgcacctcgcctattacctaggattctatagcgaaaagctccagggcatcgttgcaaacgtagagggtcattacaggacctatcatatccgaaagaagtccggcggtaccaggatgatcgaagctcccgacgccatgctgaaggacgttcagcactggatctatggaaacatcctctgccgggataagtccataaaagattgcgtgcacggattcgtccccgctctgactgagaaggataaagtccggggtatacttagtaatgctgcacctcactcgggccatgagtggctcattaacctggacttgaaggacttcttccatactgtcaagctggatatggtcaaagcctattttgattccctggggtatgtcgaagaagtaagtaaaactctgacggccctttgtacaatgaaatctagactaccacaaggggcaccgacctctccaatgctgagcaatctcattgccacaaagatggacgaggagatgatggcctactgtggcaaaaggggcattacttacacacgctacgctgatgacctgaccttctctgcgaactacgatgtggaaatgcccctggtgaaagagttgtatgctatcatctttaggaacgggtttatcgtgaaccggaagaaaaccaaaatcagatacagcggctataagaaggaagttacagggctcaccgtgacaaatggggtgcatgtacctaaaaagtaccgcaaagaggtgtggcgcgagctttacttttgcaagaaattcggcgtttacgagcactaccaccagatggatactgacaagggactgtacaaggcgtggcttcggggccgtattatgttcataagacagattgacccagcctgtggaaacaagatgttggaacaatttaatgagctgaattggttagtgtga

SEQ ID NO: 9923 - RNA, 1044 nt, synthetic construct
  source 1..1044: mol_type = other RNA
atgactgacacctgggagagtctgtttaaggagtgcgccgtggagaataatcataccgagaattatctgaaggagtgttttgagtatgctggtagcttgcaccagcgcaacctgcctgttatcttcgattttgtgcatctcgctatgtatttcgaatgttgcgcagaaaccctgaaagggatggttgccaatgtggaaaagcattataccgagtataagatccgcaagaagagcggcggtgacaggttgatcgaggcaccagatttcctactgaagaacatgcagagatggatttacattaacatcctgtgtaaggatctctctataaatgactgcgttcacggcttcatccccgcgtttaagaacagggataaagtaagaggaatcctcacgaacgcagccccacacgccggacacgattggcttataaatgtggacttgaagaatttcttccacaccgtggagctggacaatgtgaacaactattttcactccctgggatacgaagacgaagtcgtgaagactctgacggccctgtgtacctacaaatcacggttaccgcaaggtgctcccacatcacccatgcttagtaacattattgctagcaggatggacgaaatgatgctggaatactgcaaaaagagagggattgtctacacacgctatgccgatgacttaactttctctgcggactacgatgtgaaaattcctgcacttgaggacatctacaaaatcgtatacctcaacggctttaaagtgaaccgaatgaagactaaggtgcgttacaaaggatgtaaacaggaagtcacaggcctgaccgtaacaaatggcgtccacgtttcccagaaatacaaaaaggagatactccgggagctacatttctgcaaaaagtttggggtgtatgagcattaccaacacctcaagactacaaagggactgtataaggattggttgcggggcaaaatcatgtttgtccgacagattgatcctgcctgcgggaacaaaatgcttgaacagttcaacgaactcaattggttagtctga

SEQ ID NO: 9924 - RNA, 1041 nt, synthetic construct
  source 1..1041: mol_type = other RNA
atggaggaaacatgggagtctcttttcaagaaacaagccgttaaaaagaagcactccgatgaatacattaacgagtgtatgcagtatgccttccacctccacgagaaaaatctgcccgtaattttcgacatcaatcatctcagcgaatactggaatctcgacatcgatctgatcaaatcaattatagagtgtcccccccggtattacgctgagtacgacataagaaaaaagagtgggggtacgcgacacctgtgcgcacctcaccaagtgctgaaatacattcagcgctggatttaccacaacatccttctgaaggacataacaatcagtgagcatgtgcacggattcatccctaaggatcaatttgacagcaaaaggaccatcttgtccaatgcccaggcccatgaaaaatgcaaatggctgatcaacatggaccttaaagatttcttcaacaccataaagcaggaaagagtgaagaagtatttcctctctataggctacaccgaagacatttgtgagctgctcgccaaactatgtaccttacattataggttgccacagggcgctcctacatcgccaaccttatcaaacctaatcgcaagggagatggataaggaactggaatgcttgtgtgcaaagaatcattggtgctatacacgctatgctgacgacctgactttttccggcatttacatcgatgagacaccctctatcaacgagctggagaagatcatcattcagaatggatttctggtgaaccggcagaaaactaagtttcgactgagaggcaattgccagatggtcacggggttgactgtgactcatggtgtcttcgttcctaagaagtatcgtaaggaagtctggaaggagctctactgctgcaagaaatttaccccatacgcgcactgtcagtacaggtatccggataaagggttttataaagattggctgaagggccgcattatgttcatccggagcattgatccagcttgcggaaacaagatgttagacgcctttaatcaactcaagtgggtgctttga

SEQ ID NO: 9925 - RNA, 1041 nt, synthetic construct
  source 1..1041: mol_type = other RNA
atggaacagacctgggagtcgcttttttccgagcaggcgggaattgaaggtcacagccaacagtacattagtgaatgtctggcttatgccggaattctgcattctcacaacgtccctgtaatctttgataagtgccatttcttctctttcttccctgacatcaagaagggaaggatggagatgttcttactgaacttgtgctgctacaagaactactctatcaaaaagaaagccggtggcgtgcggatgattagcgctccctatagtgacctcaagcgagtgcagcgctgggtttatgagaacatcctacttaaggacctctactctgtgagcccctgcgcagagggctttatgcctaaggataaagacgatattcgcaatatagtgacaaacgcaagaaggcacgccaggagcaaatggctcatcaatgtcgatatccaaaacttcttcgactcaatcaaatacgattccgtatgggagtacttctcaaaattggggtacgaaaaagaagtcgccgacgttctggctaagatctgtacctaccagtttagactgccacagggtgccccaacgtccccgatgctcagcaatttgatagtgagatcaatggatgacgcgtttgtggaactggcaagtaagtgcaagtgtttttatagccgttatgccgacgatataacactgagtggcaattccgacagcatcatgccctccatgcgggatatttaccagattgtctatgctcaccactttcggcccaataagaagaaaaccaagatttcgttttcctgtgaccgacagatggtcacaggcctaactatcactgatggggttcacgttcctaaaaaatataggaaggatgtgtggaaagaactgtattgttgtaagaaattcggggtggcatctcatattgcctatcgccatcccgaccaaggcatgtacagatactggttacttggacggatcatgttcataaaatcagtggagccagagtgcggcgagaagatgctgcaggagtttaactctatcaattgggggatatga

SEQ ID NO: 9926 - RNA, 918 nt, synthetic construct
  source 1..918: mol_type = other RNA
atgaaagacacttgggagagcctctttaagaaagaagctaaaaagcagggccactctgatgccttcattcaggagtgcatcgggtacgccgccaaattgcacgccaacaatgtgcctgttatcttcgactttaagcacctgtcagccatcttcgatatggagtcgcgagacttattctttatgtgcaagcaccttggccaacagtacaccacgtattccattaagaagaaaagtgatccgaaagcaataagacttctgactgcgcccgggtggcaactgaaaaagatacaactttgcattttgcgtaacatcctgatgcgcgataattcagttagcgaacacgcacatggattcgtcaggaaaaagtcaatcgtgacaaatgcgaaggctcatgaaggagcacgatggattctctgtatggatctgaaggatttctttgggaccgtgcgcaaagggaaggtatatgattattttgagagcctgggctatgagaagagtgtggtggagactttagctacactctgtacctacgagaaccatctccctcagggtgctccaacatctccttgcctatccaacctgatggccaagggaatggacgaggaaattgaggcatactctgaacagaatggcttcgtgtacacacggtatgccgacgacattacaatcagctccaaaaccgacatcaagcccgaaaagaataccatcaacgcaatagttaggaagcatggctttcgcgtgaatcatgacaagaccaaactgcggcacaacggacagagaatggaggtaacgggtttgactgtcggcaggggagtgcacgtcccaaaagcttataaaaaggccctgttccgggagctatacttttgtagaactcagggtcccaaggaacactccgaaatggtctacaaagggaaatga

SEQ ID NO: 9927 - RNA, 915 nt, synthetic construct
  source 1..915: mol_type = other RNA
atggaacatctgttggattattattggacaggtcagttcccccgtgctaacgcctgctgccaattcgattgggcttatcgggactaccggatccaaaaaaagaccggagggtttagagaaatttccgcaccaaatccaacgctgaaatggtgtcagcactggattcagcacaacattctggaacacgtcgtgaatagactcccctcatccgtgcacggctttgttcaaaataggtccatccagactaacgctctgcctcatgtgaactcagagtggatcatcaatatcgaccttaaggactactttgattctatcttccagaagaaggtcctcgatttttttctgcagctcggatacgaggactctgttagcgaattcctgagcaacgtgtgcacaaagtttagttgcgtcacttaccagagagctctaccccaaggcgccccaactagccctctgttggccaatttcttaaccatcaaccttgacaaggatctggagcgtttagcccaggaactggatatgagatacaccagatacgccgatgacataacattttcgggcctccagaaaacgtgtcctgtcactcctcgggacattgagaacattatctatgagcacggcttcaggccgaataagtctaagacccggatacgccataaggggagtaggatgatggtaaccgggctgacagtgggtaacggagtacatgttccaaaagagtaccggaagcaggtgcttagggaactccatttcgcaaaaaaatatggccccgagaaccactgtcgcaaagtgcgaaatgagaaaggttattttagggaatggttgctaggacgcataatgttcgtgcgaagcattgacaaggaggcaggggcgcgcatgctggaaattttcaatgagatcaactggatgatgtga

SEQ ID NO: 9928 - RNA, 951 nt, synthetic construct
  source 1..951: mol_type = other RNA
atggaagatctcggaaatgaattcatcaagaaattgccggtgatacttgatatttaccatttaagcaacctcgttggcataaaatataatctgctcaaagacatcctctcaaataaggataagtactatcacaccttctacatctcgaaaaaaatgggcggcaaacgcaagattgaagcaccaaatgaggtgctggcattactacagaagtacataaagaacgagatactcgacaacattctggttagcgagtatgcctttggatttgtgaaagagaaaaacatcctgcttaatgcgaagagacacttgaatcaagagatgattctcaacatcgacctggagaatttctttcccactattaaggaaaaacgcgtgttctatatcttttacaagttgtgcaagtacgattatcatatcagcaaggtactgacaaatctagtcactctgcaggggaggttacctcagggagcctgtacctctcccgtgattagtaatatcgctgcctataaactggataaaagactttccacctacgccaagaaactgaacctgatctacacaagatatgctgatgacatcacattcagcggctctaaaaagatcatcaacaacttcttcctgaagaacatccagaatattataaaggagtgtgggttcgtcattaatgataagaaaacgaggttttgctctcagtacggtcggcaggaagtgaccgggctgatcatcaatgacaactacatacacattaacaagaagtacatccgggaaatccgacaagagctctactatattaataagttcggcatctcaaaccaccgtaacaacaaggacttcagtaacatgtattatagggagcatctgttgggtaaaattctttttgtcaagtccattcaccaagacattggactgtccttttttaaccagtttcagaatattgactgggaaaaatga

SEQ ID NO: 9929 - RNA, 1047 nt, synthetic construct
  source 1..1047: mol_type = other RNA
atgtccaaaaagaatatttacgagcagtacaaagctaaagtgtccaataacgagaattataccgacgaaaagaagaagaagtacctggagcagattgagattctcaaagccaagaatagtgaaatcatactgaacacataccatttctccaatcttgttggcattaaatggaacacgcttaagaaaatcatcgatgatcccgacaaattttactacaatttccagatctcgaagaagacaggcggcaaaagaaccatcaacgttccaaacaacagcttggaactgtgccagaagtacattaaggaaaaaatactcgacaacgtcaaactgcattcagcagcacacgggtttgtcaataacaagtctatcattaccaacgccaaagtgcacgtcaatagcgaaatgatcctcaacatagacctgaaaaacttttttcctagcatttctcgcaaaaaggtattctacatcttcaacaagatctgcggctacgacaattctctgagtcactgtctgactaagcttgtgatgtacaaaaatggtctgccacaaggtgcctgtactagccccattatttccaacatagtaaccttcaagttggatctgagactgaagaagttgtccgataagcttggcttaaattatagccggtatgctgatgacattaccttcagtggcaataagaacgtcatcaactctaagttcctagactttgtgaaaacaatcatcaacgaatgcggatatcagattaacgataaaaagacgaggttcgagtcaaaatgtggtaggcaagaggtgactgggttaatcgtgaacaatggaaaagttagcatacctaaacagtacattcagaatctacgaaaggatctctattatatcaagaagtatgggatagaggagcataaaaaacggaacaacatctataatgcgttctatcaggagcacattaaaggacaaatcatgtttgtgtactcagtgtcaaagaataaggggatcaagctcttgaagaaatacaatctgatctttgacgacaccaagtatggaaattga

SEQ ID NO: 9930 - RNA, 1065 nt, synthetic construct
  source 1..1065: mol_type = other RNA
atggaaaataagaacctctacaggaaaaagatcgagaactccgacatatcttttaatgagaagcagaagctgttatccaatctcggtaatattaaggatgactacccaataatccttaacggataccatataagcaataaggtgggtataaagtggaatgactatttgaagctcctgaaaaacacgaacaaatactaccacgtatattacatggctaagaaaagcggcggcaggcgaaaaattaccattcccgaccaaatacttatggacatccagtatttcatcaagaacaacatcctggagaatattaagattgatgaaagcgcctttgggtttcgtaagcagaaatccatcctagccaatgccacatatcatcgggagggggaaaaggtcttaattatggacatcgaaaacttctttccaagtatccataaaggacgggtgtactatgtattcaataagatttgcggttactctcgagaggtttcttacgacttgacaagactggtcacatataacaatggattgccgcagggcgcccctacttcacctatcattagcaatatcgttgcttataagctagatcttcggctgaaaggactgtcttacgtgataggtatcaaatacagccgctatgcagatgatttgaccttttccggggcagaaaacaaaattaacgacaagctcctctatactgtgagtaacatcatcgaggacgaagggttcaaattaaacctgaagaagataaggttctacggcaaaaactcaaccaagattattaacggacttgtcatcaataacgggtacgtgaccattcaaaagcgctatatcgataagatcaaacaggagctgtattatatcagaaaattcggcctggagtcgcacctgaattatgttgggttcaaaaacaaacactacgcggagcacctcaaaggcaagattctgtacgtctacagtattgataaggagaaaggcaagcagttgttttcactgtacaacgaactcaatatcgaaaataagcccaatctggtgagaggcggattcgatgagatgcccgtgctgtga

SEQ ID NO: 9931 - RNA, 1086 nt, synthetic construct
  source 1..1086: mol_type = other RNA
atgttcactcgtttgagaatgttcctcatgtccctgcttgagaaaaagaagaagtacacgaaaagcattaaggtcacacaaatcaaaaacgagaacgttacccctttgaaaaaacacaccccactgaagtacgacctgccggctatctccaacgcattgcacttatctaacaaaatcggcatcaagtgggaagtgtataaagacattgcccgacatcctgagaatcactaccacgtgtttcacataaaaaagaaaaacgggggctttcggaccattgccgcgcccaatgaggagctatcgatgatccagaactatattaacgagaatatcctgttcgcatacaagatccataagtcagcctttggctatgtaaagggcaagagtattatagatgtggccaatcaccacttaaagtctgaaaactttctgtcacttgatctggagaatttctttcccagtatcggagccgagagactttattactattttgggaaactgggcggttatgataaatccattagcgacaacttagtgaggttctgcatgtacggaacagggattccccagggggcatgcacttcccctcagatttcgaatatcattgcttacaaactcgatctgcgccttggggaactgtgtcagtccaaaggactcaagtatagcaggtatgtggatgacctgacgttctctggcgagactgaacatatcaacgacaagctgctgttcaccgttcaaaagattatagctgacgaaggatttaagctcaacagcaaaaaaacaaggttcggtaataatcgcaatggtttcattattacaggcttgatgatccggaataacagtatctgtgtcccatcttcgtacataaagaagatcaagaatgaactctactacatcaataagtacggattgctcgatcataaaaagagagagaagattgagaacagcaattatctggaacatatcaaaggaaagatcaactacgtgatgcacgtcgacgaaagcaaagggctacttgtaaaagaacagtttgacaagaccatactcaagataaactccatggagtcagatatgcggggcctgctgtga

SEQ ID NO: 9932 - RNA, 1011 nt, synthetic construct
  source 1..1011: mol_type = other RNA
atggacctgaatctgctggagagtagtctaacccagaaggggtatgggaagcgttacaagaagatttgcataaactatgcgaaggctcttaacgagcagggtctaccagtcatctttgacaacaatcatctctctctcttgatgggcattgagtcaaagatattaggccactacattatgaacagcaacaagttctacaaggagtaccagatcgccaaaagcaatggctcactcagaaccatctcgactccctcctacaatatgaagactattcaaagatgggtgctggacaacgtgcttagctctttcgccatccattctaatgcttttgggttcgtaaaagggaggaatattaaagacaatgcactcctgcacaccaagaaaaaggtggtccttaacatcgacattaagaacttttttccgacgatcaagttcgatcgcatcttctatatgttttaccaccatggttacaccaaggaactgtcctatactctggccgctctgactacatataatggatccctgcctcaaggtgccccaacctcaccttatatttccaacatactgtgccagagaatggacaaaaggttgctggcccttgccaaaaaaatgaacgcagattacagtcgatatgctgatgatattacgatgagcggagacgaaaatgttcgccagtatatagagacaattaagagcatcatcatcaacgaaggatttgatataaactacaagaagctgaggctacaaacagacaataatatgcaggaggtcacaggcctcatcgttaacgaagatgtgaaggtgaaacggaaatataaaaaacggctggagcagcacatttattactgtaagaaattcggggtgtatagccacttaaaaaaaatcgagtccgagtcaaagtcttactttaaggaatacctctacggcatcgcaaatttcattaaaatgatcgaacccgatgaaggattggagttcttgaagaaattagacgaaatcaactggggcaattga

SEQ ID NO: 9933 - RNA, 996 nt, synthetic construct
  source 1..996: mol_type = other RNA
atggaagctatgctaataaaaaagggctatggtcagcggtataaagagacatgcatgcagtatgcacaggagctggctgatcatgggttacccgtgatatttgacaacaagcacctcagtcttctgatgggaattgaatccaacatcttgggctattacatcattagctccaacaagttttacaaggagcaccaaattgcaaagtcaaatgggtccctgaggaccattagtacacctagctacaacatgaaaaccattcagagatggatactggataacatcctgtcttcttttgcaattcacagcaacgcctatgggtttgtgaaaggccgcaatataaaggataatgccatcatccatactaaaaaaaagctggtactgaacatcgacatcaaaaatttcttcccgagcatcaagttcgagagggtgttctacatgttctaccacaatggatataccaaagaaatctcttactccctagccgcgctgacgacatttaacggagctttaccacagggtgctccctcgtcacctagtattgccaacatcatctgccaacggatggacaaacgtctcttggcgctcgccgtgaagatgaatgccgattattcacgatacgccgacgacattacaatttcaggagacgaaaacattagaaagtacatcgagactatcaagtctatcattatcaatgaagggttcgatatcaattacagaaagctcaggctgcaaactaacaaaaatatgcaggaggttaccggtcttatagtcaacgaggacgtcaaagtgaagcgcaaatataagaaacggcttgagcagcatatatactactgtaagaagttcggagtttatagccacctgaagaaaaatgagagcgagagtaaatcctattttaaggaatacctctacggcatggcaaacttcattaagatgatcgaaccagacgaaggcatggaatttttggagaagctggatgagattaattggggctcttga

SEQ ID NO: 9934 - RNA, 1017 nt, synthetic construct
  source 1..1017: mol_type = other RNA
atggactacattgccgcgctgcaggaagccctgatccagaaaggttacggcaacaaatatcagaaactctgcgtagactatgcctctaatctattaaacaatcgcctgcctgtgattttcgataaaaaacatctcgccctgcttatgggggttaattatcagacacttacctactatctgatcaacacagataatttctacaaggagcacaagattatcaagagtaatggcggctatagaaccattagcgctccctcctttaacctcaaagcaattcagaggtgggtgctggacaacatcctgtataagtatcaggtgtctgacaacgcgaatggatttgtcaaagggaagtccattaagaataatgcagagtcacatataggcaaggagatcatcctaaacatagacataaagaacttcttcccaagcattacatttcaacaggttttctacctgttctataattcgggctatactaaagaaatgagcttcacattcgctaagttgcttacttttaaggggcgtctccctcaaggttccccggctagcccctacctggccaacatcttgtgtaaaaaactggatagcagattaaacggattcgccataaaaataggggccagctacagtaggtacgctgatgatatcactttttctggggatgctgacatttatcgacacatcagttttatccggaacattatcgaaagcgagaacttcaaaatcaatgagaaaaagcttcgggtccagaagagtaactccaagcaagaggtcaccggcctgatcatttctaatggagaagtgaaggtgaaacgcaactataagaagaagttggaacagcacatttactattgcaagaagtttggcgtgtttaatcatctcaagtacacgggagcatccgacaagtcatactttaaagagtacctctacggtatggcatcatacgtatccatgatcgaaccagacaccggaaaatcttacctgaattcattgaacgagatcatttgggattactga

SEQ ID NO: 9935 - RNA, 1014 nt, synthetic construct
  source 1..1014: mol_type = other RNA
atggattatataaattccctgagagaagcgctgatccaggctggctacggacggcgataccagaagctttgcctagagtacgccgataatctcctcaataatcagctgcccgttatctttgacaaaaagcacttgagcctgctgatgggcgtagagcctagcatcttgggctattacatctttaacagcgataacttctacaaggaatacaaaatacccaaatccaatggggacttacgggtgctctccgccccatctttcaatctgaagtctattcagcgctggattctggaaaacatcttgtacaattatcaggtcagtaataacgctaatggttttgtgatcggcaaaagtattagagacaacgcagagcctcacattggtaaggagatcgtgattaacattgatatcaaggacttcttcccctcaatcaactttgaacgcattttctacctgttttacaatagtggatacacaaaagagatctcttataccttcgcaaagctgctcacttacaataaactgcttccgcaagggtcgccagcctctccttatttagccaatataatctgcaacaggcttgataagaggttatcagggcttgccagcaaaattaaagcttcctataccaggtatgcggacgacattacatttagcggggaagccaacattgtgaactacatcaagactttgcgtaacattattgagtcagagaactttagcatcaatgagaataagctccgaatccaaaaacaaaattcaatgcaggaggtgacaggtctaacggtaaacaacggcgtcaaagttaaacggaagtacaaaaagaacctcgaacagcacatatactattgtaagaagtacggcgtctattcccatctggagcataccggagctaaggacaaatcctatttcaaggagtacctgtatggaatggcatcttacataaagatgatagagcccgacgtgggggaatatttcctgagaaacctcgatgaaatcaactgggattattga

SEQ ID NO: 9936 - RNA, 1014 nt, synthetic construct
  source 1..1014: mol_type = other RNA
atggattacctttctagactggaaaagaaactgatagagctcgattacgacaacaattacaagtccatctgcatcaaatacgccaagaagctcttggacaacgaagcgctggttgtctttgataagaagcaccttagtctgctgatgggaatcgacctgaagatcctcaactactacattgtgaataccgatgagttctataatgagaagaaaatccccaagaagaacggcaggtaccgcattatcagcatgccaagttataatctcaaaagaatccaacggtggattctggacaatatcttgtacaaactccgcgtgcattccaatgccaccggctttattcgtaacaaaagcattgtggataacgcctcctgccatgtgaataaagatgtggtcgtgaatatagacatcagcgattttttcccatccattgacttcgacaaagtgttttacatgttctataacctgggctatactaaggaactatgttacgccttgtcgaagctgcttacttataaggggatactcccccagggtgcaccctctagcccgtacatcgctaatgtcataatgatcaacatcgacttacgactggacggactcacgaaaaagattaattctaactacacccggtatgctgatgacattacaattagcgggaacaaatatattgtcctgcaattgccttttatcaaaaccatcatagagtctcaggggttcaaagtgaacctggaaaagctgaagattcagtaccgaaagtcacgccaggaagtaacaggccttgttgtcaatgacaggatttcagtaaaacgggagttcaagaagaatctaagacagcacatctattattgcaaaaggtttggggtttacgagcacttaaagtatacaggcaacgaagaaaaatcattctacaaggagtatctgtatggacatgcatacttcattaaaatggtggaacctgagtgtggtgagaggtttatcaaggagttagattccataaactgggatagttga

SEQ ID NO: 9937 - RNA, 1014 nt, synthetic construct
  source 1..1014: mol_type = other RNA
atggactatctgaatcggttggagaaaaagcttaatgagctcgagtacgacgattactataagtctgcttgtatcacctatgccgaaaagctcatagacaacgaggtaccagtagtcttcgacaagaaacatttgtccttactcatgggcattaacttagctacccttaattactacctggtgaacaccgatgaattttacaatgagatcaagattcccaagaagaatgggagataccgggtaatctcgatgccatcatataatctgaagaagatacaacgatgggttctggataacattctgtacaatatcaaggtgcacaacaaagccaccggttttgtcaggaaccggagtatcgtcgataatgccaagtatcatgtgaaaaaagatgtcgtcgtgaacatcgatataagcaactttttccctagcatcgacttcaataaggtgttctacatgttttacaacctagggtacacgaaggaactctgttatgtcctgtcaaaactgttaacatacaaagatactctgcctcaaggagcgccgtctagcccctacatcgcaaatatcataatgatgaacatcgacctgagactggacgggctggctaagaaaattaattccgattactctcgctatgcagacgacatcactatgagtggaaacagagatattgtggttcacgttcccttcattaaatccataatcgaatcccagggcttcaaggttaatctagacaagctcaaaattcagtatcgaaaaagtaggcaggaggtgacaggcttggtggtgaacgatcgtcttagcgtgaaaaaggagcttaagaagtcactgcgccagcatatttacttttgcaaaaagttcggagtgtatggacacttgaaatacacagggaacgaaggcaagtctttttataaggagtacctgtatggtcacgcctattttatcaaaatggtggagtatgaatgcggcaaaaggttcattaatgaactcgacagcattaactggaactcctga

SEQ ID NO: 9938 - RNA, 1020 nt, synthetic construct
  source 1..1020: mol_type = other RNA
atggactacctgtctaagctggaactgaaacttactgacaatgggtattcaaagaaatacaaggaactctgcatcagttacgcatcggcactccaaaaccgaaatttgcccgtgatattcgacattaaacacttgtctaaactgatgggggtaagatactccgtgctattttattacatcacgaagagtgaagagttttacaaagagtttaagatccctaagaagatgggaggtattcgtgccatctacgcgccatcactcaatctgaaaaaaatccagcgctggatcctcgagaacatattgacatacttcgatgtggacgatagcgccaaaggctttaaacgctccatgggcatcgtcgagaacgcagccatacataccaataaaagtctcgtctataacattgacatcaggaattttttcccatccattagctacgagaagatctacttcctgttttacaatgctggttattcttctgaagtcagcttcgctataagccgcctggtgtcgtatcagggctacctgccgcagggaagcccctgtagccctattctgtccaatatcgtttgtcgaaagatggatgaggaaatgaagcggttagctttcaaagtgggggcttcctactcaaggtatgccgatgacatgactattagtaccgatgacataaggctgttcgtttcaaaaaaagaggccttcaaggaaattattgagaggaatggctttatccttaataacaagaaggagcggatgcagtattacaaccagccccagttcgtcaccggactgctcgttaacgagggggtgaaaattagacggtcttttaagaaggagatcgaaaagcatatctacttttgcgaaaagtacggaattttcaaccacttgaagcaaattggtatggaagagaagagcttctataaagagtatctatatggcaaagtgaactttatcagatccgtagaacctgaaaccggcaagtatttcttagagagacttaacaagcttgattggacatattga

SEQ ID NO: 9939 - RNA, 1020 nt, synthetic construct
  source 1..1020: mol_type = other RNA
atgaactatctcgatgaattgaaggtgaaactgattgcaaaaggattttccgacaagtacatcaaaaggtgcacacagtacgctgaaaacctttataacgagaatttcccagtcatttttgatgtgaagcatctctctatgctgatgggtatcaactacaacacgctattctattacatcatcaacactgaaaccttctacaaagagttcaagatacctaaaaagtcaggcgattataggataattgaggcaccctccttgaacttaaagaagattcagaagtggattcttgataatatcctattacacttcccggtgaacgcgtgtgccaccgggtttaaaaagcagaccagcattgtcgataatgcaaaggttcacgttaacaaagagctggtgtacaccatagacatcaaggacttttttccttccatttccttcaaagacgtctacttcctgttttataatgtaggctattcgagtcagatcagctacgcctttgcctgcctgacaactcactgtggcaaacttccccaggggagcccatgttctcctactataagcaatatcctctgcaataagatggacgagagcatgaaggtgatggccaacgaaatttccgctaattacagtcggtatgcggacgacatgaccatcagtacaaatgacatcccattgtttctgtctaaacgtaaggccttcaagcagattgtggaattctatgggttcaatctcaacaacaaaaaggagcggatgcaattcaaaaaccaggctcaatttgtgacaggactgctggtgaataatggtgttcaggtcaaaagagccttcaagaaggaggtcgaacaacaaatttattactgcgagaaatacggcatctatggccatctgcgcgctaaaggaatggccgaaaagtctttctttaaggaatacatctacgggaaagtttatttcatcaagtcagtggagcccgaggtagcagatcagtttctcgagagactgaatcgactgcattggtcatactga

SEQ ID NO: 9940 - RNA, 1020 nt, synthetic construct
  source 1..1020: mol_type = other RNA
atggactacgtcgatgaactcaagatgaaaatgattaaccgaggctttagtaccaaatatatagacaagtgcaccacttatgccgaaaatctctacaataagaactccccaataattttcgacattaagcacctttccaagattatgggcatcagctatcccatcctgtttcactacatctataacaaccagaaattctacaaggagttcaagattcccaaaaagtcagggtcttacagagttattgacgccccaagtctgaatctgaagaaaattcagaggtggattttagacaacatcctagtgaacttttcaatctccaagtatgcaatggggtttaaaaagcaggtgaatattgtggaaaacgcccagatacataccaataaagagctggtctataacatcgacataaaggattttttcccttcgatcagtttcgagaatgtgtacttcattttctacaatatcgggtactcttccgaggttagctacgctttcgctaaattgatgacatataagggttatcttccgcagggatctccttgtagtcccatcatcagcaatattctgtgtatcaacctggatgagtctatgaactcactatccaaaaatattggagccaattactctcgctatgctgatgacatgactattagcacgaatgacatacctacatttctcgttaagaagggggcgttcaagaacatcatcgagttctatggatttaagctcaacgataaaaaggagaggatgcaatacaaaaatcatccccagtttgtcacaggcctgttggtcaataacaaagtgagagtgcggagagtcttcaaaaaggaggtggaacaacagatctattactgcgagaaatatggtatcttcaaccacctgaaggaactgggcctcgaggatcggagcttctttaaagaatacatatacggcaaggtaaactttatcaagagcgtagaaccagaggtggcagagaggtttcttgaacgcttgaatcgtttaaaatggtcatactga

SEQ ID NO: 9941 - RNA, 1023 nt, synthetic construct
  source 1..1023: mol_type = other RNA
atgcaaaatactttcctcgacgagctcaagcagaaactgtacgacaatggttttgatgatgcctatatcggcctgtgtctcgactatagtaaacggcttatagccaacaggttgccagtcatcttcgataagattcacctcagtatgctgtttggaatggaggtgaaggagttaaccgtgctggtcaaatccatagaaaatcagtacacgattaggaacatcccaaagaagaacggggacacccgagaactgtatataccctcactgaaactgaaggagattcagaggtggatcctggacgagatcctatataacatcaaggtcagcccttattgtaccggatttatgaaagagaaaagcatcctggagaacgctcgtatacacgagaataaggcctgtgtgatgaatcttgacattcggaatttctttccctccattagattcgagtcaatctatagagtattctactattacgggtacacttctgaggtgagttactatctggccagattgtgcacagtgcataattttcttccccagggggctcccacttcaccgtacttgtcaaacattgtgtgcctcagactcgacaaacggctgagctcgttggcgtctaaatatgatgcaaattacagccggtatgctgatgacattacactgtccggtacaggaagctctatcgttcctcggctgcctcttattaaaatcatcttggatagcgagggcttcaagataaattataaaaaggtccgagtgcagaaacagcaagaacgccagattgtgaccggcctggtcgtgaacaataaggcaagagttccacgcgaggttgaacgcgaactcaggcaacagatctactactgcaagaaatttggagtaaacgaacacttaaagcgcaagaagaaaaacaagctatccgggttcaaagaacatctttacggcttagcaatgttcattaagatgatcgataacaggaagggcgaacgttacgtttctgacctgaacgaaatctcctgggattactga

SEQ ID NO: 9942 - RNA, 1023 nt, synthetic construct
  source 1..1023: mol_type = other RNA
atgaaggaatacgaatatatttcccgcctgaaggcagcgcttattcaagaaaattacgatgacgactacattaaactgtgcaatgattatagctacaggctgctggagaattccttgcctgtgattttcgataaggaacacctcagtagattgttaggtctggaggaaagatatttctttcagctgtttatgatggccgatgggttttataaggaagtgcaaataccgaagaagaaactggggcagtttcgaaatatatctgtccctaccgaggtgctgaagtacgttcagaggtggatcctggacaatgtgctttacaatatacgcgtgtctgaggctaccacaggctttgttaaggggaagtctatcgtcgacaacgctaaaaaacacgtgcggaaagagtgcgtaattaatatggatctcaaggacttcttccctacaatcacatacgacagtgtttttcgactgcttaagtactacggatacactaatgagattgccttcatactgtcgaagttatgtacctttagagacgtcttgccacagggtgcacccacttcaccattcatcagcaacattgtctgttataagctggatatcaggttcataaagctctgcaacaaaatcggagctgactattcacggtatgccgatgacctcacaattagtggccccaggtacatcgtgggctacttgaacctattctccgatatcattgtagaggaagggtttcagatcaacgaatccaagacgcgcatccagtatcccaacaacagacaagaggtgaccggcctaattgtcaacgacaagatcagcgtgccaaaagagactaaaaaatacctgcgtcaacagatcttctattgcaaaaaatacggcgtgaactcacatcttcggaagatcaacatccagaagagcaactataaagaacatctgtacggaattgccttcttcatcaaaatggttgagctcgagttaggagagaaatttctcgaacagctcaatgagattgagtgggattattga

SEQ ID NO: 9943 - RNA, 903 nt, synthetic construct
  source 1..903: mol_type = other RNA
gtcatctttgacaagaaccactttgcaaaactcattggcctcaagaaagagtacatatttcagatcctgatggtgaccgagatgttctacaaggaaatcagcattccgaaaaagcgcttgggagagtatagggacattagtataccagcccagggactgaaatatattcagaggtggattcttgataacatcttatacaacatccctgtatctgaagtttgcacagggtttgtgaaggaaaagtccatcattgacaatgccaaaaaacacatcaataaggactgtgtcatcaacatggatataaaggacttttttccctccataacctacaacgatgtctttttcatcttcaaatactacggatacacaaatgaagttagcttcttgttgagcaagctgtgctcttataaagggtccctcccacagggagcgcctacttctccctacatctcaaacatcattagctataaactggatgttcgatttatgctgctggccaagaagctcaaggccgactattcccgttatgctgacgacataaccatctcaggcaacaaatacttagtgaagtacctgaaggtgttcaaaaatatccttatcgaagaggggttcaaggtcaatgagcggaaaactaggattcagtactcaaataaacggcaggaggtgacgggcattattgtgaataataaactaagtgtgcccaaagagacaaagcagtatcttagacagcaaatctattactgtaagagattcggcgtaaattcgcatctcgctcgcattggcatccaaaagagtaactacaaggagcatctgtatggtatggcattcttcattaagatgatacaacaggaagaaggtgagaatatgctgaacaacctaaacgatattgattgggattattga

SEQ ID NO: 9944 - RNA, 1017 nt, synthetic construct
  source 1..1017: mol_type = other RNA
atgtccagctacattgaatccttagtgagcggtttgagggaaaaaggttaccgggaccagtacattaatctatgtgtggagtattgtgagcgcctgattaataacaacttgcccgtgatcttcgataaggatcaccttgccctcgtgatgggcatcagagatgaatatctggccaagctgtttatgtttcctgagaaattctacaagcaagccagaatcccgaagaaaaaaaagggggagtaccgtgaaatatccatcccttatcagaccctgaaacatttgcagaggtggattctcgagaacattctctatagactgaaggtatctgatagctcgaaagggtttgttcccaagctgtctattgtcgaaaacgccaataaacaccttcagaaagagtgtgtgattaatatcgacattaaggacttctttccatcaatccagttcaacgagatattcaacatcttctactactacggctacacaaaggagataagcttcatcctggctagactgtgcacttatgaaggacgcctacctcaagggtccccagcaagtccctaccttagtaatctcgtgaacgttaagctggaccgacggttcgaaaacttttgcaagaaaatcggcgcggattacacacgctatgcagacgacatcaccatttctggaccaaagtatataacaaagtacatccaccagttgaaggaaatcattactgatgaggggtacaacctcaatgaggaaaaaacccgaatcctgtttaaacaccaaaggcaggaggtcacgggcttaattgtgaacgacgtcctgggtgtacccatcaagatgaaaaaatatctgaggcagcagattcattattgcaagaagtttggcgtcagcaatcatctcatgaaaataggaaatcaacggtcaaacttcaaggagcacttatttggactggcttattacatcaagatggttgagaaggaaaaaggcgagaagttcatagaggacctcaatacccttaattgggattattga

SEQ ID NO: 9945 - RNA, 1017 nt, synthetic construct
  source 1..1017: mol_type = other RNA
atggatacatacacccaccggctgaagtatgaaatgaatctgcataactacgacgaaaactacataaaactctgttgcgactatagcaagcgcttggaaacaaacaatttgcctgtcatatttgacaaagttcacttctcactcctgcttggtattgaggaaaactacttagccaagctctttatgattaccgaacacttttacaagctcgctagaattccaaaacggaaacccggaatgtatagggagatcctggttcccttcaagaatctaaaagagatacaaaggtggattctgcacaatatcctctacaacatagatgtgtctagcgccactacaggattcaaaccggactcttcaatcctggagaatgccaaaccacatgtcaacaagccttgcataatcaaactggatatcaaggacttcttccccagtattggctttgaccaggtgtatcgtatcttcgcatactacggatatacaaatgaggtgtcatatctacttgctaagctgtgcacctacaaaggctatctgcctcaaggcagtcctacttctccatacatatccaacatcatttgtttgaagctggataagaggtttaaggaactttgtaagacactgaatgctgactttactcgctacgccgatgatatcactatcagcggggatagtttcatcgcaaagtatatcgacaccttcaaatccattatcgagtcggagggctttgtagtaaacgaggataagctcaaagtgcgatatagcaatgagagacagattgtgacgggtatcattgtcaacaccaaattgtccattcccagggaaactaagaagtccttacgccagcagatctattactgccgaaagtacggcgtgtacaaccatatgctgcggacgaatctcgacagagccaattacaaggactacttatatgggcttgcgtactttattaaaatggtggagaaggatgttggacagaaattcattgatgacctgaacaccatctattgggggtattga

SEQ ID NO: 9946 - RNA, 1014 nt, synthetic construct
  source 1..1014: mol_type = other RNA
atggaagattacattaataggctcaaggaagagatcgagctgcgagaaattgaagagtcctatggccaattgtgcatagaatatgcagaacgcctcatagaaaataaccttcccgtcatctttgatagagagcacattgccttgttgctgggcattaactatgactacgtcaacaagatcatgctgtttacagacaagttctataaggtgtacaagatgaaaaagaagaacggcgattacagggagatcagcatcccaaatgtgcgtttgagatacatccagaggtggctgctggacaatatactctacaaaatctccgtttccgagcacgtaactggatttgtgcctaaaaaaagcatcgttgacaacgcgatcaaacatgtgaataaggaacttgtactggctatggatataaaagagtttttcccctctgttaagttcgagaagatcttcaacattttctactattacggttacaccaaagaggtgtcttactgtcttgctcgcatttgcacattagacggtagcctgccgcagggggcacctactagtccatacctggccaacatagtctgcaaaaggatggacatgcggattgagagtctctgtggaaaaatcaatgctatctttacccggtatgccgacgatattacaatctcgggcaaacggaacattatcgaatacctctctctaatgcagaacattataaaagacgaggggtttgaaatcaataataaaaagacccgggcaatgtattcaaaccgccagcagcgaataacgggactaatcgtgaacgagaaggtcaatgtgcccaagaataagattaagtatctcagacaacagatcttttacattaagaagttcggcgtcaccagacatcttgagaaaaacggttattgttatgggaatctgaaggaacacctgtatggcctggcctacttcattaagatggtgaatgaagagaaaggaatcaaattcattgaggagttagatgggatcaactgggagtcatga

SEQ ID NO: 9947 - RNA, 1014 nt, synthetic construct
  source 1..1014: mol_type = other RNA
atgagcgattacttatataagctgaaggaggcactcaatttcgagaaagtggacatcaagtacagtgaactgtgtattgagtatgcatcccgcttaataaacaataacatgcctgtgatctacgataagaaacacttttcactactgctcggtatagagcagcagtatatcaacaagctggttttgtgtaccgatcgcttctacaaaaagttctccatccgtaaaaaaaacggcggcgatcgtatcattagcataccaaatattcggcttaggtgcatccagagatggattctggacaatatcatttacaacatcagggtgtctgagaatgtcacaggatttatccccaacaagagtatcgttgataacgcgagggcccacgtagattcagacgccattctcgctttggatatcaaagatttctttccctcgatcagctttgacaagattttcagactctttaactactatggctataccaccgaaatttcttattgcctggccagaatatgcactttgaacaatacccttcctcagggcgctcccacctcaccgtatcttgccaatatcgtgtgtaagaagatggacaagcgaatctccagccttagtaaaaaaatcggggctaagtatacaagatacgcagacgatataacgatttccgggaaaaaaaacatcacatcttattccaagctcataaaggacattataagggacgagggatttctagtcaataatgagaaaactcgagtaatgtacaggaatcggcagcaacgcgttacagggctgattgtgaacaagaaaattactgtgccaaaggaaaagatcagatacttgcggcagcaaatttactacatcaataaatacggtgtcgtgggccatcgcgagaagtctaaggtcaagcatcggaacattaaagaacacctgtatggactggcctacttcattaaaatggtggacgaaatcaaaggggagaagttcctgaacgacctgaataagatcaactgggaaagctga

SEQ ID NO: 9948 - RNA, 1014 nt, synthetic construct
  source 1..1014: mol_type = other RNA
atggaaaatcatatagaaaagttcatcgacaagctgaaagtgatgcagtatagcgacgattacattaatctttgcatcgaatatgcagaaagactgactgacaacaatctaccaatcattttcgacatcgaacacttttcattcctggtgggcttggagaaggagtacatcaactacatcattcacaagaagaagcacttttacatagagttcacgatcaagaaacgaaaaggcgggaaccgccttctgtctattcctagcaagaagttgaagtatatccagcgctggatcctcgatgagattctgtataaaattcctgtgaacgagcatgccaagggttacatacctaacaaatcaattgtcgacaatgctaagccccacgtcaagaaaaaatgcatcattaaactcgacatcaaggatttcttcgacaacattgattacaaccgggtctttagaatcttctactattacggttacactaagaacatgagttacaagctcgccgagttgtgtacttatgaaaataagctcccgcaaggcgctccaacctccccctatatctccaatatagtatgtctgaagatggataaaaggtttagcaaactgtgcaacaaatttaacgccacatatacaaggtatgcggacgatattaccatctctggagacaattccattaccaagtacttcaaagcatacgtgagaattatagagtcggagggctttgaggtcaatgctgaaaaggtgataagcatcaaagggaatcggaccaagcgggtgacaggcattgttgtgaacgagaaactgagtgttgggagggaaatgaaacgcaagctacgacagcagatttattactgcaagaaatatggggttcgtgatcacctgaagaaaatcgagtgtgaaaaatccttttacaaggagcatctttacggaatcgcctactatatcaaatctgtagagcccatcgatggagaaaagttcttagaggaattagacgagataatgtgggagtattga

SEQ ID NO: 9949 - RNA, 1035 nt, synthetic construct
  source 1..1035: mol_type = other RNA
atggaatgttatcgcatggattacatcgaaaggttgagagaacagttaatcaagcaggggtatggcaagaggtatatatacctgtgtgagcagtattgcactcggttactccaaaacggactacctgtaatttttgacaacatccacttttccctgctcctcggtatgactactcaggacctgggtaagatgatctttctgacagattccctctacaatagcataagcattcccaaaaagagcgggggcaaacgagagatttcaattcccaccgtgaatttgaagtatgtccagcggtggatcctggacaacattctgtataacattcgcgttagttcacaggctacaggattcgtgaagggcctatccattgtggataacgcccgaccgcatgttaataaagagtgcgtcatcacaatcgacatcgagaacttttttcctaccattagcttcgaaactatattccggctgttttactattacgggtacacaaaggaaatgagttatgttcttgccaagctctgtacctacgagggcaaactgccccaaggcgcaccaacctcgccatacctgtccaacatcgtgtcacttaaacttgacaaacggttcaatagtcttgtaaacaagttatctgacctgaatgcgtcttacagcagatatgctgatgatctcaccgtgtctggagacaaaaagatagtgaaatatgtgcccctgtttaaagagatcatccaggatgaaagattcatcgtcaacgagaaaaaattcagggtgcaaaataagcctgatcgccaaatggtgacgggaattatcgtcaatgaaaagatttcagtaccaatccagacgaagaagtacattaggcagcagatttactactgcaaaaagttcggggtcgatagacacctggagcatataaaaagcatacgttccaattacaaggagtacttgtacggtatcgcctatttcatcaagatggtggaaaacgactacggcacatctctcttggaggagctgaataccattgtttgggactattga

SEQ ID NO: 9950 - RNA, 1017 nt, synthetic construct
  source 1..1017: mol_type = other RNA
atggatgaatacataaagaagctgaagctcctgttagagaattcggattatgaagaggaatataagaggaaatgcattgaatacgccgaacggttactgctgaatgggcttcccgtcatctacgatttggagcacctcattctggttttgggtatcaagaagaagatacttaccaagatgattttcgcttaccataacttttacagtactgtggagattcccaaaaaatcaggagggagtagaaaacttcaaattccttcagtggaactaaagtatatacagcgctggattctcgacaacattctcaaaaaaatcaagatcagcaagcacgccatcgggttctgtaatgaaaaatccattgtggataacgccaagatccatattggcaacaaatgcattttgaacatggatatcaaggacttcttcccctctgttaatttcgagatggtgtttaggattttcatctactacggatatacgaaggaactgtccttcatttttacccgtctttgtacttatgacgggtttctcccgcagggtagtccagcttccccatacatctctaacatagtctccctgaagatagacaaacggctgagcagattagcggaaaagtatcatgcaaactatagcaggtatgcagacgacatcacattctcttctaacagctcaatgaaaaagctacctgagatcatccagaaaattctgctggaagagggctttatggtgaacaaaaaaaagacccggtttcaatacttttaccagagacaagaggtgacaggactgatcgtgaacaatggacgcgtacgagttaagaagagctataagaaagagctctaccagaccatatattactgtcagaagtttggcgtcaataatcacttggagaaaatcaattgctacaagaacttctacaaggagtatctgtacggcaaagcctatttcatcaatatggtagagcctgaagagggcaaaaaaatctttaagctgctcgaggagatccagtgggattactga

SEQ ID NO: 9951 - RNA, 1017 nt, synthetic construct
  source 1..1017: mol_type = other RNA
atggaaaactacatttacaagttgaagatcctgctcaaaaaaagcggatacggtaagcactactctgagaagtgtgtcgagtatgctaaccggctcatcgagaataatttacccgtgattttcgacattcaacacttctcactggtgtccggcgcccctaaagagttgattggaaagatgctgtttgctgattccaaattctattctcttgccctcattcctaagaagtccggcggggttagagaactgcacataccctcagctgagctaaaatatctgcagcggtggattttggacaacatcttgagtagaatacatgtgagccagtttgccatggggttctgcaacaataagagtatcgtggacaacgctaaaatgcacattggcaatgagtgcatcctgaacatggacattaaggactttttccatagcatcaccttcaaaatggtctttaggatattcgcgtattatggatacaccaaggaattatcctttgtatttgcaaagctttgcacgtacgaagatgtgctacctcaaggttcgccggccagtccctgtataagcaacatcgtctctttacgtatcgataagcgactttctctcattgcagagaaatatcaggcatgttacagcagatacgcggatgatatcacattttcagggaatcggggcatcaagaagctgatcgagattacttccaacgtactcgaggaagaaggattctcactgaacaataagaagactaggatgcagttcccacatcagcgccaggaggttacagggcttatcataaatgggggtatggttcgcgtgaataagaagtataagagggacctgtaccaggcctgctattactgtaaaaagtttggcgtggatagtcacctgaaaaagatcaaatgcgacaaaagcttctacaaagaacacctgtatggcaaggcctattttgtcaatatggtggaaccagatgagggaaaaaaactgttcaacctcctggacaaaatccattgggactactga

SEQ ID NO: 9952 - RNA, 1017 nt, synthetic construct
  source 1..1017: mol_type = other RNA
atggaaaactacctggagagcctcaagattgagataacagaacagggatatgacgaatactacacaaccaaatgtattgagtatgcagagcgacttctgtctaacggtttacccgtaatctttgataccgatcatttgagcctagtgactggggcccctaaacagctgatcttaaagatgattttcgcaaattcctgcttttactcagaggccagacttcctaaaaaatccggtggtattagagtcttgaacatcccctctattgaacttaagtatgtacaacgttggatactggacaacattctcaagaagataaacgtgtcatcatacgccaccgggttctgtgacaataagtctatagtggataatgccaaggtgcacatcgggagagagtgcatcctcaatatggatatcaaggactttttccctactatcacgttcaaaatgatcttccgaattttcgtctactatgggtacacgaaagaagtgtcctttactttggcgcggctctgtacatttgagaactttctgccccagggatccccagcttcgccgtatctctcaaatatcgtcagcctgaaaattgacaaaaggctgagcctgctggctaagaagtataaggccaattactccaggtacgctgacgacatcacctttagtggcaatcatggcatcaagaaaatgagtagtattgtgagcgagatcttggaagacgagggcttcaaggtgaatgatggaaaaacccgccttcagtattcttatcaaaggcaagaagtgactggactagttattaacaacggcaaagttcgcgtcaacaagcattacaagcgggagctgtaccagattctctattactgcataaaattcggcgtgaacagtcacctgcagaaaatcaacagcacaaaaaccttctacaaggagcacttatatggcaaggcatattttgtcaatatggttgaaccagacgaaggccggaagctgttcgatctgctcgagtgcatccagtgggattactga

SEQ ID NO: 9953 - RNA, 1026 nt, synthetic construct
  source 1..1026: mol_type = other RNA
atgaataaagaggaatatctgcaggagctgaagaatggcctcgcctaccaaggctatgacagccgctacatccaggcctgcttcgagtatgctcagaatctactgatccatggactgccagtggtttttgatgtgcaccacctctccttgctgctaggtatgactaccaagcaattaaacgcgtacatcttcggctccgggaaaagattatacagtactaagcacattagcaagaaagatgggggcgtaagagtactttcaattccttgcgaaaccctgaagtacatccagcgctggatccttgacaacattctcaagcgaatgtacatatccgaatgttgcaaaggatttgtggacgattgtagcatacttgacaatgcgagctgtcatttaggcgccgaggtcatcctgaacatggacattaaggactttttcccaagtatttcactcttgcaggtctatcgtgtgtttaggtattatggatatacccaggaactgtcctacgtcatggcaaaactgtgcacgtacagggatcagctgcctcaagggtcgcccgcttcaccctacctgtctaacatcatcgcactgaagatagataaaagactcatggctctcgctgaatcttacggcgcacattatacccgctacgccgacgacataactatttccggattcgggtgtttggagaaaatgatccccattatcagctcagttatctctgaagagggttttgtggtcaatagcaagaagacacgggtggcacgaaagggtcagaggcaagaggtcacagggctgattattaacagtggaaaggcctgcgttcctaaagagtacaagcggaaaatcttccaggaaatttactattgtcagaaattcggcgtgacaaatcatcaggagcacatcggcgacgatcaccggtattataaagagcatctctatggaaaagcctactacgttcacatgatcgagccgcacatagggaagaagatgctttctgagttggataaggtgaactgggaagtgtga

SEQ ID NO: 9954 - RNA, 1026 nt, synthetic construct
  source 1..1026: mol_type = other RNA
atggataaagagaagtatatctctgaattgcgtattcaactggagagcatggaacagtcccagaaagacatcgactcctgcatatcctatgccatccggctcattgattccagccttcctgtaatctttgacaaacggcatttaagtctcttgcttggcatcgagctggaagaactgactacaatactcgcaacgttagaggagaattattacaatgagatgtctataccgaagaagtccgaagggtacagaaccttgaatgtccccgccatgaaactgaaaatgattcagagatggatcctggacaacatcctcgaacacattcccgtttcagaccatgtgactggattttgtaaggagcgtagcattgtgactaatgctaaaaagcacattggcaaacaatgcgtaatcagctttgatattaaggatttcttcccaacgattgatattgagagcatcttcatggtcttttactactatggatacaccaaggagatcagttatgctctggcaaggttatgtacctatgatggttacctccctcagggttcacctgcctcaccctacatctctaatatcctgtgcctgaagctcgacaagaggcttagcctgctcgccgagaaatatgttgcagactacacccgctatgctgacgacattacattctcaggcaactacggcctgagtaacatcatcaacattgtgaagaacatcatccaggaagaaggctttacagtcaatgagaggaagattcgagtgaagtacaagcatcagagacaggaggtgaccgggctaattgtcagcgataacaaagtgagtgtttccaaactatacaagcgcaaactttggcaggaaatctactactgtcaaaagtatggagtctcgtctcacttggagcacataaactgcaagaaatctttcttcaaggaacacatatacgggaaggtgtactttatatatatggtggagccagaagaggggcggaaactgctgattgcgctggataaaatcgcctgggactattga

SEQ ID NO: 9955 - RNA, 1026 nt, synthetic construct
  source 1..1026: mol_type = other RNA
atggacaaggagaggtatttaaaaaaactggaggaagccctttctgagtctagctcctctatccccgagtcattagcatgcatccggtatgccagcaatttgctcacattcgattttcctgtgatatttgatcgaactcacctggctcacctgctgggtataaagccgtcagacctatcagccctgatctattcgatagacagctactgctaccatgagtttcacttggctaagaaaagtgggggtatgagagtgatcaacattcccagcgttgatttgaaggatatccaaagatggatcctagacaatatcatctccaagatgcatatttcagagttcgctaatggcttttgcaaggggaagtctatcttgactaatgcgctcagccatatcgatcaagagtgcgtcatcaacctggacatcaaagacttcttcccatccgtgggtattgatcgagttttcatgcttttcaagtactatggctacaccaaggaagtaagttttgctctggccaaactgtgtacataccgcggaatacttccacagggatctcctgcatcccctgccatcagcaatgtgatatgtctcaagctcgacaaacgtctgtcgaaactggcggaatcttacaatggagtctactccagatatgccgatgacctcacacttagtgggaccaaaaacattacgcagctgattcccaccgttattgctattgtggaagaggagggcttttgtgtcaatgctcagaagacccatattgcatacgcacacgagcggcagaaggtgactggcctcctggtcaacgaaggcaaagtgcgcgtgagccaaaaatataagcggaggttaaggcaggaaatttacttttgccagaagtttggcgtgtccgaccaccagaaatactgtaacgaaaacttccagttcttcaaagagcacctctacgggaaggcctattttgtaagtatggttgagccagaagtcggaaacgccttcctggaggccctggataacattgcatgggaatattga

SEQ ID NO: 9956 - RNA, 1026 nt, synthetic construct
  source 1..1026: mol_type = other RNA
atggataagattaaatatctggcttcactcaggtctgccattatcgcttccggcaagtccgaaaagtactcgattgtgtgttgcaattacgctagcagtctcttaaactccaatctgcccgttctgttcgacaatagtcaccttgccagggcactggggattacccctctggactttgggaagctcttgtattccatcgacgattactgttaccacgagattaagatacccaaaaaaaacggtggtgtgcgcaccctggatattccctctatggacttgaaatatatccagtgctggatccttgacaacattctgaacaaaatgcatgtctctgactatgctaacggctttgtgaaaaatcggtctatcctaactaacgcccagaatcacatcaactcagagtgcgttgtgaacatcgacctaaaagatttttttcccacagtcaaattcgagcaggtctttaggattttcaagtactatggatacacaaaggaggtgagctatacactcagcaaactgtgcacgtatcgaggaatactgccacaaggcagccctgcttccccggcaataaccaatattatctgtcttaagctcgataagcgcctgtcagccttgggccaaaagcacgaagcgaccttctcccgttatgccgacgatatcactttctctgggaaaaaggccatcgtccaccttttgccatacgcaataaatattatccgggatgagggttttgcggttaacctggataagacccatacttcattcaagcaccagagacaggaagtgacaggattaatcgtgaatggagacaaagtgcacgtcagtcaaaagttcaaaaagagattccggcaggaaatctactattgtaagaaatacggcgtacagagccatctgaagcatattaatgatcatcatgccttctacaaggagcacatgtatggccaggcatactttataaacatggtagaacctagtctggggcaggagctgttaagactcctcgacagcatcagctgggagtactga

SEQ ID NO: 9957 - RNA, 1026 nt, synthetic construct
  source 1..1026: mol_type = other RNA
atggataaaaccaattatctcaaggagattgagatcttactgaagaacaacgacgagtccaatgagaacatttctaacgtgctgaagtacgctgccaatctcctgaatctagatatgccggttatatttgacaagagtcatttagccactctgctcggattgagtgtctctgattttaaccattatgtgattggctcaaatgactcccagtataataccctgatgattcctaaaaagtcaggctctttccgcgaaatcagtatccccagcgtcgagctcaaaaaaatgcaacggtggatcttggacaatatcctgtacaagattgaagtaagtgagtatgccaccggctttgtgcgtaagaaatccataaaggataatgctaagtgtcatctcgagaataactgtgttatcaaccttgatctcaagaacttttttccaacaatacacttcgaccgggtcttcaaaattttctactacagcgggtatactaaggaagttagcttcctgctctccaaaatatgcacttacaagtcaatcctgccccagggttcgccagcaagccctcagatcagcaatattgcttgtctgaagcttgactaccggctgagcaaattatctaaatgctttagggcgtcattctccagatacgcagatgacctgacattttctggagactatgggattacaaagattatcgacaccgtaaaaaagatcgtgaatgacgagggctttgaggtgaacgaaaaaaagatcagaatccagttcaaacaccagaagcaaaacgtgacagggctgacggtgaatgatttcaaggtgcgagtcagcagagaataccttaggaagttcagacaggagatttacttctgccaaaaatttggcatcagggatcacttgcgcttcataaactccgaccgaaggtatttccgcgattatatgtacggtaaggcctactttattaatatgatcgatgtggacgaaggaaaactgctattgaacaaacttaaccagatcaactgggaagtctga

SEQ ID NO: 9958 - RNA, 1023 nt, synthetic construct
  source 1..1023: mol_type = other RNA
atgaacaacaacccgtacgttaaagaattgtatagtgtgcttagtcagaagggagaaaagcaggaggatatcgacgctgcctgcaaatatgccgaaaatttgatcgctctcaatctacctgtggttttcaacaaggagcatttctcactcttagtcggtaggaagtacaaggagatcaccacattgatggctacactagagacgaactattatcacctggcatacatcaagaaaaaaaatgggggcgagaggaccctgaacatacccgcagtgtctctgcgaattatacagaggtggatcctcgacaacattctcaaaaatatgtacatcagccaatacgccatgggtttctgcaagaacaaatccatcgtgactaatgccaaataccacctggggaagacttgtgtgatcaacgtggaccttaaggatttttttccatctattacgcagaagcagattttcaacatattctactactacggctatacaatagatgtctcctatatgctctccagattatgtacttgcgaaggacggcttccacagggcgcacctacaagcccctgcttaagcaatattgtctgtctgaaactggataaacgcctgtctgaagttagtaaaagattcaaggccgaatatacccgctatgctgacgatatcaccttttcatcgaattcagacatcagcaacattctgcccatcgtgaaggagatcattcaagacgagggattccaactcaatgagaaaaagacccggattctttttaagcatcagaagcaagaggtaactggattgctggttaatggcaaccagatcagagtggataagaagtacatcaaaaagttcaagcaggagatttactattgcaaaaaatacggggtggaagaccacctggaacacattgattgtaagaagcacttttaccgtgaccatatgtatggcaaagcgtattttgtaaagatggtcgacgagaaagtcgggaaaaagctgattaatgaactggactccatagattgggagtga

SEQ ID NO: 9959 - RNA, 1026 nt, synthetic construct
  source 1..1026: mol_type = other RNA
atgaataacgagggatatctggagaacctggagaaagaactgatagactccaatgaaaaggtcaaggacatcgaagcagcaaagaaatacgccaagaatcttttgaacttggggttgccagtaatctttgataaacagcactttgccctgctagtgggcagagagctgagtgagatcaccaagatgatggctatgattgagactaattattaccacgaagctaacatcgtcaagaaaagcggcaaaatgagaacgctgaatattccggccgttagccttaggctggtgcagaaatggatcctcgacaatatcttgtataagatccgtgtgtcccagtactgtaatggcttttgtaagaagaagtctatctgtacaaacgcccaaaaccatctcaaccaggattgcattgtgaacatggatatgtcagatttcttccctagtatttcacagaagcagatctttaggatcttctactactatgggtataccgttgaggtcagttacattttagcccggctttgtacctatgacggatacctccctcaaggtgcccccacttcgccctacctgtctaacattgcttgcctaaagctcgacaagaggcttgcgggactggctaaaaaatatgagagcacatacagccggtatgcagatgacataaccttctccggaaaatgtggtatccaaaagatcattccagtggcggaaaaaataatacaggacgaaggcttctccctcaatgtcaataaaactcgcattgcctactattatcaacgacaggaagttacagggataaacgtgaacggcaaaaagatgcatgtagataagagatacgtgaaaggcttttgccaggagatctattactgcgaaaaattcggggtccatgatcacctgcagcacatcaaatgcaacaagcatttttacaaggagcacatgtacggtaaggcatactatattaatatggtggacaaggacttaggccggaagctcctgtctcgcctggacaatattgattgggatgactga

SEQ ID NO: 9960 - RNA, 1062 nt, synthetic construct
  source 1..1062: mol_type = other RNA
atgggaaatcgctgcacagagacttggcggctgtacatgaaaaccgaggagtatctgaacgaactgcgtaccgtgctcgtcgcagctgacgagtgcgaggcagatattgtggcagctgagcagtacgccgaaaatctgatgcagctggggatgccggtgatctttgatttgcaccatttcgcgaagctagttggcaaggaagcgcgggatattggcaacatgatgatgcatcaggaggattttttctatcgccaggtacagatcgagaaaaagcatggagggtaccgaactcttgacatcccagccatgaacctccgcaatatacagaagtggatcctgaagaacatcctctaccaaattagcgtctctgaacacgcctgcggcttttgtaagaagaggtcaattgtaacgaacgcagaaaggcatgtcggaaaggagtgcgtaataaacgtcgatataaaggactttttcccctccgtgcacggtgaccagattttcaaaatcttctactactacgggtatacaactgaggtttcttacctgttatcccggctctgtacatacagagactatctccctcagggtgcccctacgagcccctatctgtccaatattgtgtgcctaaaactggataaacgattgagtagactggccaagagctatcaggccgagtacagtcgttatgcagatgacattacattttctggcaatgccgggatcaaggctatgcttccaatagtggaagggattgtgaatgaggaaggttacctgcttaacaaagacaagacccgcatcgcctataaacatcagaggcaagaggtgaccggcttattggtgaatggaactaccgttagagtgagcaaacaatatcttaagaagttctcacaggagatttactactgtaaaaagtttggcgttcggtcgcacatggaacacatccactgtgaaaaaagattcttcagggatcacatgtacggcaaagcttattttatccaaatggtcgacagggacatgggaaaaagatatttcgctgaattggagcagatcgactgggaatcctga

SEQ ID NO: 9961 - RNA, 1014 nt, synthetic construct
  source 1..1014: mol_type = other RNA
atgaactacattcagaagctgcaggagaaaatgagagagtccgagcaaagcgaacaatacatcaaaacgtgttctacttatgctcagcggttgatcgataacggtgtgcctgtggtattcgactttagccatctcgcacttctcttgggatttaaaacagcggatattgctttttacctgttcgctgaagacgatctgttctacaaggaaattgaaatccccaagaagagggggggctacaggaaaattgatatcccttccgagcgactgaaatgcatccagcgctggatcttggacaacattcttgacaatatggaggttcatgagtgctgttacggattctgtaaaggcaaaagcatctatgataatgccttgcttcacgtcggcaagaaatgcgttctgaatatggacctcaaagactttttcccttcaattaagcagaaggacgtttttaacatcttctacaagaaagggtacaccaagaaggtgagctactacctctctaaattactgaccaaaaatggtgaactgccgcaaggctcacccgcctccccaatggtgtcgaatatcgtagccgagcacctagacactcggctttcagcactcgccaaacgctactgtgcggagtatagtcgttatgccgacgatataacattcagtggcgcactgaacgtcaagaacatgattcccattatcaccgggatcattgaagatgaggggttcaatatcaatgagaagaagactagatacgcctactattaccagagacaggaagtcaccggcttaatagtcaataaaaaagtgtccatcccaaaggaatatattaaggaactcaagaaggagatctattattgcgagaagtttggagtgacatctcatctggagaggacaaacatgcacaagagtttttataaggaacacctatacggtaaggcttatttcgtgaacatgatagacaagaacatgggacagcagatactgaaacacctggataccataatgtgggagtattga

SEQ ID NO: 9962 - RNA, 1014 nt, synthetic construct
  source 1..1014: mol_type = other RNA
atggggtacgtccagaagctgaaggataaaatgatcgagcagggggccgatgaaaattatgtcgaactctgcgtgtcctatgctcaaaagttatgttcaaactctgttcccgttatctttgatttcaaacacctgagcctgttgctaggatacgaaccctctgagttagccttttacctgtttgcccctgaagactctttttacacgcaaatgaagattccaaagaagtcagggggtatgcgtgagatcgagattccttcagataagctcaagtcaatacagcgctggattttgcgaaatgtgctggagaatatcgaagtacacgaagcgtgttatggcttcaccaaaggtaaaagtatttatgacaacgccttactgcacgtggggaaggagtgtgtactaaacatggacttgaaggatttttttcccagcatcactcagaaagacgtgttcaatattttctaccagaagggttacactaagcgggttagttactatcttgcaaaactcctgaccaaagacggagtgctcccacaaggcagcccagcttctccgaaaataagcaatatcgtggctctgcatcttgataaacggttgagcgaactggccaaatgctatagggctacctactcgagatatgccgacgatctgacattctccggcgcaagcaacataaaaaacatgatccccatcatcaataagataattcatgaggagacattcctggtgaatgagaagaaaacaaggtattcctactactttcagaaacaggaagtgaccggacttatcgtcaataagaaggtcagtgttcctaaagagtatcttaaggagctcaacaaggaaatctattactgcaagaaattcggcgtctccagtcatctcaagaaaactgaaaaccacaaatccttcttcaaggagtacatgtacggaaaggcatattttattaacatggtggacaaggagctcggccagaaaattctgagagagctggacacaattctgtgggaatactga

SEQ ID NO: 9963 - RNA, 1014 nt, synthetic construct
  source 1..1014: mol_type = other RNA
atggaatactgtcaagagctccagaaaatgatgagggagcaagaaatggatgaaacctacatcgagctctgcacctcctatgccaaaagactgcttaaaaacgacatgcctgtcatttttgactttaaacacctctctatgctgctgggaatagaaccctacgagatggctttttacttgttcgcagacgaaaagctgtattatacagagattcagattcctaagaagcgcggcggtgtgagaatcatcgacatcccaagtgagaggctgaaggacatccagaagtggatcttggacaatatactctcccgctatactgtgcacgaatgctgttacggatttattcgggggaagagcatttatgacaacgctctgcagcatgtcaataaacggtgcgtgttaaatctggatctgaaagatttctttccatcgattacccaagaacaaatattcaagatcttctttagcgtagggtacactaagaaggttagctactatttagccaaaatgctaacgaagaacaaaaaacttccccagggatcacctgcatctcccatgcttagcaatattgttgccaaaaaacttgacagccgtttgaatggactggctaaaaagtacggcgccgtttactctcggtacgcagatgatattacattttcaggcgaaggcaacatcaaaaatatgatcccaattgtggagaagaccatccaggatgaaaagttccaggtgaataagtccaaaacgcgatattcttattactttcagcgacaggaggtgacaggcctcattgtgaataagaaggtcagtatcccgaaagagtatatcagagagatcaacaaggagatttatttctgtaagaagttcggtgtatcaagtcatctggagaaaattcagaactacaagtccttctacaaagaacacctatatgggaaggcgtacttcataaagatgatcaacaagaggaaagggaaccagatattggagcagctggacgagatcgaatgggattactga

SEQ ID NO: 9964 - RNA, 1017 nt, synthetic construct
  source 1..1017: mol_type = other RNA
atgatcaggatagacctcgaaaagtataaagagttcctcagcaagaaaaacatcaagaagaagaacaaggagctgcttatccagtacgccgaacgtctgacgaataataatctcccgattatttgggacatccggcactttagcattataaccgacataccttacaaaaggattctgtcctacatctacgagacagagaagttttatcacgagattgatatccccaaaaagcggggaggtgtacgcacactcgaaattccctctctcgaactgaaaaccctgcagagagatatattgcatgagcttcttgaatgcattaacacaagtgaacaagcatatggcttcctgaagggaaagagcatcgtcgacaacgcacgacagcatgttggcaaaagatatatcttaggtatcgacatcgagaattttttcgctacaatcaatgtggacagaatcttcaagattttctattactacggctataccaaagaggtttcgttcatgctgtcccgcattgtgtgtaaagatgggtacctgcctcagggcgcccctacctcaccatacctaagtaacatagtttgcaggaaattagaccgcaggttgttgggagtggctaaaaaatatggcgcgacttacactcggtacgccgatgacatcaccttttcaggggaaattcacccagatgtgtatgtcgacctaatcaagaaaattatcgtggaagagggcttctgtatcaattccaacaagactcgaattctggggaataatcagagacaggaagtaacgggtatcattgtcaataagaaggtgaaggtcaacaagaagtataaagagtatctgcggcaacagatttattactgcaacaagtacgggatcgattctcacctggagaaaataggaaacaatgtgactggatttaaggaacatatgtacggcatcgccaactttatcaaaatggtggaacccgatgagggggagaaatggattaacaagcttaacgagataagctggtactactga

SEQ ID NO: 9965 - RNA, 1035 nt, synthetic construct
  source 1..1035: mol_type = other RNA
atgacatacgacgcacaaagcgaccagtacctgttagaattggactctctactggaggctaatggaactccttttgaagacagggccatctgtatagagtatgcaaccaatctccggcgaagcggacttcccgtcatcttcgacagggatcatttggcgtttctcctgggcatcacattgcatgatctgatgtacttcgtcatgcagcaggatgatcactacgctaggtactatcttagtaagaagaggggcggtagacgccctgtagatgccccgtctgagagactgaaatctgtccagcgttggattctgtcctcaattcttgagaagatgcgcgtgagcgattatgctttcggctttgtgaagggccggagtcttctcgagaacgcgagagtccacttaggcaagcactgtgtagtaaatgttgacattgaagacttctttgcttccgttcaggcggataatgtgttcagggtgttctcctattacggttacagcaaagaagtgtcattctgcctgtcacgcctgtgtacactgagcggcgtgttaccccagggagccccaacctctccctgcatctccaacctcgtgtttctcaaggtggacaagcgtctcgctcgccttgccaagacatatgaagcatcgtattccagatatgccgacgatctgactttcagtgggcgggggaatctgggcaacatcatacctgctgtggaacatattttgcgggaggaggggtttactttgaatgatgccaagacgagagtcgccttctctcaccagcgacaggaggttaccgggctgaacgtgaacggagatagtgttagagtcccacggagctttaaacgcgacttcttccagcaagtgtatttttgcaaacgatacggtgttgattcacacctggaccggaccaaccaactctttgcattttacaaagagcatatgtacggaaaagcctactacctgtgcgaaattgagccagaggtgggtcgtagggcactgggggaactagacgccatcgagtggacctattga

SEQ ID NO: 9966 - RNA, 1179 nt, synthetic construct
  source 1..1179: mol_type = other RNA
atgtgttgcgtgtcctctgcatggcaacatattgcgcacggagcctctccgatcgtaggcctgccaatagtttccctggccttccacgcaaaagatggattcgctaccgggacagtcggtactggaaccattaccgtaatcgtcgacagtaatgtgtgtttttatatggaggaagagaacctgcagattgcgctcgaaaagggcattatagaaccagccgtctatgagagagtgattgcttacaaagagagactcgaggagaaccaggttcccgtcatttacaatctgagacatcttcggaaaatattccgaatctacaaaaaggagcaggacttctttttcggggacaagaaggaggagttatataggacttttaagatccccaagaagtctggggggtatcgtaccatcgaggccccctgtgaacgcctgaaacagatccagcgctggatcaaagatgaaatcattgacaagcttgtgatgtctgaatatgccaccggatttaggaagaatctttcaatcgtcgataacgcgaaaaagcatgtgggcaaggaattggtgattgggatggacctgaaagacttttttccaagcgtgacgtatgaggaaatcttcctgatgttcaggtatgtaggctacaggaaagacgttgcacacctccttagcaagttgtgcacaaatgcagaaaacgtgctccctcagggtagtcctgctagccctagcatcgccaatcacgttctgctgaaactagataagcgtctcggcattctggctgagacaatcggagcagattatagccgctacgccgacgatatcactttttcaggaaagaagagtattgcttcaatcatacccttggtcgagaagatcgttgccgaagagaactttacgataaataagaccaagactcggctgcaatacaagaatcagcgacaggaggtgacaggcttaatcgtgaacaacaaaatctccatttcgcgggagatggagaacgagataaagaacgctatatacttcatcggtaaatacggggtgtgcgaacacatgagacacattgaatgcaacaaatccttctacaaggaacatctatacggcattgcctatttcattaatatggtggaccgggaaaaaggccaaaaatacttgcgccagttagatctgctcgagtgggagtactga

SEQ ID NO: 9967 - RNA, 1011 nt, synthetic construct
  source 1..1011: mol_type = other RNA
atggagaagaacaatcttcaaattgccctgcagcagggcgtcattacccaggatgcatataatagcatcacggaatacaaacagaggcttaacgataataacgtccctgtgatctataacctaaggcatctgcggaaaattttccgaatcaagaaacgtgagcaggatatcttctttggcgaaaacaaacgttctttataccgaagtttctcgatcccaaaaaagtctggtggcgttcgccagattgaggctccttgtaagcggctgaaggaaatccaaaggtggataaaagacgaaatcgtggacaagtttgtcgttagtgagtacgccacaggattcaggaagaacatgtctattgtggataatgcccgcaagcacgttgggaaagagctcgtgatcaatatggacattaaggactttttcccctcagtaacctatgcagatatcctgttgatgtttatgtacatagggtacaggaaagacgtggcacatctgctgactaagctctgcacaaatgcagagaatgtccttccacaggggtcacccgccagtccttccatttccaaccacatcttgctgaaattggacaaacggttaggaagactggcggaaagcgttggtgccgactactctagatatgccgatgacattactttctccgggaagcggggtatctccacaatcataccgctcgtggagcagattattgaagaggaaggcttcctcgtaaacgagaataagactagactccaatatagcaaccaacgccaggaagtcaccggactgattgtgaataacaaaatcgccgtgtcaaccgctatcgaagatgagatcagaaacgccatctactttattaagaagtatggagtggacgaccacatgaagcatataggctgcaataaaagcttctatatggagcacctgtacggcatagcttactttatcaacatggtggatcgcgataagggaaagaaatacctagctcagctggacgagattatatgggcgtga

SEQ ID NO: 9968 - RNA, 1011 nt, synthetic construct
  source 1..1011: mol_type = other RNA
atgggcaacgacaagctctacgaggcatcacgaagaggcgtcatttcggagaaaacttatcgcgagatcctgaaatataaggagagactccagaagaatggcgttcccgtgatatacaaccttcggcatgtaaggaagatctttcaaatccgccggaaggagcaggaactgttttttggtgcgcagcgcgaagctctttactaccagtttgagattccaaaaaagtccggaggtaaacggaccatcgaggctccctgcgacaggctgaagaaaattcagcgttggataaaggacgagatcatcgattcattctatccgagtgaatacgcaacagggtttcggaaggggataagtatcgtcgacaacgcgatgccacatatcgggaaggaattggtgatcaactttgatctcaaggatttctttcccagtgtgacatacgccgaaatcctgaaactcttcgtgtacatgggttaccgactggacgtggcccacttactgactaagatttgcaccaatagcgagaatgttctgcctcaaggctcccctgctagcccttcaattagcaacttagtccttttgaaactcgataaaaggttgtctagcctggccaaaaccatttcttgttcctattccagatatgcagatgacattaccttcagcggcaataaaagtatcaagtccattgtgccactggtcattcagatcattatagatgagggatacacagtgaatgagaacaagattcgtctgcagtatgccaaccagagacaagaagttacagggcttactgtgaatacgaaactggccgtgtctaaaaacataaccgatgaaatcgaaaaggccatctatttctgtaataagttcggagtaagctctcacatgaagcacatagcctgcgacaagcatttctatagggagcacctatatggaatcgcttacttcattatgatggttgacccccagaaaggcaagatctacttgaaagaactaaatgacctcaactgggtctga

SEQ ID NO: 9969 - RNA, 1011 nt, synthetic construct
  source 1..1011: mol_type = other RNA
atggcccgccaagaggaactgctggctgccgtggaaaaaggaattatcactgaggattcagcgaatcgaattctggagtacaacgctagactggacgagcacggcctgcctatcatctataatctgaggcacttgagaaagattctgaagatccgcaagcgggatcaggagatctttttcggtccaaggagaaatgagttatatcgcgaattccagatacccaagaagtccgggggcattcgtaaaattcaggctccaaatgaagaacttaaagcgattcagacctggatcaaagctgagatactggacaaatattccgcctctaagtatgcaactgggtttcggaaaggctacagcattgttgacaacgccaaccgacatgtggggaaagagctcgtgatcaatcttgatatcaaggactttttccctagcataacctacgcggatgtaatcaaaattttctcgtacatggggtacaagttggaggtcgcccacctgcttacgcagctctgtacaaatggtgagaacgtgctgcctcaaggatctccggcctctccagctctaagcaacctggcagttataaaattagacaagaggctaggtacattggccgactctctcaattgtgactacagccggtacgctgatgatatcacattttcaggcaagaagaacattaggagcatagtccccttggtaaagaaagttatctccgaagaaggattcgaagtcaacgagtcaaaggtgcggctccagtatgcccaccaacgtcaggaggtgaccggactcatcgtcaacaaaaaggtgagtgtctccgaaagtgtggtgtccgaactgaagaatgcagtgtactactgcggaaaatacggggttgaaagtcacatgcagcatattggctgcgacaaagccttctataaagagcatctttacggcctcgcctattttgtaaagatggtggagcccgcaaagggcagagcatatctgaacaagttagatagtatcgtctggtga

SEQ ID NO: 9970 - RNA, 1002 nt, synthetic construct
  source 1..1002: mol_type = other RNA
atgtatgaggacgccaaagaaaaatcaatcatcagtcaggatgcataccaactcataaaaatctacataggtcgcctcgaagataacgacatccctgtcatctttaacctgcgacacttgagaaaaatcctgaaaattcccaagcagaaacagtcggcttacttcggcgttaataggaatgaaatgtacaggaagttcatgatccccaagaaaagtggcgggtatcggaagattgaagcaccatctgaagagctgaagttaagacagctgtggattaaggaaaatatcatcgacaagttcaagatttccgatagtgcccagggctttcgtaaaaaccatagcatctatggtaatgccctgccacatgtggggaaggagcttgtgatcaacattgatattaaggacttcttccctagcatcacctaccagaaagttttcaagttctttcgctatattgggtatacaaatcaagtgtctcatctgctcacaaaaatgtgtactaacgtggataatgtcctaccgcagggatcacctgcctccccaagcctctccaacattgtactcttgaaaatggacaagagactgtcaaagttagcaggagctgtggaatgcgattacacgcggtacgccgacgatatcaccttttctggcaagaaggtgataaaaagcctggtccccattatatgcaaaattattgaggaggagggatatgacgtgaacaaagggaaactgcgccttcagtattctaatcagcggcaagaagtcacaggcctaaccgtgaataaaaaagttagcctttccaagcgaaccataaaggagatcgagaacgctatttattattgcaagaagtacggtgtacaagaacacatgactaggattaagtgtgacaagtccttttataaggagcacttgtacggaatagcgtactttatcaagatgatcgacaaagagaagggcaagaaatacctggaggagctgaacaggatcgagtggctttactga

SEQ ID NO: 9971 - RNA, 933 nt, synthetic construct
  source 1..933: mol_type = other RNA
atggctacgaaagaaaaaatcgataatgctttgcagaagggcatcatcaccgccgaaactgcgaacgagcttaaggaatacaacgataggcttacccgtaacaatatgcctatcatctataacctgcggcatctgagaaaaattctgaagatcaagaagaaggaacagaataagtactttggcaacgagcgcaatgaataccacacattttacattcccaaaaagaatggcagcaagcgcatgatcgaagcgccgtctgacagactcaaaagctttcagctgtggataaaggagaacatattggacaagattaacgttagcacgaatgctagagggttccgaaagaattattccattcttgataacgccaaggaacacgtaaacaaagatctggtgatcaatatcgacctcaaagactttttcccatccattacctacaatagggtatataagatcttcgcatacgtcggatacaccaatgaggttgcccatctcctgactcaactatgcacaaacaaagaaaatgtgctgccccagggatctcccgcctctccagtcatttccaacattgtggcactgaaactcgacaaaaggttaggtgccctcgcaaacaagttcaattgctcatatactcggtacgctgacgatatcacattcagtggatgtgtgggcatcaaaaatatgctgtcgaccgttgagcggataataatagaggagaacttctccattaacgacgcaaaagtccgactgcaatataagaaccagcgccaggaggtgacagggttaattgtcaacaaaaagatcgccgtgagccctaaaatcattaaggagatcgacaatgccatttattactgcctaaagtttggcgtggcttcacatatgcagaaaattgggtgtgataagagtttttacaaggagcacttgtatggttga

SEQ ID NO: 9972 - RNA, 1011 nt, synthetic construct
  source 1..1011: mol_type = other RNA
atgatggagcatatagagaaggcctatcaggctggggtcattactgaggaggaaaagaggttgattgaggagtataaccagagactgacggacaataatgtgcccgtgatatataatctgcgccacctgaggcagctgctcgggatccataaatctgctcaggacaggctttttggagataagaagtgcgattcgtatcgggttttccatattccgaagaaaaatggcggcctgagagaaatcgaggcccctaacgaagaattaaaacgcattcagttatggatcaaggagaacattctggataaattttccgtcagccaatttgcaaagggtttcgtgaagggcgtctcaatttacgacaacgcggtgcagcataccggtaaagagctggtagttaacatagaccttaaagacttcttcccttccattcagtacagagagatctacaagatttttaagtacatcggctataccgactctgtctccaagctgttgactaatctgtgtactaacgctaggagcgtgttgccccagggaagcccagctagtccaacaattagtaacctcgtaagcctcaaactcgacaaacgtctcgggcgactggcagacaaaattggcgcctcttataccagatacgccgatgatatcaccttctccggtaagaagacaatacagaagtacatcgagctgattcgaaaaatcatctacgaagaagggtacgagataaatgaaggaaagtttcggttgcaatacgcgcaccaacggcaggaggtgacagggcttatcgttaataaagaggtcgcaattccccaaaagcgcataaacgaattggaaaatgccatctactattgcaaaaagtatggcgtggtggatcacatgtcacacatcggatgtgaaaaaggtttctacaaggaacacctctacggcctggcctattttatcaaaatggtgaaccctgagaagggactgaaatatcttctacagctaaacgagatcgaatggccaatctga

SEQ ID NO: 9973 - RNA, 993 nt, synthetic construct
  source 1..993: mol_type = other RNA
atggcaagcaccaaggaactgcagaaagcctacgagtcgggctacataacacaaggcgacatgagtttgattgaagagtataatcagcgactcctttctaacaatgtccctatcatctacaatctgcgacacttaaggcagttgctgggcatacgcaagaaagaccaggacaaactctttggcaaggataggaaagattcatatcgcaactttaaagtaccaaagaagagcggggggtttcgcagtattgaggcccccaatgaacagctgaaaaaaattcagctatggatcaaggaaaacatactggacaaattcaccgtttctgagcatgcaaagggctttaaaaaggggttctccatctacgataatgcactcccacatgtcggcaaagagctcgtgatcaacttcgatcttaaggatttctttccaagcatcgattactgcgacatttacaagattttcaagtacatcggatacacagacggagtgtccaaactgttgaccaagctgtgcacgaaccccgaaaatgtcctaccccaaggatcacctgcctcacccgtgttgagcaatcttgtttccctgaagcttgataaaaggctcggcgaactcgccaagaggatcggtgctagttacacccggtatgctgatgacataacattttctggggaggctaacattcagaagtatgagatcctgattagagagatcatcttcgaagaggggtaccgggtgaatgaagacaaattcagacggcgtctgtatttccagaaacaagaggtgactggtctgatcgttaacgacaaagtgtccattccgaagagaaagataaaggagatggaaaatgcgatttactattgtaagaagtacggtgtgactaaccacatgaagcatatcaactgtgagaaaggattttatagagaacacctgtacggtttagcctatttcattaagatggtaaaccagcctcaaggagagaagtattataaaaactga

SEQ ID NO: 9974 - RNA, 993 nt, synthetic construct
  source 1..993: mol_type = other RNA
atggcctttgacaaaggaatcatcgatgagtgtcagaaaaagctcctgacggagtacatagagagactgcacatgaacaatgtgcccattatatataacctcaggcatctgaggaagttgtttgatattccccgagacgaacagaacaaattctttgggcacgagcggagcctgctgtacaagacattctatattccgaagaagaatggtgggtaccgcaaaattgaggcaccaaatgaaaaactcgagaagatccaatgttggataaaggagaagatcctagataatttcaacgtctctgaatacgcgaaaggatttaaaaaagggactaacattgtggacaacgcactccctcactgctctaaagaggtactgatcaatatcgacattaacaacttcttcccttcgattaaatactcctcagtgtttcggatgtttaactatatgggatataccaaagaggtttgccaccttcttacccgtttgtgcacaaacgctgaaaatgttctgccacagggtgctcccaccagccctgctataagtaatcttgtgaacttgaagctggacaagagactgtcaagcttagccatttccggtggagcggcctacactagatatgctgacgatattacctttagtggggacaagttgatactgaagtatatcaagctcatcaagcgcattatcaatgaggaaggctactccattaacgataaaaaattccgcatccagttcaagaatcagcggcaggtggtcactggcctcatagtcaattcccgagtgaaggccaataaacagatcttcaatgagcttgacaaagccatctacttcatcaagaggtatggcatccaggatcatatggcacacgaaaacatcaacagatctgcatataaggagcatttatacggcctggcctactttatcaatatgatcgataggacacaaggcaagtactacattgaacaactaaacagcattgaatggctgtattga

SEQ ID NO: 9975 - RNA, 1008 nt, synthetic construct
  source 1..1008: mol_type = other RNA
atgtcaaactacatcgagaaactaaaaaagcgaatgctgcagcaagaacttccaaacgattatatagaagagtgcatcagctacgcgactaagctcctgaataagggattacccgttatttttgacagcgaacatttcgctaaacttgtgggaattaactatgaggatctgcggaaactcaccataagcgataattacaaagaagtgaagatcccgaaaaaaaatggcattaggaccctgctcatccctaatcaagatctgatgttcgtccagaagtggatgcttgtcaatctcatttccaaggtgaaaatttcaaagcactctagaggtttcatcaagaatacctccctggtggataacgccaagcatcacgtcaaaaaagagtatgtcatcaccttagacatcaagaacttcttttcaagtatccacaacgtggtggtttatcgtattttccggtctttaggatatacaaaagaactgagcggcctgttcactaaacttctggtgactaaagatggcttgcctcaaggtgctcccacgagcccttacctttctcacatagtatgcaagaagctggaccgcaagatattcatagaactgaagtccctgaagaattgtgactttacgaggtatgcagacgatattacaatcagtggggagtacgatattaccgagaagattgagaatatcattgggatcatcgagagtctcgggtttgagatcaatctaaagaagaagaggcatcagctcagatctcagcagcagatggttacagggttggtagtcaacgacaaggtgaacattccaaagtcctatatacgcaaattgaagcaggaaatttactactgtaagaaatacggcgtgaattcccacatgaacaagacaaacattaacaattcgaactacaagctgttcctgtttggaaaagcctactacatcaaaatgatcaacaaagacctcggcgagaagtttttgaaagaattggacgagatcgactggccctattga

SEQ ID NO: 9976 - RNA, 1008 nt, synthetic construct
  source 1..1008: mol_type = other RNA
atgcacgattatctgatcaaactgaagagtgcaatgcagtcgcaggggtgcccccccaactatataaatgattgtaccaagtacgcaagcaagctgttaaacaaaggtctgcccgtcatttttgatcgggaacacttttctcgcctgattggattcaaactggaggagttggaagaactgctcaagaaggacaactaccgtgttgtcaagattcccaaaaaagacgggcacagggatctgtacattcctaacccaagactgaaattgatacagaagtggatgctgatgaatcttatcagcaaggtcaaaatttccaaacatgccaggggcttcatcacagataccagccttgttgacaacgctatcgagcacgtgaataaggacttcgtggtgagcttagacatccgcgactttttccctagcattaataagtaccgcgtgtatcggatattccgatcactgggctattgtaatgatttggcgggaatttttaccgcattactcgtgactaataatggcctcccacaaggcgcccctacttccccttatctgagtcacatcgtatgcaaaaagcttgactctagaatatcaaaggagcttaaacatttcgaggggtgttcctttacgaggtacgccgacgatttttcaatttctggcggcaatgaaattttggagaagatcagcaacatcatatacattatctcctctgagggatttgaactaaacttctcgaaaacaaggatccagagtaatagtcaaaagcagctcgtgacagggctcgttgtgaatgaaaaggtaaacgtgccaagctcatacaaacgaagattgaagcaggagatctattattgcaaaaaatacggggtcaactctcatatgaaacggctcggaatcaataaatccaactacaagctgtacctttacggtaaggcttactatatcaagatgatcaaccagaagctaggtgagaagttcctctccgagctgaacgaaattgactggccgtattga

SEQ ID NO: 9977 - RNA, 1092 nt, synthetic construct
  source 1..1092: mol_type = other RNA
atggttctcaatctcagctttgtttttttctgcaacaatccactcctttgctgccttaagagttcactcggcagcgggactatgtctgagtatctcgattcgcttcgaggtaaaatggtaagcaccgggtacagcacagagtacatagagctgtgtataaagtatgcgaatgacctggagaacaacaatgtcccagtgattttcgacaaggctcattttctgctgttaactggcctgaaaacgtccgaattgcgcaacatcctgacaaacaagcccgagcattaccacgagtttgagctgttggtgaactatagacttcggaacattttggcacccaatcctctgctaaaacaggttcagaagtggatccaggtgttcatattaaagcccctgaaggtgtcttcctgggccactgcctacaagccggggacaagtataattaagaacgcaaaggtgcacgttaaacaagattgtgtcattaatctcgatctgaagaatttcttcgactcaatcactagcgtccgcgtacataagatttttcgctcagccggatatacaaaagaactagccaccttgttcacacaaatctgcaccctggaaaagtgtttaccccagggcgctcctacttctccttacctgagcaacttgatctgtcggaatcttgatcaggacctggccatcttctgccagtctagggcaattagatttaccaggtatgctgatgacatgaccttttccggaggcgtggagatcgaaaactacattccaaatatcagaaagaccatcaccaaacacggctttgtgattaatgaagataagtcacaggtcctgttcagaaatcaaaggcaggtcgtgacgggacttgtggtaaacgacaaggtcgctatcaaaaaagaattcatccgaaagctcagtcaggaaatacactactgtctgcgtttcggtgtgtccaaccatattctgaattcccggatcaacaaaagtaactacaaagaccacctatttgggcgggtgtattatatcaggatggtgaataaacctctcggagacatcttgctcaaaaaactggagtctattgattgggagtactga

SEQ ID NO: 9978 - RNA, 1011 nt, synthetic construct
  source 1..1011: mol_type = other RNA
atgtcggagtatacagataatttacggaagtccatgctggaacttggcaattccaacgactacattgaactgtgcattaactacgcccggaaattagagaaatctcacgtgccgattatatttgataagatccactttctcgtcctcactgagctgaagtccagtcagctaaatgatttcttgaacaatagggccggttactacagggaattcgagttgatcataaataaccgaaaacgcgaaattcacgcccccaataatatcctgaaggagttacagaagtggatacagttgtatatcctgaagcccctgagggttagcgactgggctacagcttatatccctgggacctccatcattaaaaacgccgcaatccatatcggccaggaatgtgtggtgaacctggacctgaagaacttcttcaactctattagcgccgttaaagtccatagggtatttagagtcgctggatacactaaggagctggctaccctattcacgaaaatatgcacggtgaataattgcctccctcaaggggcaccaaccagcccctacctttctaatctggtgtgcattaagctggaccaagaacttgcggatttttgtcaatcactgggtattcggtttacaagatacgcagatgatatgactttcagcgggggcaaagagatcgtgaaagtgctcccacagatttataagattatctccaaacagggtttccttatcaacaatgacaagaccaagatattgaattgtggacaacgccaggaagtcaccggacttgtggtaaacgacaaggtgagtgttaaaaaagagtttatccgtaagctctctcaggagatccatttctgtttgagattcggcgttagcaaccacatcctacgcacaggcatccgaaaatcaaactataaggaccacctgtttgggagagcctactttattaacatggtcgacaaatcactcggagacgatctcctgaagaagctgcagagtattgattgggagtattga

SEQ ID NO: 9979 - RNA, 1023 nt, synthetic construct
  source 1..1023: mol_type = other RNA
atgagcaattctctgaattatctgattctgttggaagagcaaatggtacaggaacaatacccgactgacgatatccaactcgtcaaactctacgcacagagactcatttccaactccgtggccgtgatcttcgacttcgatcacctttgctatctcctggagtgtagccctgaggatatgcgctcctatatgtacaacaaggaatacaactatcacagttttgagatccctaaaaagagtggtggcactagacagctagaggccccaagttaccccttgaaaatgattcaacgttggattctggatcatatcacatgtcaggtgccaatctctagccacgctttcggcttccgaaaaaagaggagtatattggacaatgctaaaatacacgaaggccaggagtgtattgtgaacatcgacattgctaacttttttccctccataaaggggatccagatttacaagctgtacagatatctcggatacaccaagcaggtcgcttcaattctgaccacactgtgcaccaaggacgactgtcttcctcagggagccccaacctccccttacctgtcaaatatcgtgtgcaagaagctggataagcggatctctgggttagcaaatgcgataggggcaaaatatagccgatatgccgacgacatcacattaagcggatcttcgtcaatcactaattacatcggaaccctgaagaaaatccttacagacgaaggctttatcattaactacaagaagctccggattcagtttaataatcagaaacagatggtgacgggcttagttgtcaaccagaaggtaaatgttcccaacgagatgattcgcagcctcaggcaagagatctactattgcaaaaaatacggcgttaacggtcatatgcggcagaggaacatacgcaactcaaattataaggaacatctgtatgggaaagcctacttcataaaaatgattaaccccgatctaggtcttgatatgatcaggcagttggatcagattctgtgggagtattga

SEQ ID NO: 9980 - RNA, 972 nt, synthetic construct
  source 1..972: mol_type = other RNA
atgtacaagcagaactgtaacagccagtatattaaactggtgatcgattatgccgaaaatctgttgaagaacaatgtcgaggtgatatatgacctagaccacattagcctgctcactaacaaatctatcggagactttctcgacatcaataactactacaaggagattcaaatcagtaaaaggaacggggagacacgcactctggctattccggatgacaatcttaagtccgtacagaagtggatattgaaatcaattctggagaagatgcccatatcaaactcagccaaaggttttaagaaaggcttgagtatcgtcgagaacgcaaagccccatacgaacaaagattgcgtactcagcctggacctgaaagacttttttccatcgatcacccagggaagtgtttatttcatcttcaaggagattggctatacagaggaagtcagcaggttgctgaccagactgtgcacataccaaggacagctgcctcaaggggcacctacttctccctatattgcaaacctggtctgccggaaactcgatattaaattacaggagttcgcttgcaatcaaaatatagcctataccagatacgcggacgatctaaccttctctgctaacaaggaactcagcgagtatatcccacgcatcaaagagattgtgatcatccagggttttaaggttaacgactctaaaaccaggtgtcgataccgacaccagcgtcagcttgtgacaggcttagtggttaataatgaaaaggtgtccatacctcgggaactgaagcggaagttaagacaggaaatccactattgtaaaaagttcggcgtccatgggcatctttattgggggattaagtactactccaattacaaggattaccttctcggcatggccctgtacgtgaagatggtggataaaaatctcggaaaaaagctgcttgaggaaatcaagtccatcaattgggaatactga

SEQ ID NO: 9981 - RNA, 1065 nt, synthetic construct
  source 1..1065: mol_type = other RNA
atgtggctcatcaaggattttctcgtgggttcccccctgataggagttgaaaacatggacaattacctggagaaactggaacgagagatgaggaacagaaatttcgatctcgagtacataaacctgctgaaggactatgctaaaaggctactggatcacaaagttgcggtcattttcgatcaagaacatttcagcctgctcacagaggtccctgtagacaccattaaagcccttctgaataacttcaattcatacaacgagatccagattcccaagaaaaatggtgggaataggaccttgttaattccgaacgaggagcttaaatcaatccaacgatggatcttgaacaacattctgaactctattccaattagtgattacgccaaaggttttaagaaagggctgagtatagttaagaatgccgaggtgcacaccaataaggagtgtctacttaacattgacctcacagacttcttcagcagcattgagagccagcgcgtgtataaagcttttcgttatatcgggtacactaaggaaatctcagctatgctatcccggctgtgtacctataacaattttttaccccaggggagtccaacctctccatacctcgcaaacatcatatgcaaaaagatggacaaaaggctcttttccctttgcaaggataaaggcatcgactacacgcgctatgcagatgacttaacattttccggagatattaagctcagcaagtacctgcctattatctctgaaatcgtagaagacgagggctttcagatcaacactaccaagactcggatttcgtatcagcaccatcggcaggtggtgactggattgacggtcaataagggattgaatatccctcgcgatatgaagaaaaagctgtctcaagagatctatttctgcaagaagtacggagtgcagggccacctggctcagacaggccagacatattccaattataagcattacttgctgggcaaggcctacttcataaagatggtgaacaaagaacttggcgaaaaattcatcagaagaatcgccgaaatagcatgggactactga

SEQ ID NO: 9982 - RNA, 1008 nt, synthetic construct
  source 1..1008: mol_type = other RNA
atgaacttgctgagtctggaaaaggaaatgattaagcagaattacgacaaggagtatatcaacattgttaaagtctacgctcatagactggtcgagaataacattccgatcatattcaactttgagcacctttgctttctgactaactactctacagaaaagctcaggtacttcatccataataatcagagcctgtataaggagatagagattgagaagaaaagtggcaacacgcggttaatttccatcccaaataacgaactaaaggtgatccagcgctggatcctggacgaaatcctgagcaaaattcctctgagccctcatgctaagggcttccgcaaaggacaaagcatcataaacaatgcacaactgcacaccaacaaagagtgcgtgatgaatctggacattcaggatttttttgggtccgtgactcagaagcaggtgtacaagatctttagatatgttgggtataccaaacaggttagttccattctctcactgctgtgtacgaaagatggcgtattgccacaaggcgcccccacttcaccctacattgcgaatctcgtgtgcaaaaaattagacaagcgtatatctaacctcttcataaacaagcccattaattacacacggtatgccgatgatattactgtctccggagaagcaaccattaaggactacctccctatcctaattaagatcatcaccgatgaaggcttcgaaatcaacacaaacaaaacacgaatccaatattcgtacaataggcagatcgtcaccggtcttgtggtgaaccagaagatcaatgtcccaaaaaagatgataaagcagttgcggcttgagatctactattgtaaaaagtatggtgtagccgggcacattgataaaaggcatatagagtactctaactacaaacaccacctttttgggaaggcctattatatcaaaatggtgaaccccaagttgggacagaagttcctcaatgagttaaatgagatcaattgggactactga

SEQ ID NO: 9983 - RNA, 1008 nt, synthetic construct
  source 1..1008: mol_type = other RNA
atgaacattgacaccctgaaaaaaatgatggagaatgagcaactgtcagaggactatataaatctgtgcgtgacctatgctcgttccctggaggataaaggacttcccataatctttgactccattcatctggctaaactgatagggatcggaaccaaggagctatatagctattatgaactcgcgcaaacactgtacagcactgccgttatccccaagaaaacgggcgggtcccggaaactgaacgcaccatcagaaaacctgaaatacattcagaaatggatcgtagagaatgtgttgtaccgactcgatacatctaaggtggccacaggctttgtaccccagaaaagtatagtggataatgccaagcctcacgtgggaaaggagtgtgtgattaacctcgacctgaaggacttctttcccagcattaagtacgtgtggatctataatctgttcatcagcttaggttatactagacacctgagcatgctctttaccggcatttgcacgcttaataacgaattaccacaaggcgccccgtcctcaccatatttgtctaacctcatatgcgagaaattagactctaggctgagtagtcttgctgaaaacatgggcgcatcttatacccggtacgcagatgaccttaccttcagcggagacaaggaaattaccaagtacattaagctgatcaagagggtgatcaaggaagaaaaatttgagctgaacgagaagaaggttcgcgtgagattctcctaccaccagcaaatggtcacaggtctaattgttaatgagaaactctctgtccctcagaagacaaagaaatacttgcgccagcagatctactacgctaagaaatatggagtctcctcgtcattgcagaaacagggcgtcactaagagtaactacaatggtcatcttttcgggttggcctacttcatcaagatggtcgaacctgattgtgggactaagtttatcgaagagctcaagcagatcgattgggagacttga

SEQ ID NO: 9984 - RNA, 1008 nt, synthetic construct
  source 1..1008: mol_type = other RNA
atgaaaatcgacacactcaagaccaagatggaggatgaacagttcagtgaagattacattaacctgtgcgtgtcttacgccaggaacctcgaggaaaagggactgccaattattttcgattccatccacctggcaaaactcattggtattgagacgaaagaattgtattcgtactacgagcttgcccaaatcctttatcgcactgcggtgatccccaaaaaaacaggcgggagtaggaaactgaatgctccaagcgagaatctcaagtatattcagaaatgggtggttgagaacgttctgtatagactggacacttccaaggtagcaaccggattcgtgccccagaagtctattatcgacaatgctaagcctcacgtgggcaaggagtgtgttatcaatctagatctgaaggactttttcccttccataaaatatatctgggtgtacaacttgttcaagaacttaggctacacacggcatctgagcatgctgtttaccggcatttgcaccctgaacaacgagttaccgcagggggcaccctctagcccttatctatccaatctcatatgtgaaaagctggatagccgcctctcaggacttgccgaacacatcggcgcttcctatacccgatacgccgatgacctgactttttctggtagtaaagatatcgtgaagtacatcaagctgataaagagagtcatcaccgaggagaagtttgagcttaacgagaaaaaagtcagagtccggtttagctaccatcagcaaatggtgactggcctgattgttaatgacaaattgtcagtgccccaaaagacgaagaagtacttgcgtcagcagatttactacgctaagaaatatggtgtatcttcatcattggagaaacagggagtcacaaagagcaattataatgggcatctttatggactcgcctacttcataaaaatggtcgaaccagacagtgggacagagtttatcgaagaattaaagcagatcgactgggaaacttga

SEQ ID NO: 9985 - RNA, 1008 nt, synthetic construct
  source 1..1008: mol_type = other RNA
atggacatcaagtcacttgccgccgagatgatgaaaaagaactacgacaaagagtatatcgatctgtgcataagctatgccataaacctcgagaagaacggcatgcccattatttttgactctatccacttggccaaactgataggcattgagacaaaagagctgtattcatactacgagtttgccccaaggttgtataaggtcgcggtcgtgccaaagaaatccggggaaaaacgctttcttgatctgccaagtgagaacctgaaatacatccagaagtggattctcgagaacatcttgtataagatcaaagtgagcgactatgccactggattcgtgcctcaaaaatctattgtggataatgcaaagccccacatagacaaggaatgcgtcgtgaatctggacctccaggattttttccccaacatcaagtatatctgggtgtacaacctgttttacaacatcggatacacaaagcacctctcaatgatttttgccggtatttgtactctggaaaataaactccctcaaggcgcacccagctctccttacatcagtaatctgatctgtcacggcttagatacgaggttatccgatttagcgattcacatcggcgctcagtatacccggtacgctgacgatataaccttcagcgggaataaagagattgcaaagtatatatccctgatcaaacgtatcatcaaggaagagcatttcattgtaaatgagagaaaggtgcgagtgcagttcaagcatcatcagcaaattgtcaccggtcttgttgttaacactaagctctcggttccgaagaagaccaaaaaatacctaagacagcagatccattacgctaagaaatatggggtaaatgactctcttattcagcaggggatcaataagagcaactacattgatcacctgtatggattggcttacttcattaaaatggtcgaagaaaagtgcggatccgaattcatcgaagacctagatacactggactgggagagttga

SEQ ID NO: 9986 - RNA, 981 nt, synthetic construct
  source 1..981: mol_type = other RNA
atggtcgaggagcagttcagcgaagagtatataaagctttgtgtgacttacgccactaacttgatcgagaatggtctgcctataatttttgacgctcgccacttgtcatgcctgataggaatcgataccaaagaactctattcctactatcagctggcgagtaccctctacagaaaagctgtgattccaaaaaaatctggagggtcgaggaccattaatgccccctcagaaaatctaaagtatattcagcgatggatcctagagaacatcctgtataagatcaactccagtcaggaagccactgggttcgtaccacagaagaatatcgtcgacaacgcatcttaccatgtaggcaaagaatgcgtgatcaatcttgatatgaaagatttcttcccatcaatctcttttgtccaagtgtataacttgtttaaccggtctggctacacaaaacacctgtcaatgatactgacgggtctgtgcatgtataataatgagctgcctcagggtgctcctagctccccgtacatcagtaaccttgtctgtaagaatttagacctgcgtctctccaagttggcctcccaaataggggcaaagtataccagatacgcagatgacatcacatttagcggagagaaagtgattgtgaagtacattaagctcatcaagagggttatcaaagaggagaacttcaacattaatcacaagaaagtgagagtgcaattcagctaccatcagcaaatggtgacaggcctcgttgttaacgaaaagattcggattccccccaaaacaaagaagtatcttaggcagcagatttactacgctaagaaatacggcgttacgagcagcctgtctaaacagggccagaccaaggccaactataagggccacttatttgggctggcccattttatcaagatggtcgagcaggaatacggagataatttcatccgcgaactcaaagagattgactgggagagttga

SEQ ID NO: 9987 - RNA, 1008 nt, synthetic construct
  source 1..1008: mol_type = other RNA
atggacattaataagctgaagaacaacatgctaactgaggagtatgataaagagtacatcgacctgtgtatcagttatgcctacaatctggagaagaacggctttccagttattttcgacagtacacatttggctatgctgattggaatcaaagtgaaggagctttactcctattacgagctggcacagtctctgtacaagaagattatcatacctaagaagacaggcggtaacaggattctgaatgccccctgtgaaaacctcaagtatatccaaaagtggatactagataacatcctgaacaatagcgagagccttgacgtttctaccggattcgtgcaagggaaatctatcgtggataatgccaaacagcatattggtaaagaatgcgttattaacttggacatcaaaaacttcttcccgtctatcagatacatccaaatctacaacatctttcgctcgttcggctataccagacacctctgcatggtgtttactggtctttgtacgtacaaaaatgtactccctcagggagcaccaacatcacctctcctctccaaccttgtatgcaaacgcctcgatactaaattactggatctggctaatcacattggcgcatcctacactaggtacgccgacgacattacattttcaggggaaaaggtcataaccaagtacatcaagttaataaagcgggtgattaaggaagagtatttccaggtaaatgagaaaaaggtgcgggtgcagtttaaacaccaccgtcagatggtcacggggctggtcgttaataccaagttgtccgtgcccaaaaagaccaaacgatatttgaggcagcagatctactatgcgaagaaatacggggtcaacaatagtttagaccggcaagaagtgagcaagagcaattatgagggacatctctttggcctggcttatttcataaaaatggtcgagcccaaaaacggcgtggaattcatcgaacagctgaagcagattgattgggaatcatga

SEQ ID NO: 9988 - RNA, 1008 nt, synthetic construct
  source 1..1008: mol_type = other RNA
atggacatcatcaaactggagcagtcaatgcgacttgaaggccatagggccgactatattaagctctgcaaggactacgcgatcaatctgaaacggaatgaactccctgtcatttttaacatcgaacatttggctaaactgattggaattaacgccgacgagtgctatgcatactaccaactatcctctaacttgtataacgagctcttgatccccaaacgcacagggggacaacgcgttatcaacgcaccaagcgagaatttaaaatatatacagcggtggatactcgacaatatattgtcaaacgtttcgattagcgtccatgctaatggtttcattaatgagcggagtatcgtgactaacgctatacagcacatcgggaaaaagtgtgtgataaacctggacatcaaggacttcttcccaagcattacctacatccaagtttacaatctcttcaataggctcggctattcaagacatcttagtatggtattcacaggtctgtgtacacttgataacaaattgccccaaggagcccctacgtccccctacctgtctaacatcatttgcaaaaatctcgatgatagactgagcctgttagctagtcacattaacgccagctactccagatacgcagatgacatcactttttccggcgatagagggattacctcttatatcaagctgatcaagaaggtagtccaggaagagcgttttcttataaacgagaaaaaagtgcgagtgcagtttcagtaccacaggcagatggtgacaggtttaattgtgaacgaaaagctgtccattccgaagaagacccgcaattacctgaggcaggaaatctattactgtcagaaatatggggtcaaggatcacatgagcaaaaagggcctttacaagactaattatcagggccacctgaccggactagcccagtttattaagatggtggattctaagctgggcgaggaatatctgaagtccctggacaagatcgattgggagtcatga

SEQ ID NO: 9989 - RNA, 1137 nt, synthetic construct
  source 1..1137: mol_type = other RNA
atgacactgtttaggagagctttaaacaaagtgataccgcagcgccgcagcttttggggaatgcgtaagaagaagccatctagtgtagtcaattggaaagagcccgtcgagaacattttagaacgaaaaatggatctgcagaagttatacgaggaattgcagaatggcaatcatgacgaagactatactgagctctgcattaactacgcccggactcttctaaacaacggcatgagtgtgatattcgacaccgatcatctatcgaagctcattggaattagctcccacgagctgtactcttattatttgtttgccaacaatctctacaccgaagttaagctccctaaaaagaatggatctttccgcacaatcaatgctccctctgagaacctgaagtacatccaaaagtggatcctcgacaacattctttacaacaagaactgtagccactttgcaaatggctttatcaaggacaagtcaattgtcgataacgccaggccacacgtcggcaagccttgcgtgattaatttggatatcaaagacttcttccctaccatcaagtacatagacatctacaaacttttcaagggcttcggctatacatcccatctgagtatggtactgactggactgagtacgtataataatgtgcttcctcaaggggccccaacgtccccctatctgagcaatttgatctgtagaaatctggatgtcaaattcgaaagcctcgcgaaccggatctccgcttcatacaccagatatgccgacgatatcaccttctctggagagaaaagcattactaagtacatcgcacttataaaatccatcatcaagtccgaagggttcaccatcaatgaaaagaaagttagggttcagtatcagtaccacaaacagatggtgactggtctgattgtgaatgagaaactgtcagtgccaaaatcaacaaaaatgtacctgcggcagcagatttatttttctattaagtacggggtgacaaacaacttggagcgacagaacattaataagtcgaactacaaagatcacctctacggtatcgcatattttataaagatggttgaacccctggtgggtgagcaatatatcaaacaactgaacgggatagactgggagagctga

SEQ ID NO: 9990 - RNA, 1014 nt, synthetic construct
  source 1..1014: mol_type = other RNA
atgaacaattatatatctacgctgactgacaggatgattaaggaagggtatgagactgattatattaaaacggtcgtaggatactctgaacgactgatgcagaaagatctgccagtgatattcgacctggcgcatctggctctgtaccttgatgaatccgaagagacactatccgaaatggttaataacagcaccagcttctactccaaggccaaaatcaaatctaaaaagggtaaggtgcggaacatttatatcccttacgagaagcttaagaaaattcagatttggatcctctacaagatcctgtataaagtagaaacacccaagtgtgtaaaaggatttaaattaggcagttccatcgtcgacaatgccattccgcatgttaataaaaactacgtgttgaatctcgactttaaaaacttctttgagacaatcaaggagaaacagatcatcaccgttttcaccagcttggggtacaacaagatcgtgtctagtgccctgtcaaagatctgtaactacaacggaagtttgccccaagggtccccctcttcaccatacctttccaatctggtctgccggaacttggacaataagataatcgagctgattaagttcgaggatgtgacatatactagatacgctgatgacctgactttttcatcaaaccaaaagcttgactctctgatacctcttctcgaagagctcattgtgagcgaaaaattcaagataaacgaaagtaagacccgcatgcaactcaaaaatcagcgccagttggtgaccggcctggttgtcaatagccaggtcagtgtgcctcgtaaatatatcagggagctaaggtcagagatttactattgcaagaagtatggcgtgagcggccacatggacagaaagggcattctgtacagcaattacaagctccacctctatggtaaagcactgtacatcaagatggtggataaatccaaaggggagtcgtttttaaaggagttagataagatcaactggcagtattga

SEQ ID NO: 9991 - RNA, 1014 nt, synthetic construct
  source 1..1014: mol_type = other RNA
atgtcccaactggaagagttgaaaaagctggacatacctgtgttctgcaacctggaagaactccgcgagaacatcggaactaacaagaagttcttctacaaagtactctattctcacaacaagctttataaggaaatcactattcccaagcgcaatggagggaaccgggtgctcaacgtgccaaatatcgcattaaagagcatgcagcgatggatcctggacaatatactgtataaagtgcagagtgatccatcagcgaccggcttcatgcctatgaaatccattgtcctaaatgctagcatccatctgaagaagaagtacatattgaagatggatatcaaggactttttccctagtattgatttccgtaaagtgcgcagccttttttttgaactgggctacaataaagacgtggccacggctttagccaatatctgcgtgtttaggggacagctgccgcaaggtgccccaacatccccctacttggctaatctggtctgtagagagcttgataagaggattgacaatctctgtaggaaatatcgtctctcatatacccggtacgcagacgatattaccatttcgggaaatagtaagatcttctggattaagggtatagtcgaagaaataattaggtcataccagttttccctcaacaacgagaaaaccatctttttaaaacccggggaccggaaacgagttactgggattatcgtaaacgagaaacttagcgtccccagaagcgttaccagaaacttgcggaaagagatctactttatcaagaaattcggcctggaggagcacctagataagaattccttcaccggcagcaaagaacagtacatcgcccacctgtatggggttgcctcatatattaagatggtggagctgacaaagggcattttcttcattaaccagctgaactctatcttttctgggaacgagcagctggaaacaggcaaaaatctccatatagagtttgcatctatcgactggacaatctttggtgagtga

SEQ ID NO: 9992 - RNA, 1023 nt, synthetic construct
  source 1..1023: mol_type = other RNA
atgtcagagaagatcaatctaactgtcctttcaattgagagtattacctcccttgaagatctccgcaagaaaatgggggtgaagaaaaagtatttctaccgggtgttgttcagccacgataagttttacagggagatcgaggtgcctaagcggaaatctggtcaattcagaaagctgagtgttccatctatggcgctgaagaatatgcagaggtggatactggacagtattctgtacaaaatcagcgtgaatgaaaatgcaatggggtttgtgccctcaaagagcatagttactaacgcttacaaccatcttgccaagaaatatatcctcaagctggatatcaaagattttttcccttctatcggatttggaaaggtgttggacattttccaaaagctcgacttcccggcagaaatctctagtgctctggccaacatctgcatctacaaggacgagttacctcagggcgcccccacatccccatacctcgctaacatcatttgtaaacagatggacttcagaataggcagcctctgtaagaaatacgagttgaattatacgcgatatgccgatgacattactattagcggcgacaggcgcgttttttggatcgagaaacagattgagaagatcgtaaattcatgccatttcacactgaacaaagaaaaaaccgtccggcttaaacccggggataggaagcgcgtaaccggaataattgtcaatgaaaagatctctgtgcccaaaaatataaagcgtaccttacgacagaacatctactacatcgaaaagtatgggctggagagccatctggacaaaattcagtttacaggcttgtccaaccagtatataagacacctctatggcatggcatcctttattcagatggtggagattgaacggggtattgaatttatcgataagctgaactccttattcaaccaaaaaaacgatacagactaccagattagcgaggatgatctactgtcgttcgaccacatcgactggtccatcctggacatatga

SEQ ID NO: 9993 - RNA, 1026 nt, synthetic construct
  source 1..1026: mol_type = other RNA
atgaggcacctcgatttttcgttttctaatgaaaacatcccagttttctcgagcttggaggaccttcgcaaaaagatgggcattagcactgcttttttctataaggctatattcgcgagcgacttcttttataaggagatcttgattcccaagcgcaaggtggggaaatttcgaaccctgaaagttccacccgtatttcttaagaatatgcagcgatggattcttgacaatatcctgtatttcatcagctgtcatagaaatgcaaccggttttatacctaacaaatctatcgtggacaatgcactggtgcatgtcaggaagaagtacatcttaaagatggacatcgaagatttcttcccatctattaacttctacctagtgcgggaagtattcattaaaatgcactactccaaagtgatctcaaatgccctggcctcattgtgtatctgcgaagggcagctccctcaaggcgctcccaccagtccatatatcgcaaatctagtgttcatcgacattgatattcgcattagccagttatgcctcaaacataacctgaactattccagatacgccgatgatataactatttccgggagttccaatatcttttgggtgcggaaagttgtcgaaaagatcctgaaggagaagaagttcaaggtgaacaaggataagactgttattatcaaacctggcgataaaaagcaggtcacgggcctgatagtcaatgatcagctctcagtgcctaaaagcacaatccgggagctgcgtaagaacatctactacattaaggagtttggaattgacagtcacctcaacaaaataaagtacgagtatgccaaggaaaaatacattgactccctgtatggaacagcctctttcataaaaatgatctcaccggaaaaaggaatcaacttctttaacgagctgaactctatcttcagaaggggtaaccagtacaattccgagcagatagaacccagttttattgactttagcgagacacaatggaccgtcttcgagaattga

SEQ ID NO: 9994 - RNA, 1218 nt, synthetic construct
  source 1..1218: mol_type = other RNA
atggacgaatctagctatttgtccattaatggatacaagtacctgagtctttatgaagccccactgcccataacacgggcaaagttctgtaaatttcttccatggggtgtcctactgcgaggaggcccccaaccccattgtcccaccggaaagggtttctataaagtgaagctggtgctggtgactcaaaaacgctttaatatgatcaagttcgacaagatcatctctctcgacatccccgtgttcctcaccttagaagccctgcgcaagaacatcgacattgacaagaaatacttttaccgcactctcttttatcgcaacaatctatacaagtccatccagattcttaagaagaacggcagcgattataggcagattaatgcacctatcttacccctgaagaggatacagcggtggatcctggagaacatcctctataaaataccaattgaggattgtgcccacggctttgttagggggaaatcaataattaccaatgcttatccacacgtcaactctaagtacatcttgaaaatggacattgtggatttctttccttctatccactttggcttgatcaagaaattcttctacgatttaggatactctaacacgatagcatgtgccctggcgaacctatgcaccttcaattcgcagctgcctcaaggtgctccgacgagtccgtatcttgctaatattatctgcattgagatggacaaacgtatccaggggctctgcaaaaaaaacagactgaaatacacacggtatgccgatgatataacaatatccggcaactcaaatgtattttggatcaaggacattgttgaaaagatcgtgaactgctacgggtttcagattaatcagaataaaaccgtggtcatcaagccaggagacaggaagaaggtgactggcattattgtcaacgagaaattgtccgtccctaaaagcatcgttagaaaattgcgacaggacatctactacattaaaacctttgatctggagagccatatggaaagaatcagtttcactgggacaaagcaacagtacatttcacagctttacggggtggccagctttattaagatggtagacatagacaagggcctgtattttatcagtacactggatagcatcttcaagcctttctcaccttccattgctgaggttgatctcgagctcgatgattatttcgacaatctcttcaacgacctgttctga

SEQ ID NO: 9995 - RNA, 999 nt, synthetic construct
  source 1..999: mol_type = other RNA
atgaagtataaagtagaagtgtttcctgcgattgattctattgaggatctgcggaacatgatcggtgtgcagagcaattatttctataagtgcctctactccaacgaatacttctataagaccgttaagatacccaagagaaggaatgacgaatacagagagcttacaattccaaccatggctttgaagaatattcagcgttggatactggacaatatcctctacaaatttagcgttcatccatgtgcaaaagggtttgtacctggaaagtcaatcattgataatgctatcccacacattaacaaaaagtacgtggtcaaaatggacgtgaaaaattttttccccagtatctcgtttaaggatgttaggatcctgtttttgaacctggggtacaaaatcgaggtcgcaattgctctggccaatctatgtacctacaagaacacattacctcaaggttcacccacctctccctatatagccaacctgatcttctacaagatcgacaaaagaatatccggcttttgcaataagaacaaccttacttatacgcggtatgccgacgatattactatctcaggaaagtccaacatctctttctccattaagattatcaaccagatcctgacacagaaccgatttgagctcaacgacaaaaaaacaaaagtgctcaagccgggcgatcgcaaaatcgtcactggcattatcgtgaatgaaaaactgaccattcctaaagatttcatacgcaatgtcaagagggatttgtattacattaaccggttcggcttgttaaatcaccttaacttcatcagcatcgccgaggacaatagtgaatactatctgaacagcctttctggcaagattagtttcattaagatggtggactacaaacagggatacatactccaaaatgagctagacaacattatcgggtataatgacaagcatgaggaaaagtacatcgatctggaggatatagacatcaagtgggagaaactgtga

SEQ ID NO: 9996 - RNA, 942 nt, synthetic construct
  source 1..942: mol_type = other RNA
atgataggcattaagtccgattatttttacaagtgcctgtatagcaatgagtacttttacaagactgtcaaagtgccaaagaaacgcaatgatggttacagagagctgacaatccctaccatggcattgaagtctatacaacgatggatccttgacaatattctttacaactttcccgtgcatcattgtgctaagggcttcattcccgggaaaagtattattgataatgctatccctcacatcaataagaaatacatcgctaagatggacattaaaaacttctttccttcaatctctctgaaggacgttataatgctgtatctgaatttgggctataattataaggtcgcaaccgcccttgcgaatctttgcacttacaaaaatcagctcccccagggatcgcctacttctccgtacattgccaacttaatcttcttcaaaatcgataagcggatttttgggttctgtaaaaaaaactacctcacgtatacaaggtatgccgacgatatcacaatcagcggccgtacaaacattgcctttagcatcaagataatcaaccagattctcaaccagaataaatttgagctgaacgacaaaaagaccaagattctgaaacccggtgatcgcaagatcatcaccggaattatcgtgaatgagaaactgaccgtaccaaaagatttcataaggaatgtgaagaaggacatttactatatcaagaagttcggcctagcctcccacctaaacttcatagatttcccaatcgaaaacagtgaatattacctcgactccctgtatggaaggatcagcttcataaagatgattgactacaagctggggaacatgttacaaaacaagttgaacaacttcatcgactactcaaaacggagagaggaaaaatatattgatctcgaagacatcgacattaagtggaaaaaactgtga

SEQ ID NO: 9997 - RNA, 996 nt, synthetic construct
  source 1..996: mol_type = other RNA
atggtcaacaagacctatttggcaataaactcactcgaggagctgcgaaacatgatcggcattaaaagcgactatttctataagtgtctctatgtgaacgaccacttttacaatgtcattaagattcctaagcgcaaaaaagacgagtacagagaactgatgatcccaaacatggcattgaaaaatatccagaggtggatactcgataatgtcctttatagacgccaggttcataaatgtgccacgggatttgtgccacgcaagagcatagtcaataacgctattcctcatgtgggtcaaaagtatatcctgaaaatggacatcgagaatttcttcccttccattacctttaagcaggtgcgtaaaatcttttccgaaatgggctacaaatttgagctggccaccgctttggctaacttatgcacagtgaacaaccaattaccccagggggccccaacttccccctacatagccaacatcatcttttacaacatcgataaaaggatcttctcttactgccagaagaataatctgagatacacccggtatgcggacgacattacaatttcgggaagtaataaggtatctttcagtaaggagatcattagggaaatagtcaatcagtataacttccggatcaatgagtctaagactatcatgtttaagccgggtgacagaaagaaagttacaggcatcattgacaatgagaaaattagcgtacccaaaactctgattcgggaagtgcgaaagcagatttacttcgttaataaattcgggctggaggaacacctcatacggaataactattcacttgattacgagcagcaattcattatgtcaatctacgggaagatttccttcatcaagatgattgactttaagaaaggagtgagcctgcagaagaagtttaatgaagtgcttggcaacatagaaagttctaacatgtacagggataacatcgatttcgatgatatcgaactacactggatcaattga

SEQ ID NO: 9998 - RNA, 948 nt, synthetic construct
  source 1..948: mol_type = other RNA
atgaaattaatcgacaatgggctggacgatctttcccgcccggtcttcctctgcacaaaggatatacaacaggccattggaatagaccctaaaatcttttataccttcctcaaccctaagaacatttcctacatcaagatcaagattcctaaacggaaaaaaggtgaatatcgagagctgtctatcccaagtccagcactgaaaaacctccagaggtgggtcttggagcacatactgtactcattcccttgtcatgggtccgcaaacggctttattccgaacaaatcaattgtgacgaatgctatcccccatattagcaaagagtacatcttaaagatggacttaaaggacttcttcccaaatatcacgttttccatggtgaaaaatcagtttttgacaatggggtacaatgaccacgtgagtcactctttggctctgctgtgcacatataatgattctctaccccagggtgcccccagctcaccttatctcgccaatttgctcttctcaccctttgacgagctgatttacactcactgtagcaagaataacctgtcctatactagatatgccgatgacctcaccatcagcggcgggaagtacattctgaatattccacagtatgtgaaagacatactgagggatagtgactttcagatcaacaactctaagactctaattatcaagaagggcgacaagaaacaagtgaccggaatcgttgttaacgagaaaatatccatccccaagaattatctcagagaacttcgtcagataatctattacatcaacaagtatggccttgattctcatctgaagaagattgattacaaaggaagcaagtacaagtacattaacagcctgtacggcaaagcgagctacattaagatggtagatttcaagaaaggaatcaagatcttcaccgaactgaacaaaatctcgcttgattga

SEQ ID NO: 9999 - RNA, 1002 nt, synthetic construct
  source 1..1002: mol_type = other RNA
atgtcctccgataagaacccactgtccctcaaggaggagtggtccgctgaagacatcaagaaatacagctccatgttgaaacgcaacaatgttccggtgatttttgatacagaacattttcggaggctcttaggactggagaaaaccgacttttacaacattctcttcaagctggagtatcaataccacgaagtcgaaataccaaagaaaaagcaaggggagttgaggacactattccttcccagcattaaactgaagtatatgcagcgatggatactggacaacattctctacagccaagagtgtaataatgaagtgacaggattcgttcccagcaaaagtataattgataatgccaagcctcatattgggcagaaatacatcctgaaacttgatattcaggacttctttccttcaatcagcaagatccgagtttttctgatgtttaagcacttcggatatacgaatgacctgtctaacactctatcaaacatttgcatctacaagaatgagttaccccagggcgccccctcaagtccatatatcgcgaacctcatctgtaagaagatggataatcggtttctcggcttgtgcaagaaaaacaacctgaagtatacccgctatgcagatgacataactatttctggcggaaagtctgtgtataagttcaaacagttcttcatcaacatcgtgaccgacgaaaaattcttcgtcaacaagaaaaaggtgaagcttctgaaaaacggggacagaaaacaggtaaccggtattgtgatcaacgagaaactgtctgtccctaagaatgtgatccgggatctcaggagagacatctactacattactaagtacggcctgaatagtcatctgaaacgtaccggcaatatcgcctcatcgaattataaagctcacctgtttgggaaagctaagtatatatacatggtagacagagagaagggtgccttgtaccttgaacagttagatgcaatcgattgggagacatga

SEQ ID NO: 10000 - RNA, 999 nt, synthetic construct
  source 1..999: mol_type = other RNA
atgaactcagacgacaaactcagtaaactgaaggaaaactggaccgctatggagatcgaaaactacagctcatctctgaaaaaaaaaggggtaccggtgatctttgacgttgagcatttccgcaggctcctaggcttgagaagcgaggacttttacagtatattgttcaagctcgaataccattatcacaaactcgagatccctaagaaaatcgtggggacttatcggcagctcctgctacccagtatcaaactgaagtatatccagcgatggattcttgataatattttgtacacccaatcctgcattacagaggttacaggttttattcccggaaaatccattgtgaataacgctagacctcaccttaagcagaagtatatcttgaaactggatatcgaggattttttccccagcatagacgagaaacgagtgtttaacttgttcaagaactttggatacacgaaccggctggcaaggaccctttcgcggttctgttcttatgaaaatgaactgccacaaggtgctcccagctctccatacattgccaatctgatatgcagaaagcttgatgcccgtctgactgcactgtgtgccaaatatgccttaaattatacacgctacgcagatgacatcaccatttctggcggaaggatggtgttcaaactgaagaagcacatcatcaacatcatcagcgacgagaacttctccattaataagagcaagattaagctcctcacagccggggatagaaagaaaataaccggaatcatcgtcaatgaaaagttatccgtacctaagaaagtcgtgcgcgaactgaggcaggagatttattacataaagaagttcaacctggagtcacatatgaagaaaactggcaacgtctccaagtcaaattataaggggcacctttttggcattgcgaaatacattttcatgatagacaaggatctgggtacctactacctggataagttaaatggcatcgactgggaatga

SEQ ID NO: 10001 - RNA, 984 nt, synthetic construct
  source 1..984: mol_type = other RNA
atgaagaaatggaccgatcaggatatcagagagtataggaacaaactggaggctaatggagtgcccgtcatcttcgacctggagcacctgcgtagactcatcggcatcgagaagaagtacttttacaaggtcttctacaaactcgaataccaatatcgcgagattactatccctaaaagaaagccagggcagtttaggatactctcagttccctctcgtaacctgaaacttattcaacggtggatcctagacaacatattgtattgcatagagtgcggcgagattgtaaccggtttcataccactgaagtctatcgccgacaatgcaaaaccgcatacgcagaagaagtacatttataagttcgacctgaaagatttcttccctagtattcctcgcaggaaggtgtactatctctttagaaacctgggttattcatcagatctcagcaatgctttggcgacactttgttgtttcaataactatctaccccagggagctccgacaagcccatatattgccaatatcttatgcggcaaattagaccggcgaatcaactccttttgtcagaagaacaactttacctacacacgctatgcagacgatcttaccatcagcggggacgaaaaactcgtgcactacaagagtctgttccgaaaaattatcaatgacagcggcttctgttttaatgaagataaggccaggctgattcgctgcggtcagcggaagctgattacaggaatagtggtgaacgaaaaagtgactgtacccaggagttatgttcggtcgttgaagaaagaactgtactacatccataaatacgggctgaagggacatttggagcactgcgatattaagactcctccaaatatatactccaaggaaatcattggcaagatcaatttcatctccatggtcgattctaaactgggggaagagtttaagtccttatttaaggacgcccttaaaaagaacaaaattttttga

SEQ ID NO: 10002 - RNA, 960 nt, synthetic construct
  source 1..960: mol_type = other RNA
atgaactggacagaggagaatatcactaattacaagaacaggctcatcgaaaagggagttcccgtgatttttgatattgagcactttaggcgcctcctcggaatcaagaagtcttacttctacaagctgttttatgggctgaaataccaatacaaggaagtcgaaataccgaaacgaaagataggtgagtatagaaaattgacggtgccatctaaaaacatcaagaaaattcagcgttggatcctggagtttatcctgtactccaacctgtgtgatgattgcgtaactggatttatccccaccaagtccattgttgaaaacgccctacctcacatcgggcacgactatatttacaaattcgacttgaaggacttctttccctcaatacctcggagcaaagtcttttatctttttaaagacctgggctacacggctgagttaagcaactatttggccagtttctgttgctataatgactgcctgccccagggagctcctacctcaccatatattgcaaatcttgtctgtaaacgccttgataagaggctgaagattctgtgcgagaggaacggctttacctacacaagatacgccgatgatatcaccattagcggcgacttcaaaatcgtgcatttccgaaacttatttgaaaccatcatagaagactcgggtttcattataaatgagctgaagactaagctcatccggaatggccagcggaaaatagtcacaggcgtcgtggtaaatgaaaagccaacaattagccgcgagtacgtgagggagctcaaaaaggagatctacttcatcaataagttcgggattgaaaaccatatgaagagaattggggaggcgggtagtgtgaaggactatcgacgcaaaatctatgggaagatcaacttcgttaaaatggtggatcgggaactgggcctagagcttcgtagaaaagtgaattccttctga

SEQ ID NO: 10003 - RNA, 1074 nt, synthetic construct
  source 1..1074: mol_type = other RNA
atggacttggaccttttgaagagcaagttgatcgaaaagaacattccactcaatgacattgaagcaaccattagttacgcgcagaccttaaaaaataacggcgtgcctatcatcttcgatatgcagcacctccgacgccttctcaaattgacggagtccgatttcaaaagactgtactatgccagggatctacagtatcggacaatcgagatcccgaaaaacaatggttctggaacaaggaccctgagcttaccctccatagacctcaaatacatacaacgctggatccttgacaatattctgtacaacgtccacgtacatgagtacgcaattggctttgtcactggcaaatctactgttctgaacgccagccatcacatcaatcaggagtatgttctgaaaatggacattaaagacttctttccaacaatatccggcggccgagtttatggactctttaaatgcctgggttacagcagcagtgtggccctgactctaactaacttctgtatctaccaaaatagcctgcctcagggagcccctacctctccctatatttctaatctcgtatgtaggaagctcgaccaaaggttagagcttctgagtagaaagcgtaagctgaagtatacccggtacgctgacgatatgactatctctggggggagaaagatcaagaaaacgataccatatgtgaagcagatcatagaagaagagggatttcggtgcaatgagtccaagacaaaactgatttacaagtcaaaccgccagcaaattacaggcatagtggtcaatgaaaagctgtcgatccccaaaagtatgtttaagtcactgcggcaggaaatctactatatgaagaaattcggggtgtcatcccacctggataagaaggggcttaagcataagtcacatgtgaaggagcactactttgggctggctaactatattatgaaggtggacagagagaaaggtaagcagatcttgaacgatctaaacgctattgattggatttccaaatctcacaaaggaaataagcagttcaccgcacaggaaaaaaacaaagatatctacgagtga

SEQ ID NO: 10004 - RNA, 1005 nt, synthetic construct
  source 1..1005: mol_type = other RNA
atgatcgaacgcaatgtccctaatgaggagatcgaaagcacgctgagttatgcccacattctgcaggaaaacggcgtgccgattatctttgacagccagcatttgaggcggcttctcaaactgacagatactgactttaagcggctctattactccaaagagatgcagtatcggactcgggagattcccaaaaacaatgggagcggcaccagaacgctgtgtattcctagtctggatctgaaatacgttcagcgctggattctggataatatcctgtacaaagtgaagataaacgagcatgctattggtttcgtgaagggaaagtcaaccgtctccaatgccgggtaccatatgaatcaggagtatgtcctgaagatggacatcaaaaacttcttccccactatttctaattctagggtgtttggactttttaagtcactcggctactcaagttccgtagctatgactctcacaaacttctgcacatataataatgagctaccccaaggctctccaacctccccatacatctctaacttagtgtgccgtaagctggaccgacgattggagctgctttgtcggaccagggggctacagtactcgcgttatgcagatgatataaccatttctggaggtagaaaaatcaagaagaccataagtttcgtccaaagaatcctcgaggaagagggctttaagaacaacgagaacaagatgaacttaatctacaaaagcaaccgccagcaggttacaggggtagttgtcaatgagaagttgtccgtgcctaaagtgatatacaaaagcctgaggcaggaaatatattacatcaggaaatatggccttgaatcccacttggacaagaaagggttaaatagaaagtcacacgtgaaagaacactactacggactggcgaattatatgatgatgatcgataaggacaagggacaacaattcattaacgaactcaacgccatcgactggaagcgcaagagcctcggtagagactga

SEQ ID NO: 10005 - RNA, 1071 nt, synthetic construct
  source 1..1071: mol_type = other RNA
atgaaggacagcatgggttccgttatctatgctctgctgaacaagaaagacggaaaaatggacctcgccatccttgaatctaagatgattgagcagaacattcccaccatggatatcgagtcaacaatcagctatgcaagggccctgaaagacaacggcgtgcccgttatattcgacattcagcacctgcgaagactgctgagaattaccaagtccgattttaaacgtttgtactacgccaaaaagaatcagtataagaccgtggagataccaaagaataacggaacgggatctagattgctgagtatcccctcaatcgacctcaagtacatccagcggtggattcttgacaacatcctgtacaaggttgaaatcaataacctggccattgggttcgcaaagggcaaatctgtcgttgtgaacgcttcataccatataaaacaagagtacgtactcaagatggacattaaggacttctttcctaatattacagcaaatcgcgtgtttgggctcttcaaaagcctgggttattcatctagcgtggccatcacacttacaaatctgtgtacgtataatgattccctgccacagggagctccgacctccccttacatttcgaacttaatatgtcggaagttggatagtaggctaaagaatctctgccaaaagaggaatctgaattttagccgctatgctgatgacatcaccatcagcggggggaagaaagtcaaaaatactattccttgcgtggaaaagatcttggaagaagagggctttaacgtcaacgagcagaagactcggatcatcttcaaatctaagagacagcaagtgactgggatagtggtgaacgagaaactcagtgtgccaaaaagcatttacaagaacctaaggcaggaaatttactatatgtcgaagtttggcgtcgagagtcatcttgataaaaagggcctcaaaaacaaatctcacgtgcgagaacactactatggtttagcgaactacttcctgatggtcgatcgcgtaaagggcgagaaagtattatccgagcttaactccataaattggaatgattga

SEQ ID NO: 10006 - RNA, 1011 nt, synthetic construct
  source 1..1011: mol_type = other RNA
atgaatttggaggtactcgaaagcaaaatgtccgaggagaacatttccttggaagaaatcgagagcaccctttcctatgccagaaatctgaaggaaaatggcgttcccgtcatctttgatatccagcatttgcgcaggctgctaaacctgaataagactgatttcaagcgtatatactacgcacgacagcatcagtacaatactatagagatcccaaagaacaatggcaagggcactcgaaccctctcaatcccgagcttagatctcaagtatgtgcagagatggatactcgacaatatcctctacaaaatcgaagtgtctgagtacgctaatggatttgtgaaggggaaatccgtcgtcaccaatgccaactatcacgtcaagcaggagtacgtgttaaagatggacattaaagacttctttcccacaattaccgcaggtagagtgtttggtttgtttatgtccatcggatactcttctaacgttgccatagtcctgacgaatctttgcacatataacaactcaattcctcaaggtgctccaacttcaccctatatctctaacctgatttgtagaaatctggacctgcggcttagtctactgtgcaataagcggaacattaaattcagccgctacgctgatgatatcacaatttcgggcggaaggaaagttaagaagaccattcctttcattcggaaaatcataaatgaggaagggtttatcgtgaaccaggagaaaaccaagctgctgtacaagtcagggaggcaacaggtgacaggcattgttgtgaatgacaaactgagtatcgcgaaggaaattttacggaaactgaggcaggacatatactatatcaagaaattcgggctcaatagccaccttgagaaaaagaacatgatcaacaaaagtcacgtgcgcgaatattattatggaatggccaactacatcctcatggtagatcaaaacaagggccagaaactgttcaacgagctgaacaagattaactggaaatga

SEQ ID NO: 10007 - RNA, 1014 nt, synthetic construct
  source 1..1014: mol_type = other RNA
atggatctgagtatcctcaaacaggagctgatgtctagagatttaaattctgtggacgtggaattcatcataagttacgcgcagtccctcctggacaaggacattcctgtgatattcgatctcgaacacctgaggagactgttgggactcaagcggagcgatttcaagcaggtctactatgccaatagcaaccaataccacaacattgagatccccaagaacaacggatcgggaactcggaaactgtctctgccttcagataaactcaagaaagtccagagatggattcttgactacatactgtacaatttcgaggttaacgagaaggctaccggctttacactagataaaagcatcgtgaccaatgccaacttccatactaaccaaaagtttgtgttgaagatcgacatcaaagacttttttccgacaattacgagcaacagggtgtatggtctgttcaagtcattcgggtataacaattcaatcagcctggcacttaccaaattatgcacacatgagaattgtctcccccagggcgcacctacttctccatatattagcaatctgatctgccgccaccttgatattcgccttaacgggctagccaagaaaaacaacctcaatttttccaggtatgctgacgatattaccttctcaggtgaattcatcccctccaatatagtcgaaatggttcaatggattctgattgaggaaggcttctggatcaatgagttaaagacaaagttgctgaacaagagtcagcgacagaaaatcaccgggatcatcgtgaaccaaaaactctctgtgccaaaagaaataactaaaacattgcggcaggaaatctactacatgaagaagtttggggtacagagtcatctggagcgaaaaaatctgcagacgaagaccaatgtaaaggagcactactttggccttgttcgttttattctaatggtcgacaatgaaatgggcaaaaaactgtcctatgagttgaagaagattaactgggactcctga

SEQ ID NO: 10008 - RNA, 1149 nt, synthetic construct
  source 1..1149: mol_type = other RNA
atggatttgatactgctggaacaagagttaaaggccatggagctggacaacgacatcatcaacaactacataagttacgcgagcaacctcaagaataataatgtgcccgtgatttttgagttggaacaccttaggaagctgcttcacatcagccgtgaagagttctttggcatctactatagtatcaagtaccagtaccatacgatttatattccgaagagcaaaatcaagtacgaaaccaacaaagggattacccgccagagtaagaagtacattctgcccaaagtctactacgacaacgaggttaggcacaagttcaagcgctataataaggtaatcacagacctaacaaacaacaaatcctcttactatcgtaaactggaccttccctcaaaaaagctcaagtacatacagcggtacattctggataacatactgtatcgggtggatgtgcataatgccgcacacggctttgtgcctggcaaatccactatctcgaatgcaagagtacatgtcggtaatgagttcgttgccaaactagatatgagagacttttttcctgctatcaccgcacagcgagtgtatggattgttcagatctttcggctacaataagagcctttcattcacactcacaaaggtgtgcacttacaatggaagcctgccacagggagctcctacttctccctacatatcaaatctgatttgtcggaagttggattacaggattagcaccctgtgtatcaagaacaacctcaatttctcacggtatgctgatgatattacgatttctggggggaggaaggtgaagagagtcctgccaatcatcaaagacatcattaagaacgagggatttcgaataaacgacgagaaaaccaagatcctccacaactcccataaacaaaaggtgactggtgtggttgtaaaccagaaggtgagcattcctaaatccttttatcgcaatttgcgccaagaattatactatatgaacaaattcggcgtctcctctcacctgctggaaaaacagacaatgtttaagtccaataccaaagcctattatttcgggctggttcattattgctatatggtcgacccaatcaaaggtgaaaaacttttacagctcctcgagaaaatcaattggaatagttga

SEQ ID NO: 10009 - RNA, 999 nt, synthetic construct
  source 1..999: mol_type = other RNA
atgtggactaaggaatccatcaaaatttatgaacgccagctcgaaagtaataggctgcctgtgatctttaatatcgaacacctgcggcgtcttattggcgtcgagaagaaatacttctataagctgaccaatagcgtggatgcatcatacatttccaggtttatcgacaaacggaacggcggtaagagaaaactcctgataccagggtttaatctgaagcttatccagacctggatcctccataatatcctgtacacacagcctgtgtttacatctgccactggcttcatcaagcagaaatctattatcgataacgccactccgcatatcggcaagaagtatattttcaagaccgacatttctgatttcttccctagcataaagtttaagaacgtattcctgcttttcttgaattttggatacacaaaggaggtgtccaacgtgctcgccatactctgcacatatgaagggtatctgccacagggagctcccacgtccccctatttgtcaaacctgatttttcgagacttcgacaagaaattagagaatatctgtagtctcagcgagtataagtataccagatacgctgatgacattacgataagctccaatgaaaaaatcagctctatcgaggtcgattacctgtcgaaaactatcgagcagagcctccaaactatcaataacttcttgaagttgaacctggacaaaaccacagtattaaggcccggtcaacggaaaattattaccggcgtgctagttaacgaaacactgaatgtcccaaaaaagatactgtcagagattagactagagatttactgtctgcagaagtacggggcctcaaaccgcatcgaggcatataaccagaagcacaataccaacttagataaatacagttaccgacagaaactttatggaaaaatctgcttcgttaacatgatcaatcccaagaaagcggaaaagttctacgagcaattttacgacattaactggataaagtga

SEQ ID NO: 10010 - RNA, 999 nt, synthetic construct
  source 1..999: mol_type = other RNA
atgtggacggaggagtccatagagaactatgaacgtttgttagagagcaaaggtctgccagtgattttcgacgtcgaacacctccgccgactcatcggcgtgaagaagaaggatttctacaaattgacaaacagcattgatgcatgttacacttgtaggctgattgacaagcggaacggggggaagagggagctacttataccctcgttcaatctgaagattatacagacctggattttgaataacatcctgtacacccaaagcgtctccagctcagctacaggcttcattaaaggcaaatctatcgtggacaatgcagagccacatatcgggcataagtacatcttcaaaaccgatatcctcaacttttttccctcaatcaaactacgcaatatcttcctgctatttttctactttgggtacaccgtagaagtctcttatatccttgccagcctgtgcacatatgagggatatctgcctcagggcgctcctacctctccctatctcagtaacctgattctgagagactttgacattaagctgcagaatatctgctcctcactgaattatacctacaccagatatgctgatgacattactattagttccgacactaagatcactaagttctacattgagtacctgctcgataccatctctcagctcctgaactcaatcacatactttctcaaactcaacctggacaaaactaaagttttacaccctggacagagaaagataatcacgggcgtgcttgtgaataaacggcttaatgttccaaaggaactgttaagcgagattcgactggaaatctactgtcttcaaaaatatggagcctccaataggcttaaggcgtataacctcaaaaacaatacagacttgaacatagccagttatcggcagaagttgtacggtaaaatttgctttgtgaacatgatcaatccgatcaaggccgaaaagctgtatgatcagttctacgatataaactggatgaagtga

SEQ ID NO: 10011 - RNA, 999 nt, synthetic construct
  source 1..999: mol_type = other RNA
atgatgtggaacgaacagagcattagaaattacatcgggcttttggaatctaaaggactgcccgtcatttttgacttagagcatctccgaaggttaataggggtggagaagcaatacttttacaagctcaccaactcaattaacgagtcctactcttttttcacaattcgcaaaagaaacggagggagccgaacaatttccatccctttcagcaatctgagaacgatccagaattggattttgaacaacatactgacaacacaacaggtagctgagagtgccacagggttcatcaaaggtaaatctatcgtggataacgcaaaaccgcatataggccacaaatatatctacaagaccgatatcgtggacttcttcagctcgattaagtttaagtctgtgttggccctctttctacggcttggttatgttaaggaagttgcgtatatcttggcccggttttgcacctatgacggatatctgccacagggagctccaacttcaccttacatctccaatcttatactgtacaacttcgacattgagctacagaaaatctgttgcttgagtaaattctcttacacccgctatgcagatgatatcacgatcagttcaaatggcgagcaccttatcgactccaatctgctgagcgccaccataactaagctgctccaggatatctcctttgaactcaagatcaatttcaagaagaccaaagtgctgcaccccggtcaacggaagattgtgactggcgtattagtcaatgagaagctaaatgtccccaaggaaattatctcagacatcaggctggaactgttctgtctcaacaaacacggcctgagtaaacgtattaagcactacaatgaaaagcataagactgctctgagcgttgcactgtataggcagaaaatttatggcaaaatctgctttgtgaacatgattaaccctaaaaaggccgagaagctttttcaggagttctacaaaataaagtggctcctgtga

SEQ ID NO: 10012 - RNA, 1023 nt, synthetic construct
  source 1..1023: mol_type = other RNA
atgatcaaacaggtgatcttcaatatccaactttctgacctcccagagcaggagaaaaaagacctcatctactacgcagaaaacctgtatttcaagcaatgtcccgtaatattcgataatcagcatctcatgaaactctttgagctgcaggatcacgacctgaagaggttcatgacagaaaataccaatcactactccattaagaagagaaatggcgatctacgtgaggtatggaaacctaactacaagttaaagaccattcagaaatggatactgaagaacatcctgaacgaaattaaggtgagtgagtgcgcccatgggttcgtgaaaagtaagagcattctgactaatgctgaaactcaccaatacaaagaacagttttgggtgttttccatggatattaaagactttttcccctctatcaagtatcatgaagtcaaacgaatctttatgggtatagggtattccaatgaggtgtcagaagccctgtcactgcttaccactgttcatggaaagctggcgcaaggcttccctacctctcctatgcttagtaacttgttcttcagagacatcgatgaggagttccagcagattgcaagcagataccatattcgctattcacggtacgctgatgacatcacattttccggcgtccagaagaaaggatatctagtgctctctgagaagctgaagcaaatagtcacgagcgtcttgagcaagcacaatttcatagtgaacgaagccaaaacgcgcttgatgaaaggcaagcacccaaaaattattacagggctggtcgttacctcgcagggagtgaggatcccgcagaagtacatccggcggttaaacaaagagatctattactgccgaaaatttggtgtgaacggccacctcaaatatcagggtttaatcacaattgctaactacaagggatacttgatcggccttgccaggtttatctatatggttgaccccgttaagggggcaaagtttattaagatgattaaggacctggattgggactga

SEQ ID NO: 10013 - RNA, 1023 nt, synthetic construct
  source 1..1023: mol_type = other RNA
atgttcgacaagatcctggacaacattaagaaaagctctctgctcgagaaagaaaaggaggcttacattcagtatgcacgtaacctgcatctgaaaaattcacccatcatcttcgacataaatcagcttgttatgttgttcgatctcccgaatgacaacataaaggagtttgtcttagagaataccaatcaatacaccatttccaaaagggatggctcatccagggaggtctggaaaccttcttacaaactgaagactatccagcggtggattctgaagaacattctcttcaatatcaaggtgtctgaaagcgcccatgggttcgtgaagaacaagagtattctgacaaatgccgaagtacaccagtacaatgaaccattttgggtgtactcgaccgatatcaaagacttctttccaagtatcaagcagaatgaggtcaagaagattttcctagagattggttacacagagaaagtgagcgaggctcttagctctcttactaccatcaacgaatcattggtgcaaggctttcctacctcacccatgattagcaatatttactgcagagaaatcgatgaagagttcaaaaaacaggcgaacaaactgaatatctcctattccagatatgcagacgatataacttttagtggcccacaaaagaacggctacctgaagctaatcaaaaacatcaagaacatagtcctccacaactttcgcgagaataacttcctgataaacgagaagaagacacgggtgcgcaagaataagcacaccaaaatagtcacgggaattgtggttagccaatatggagtgcgaatccctcagaagtactataggcggttgaacaaagaattgtactactgtcagcgattcggtgtaaacgaacatcttaagtatcacggattaatcacaatctccaattttaagggctatctcatcgggctggccagatttatttatatggttgaccccgataaagggtccgagtatattaaaaaaatccagaagctcgactgggaatga

SEQ ID NO: 10014 - RNA, 1023 nt, synthetic construct
  source 1..1023: mol_type = other RNA
atgattaagcaagtcttgcataatatcgtgctgtcagacctgtcggaggaggaaaagaagttttttatgcagtacgcaaaagacctgcactctaatcactgtcccgtaatatttgacattaatcagattctccgcctattcgaactccccgatgatgatctggagaaatttgtcatcgataacacaaaccattactatgtgtctaaacggaatggggagcccagagaagtttggaagcctaactataagttgaagaccattcaaaagtggatattgaagaacatcctgaacaaaatcgaagtcagtgcttgtgcccatggcttcgtgaaaagcaaatctatcctgacaaatgccgaagtgcaccagcatcaggagcctttctgggttttcagcacggatattaaggacttcttcccgtccattaaatacaaggagatcaagaagatcttcataggtatcggctacagtgacgcggttagtgaagccttctccctactgaccaccgtcaataaagagctcgtgcaaggatttccaacttcacctatgttaagcaacatctttttcagagagatcgatgaagaattccaacagctcgcctcccggtataatatcagatattcccgctacgcagacgacattacatttagcggcgtgcagaagaaaggctaccttaaattggtaaagaagatcaaggagatagtttcatgcgtgcttagcaagtataacctgatcatcaataacaagaagacccgacttatgaaagacaggcacaccaaaattgtgactgggctggtcataacaccacagggggtacgtattccccagaaatacatcaggcggctgaacaaagagatctactattgccagaaatttggtgtgaatgagcacctgaagtatcacggactcattactattgctaactataaaggctacctgatcggacttgctaggtttatatacatggtggaccagtctaaagggattgagttaattaagaagatccaggaactcgattgggattga

SEQ ID NO: 10015 - RNA, 1023 nt, synthetic construct
  source 1..1023: mol_type = other RNA
atgctgaacaaagtaatcaacaatatacggctttcggacattgaagaggtggagaagagagaactgatccattactccgaacagttatactctaagaattgccccataattttcgacgtgaatcagctcctgctgctatttgaaatagagtccgacgacctggagaattttgtgcttaacaacaccctccattatttcgttaaaaagcgcaacggcgaaatgagagaagtgtggaaacctaattataagttgaaggcaatccagaaatggattctgaacaacatcctgtataatatcaaggtcagtccccattcacacggtttcgtgaagaagaagtccattctgactaatgcccaagtccaccttcacgaagaccctttctgggtgtttagcaccgatatcaaagattttttcccgtctatcaaacagaacgagattaagtcaatcttcatggaaattggctattccaagccagtcagcgaagtgttttgtctgttaacaaccgttaatcagaagctggtgcaagggttccccacttctccatacatcagcaatattttcttccggaacatcgatgagaaatttcgcgagatcgagtacaaatactctatacgttacagcagatatgcggatgacatcactttcagcggaatacagaagaagggatatctcacattggtcaacaagcttaagcagatcatttcaaacacactgagtaagtacaacctgacaattaacgagaaaaaaacccgactcatgaaggataaacacaccaaaatagtcacgggcctggtgttgaccagtaaaggtgttagggttcctcaaaaatacatccggaaaattaacaaggagatttactattgcgagcgatttggcgtaaatgagcacctcaaataccatggactcattactagggccaattaccgcgggtatttaatcgggctggctaggtttatctatatggtggacagcatcaagggcgctgagctattgaagaagattgaagacctcgattggaattga

SEQ ID NO: 10016 - RNA, 1023 nt, synthetic construct
  source 1..1023: mol_type = other RNA
atgattaagcaagtgctacacaacattgagctctcagatatctgcgaggaagaaaaaagaaagctcatacactatgctgagcagctgtacagcattcattgtccggtcatctttgatgtagaccagttgctcctgctatttgagattaaggtcgatgagctggaaaagtttgtgacggacaacactaatcattacttcatcagtaaacgcaatgggaaatctagggaagtctggaatcccaactacaaactgaaagcgattcagaagtggatccttaagaacatactgaataacatcgaggtttctaactgctctcacgggttcgtgaaaaataagtccattcttaccaacgcacaggttcatttacaccaagaacccttctgggttttttccacagacatcaaagatttctttcctagcattaagaagaacgagatcaaaaagatcttcatgggaatcggatattctgagagtgtcagtgaggccctgtgtctgctgaccactgccaatgagtcactcgcacaaggctttccaacgtccccagccatttcaaatatcttcttccgaaagattgacgaggaatttcagcaggtggcttccaaattcagcatccgctattcaagatacgccgacgacattacttttagtggcatacagaataacggcagcccctctttggttaaaaagctgaagaggatcattagctataccttgtcccgatacaacctgtacatcaatgaaaccaaaacaaggctcatgaaaaacaaggatacaaaaatcgtgaccggtctggtggtaacatcgcagggagtgagagtgcctcagcggtatatccgtatgatcaataaggaaatctactattgccaaaagttcggggtcaacgaacatcttaagtatcacggtcttattactatagctaactacaagggctacctgataggattggcacggttcatttacatggtggacagcatcaaaggcgccgagttaattaagaaaatacaggacctcgattggaattga

SEQ ID NO: 10017 - RNA, 1023 nt, synthetic construct
  source 1..1023: mol_type = other RNA
atgatcaagcagatcttgcataatataatctcttccaacctgtcgaaggaagataaagaaatacttacgcaatacgccgaaaatctctacctgaaaaacttccccatcatctttgacgttaatcagttctttctgcttttcgagttaacagacaacgatctggagaaatttattatcgacaacacaaaccactaccatattaataagaggaacggtgaactcagagaagtatggcaacctaatcacaaggtgaagataattcaaaagtggatcctgaagaatatcctgaataagatcgaggtaagcccatatgcccatggctttatcaagaacaagtccattttaaccaacgctgaggtgcatctgtaccaagagccattttggatcttttcaaccgatatcaaagatttcttccccagtatcagctacaacgacgtgaaaaaaatattcatggagatcgggtacagtgacaaagtttcagaagctttctcactgctcaccaccgtggatggaaagctgatccagggattcccgactagccctatgctctccaacattttcttgcgagatatcgatgaggaatttcagaaaatcgcggtcagatataatatacgctattctcgttacgccgatgacattacctttagcggcattcagaagaaaggatatctaactctcgtcaagaacatcaagcgcattgtgtctttcattcttgagaaacacgacctggctataaataatgagaaaacgcggctgatgaaggacaaacacactaaaattgtgactggtttgattgttacaagtaagggcgtcaaaatcccccagcggtttataaggaagctttccaaggagatttattactgccagaagttcggggtgaatgatcacctgaagtatcaggggatcattacaatagcaaactataaaggctacctcattgggttggccaggtttatctatatggtggacaaaatccagggcgcaaagttcattaaggaaatttacgacctagactgggattga

SEQ ID NO: 10018 - RNA, 1023 nt, synthetic construct
  source 1..1023: mol_type = other RNA
atgattaatgacatcctaaagaacatcaagttgtctaagctcagcgaagagaatagggccagtctgacacggtacgctatatccattcataacaataactgtcccatactgttcgataagaatcacgttctcttggtgtttaatttagtggaggaagacctgcaaaagttcattaaggagaactcgaacaagtatttcatcaagaaaagaaacgggagcctgagagaggtgtggcagcccagctacaaagtcaaagagatccaaaaatggatctacaaaaacatcctgaacgatattcaggtcagcgaatgcgtccatggcttcgtcaaaaaccgttccattctaactaacgctcagaatcacatacatgaagacaagttttgggtattcagtatggacattaagaacttctttccatctattcgaatcgaacgaatcgaacagatattcctcaaactcgggtactccttggaggtttcaaaagccctgagtctgctgtgtaccgtggacggtaagctggtgcagggatttcctacttccccttctctgagcaacatcattatgcgggagattgatgaagaatttaagaccattgcagacaggtataatcttaagtattctcgctacgccgatgatatcacattttcaggcgatcagaagaaaggctacctgattttggttaagcgcctggagaagatgatctgctttatacttaaaaacgccgacttcgagataaataactccaaaacacgcctcatgaaaaataaacacgcgaaaattgtgaccggattaatcgtagattcagacggagtgaggattccaaaaaaatatatccggaagttgaagaaggagatctactactgcaaaaagttcggagtcaatgagcaccttaaatatatcggtctgatcacgatcgctaattacaaggggtatctgtttggccttgcaagatacatatatatggtggaaaaggagctcggcatcatgttcattaagcagctcaatgatttagagtgggactga

SEQ ID NO: 10019 - RNA, 1038 nt, synthetic construct
  source 1..1038: mol_type = other RNA
atggacaacattgtgtttcagaatattaacaggtccagtcttacggataatgagaagaatcatcttaccattatcgcctcttctctgataattaagggagttcccgttatcttcgacatacatcaagtgcggttgctcttcgggatagatggcgaaattggcatcttcgtgcagaagaattgtgctaagtattccatcctgaagaaaaatagggacgaacgaacaatttaccagccctcttacaaactcaaaaaaattcagcgctggattgtgagcaatatcctttcaaagatcaagatctctaagtcatgtcacgccttcgtgccagagaaaagcatactcaccaatgctaaagcacatgttcacgaagatcctttttggatctacaagacggatatcattaacttctttggggagatcaacttcattacagtgaaggacattttctttagcgtcggctatagtcaagatgtgagcgaaatactgaccagcttgtgcatgtatgacggcgtcctggcccaggggtttcctacctcccccataatttccaacatcgttttatccaacttcgacgaagaactggatgtgatcagccagagatataattttgtctacagtcgttacgctgacgacattaccatctcagggacacagttaagaaacaaggatatagagaagatcaagaacatcatcacttacaaactgcaccacctggggttcgaaatcaacaagaacaagactaagttctttggttttaaggcggataagaaagtcactggtgtcgtaatcaaaaatggccaactgttttgcccgcagaagtacaaaaaactgctaaacaaggagctgtactatattaacaagtatggagtggattcacatctcatccacaatgagaaaacactaatctcgaactacataggatacttgtacggctatgcaggttatatcaaaatgattgagccagacgtaggagacgagtatgtgaaaaaactcaacagcattttctggatctctaattccgagcaggcccctagttga

SEQ ID NO: 10020 - RNA, 930 nt, synthetic construct
  source 1..930: mol_type = other RNA
atgaacttcacaaacacaaagcagattaaatccgtgtttaagatctctcaagacatgaccgtcgagaaattcgtgtctaagaacatcaaccagtactacttcatcaagaagaaatcgaagaatccccgtcagatttacatcccaagcattcagctgaaaactattcagaagtggatcctgaagaagattctgacgaaagaatttagctccagtgaagttgcgcatggctttattagtgggagaagcatagtgacaaatgctagagagcatttgtataaagaaccatcttggatccttacgatggacataaccaatttttttgactccatccgatttgacagtatagaacatctgtttcgccagcacggatataccaaggaggtgtcaaggacctttgccactctttgtacctatcgcggcaagctcgtgcaaggcttccctacttctccttttctagctaatctgtacctcaaatccttcgatgtgtacctgaagtccaaccttcagaaatataacgtaaagtacacacgatacgcagatgatctgacattctcagggaatatagagaaaaactacgagtcattcatcttggagagcgagaggatggtcgagaagggtttaaccaagttgcaactgagggtgaacagcaaaaagacaaatatccagactaaagaacggaaaatcgttactggtatctggctctataagaacaagctgagtgtatcaaacaattacctcaagaaattcagacgggagatttactattgcaagaagtatggcgtgatcgatcacctcattcacaccaacaaagtcgaaattagcaatttccacggatatatgtacggaaaagcctatttcgttaaaatggtcgacgagaatttagggatgaaacttctgaaggaactgaatgatctaaactggcccatgtga

SEQ ID NO: 10021 - RNA, 933 nt, synthetic construct
  source 1..933: mol_type = other RNA
atgaaactgaagaacacaaaccagattaagaagctcttcaaaattaccggcaatgatatctcctcattcgtgactgacaatattgcctcagaattcaagatcaagaagagtaacaaagagcggattatagtcgttcccagcctgcatcttaaaagtatcttcaggtggttattggataacatcttcgaaaaggagttcattcctcacgaatgtgtgcatgggtttgtgaagaataaatccattgtgaccaacgctaaagcacacctctaccactccccaaattgggtctatacgatcgatatcaacaactttttcggtagcataactcgaaatgacgtgttgtcgatctttatcgaaaaaggatggccgacttctgtagctaatgcgttcgcagatctgtgtacatacaaaaacacattaccacaaggattccccacgagcccatgcttggctaatgcatttctcaataagttcgacactcacatccacgatttttgcaagacctatggcattcgctatacaaggtacgccgacgatctaaccttctcttccaccgactttgtctctgtgaaaaagatcaacgaggaggtttcatgtactctgaaaaagcaaaacctgttccttaatcctaagaaagagcatctgcagaaagggaagcacaagaagataaccggcattaacatcaatggccataagctggtaagttctagacgctttagaaagaagttcgacaatgagatctttttctgcaagaaatacggcatcatggaccatctggccagaaccgggacacttacacggagcaactttaaatcctacatgtatggtaaagcctgctttattaacatgattgaccaggatctaggacagcagtattttcgtaagctgcagcacctcaattggcccgaaatacctaataacgcctacttttga

SEQ ID NO: 10022 - RNA, 1020 nt, synthetic construct
  source 1..1020: mol_type = other RNA
atgctggaaacaatccttaacaacattaatcttggcaacatagacaaggagaataagaacatactgatcgagaactcaaagtacctgtattcaaagggccttccaatcttcttggacgagcgccacgtgtctcttgtattcaacatcgagggaaacatcaaatctttcgtggagaatagtactagccaccatatcattaaaaagcacaatggggattcgcgggatgtcttcgtgccgtcagaacatctgaaagaaattcagaattggttgctggtgaacattctcgagaaaaagatgatcagcaatagtacttacagttttgtcaagggcaagtccattattgatcatgcgctgaatcacatctatctgaaggacttttggttagttacgttcgatgtcaaagatttcttccctagcatcaggaaagacgctataaaaaacatcttctttgagctcgggtatacctccgacattagcgacaccctaagctccttctgttccattaaaaataatctggtgcaaggctttcccacctcacctatcattagcaacatctatttgaacgaactcgattctgttctgcaggaattttgccagagtcacaatataacctattctagatacgccgacgatctggccttttccggagaaggggaaaagatccaaaaatctctatacgacaagttataccagctcgttgtaaatacgcttgccatctatgaactcaagctcaacaaaaacaagatcaagatttacgactacaaccatcccaaaaaactgacaggcataatgctgaccacaaatggcattagggtgcccttgaagattaagaaaaagatactcaaggagatctactactgcgagaagtacggagtggaggaccacttaaagaaaactgggcgtctggagttggcaaattacaaaggatatatctatgggatagctggttttatcagaatggtcgaaccagagacaggtattcagctgtttcgacggctggataacatttattggggttga

SEQ ID NO: 10023 - RNA, 936 nt, synthetic construct
  source 1..936: mol_type = other RNA
atgaactcaattctggtgagtgagcagcagattaaactgctgttcaaaatagccatgacagaagacgtcatagatttcgttaaggataataacctcgtgtactccaaatgcaaatataatggcgaaactcgatttataagctctccatccgagcacttgaaaatcatccagaggtggatcgtggacaatatactcgtgcagaaaagcatctcagacgtggcccacgcgtatgtgagggagaagtccatattcaccaatgccagagttcatgtgggcaacaaggcaatcctgaagatggacatttcaaacttcttcgattcaatccccattacaaaagtgaaggagatctttctaagcctgggatataattctgccgtatcccaggtctttgctgaactctgcaccaataatgggtacgtgcggcagggctttgtcacaagtcctttcatcagtaacataatcttgaaggactttgatgacaagttgatcaacacacttaaaaagtcctgttattccaagtatgagttcaaatacacgcgctatgctgacgatattactatcagtagcaagtacaaggttaaaagcaagctcaaagagatcgagcaagaagtgatggatatcttagaagtatctggttttagcgcaaatctcggaaaaacccgtttaattatcggggaaagcccgaaaaagatcactggcatcattgttaaagagtcgtcaattagtgtacccaacagatttaagaaggaactgcttaaggagctgtattactgtcggaagttcggtgtcattagccacctgatctacaccgggaactacggcaagctgaattacattgaacatctgaaaggactagctatgtttattaagaacaccgaccagaagttctacgagtctgtcatttctcaaatttccgagctggatcttaactcttga

SEQ ID NO: 10024 - RNA, 936 nt, synthetic construct
  source 1..936: mol_type = other RNA
atgattcccaaattgatatcagtgcagcaactgaaaaagctattcaagattgagcttacctctaatatcgaggattttgtggagaataacaatcaggtctatccccgtatcaagaagaacggcgaaatcagattcatttcctctcctaccatccacctcaaaagcattcagaaatggatcgtagagcatatactttccaagaaggactgctccgaattctgtcacgcctacgtgaaggagaagagtatttttacaaacgccggcacgcatattggcaaccagaatctactcaagatggacatacataacttttttgacagcatcccacacattagcgtgaaaaatatcttcattaccatggggtacaacttggaggtgagtcactctctggccctgctttgcacttataagggctacgtaaggcaaggatttgttagctcaccgatgatcagcaacattatcatgaaagagttcgatgactggataataaaatcactgcacgaagaggaatacctgaagttcgattttaagtacagcaggtatgcagacgatattgctatcagttctaagaagaaggcggtcgcccccttagtgattatcaaggaaaacatttccgattacctcgagaaatatgggttcatcgtcaataatgataagatcaaactgatcaagggaaaaggtcctaaattgatcacaggtatcgttgtcaaggacaactcgatttcagttccaaacaaatacaagcgcaaactgctgaaagaactgtactattgtgagaagtatggcgtggaatcccatctgttatacacaggacagtacgggaaaactaactataaagaatatctcctcgggatcgcaatgtacataaagaatactgacaaccagttctacaataccatccgggagcgaatagatgctctgaatattgactattga

SEQ ID NO: 10025 - RNA, 1011 nt, synthetic construct
  source 1..1011: mol_type = other RNA
atgttggtttttcagcgaccttcatccaagagaatggccttttgtgtaggtgggttcatcgtgaaagtgtctagaagcataagtgtgaagcaagtctctgaggctttcgggataaacgaaaatatagatgagtttgtggacaattcctcatggttctacccaattgagaaaaaaaatggtgacatccggtacatttttattgccaacaatcagctcaaagctattcagtcgtggattctcgagaacattcttgaggacgtaaaaataagcgacgcagcaaacgcgtatgtgtccaaaaagtccatctttactaacgcccagtgccatgtcggctacaagggcatgatcaagctggacatcatgaatttcttcgatgcaatcaaccgagatgacattagcaaaatctttgaaaaccttggcttcagcaaagatgtcgctatgctctttgggaagttgtgctcaaacaagaatattctgaaccagggcttttccacaagcccgatgctgagcaatatcttcttctataagtacgacaagcttattgaaaagatcttaaacgagaagtacggaaaaaacacttttgtgtataccaggtatagtgatgatattaccatcagtacgtctaaaacgtttactttcgacgacttgatgaaactgtccagcgagatagaaaacctgctgctacccaagtttaagatcaacaagatgaagaagaagatcattctgggaaagtaccccgctaaggtcacaggaatcaatgttttcaaggagtatatgtcagtgtctaagaaaatccgccgcagaattaaacgtgaaatccactattgtgagaaattcggggtttctggacatctaaaatacgtcggcgagtataataggcaaaatttcttcgggtacctccgcggtaccgcccactttataggcaatacagacaagaaactggccctgaagttactggaacggatcgatatgctggaattccgggatagggtgacccagaaaaaactctga

SEQ ID NO: 10026 - RNA, 993 nt, synthetic construct
  source 1..993: mol_type = other RNA
atggcaaattcttatattaaacgccttgaagccgcgatgacagaacagggggcagaaaatgaggccatctcgcgcgccgtcgactatgcttttaacctcctgaaccagaatttgcccgttctgttcgatgacattcacgtcgctgaggtcttactcctgagtcgactcagtctctactcatatcacacctttccagttagccagatcgataagactagaattataactgctcccagtcttaacctaaaacagcggcagaagtggatattgtccgaaatcctgaacaaaattcccagcagcgagcatgcccacggtttcgagagcggccactctattaagaccaacgcccttatccatgctaacaatgactacgtgttttgcatggacataaaagattttttcccgtcaattagtcgccagagcgtatgcgaaattttcaggaatgtgggctacagccctaaagcctctgacatgctgtccaaggtgtgctgttataacaattgtctgccccaaggagccccaacatcccctaagctctctaacattttcttcgcaaagattgacgcggagttggctaacttagccaagctcaacaatgcaatctactccaggtacgcggatgatatgaccttttcatcaaaacacgacatccctgctctgcacaaggcagtggaggaaatcatcggaaaatacaatttcacgctaaaccacaagaaaacaagagtcttttacccagggcaaccgaaaagaatcaccggcctgatcgtgcagaacggttgtattcgtgtacctaagcattttaagcggcgactgcggcaagagatacattattgtaggcagtatggagtgactgttcatctggaaaatacaaatgcctcccattgcatcaattatagggagcacctgtacgggaaggcctacttcgtgcacatgatcgagccagataccggcgataagctgttgaacatgcttgacgagatcgactggatgtga

SEQ ID NO: 10027 - RNA, 1008 nt, synthetic construct
  source 1..1008: mol_type = other RNA
atggactatgtttatatcaccaatcttatgcacggcttattccagaagggttatgacgataagttcgtcatacgatgttgtaaatacgcggaaaagttaatgcgcaagaacctgcccgtgtttttcgacgaggagcatatatacgaggtactaaggacccgcggcatttctctggaggactcctatcacacatttgatctgatccatgacaacaaggtccgcacaattctggctccttccaagaagctgaaggcgcggcagagatggatcttggacaatatcctcaataacatcaaggtcagtaagtacgcccacggatttgagctgaatcggagcattaaaactcacgctcagctgcacgctaaccacgattttgtgatttgtatggacatcaaggactttttcccaagcatctctgaggaaaaagtctttaccctgtttaagcagatcggctatactactagagcctcacaagagctaactcgtctctgttgcttcaaaggggcattgccacagggagcccctacctcgcccaaaatagccaatataatctgcaagaggatggatcgagagatacaaagattcgccaaagagaacgggattacatactccaggtacgcagacgatctgacatttagctccaactcagagatgccacaactgatccctgagattacagctatcgtgaacaagtacgatttcagtatcaacactgagaagacccagtcttttgtttgcggcgaaccgaaattcattacgggattggtggttcagaacggcaccgtgagggtccccaaacggtacaaacgggaactcaagaaagaaattcattactgccagaagttcggggtgcttattcacctggaaaatagcaatgccacgcatttcgtgaattacagagagcatctctatgggaaagcatattacgtacacatgattgaacctgatatcggtgaaaaattcctcgatgaacttgacaaaatctcatggcccgaatatatggtgtga

SEQ ID NO: 10028 - RNA, 1056 nt, synthetic construct
  source 1..1056: mol_type = other RNA
atggaacagaacgtgaaagacatgtacatagaaaggctctgtcacaccctcaacgactcaaaactgtccgatatgcacaagaacaagataatttcatacgctcagcagcttctggacaaaaatatgcccgtactttatgacaagaagcacatcgcgatgatttttgacctacggaacattcgactgatcagctccaactataacaaattctacatcgacgagaagcacaagaagcgcttaatcgaggctccttcgaagaaactcaaaagtatccagaagtggatcctcaacaatatcttagagcaactggataccagcgagtatgcctacggctttagaaaaggtagaagcatcttgcagaatgcgctttgccatttgggcaagaaaaatgttctctgtctggatattaaggattttttcggttctatcgacgaaaaaacagtcttctggctcttccggaacatagggtttactagcgaggccagtaagaccctgaaaaaactatgttgctataaaaaggcccttcctcaaggcgcacccacgagtccgtgcattgctaacatcgtgtgcattaacatggataagaagctggcacagttagctaaaaagtataatgccgtgtatagcaggtacgcagatgatatcacattttcctctgacgaggacattagcttcctgaataaggaggttgagaagattatacggaagtacaacttttttctgaacgacaaaacaaagtactacagtggcgatcatccaaagttcataactggactggtcgttcacaaagacaaaattagggtgcctaaaaagatcaagagagaattgtcaaaggaaatccatttctgtcgaaaattcggagtggatatgcatctgaataactctggggccgaaaaacgcgtaaattaccgtgagtatttgtacgggaaggcatactatattaagatggtcgagcacgaaactggagagaaattcctgggcatgctgaatatgatcgattggccagattgggccctggggtcctccaatacctctgacaatgaatcagtgctctga

SEQ ID NO: 10029 - RNA, 1005 nt, synthetic construct
  source 1..1005: mol_type = other RNA
atggagcccaacgactacgtgaacagactgaggcatgccatggaaataagtgaaaatccaaggttcagccccgagtacattgcccagtgctgcacatatgccgagaatctcctgaagcagggactgccagtgctttttgaccaaactcacatacgtaaagtcctcggtatggccgcgcctcggctctgtgactaccataggtttacgatcccaaagcataatggttcccggatcatcacagctccgtctcgcaagttaaaacttcgacagcaatggatttaccaaaatatccttatccgaaaggaagcatctccatatacgcacggatttgtgccagagcgaagcattgtgacaaacgccatcctgcatataggttacgcctatacctattgcgtggacatcacagacttctttccgagtatcaccaaaaaacaggtcctgcccattttccgcaatatggggtatagcgggtccgcggccaacactctgtgtgatctctgctgctgtgatggagtactgcctcagggagctcctacctctccctacttgtcaaatatgatatgtagggacttggacgatgagctgggcgccatggcaagaagatttagaggcattttcactcgctacgcagatgatatcgctatctccgctaaccagcagcagcctcaattgctagatgctctggggctaattctcggcaaacacgggttcagcatgaacttggataaatgccggatttacaatcctggacagcccaaacggattactggcctcaccgttcacaacagagtgtcagtgccaaaggcattcaagaggaagctgcggcaggaaatccactattgtcagaagtttggcgtcaccgcccaccttgagaacaccaaggctgcacgctccattcattatcgtgagcacttatatgggaaggcctactacgttaagatggttgagcccgaactgggcgcgcacttcttagacgaactgtcgaaagtagactggcctgagtga

SEQ ID NO: 10030 - RNA, 1275 nt, synthetic construct
  source 1..1275: mol_type = other RNA
atgggaaagtacaagtatattgatcggctaagacaggccatgggcggcaaatattctgaagagtacattaactactgcgcagaatatgccgccaagctgcttgacaagaatctgcctgtcatctatgacgctcgccacgtggacgagatactccgtctgcacgggatcaagcccgattgttatcatatctttgtaattgccgggaagaataaagagagaaaaatcactgctccgtccagagaaattaagcaacgccagcagtggatactggaagagatcttggagaagcaggacgtgtccgacaactgtcatggatttgtcaagaagaggtcgattttaacaaatgccaaaatgcacatgggccataaaaacatactcaacttggacattcggaatttcttcccatctattacagagactatggtgatattccaatttcagcagatgggctatagcaagtccgcggcggaagcattagcaggcgtttgctgttatgagggaaaactgccccaaggggccccaacctcaccctatatgtccaacctaattctcaagaagatggatcaggaccttgaaaatttctgccagaagaagggaattacatatacacgctacgcagatgacatgagcttttctagtaacgaggaaatcgaaggatttttcaaggacatcaaattcatcataggtaagtactcattcgagatcaacgagaaaaagacctgctactaccaggatccataccgcaaaatcgtaacaggcctgttggtcaaggagaacgaggtttgcattcccaaaaagttcaaaagaaagttcagacaggaaatctactactgtaggcaccttggggtgcagcggcacctcgagaatacgggtaaccaggaacggactggctttagggaatacatgtacgggaaagcctacttcatcgcgatggtcgaacctgaggccggtaaaaaatatctcgaggctaatacctttgatacctttaaagtggaacctagtctgatgacggtctttgaacaaagtcatacctgggatgagctcatctgtcacttcgtggacagctacgtggtggagactgacaaaaaggctgtgagcgccttctatgatcgaggttatatcgctgagaaactgaaaggcctggagactgaattggctctggaatgcaggataacccttaacggggaggagaggtggattcgtaatgttatcattcggggagagatcgaggattcagagtacgcaatgatttttctgcgagatgaaaagacctga

SEQ ID NO: 10031 - RNA, 996 nt, synthetic construct
  source 1..996: mol_type = other RNA
atggacaagaaggcctatattgttagactggagaatgccatgaaagggacatactccaaagaatatatcgacgtgtgcacgaagtacgcaagctcccttttggataaggatctgccagtcatatttgatgagacacacctttatgagatcctccagctctacgctataaagccagacgtataccggaagtttcatattctcggcaaacgcggaaaactgaggaccatttgcgcaccttcgcgatctctgaagctccggcagcgttggatcctggacaacattctcgaaaaaatccctgtctcagagtgttgtgaaggtttccgcaaggatcacagcatatacactaacgccaagaagcatattggctacgaacagatgttgaatatagatatcaaggacttcttcccatctatcgccgagaagaccgtgattgaaatcttccacgagattgggtacagtagagcagccgcggatgagttgggtgctatttgttgccacgacggctgcttacctcaaggcgcacccacctccccctatctagctaatttagcttgtcgagaaatggatcgggagcttcttgaattcgcccagaaccataagttgatatataccaggtatgcagacgacatgacgttttctggcaacgtagaaatggataaactgatcaaagggatcgtgcagatcgtctatgcccacggctttatggtgaacactcgcaagacacgcatctcaactggtaatcagagaaggctggtgactggaatcattgtgaagaaggacggactggctgttccgcggaactacaaaaggaaactgagacaggaaatccattactgcaaacaatttggagttgctaaccacctcgagaatacaagcagtgagagaaaagcgaatttcagggagtacctgtatgggaaagcctattacatcaagatgattgaacccaaaaccggggagcaatttctacgtgagctggacgagattcagtggcagtga

SEQ ID NO: 10032 - RNA, 1062 nt, synthetic construct
  source 1..1062: mol_type = other RNA
atggacgagtatattgtgaacctcaagaaggagctgatcaagaaggagaaatctatagagtacatagaccgatgctgtaaatacgcaaagaaactgctggacaacgggaagccaattatattcgatgccacccacgtcaaaatcatccttaagatggaagggatcaagaggaacgggtatcattactttaatgccggcaatatttacaaacagagattaatcgaagccccctctgtgaatctgaaagctagacagcggtggatcgcaaagaatattttagagaacgagcccctgggcgattggattcatggatacgtcaagggcaagagcataatcaccaatgccctggtgcacgccggaaaaaaaaggatcctccatatggacattaagaactttttccaatccatcacagacgagatggtggagaatgagttcgctaaaatgggatacagtgagtcagctgcgaaggaactgactagtatttgtactttctccgccgaaatggtctactggcaagaagtagaaaaactggaggatattagctcatcccagaaatatcttcctcacggtgcgccgtcaagtccatggttgtctaacctcgttttccagaacatcgacttgcagatcttggacattctcaaaaacaagaacatccaatacacacgatatgctgatgacctgatgtttagctccaattcggataagctagtgtggcttaaggatgagatcgaaaagctcgtgtctaagaatggtttcgccattaacgtaggtaagacgaagctgttcgaagaaaaagaccagaagctaatcatgggcctgaacctcaccaacgggataaagattcagaattcctacaaacgcaaactgcggcaggagatctattattgcaagaagtatggcatagagaatcacctgcaaaaagttggagcaagcaatcgcagcaattttgtggcatatatctacgggaaggtttattttgtcaaaatggtggagcctgaattgggcaaagaattactcgaaaaccttgatcagattttccaggaggagcccctgttttactga

SEQ ID NO: 10033 - RNA, 1056 nt, synthetic construct
  source 1..1056: mol_type = other RNA
atgaacgaatatatcatccgtctggaagaagagttacgtaaaaacaacaaggaagaggcttttataactgcatgctgcacttatgcccgaaaacttctagaaaagaataagcctgttctgtttgacgctgaccacgtggataaagtcctgcgaatggagggaatcaaacgcgatggttaccatacatttaatgccggaacaagaaagaaagctagaattatcgaagccccatcagtgtccattaagaaaaggcagaggtggatagtaaagaatatactggagggcgaagaactggggggctggatccatggttatgttaaaggcagaagtatcgtctcgaacgctaaggttcacgctggcaaaaagcggatcttacggctggacatcaagaatttctttccctctatcaccaaaggcatggtggagaaaattttcagcgccatggggtacagtcccagtgcagccggagagctggcagcaatttgtactttcagctctgatatgttgtaccaggtgaaggggaggaccgaagaagaggaggcgtccgaggagtaccggtatctgccacacggtgcccccagctccccttatctcgcgaatcttatcttccagaatacggaccttgaaattctggagtctctacagggcagagagattagatattctaggtatgccgacgatatgtttttctcatccgacacagaagagttgcagcagctggatgaagagatagaagggattctgagcaagcatggcttccgactcaataaaaacaagaccaaacttatggctgagaaggatcaaaagctcgtcatgggtttgaacatcaccaacggaattcgcgtgcagaactcatacaagcgcaaactgcgccaggagatttactactgtaataaatacggcatccaagaccacctggagcggacagggaataagggcaagagcaacttcatggggtacttgtatggaaaggcatactttgtgaacatggtagagccggccgagggaaagcggctcctcgaagagttagacaggctcttcgccgatgagcaatga

SEQ ID NO: 10034 - RNA, 996 nt, synthetic construct
  source 1..996: mol_type = other RNA
atgtacaattatgaatacacaatcaggctttgcgagactctgaaaagcctgagcgccgatgacgtgtacatatcaaagtgttgcaattatgctgaaggtcttctggacaaagaactgcccgtaattttcgatcccacccacctgaaacagatcctacgattggacgatatctccctggatgaatatcacatcttctacatcgataagaagaacggcggcagtagagaaatcaacgcaccatctgaggaactaaagaaacgacagcggtggattctgaagaacatcttggagaagatctctattagccacaatgtacatggattcataaaaggcaaatccatcgtcagcaacgcaagaaaacatttgaacaaggagtacgtcctcaacatagatatcaaggacttctttcccagcgttaccaaatactccgtggagaagatttttaggcggatgggctattgtaactctgttgctcagctgctcgccagagtctgttgttatcgcggagggctcccacaaggagcacctacatccccgtatctcgccaatttagcctttgacgaggtggatcaggagattatcaatgtggttcggaatcgcgacattacatatacaagatatgcggacgatatgactttctcagctaactatgacttatctacgttcaagaaagaagtgtacaagagtttggggaagtaccgcttttcgcctaacattatgaagacccatcaaatgtccggggaaaaaaggaagctggtcactggccttattgtggatgataaagtgaaagtctgcaagaagtacaagaggaaactgcgtcaggaaatttattattgcaagaagtttggggtgaccaatcacctgcggaattgccactcagagaaaagtattaactacaaggagtacctctacggaaaggcttactttataaaaatggtggaggagatcgttggtgagaaattcctcgccgaccttgactcaatcgactggtactga

SEQ ID NO: 10035 - RNA, 987 nt, synthetic construct
  source 1..987: mol_type = other RNA
atggagaacaattatatctaccgtctgaagattaacatgtttgagcaaggctttagcacctcctacattgataagtgctgttcttatgctacactcctgatttcacagtcacttcctgtgatttttgataagaaccacctggatcagatattgatgctggacactctgaaactggattgttaccacgaattcgagatttataccaaggggaagtccagaatcatactagcacccagtaaacctctgaagagcagacaaaggtggatactcgacgaaatcctgaacaaactaccaactaaccagtgttgccacggattcgtccagcagcatagcatcaagacaaatgcagaaatgcatgtgaataaagctcaggtactctgcatggacatccacaatttctttccgagcattaacatagaccaagtcttcgaagtgttccatcgggtcgggtatacctccgacgtggcccaagccctggctcagttgtgcacacataatgggattcttccccagggcgcgccaagtagcccagatcttgccaacatcattttcaatcccattgatcagcagatcctcaactcaatctccacaaaagacataacgtatactcgctacgccgatgatttgatcttttcttcttctcacgagatcgacttcttaatccccctgatcagtgagattatctccacgaatggcttcaaaatcaataacgataagacccacctgatgaagaatccttacaggaagatgattacaggattaattgtgaccgacactgttaaagtgccaaaatactacaagcggaaatttaatcaggagctcttttattgcgagaaatacggagtagcctcgcatcttaagaactgtaggacccacaagaaggttaacttcaaggagtatatgtatggtaaagcctactacatcaaaatgatagagcctgacctgggtgaagaatacctccgacgcttggacgcaatcagatggtga

SEQ ID NO: 10036 - RNA, 1182 nt, synthetic construct
  source 1..1182: mol_type = other RNA
atgctcaaagctaacgaactgattatcctgtcctacattaacaagtttcagaggatcgatctctatgagattcagaaaactattaacgagcccctggtgcagttaatggattccatctacaggctctacgaaaataaatacatcgtcaacgacggcatagataaattttctgttacagagaaagccaaagaagagaatattggaagctggaatatctggactctgaagtataaggagaaaaacatcaacaacaacgtgttcaagtacaacaaaaagtatacgggtgaattttgtgacaatggagtccccaagatctcgtctgtgcatcaaataaatgacatccttgaactcaaccacattgacattgagtcatatcacggattcgttttgagctacggcgggaagaacagaatgatcctggcgccagggttaaatctgaaggagaggcagaaatggatcctgcataacatacttgaaaagattcctgtggaagactgcgctcatggcttcgtgaagggacgttctataaagactaatgcagaagtgcacgttaataagaaagagatcgtgtgtctcgatatcaaggactttttcccgtcaattaagagagtgcaggttgagaatgtgtttttggaactgaactatagcgaagaggtagccaagaaaatatcttccctagtcacctacaatgatgagcttccccaaggggcacctaccagcccatatcttagcaatctcgtattccgcaatgtggatatggggctgaaaaaattagccaaagagaatgatttggagtatacacgatacgcggacgacataaccttcagtgctaatcatagtattgacaacatcatcaaggaggccgaagagattatcgaacgcgcaggttttatcgtgaatgaggataagacacacatcatgaaggataactatcggaaaatggttaccggactagtcgtcaatcacaaagtacggatacctagtgcttataagaagaagttccggcaggaaatctactattgcaagaaatacggggtgtcacagcacctgcgagcaattggtagagaaaacgccgtcaactttcaggagtacatgtacggcaaggcctactatatcaaaatgattgagaaggagctgggcgagaagctcctgttgcaactggactccattttcggcgtctga

SEQ ID NO: 10037 - RNA, 1125 nt, synthetic construct
  source 1..1125: mol_type = other RNA
atgaggaaagaagtccagaaggctctggaggattacatcagttattttgggattcaaaaggcaaaagagcaactcaaatcatataagaagcattccgagaagtataacaaaaagggttacgttttcttcgacgaaaatcactttgacaagatagtggagagtaatacgcagatcggggtttaccaggttgactactattacgacgtctacaaaataccaaaaaagcggggtggatacagagagattgcttctccatctctggaattgaaaagcattcaggagtttattaacgagaacattctgctctatggcgacgtttctgattattgccacggatttgtcaaggaacgctcaatcgtgacaaacgcccttaaccattgcaacaaagaacttgtaatctgcatggatattaaggacttcttcaaatccatcaagatcgaggatattatatctgtcttctccaacatgggctacaataaagaaattagcaatgcactgggcatgtggtgttcatttaaaggggccctagtagccggtagcccttcgtcacctgccctgtccaatctagtgttcagcaagctggacgagatcatcaatgacatttccatcaagtacaaattcatctactctcggtatgcggatgatatggtgtttagcaccaataaaaagaacgctaactacaaccagttaatcgaggaggtggagaagtgcgtgaacaacttcaattttagtataaacgctgagaagacaaagatttatcccaaatgtggaaaacaggaagtgaccggcttgattgtcaacaatactgtgaaagtgaagtccaaaattaagaaggaagtgctcactcacatatactattgtgaaaagtttggcttcgaaaatcacttaagcaggtatgataaggagtatatcctgaagaacagtatcgagcagatcaagatcaaacgacatttcatcaattacatccgcggaaagattaatttcatcaagatggtcgagccccttaatggcgggaatgtagagaagagatacctggaagtgtttgccgaagaagaggcaaaactcaaattggaggagaaaccgatagaaattggatttgaagagctggacgatatctacatatga

SEQ ID NO: 10038 - RNA, 999 nt, synthetic construct
  source 1..999: mol_type = other RNA
atgagcaataacctttccaaacacaatgagaagaatgactacgaaaagaaaatcaagtcatactcccagaagatccatgagaatggggttcccttgatttttgattccgagcaccttcgtcggataattggcgtgaacaagaagagcttcttagagattattaactctatcgacatccagtatcatacaatctatgtgcctaagaaaagagaagggttcagagagataaacaaaccaagcattaacctgatgataatccaacgatggatcctcgaaaatatcctctacaagaagaaggtgcataacaacagctttggattcgagcctaaaaaaagtgtgatcagcaatgctaaggaacacctcaataaaaaaaccgtgctgtctgtcgacattgaggatttctttcactccatcaaggaggactatatcaagaagatttttctagacatgggttataccaagaaactgtccgaactattggccaaaatctgttgctttaatggcatgctgccacagggttcaccctcaagcccgtacttgtcaaacatttactgtattgagctcgacaaagacatttacaagctctgccagaactacgatctgaagtactcccgctacgcagatgatatcacgataagtagcaataaccacattaattctgaggaagtgataaccaacctgattaaaatcttcaacaagtacggattcgagatgaattcttctaaaactcgcgtctcgctcaaagggaatagacaaattgtcacaggaattctggtgaacgacaagctgaatgttagtaagaaataccggaatgacttacgacaggaaatctattatcttaacaagtatggccttgaaaaccatctggataaacgggatgatataatgaggaggagtaactataaagagtatatctatggcaaggtaaactacttgaagctgtttgacatcgagaaagccaataactactatgaagtactgaataggatcgattggtga

SEQ ID NO: 10039 - RNA, 990 nt, synthetic construct
  source 1..990: mol_type = other RNA
atggagatctcagcccacccacaggcgttgtccaagctgaaaaacctcgggctcccagctgtgtcaaacttgaatgaattatcgtcacagatgcgtctgtcttctggtcttttacagcaactcatttacaagtccgatgaccactaccacgtttactatcttgacaaaaaatctggaggaaagcgggaaatagcacagcctagccgcgctatgaaggcagtccaatcatggattctgcgcaaaatactctataggctgagctccagtggcaatagtaagggcttcgagattggcgaaagcatactaagcaatgccaaaccccatgtcggtgcacatgtgctgctaaacatcgaccttgaggatttttttcattccgtgccggccagcaacgtgtattccatttttcattcgatcggatacaacaagaacatcagctatatcttgacatccctgtgtaccttcaatgggagactgccccaaggggcccctacttcccctaagctgagtaatcttgcgtgtcagcgactggactctaggattcagggttattctgggcccaagggaattatgtacaccaggtatgccgatgatatcactctgtcagccagaaatgaagctaagatacgcaaagctcagcctatgattgaggagataatccaggatgaggggttcatcatcaaccacaaaaagacaaaaatctgcggtactaggaagcgaaaggaggtgacgggcctggtcatcagtcccaattctgtgggcatcggcagaagcgagtatagacggattcgggcagaagtatacagcatgctcacatctgacaattcaaagctgccaaccatcaatgggcggattgcccatattaaatccgttgacaaaaacaactacgagaagattaccaagtacatcctcagcttgaaaaaaaagcacccagaaaacgatctcttcaacctgatagtttgcatcaagggccacattagtcagggagtatga

SEQ ID NO: 10040 - RNA, 984 nt, synthetic construct
  source 1..984: mol_type = other RNA
atgaccacccttcaggatagcaaaaacctctctaggctcaaaaatctgggtttgcctccagttacgaatctggacgaactgagcagtcaaatgaggctctcaacagggctagtgcagcagcttgtttataagagcgatgatcactacaaggtctaccacctggacaaaaagactggcgggaaaagagagattgcccaaccttccagagctatgaaggccgcccagtcgtggatcttgcggaatgtgctgagtcgccttaattcttcacagaactccaaaggttttgaaataggcgagagtattctgagcaatgccgcaccacatgtcggcgctcacgtgctgttgaacattgacctagaggatttcttccattctgttccagcctctcacgtgtatagcatttttcacagcatcggatacaacaagtcaatctcccatatattcacatgcttatgcacctttaatggccggttaccgcaaggagcacccacgtccccgaaattatccaatttggcctgtcagcgtctggacagtcgaattcagggatactctggccccaagggaattatgtataccagatatgcggatgatatcactctgtcagcatttaacgaggcaaagattagaaaggctcagccaatgatcgaagaaattctccaagatgaggggttcatactgaaccctcgcaaaactaagatctgtggaacacgaaagcggaaagaggtaactgggcttgtgataagcacagactctgtaggcattgggaggaagaaatacaggcagatgcgggcggagatctacacaatgctgaagtccgacaccagtaaactcgctcaggtgaacggttggctggcctatatcaagtccgtcgacgaatcgaatttcaaccgcctcattaaatacatcatcgccctgaagaacacctttcctaacaatgacatctttgactcaatccccttcatcaaagctactagccccaagtga

SEQ ID NO: 10041 - RNA, 999 nt, synthetic construct
  source 1..999: mol_type = other RNA
atgacccagtattccaatattaacaatctgagcagactcaagaacttgggcctgcccccgataggggatctcaacgagttaagtaaccagatgcggctatcatctggtctgattcagaaattggcctatctgtccgacgagcactacaaggtatactacctaaagaagaaatcaggtgggcagagggagattgcccaacccagccgcgctatgaaggctgtgcaatcctggatcttacgcaagattctctatagattgagctcttctcagaatgcaaaaggctttgagattggagagagcatcctttccaatgccactccacacatcggcgctcatgtgctgcttaacatcgacctcgaagattttttcaacaccattccagcatcgcatgtttactcaatttttcacagtataggctacaacaagactatctccaatatcttcacgcgtctgtgtacctttaaagggtatcttcctcaaggagcacctacatcaccaaaattgtccaatctggcttgccagcggctggacagccgcattcagggatacagtggacccaagggcatcatgtacactcgatacgccgatgacatcacactgtctgcgtttaatgagacgaaaattcgaaaagcgaaacccataatcgaagaaatcttaaaggatgaaggattcttcatcaacgactctaaaactaagatatgcggcacacggaagagaaaagaagtgaccgggcttgtgatttcaattgatggagtggggatcggccgtcgcaaatataggcagattagggccatgatatatacaatgctgaagtccgacggtagtaagatcgagcaggttaatggctggctggcctacatcaagtctgtcgacgagaagaattatttccggctggtcaaatatatcctcaccctggagaagaacttccctgaaaacaagatttttgagagcataagtagcatcagggaaaaaagagtcgataaggggaactacctctga

SEQ ID NO: 10042 - RNA, 975 nt, synthetic construct
  source 1..975: mol_type = other RNA
atgccaaaccaccagattgtaacttcactttcacggcttaagaatctcggcctgccgcctgtgaccaatctgaaagagctagctagtcagatgcgattgagtagcggcctcctgcaacagctggtgtataagagcgatgaacattataaggtttactacctagacaagaagagcggcgggaagagggagattgcgcagcctagcaggtctatgaaggccgtccaagcttggatccttcgcaaaattctgtacagactgttttccagccagaatagcaaagggtttgaaactggtgagagcatcctgaacaacgccacaccacatatcggcgcacacgtcctgttaaacatcgacttagaggattttttccactctatcccagcaagccacatttattccatttacctgtccatcggatataataagaagatctccaacatcttgacttccctctgtaccttcaaaggtaggcttccacaaggagcccccacatcacctaaactgtctaatttggtgtgccaccgattggatgcacgcattcagggatacagtgggcccaaaggaatcatctacacaagatatgccgacgatatcacactcagtgccttcaacgagagtaaaattagaaaggctcatccgataatcagatctatattggtggacgaaggctttaccgttaatcagtctaagactaagatctgcggtacacggaaaaggaaggaagtcaccggcctgataatttctaaagactcagtgggaatagggcggaagaaatatcgtgaaatgcgctcggagatttacaccatgctccagacagatccctcaaagctgcctaaaatcaatgggtggctgtcctatattaaatccgtggatacgactaactacaaccggcttattaagtacattaccaaactcaagacgacctttcccgacaatctcctgttcgagaaaatcttattcatacagaagaagtga

SEQ ID NO: 10043 - RNA, 972 nt, synthetic construct
  source 1..972: mol_type = other RNA
atgggctctcagtataccaataatctgtcccagctgaaaaacttaggcctcccggctattactaacctggccgagcttgccagtcaaatgagattgagcgtggggttagtgcaaactctggttttcaaatctaacgaacactaccgcgtgtatttcctagacaaaaagagtggaggggaaagagagatagctcagccttctcgggcgatgaaggcagctcagagctggatcctaagaaagatcttgtaccggctcaattcaagccagaacagcaaaggctttgagataggggagtccattctctctaacgccgcaccacatatcggggctcatattctcctgaacatcgatctcgaggatttcttccacagtgttcccgcttcacacgtgtattcaatctttcactcaatcggctacaacaaattgattagtcagaagctgacgagcctgtgcatatttaaaggtcgactgccccagggtgcgccaacctctcctaagctgtcaaatcttgcatgtcagaggctggacagccgcattcaaggttacgccggatccaaagggattatgtatacacgatatgccgacgatatcacactcagtgccttcaacgagagcaagattaggaaagcaaagcctatgatcgagaagatagtactggatgagggcttttcgatcaatcacaagaagacaaaactttgcggaactcggaagcgcaaggaagtcaccggacttattgtctccgccaacggtgtcggcataggacgggaagaatacaggaagatgagagccgagatctacaccatgttacagtccgacccctccaagttggcccatatcaatggctggctggcatatatcaagtccgtggacacgaccaattacgcgcgtctcattaaatacatcaggacactgaagaagatttttccagattctgaagtgttcaacctgattcccgctatcaaaaaaaattga

SEQ ID NO: 10044 - RNA, 975 nt, synthetic construct
  source 1..975: mol_type = other RNA
atgaccatccctagcagtcccaccgacctctcacgtctcaagaacttgggtctgccgccaatcaccaacttaaaagagctcagttccgaaatacgactgtccaagggtttcctgcagaaactgaattataagagcgatgagcactatctggtctatactctggataagaaatccggcggaaaaagggagatagcacagcctagtagggctatgaaagccgtgcagtcttggattttgagaaagattctggtcagacttaaatccagcaaaaacagcaaggggtttgaaattggcgagtcaatcctttctaacgcgagcccgcatatcggggctcacgtgttgttaaacatcgacctcgaggatttctttcactccgtaccagccagccatgtttacagtatcttccactcaatcggctacaataaactaatctcccacatcttcactaacctgtgtacatttaatggccggttaccccaaggagcccctacttcacccaaactgtctaatctcgcttgccaacatctcgactcaaggatccagggatatgccgggattaagggcattatttacacgcggtatgccgacgatataaccctctctgctctaaacgagtcgaagatacgaaaggccaagagcatgatcgaagaaattgtcgtggatgaagggttcatcatcaataagaagaagacaaagatctgcggaacccgcaaacgcaaagaggttacaggtctggtgattagcaaggattctgtgggaattgggcgcaaaaaatacaggaagatgagaacagagatttacacgatgctgaagtccgagcccgcaaagttgccacaggtaaatggctggctggcatttatcaagtctgtggacattaagaactacaatcggctgaaaaaatacatacttactctgaagaaggtgtttcctgaaaatgacattttcgaacttatcccaagtatacagaaaaaatga

SEQ ID NO: 10045 - RNA, 987 nt, synthetic construct
  source 1..987: mol_type = other RNA
atgagtgatacaaacacttccaacaacctgagccagcttcggaatctgggtctgcccccagtcgccactcttgccgacttagcgagccacatgcggctctctgtgggcctgcttcaattgctgtcatataaaagcgacgaacattacaaggtttactacctgaaaaagaagtccgggggaagaaggcaaatcgcacagccatcgcgggccatgaaggctgtgcagtcctggattttacgcaaaattctgtccaggctgagttcctcagccaatagtaaagggttcgagcagggcgaatccatactctccaatgccttaccccacgcgggggcccatgtgattcttaatatcgacttggagaacttctttaacaccgtacccgcaagccacgtgcactctgtctttcggagcatcgggtacaataaaactatctctcagatcttgacaaacctgacaacctataacggacgactgccacagggcgcacctaccagccctaagctgtctaatctgacatgccagcaactcgatgctcgcattcagggctatgctggtcctcgcggcatcatttatacgaggtatgcagacgatattactctgtccgcctttaacgaatctaaaatccgtaaggctcagccgatgatcgaggagattgtaaacagcgaaggtttcactataaacgacaagaagaccaagattagtggaacgcgtaaaagaaaagaggttaccggtctagttatttcaatcgacggagtgggcataggccgacaggaatatagacgcatgagagcagagatctataacatgctcacagaggattctgataaattgtcgcagattaacggatggctctcatacatcaagagtgtggataagaccaattaccacaggctaatcagatacatactgaagctcagggggcatatcaagaatgaggctgtcttctcagaaatagcctgtctcaataaatacaccaatcaaagctga

SEQ ID NO: 10046 - RNA, 972 nt, synthetic construct
  source 1..972: mol_type = other RNA
atgactacactgtccaaaaactatccccttagaaacttcgggttgcctgtcatctcctctttagaagactttgcttccagcacaaggttgtccgtgagctttattaagtactacctctttcaaacagactcccactataaggttttctcgatccccaagaaaaagggcggtgagcgcatcattgcccagccatctcgaaatctgaaggccatacagagctggattctgcggaatattctggatagactatcttctagcgaaaattctaaagggttcgaaaaaggcgactccatcctgaataacgctttgccccatagtggcgctagttacatactttcaattgacatcgaggattttttcccatcaattagcgcaaacaaagtgcactccgtgttccggtcactgggctacaattccgacgtttgcaagatcctgaccaccttctgtacttataagggacgtctgccgcaaggagcgccaacgagtcctaaactagccaatcttgtgtcgcagcagctggatgcccggattcagggctatgccgggcctaagggtatcatatacacaaggtacgctgatgacttaaccctctcaagtaacactgtgaagaaactcgagaaggcaagagatattatcggcctgatcagtaaatcagagggcttgaagataaattccctgaaaacgaaactgaccggaagccggtctaggaaaagcgttactggactcatcgtgaccaaggagggggtagggatcggacgagcaaagtaccgcgaactcaggagtcatatctacaacctgtttaaggacaataatggtgatatcaacaagctcacaggtcatttatcttatgtatatagcgtcgacaaacgcaacttcaagagactcaaaacctacatcaacaacataagcaagaaatatcctaaccccatttactttctgcacctttcaaaaattgccaatgtcaagaagtga

SEQ ID NO: 10047 - RNA, 963 nt, synthetic construct
  source 1..963: mol_type = other RNA
atgacaggaatctatcggcttaaaaatattggcttgccggtgattaaaaatattgacgacctggctcattttaccaggttgtcttcaaccaaactaaattacctgagcaattcgagcaagttcctgtacaaagtgtacgccctccctaagaagggatccgggattagaatcatcgcccagccttcacgggagcttaaggccgtgcaagcctggatcctccgcaatatcttagaccggctgtcctcctccgattgttccaaggggttcgaaataggttcaagcatactggataacgcaaagccacacattgggtcaaactacatactgaacattgacctaaagaacttctttccctctatctctgctaataaagtgtacagtgtcttcagctctcttggctacgagaagaaggtttgcatccttctgaccaacttttgtgtctataatggatttcttccccagggcgcacctacttctcccaaattagctaacctgatctgcagtaaactcgatagtaggattcaaggctatactgggcccaggggtctgacatacacgagatacgcagacgatattacaatcagtgcgaacaccatcaaaaagattatcaatgcccgcgatttcctcgaaacaatcataaatagcgagaatctgagcgtgaataaaaataagacccagatcagcggcgttcgaaaggccaaaaaagtaacggggttgattgtaaaccaggctaatgtcggcattggacgtggtagatatcgcgagatccgagccgaaatacactacgtttatctcaacaagaagactaatctgcatagaatcaacggacatctggcatttgtctactccgtggacaaaaaaatgtataacaagctggtggcgtatttaaacaagctcattgagaaaaacccacactgcttgttgaaggatctcaacatattcaaaaacctgatcaagaagtga

SEQ ID NO: 10048 - RNA, 1020 nt, synthetic construct
  source 1..1020: mol_type = other RNA
atgcagttagataacaggaaattccagttgaagatctttaatctcccagtcatcgagactatcgacgacttggctgagtgtactcgcttgtcaccgcccctgattaagtacctgacttatcgggcagaccacctctacaaggtgttccatatccccaaaaaaattggggagtttagagagatagctcatccctgtcgagagctgaaggctattcagggttggattctaaggcacattctcgataaactgtctcccagcgaaaattctaaggggtttgaattaggatcctctactctcgaaaacgccagcccacatatcggctccaacttcttactaaacattgatctgaaggatttcttccctaccattgtagcaagcaaggtgtacggagtcttccacagcataggttataacaagaaaatcgccggcgccctgacctcgctttgcgtgtttaagggcagacttccgcagggagcccctacatccccaaaactggctaatctggtttgcctgaaactggacgccaggattcagggatatgcaggtcctagaggaattgtatttacgcgttatgcagacgacatctcacttagtgcccagacactcaagaagatccagaacgcgaaaaaccttattcacaccatcgtcgcgtcagagggccttgaaatcaataatcggaagacctctatcagcggcaccagaaagcgcaaaaaaataacagggttggtgattaccgaaaacagtgttgggatcggccgggatctaacacgccaaatacgtgccaagattcatcacctgtttatagaaaagtctaccaatttctcccacgtgaatgggctgctggcttacacttacagcgttgacaaaaagagttatcgaaagctcgattccttcatagagaaactcaaactcaaataccctttgtgcccagccaccacagagctgtataaaatcaagaattcaacgatcacccaatttacaaaggtgtgttacaggacttcccggatcaagaagctgtga

SEQ ID NO: 10049 - RNA, 963 nt, synthetic construct
  source 1..963: mol_type = other RNA
atgccccaggattcacatatttacagactgaggaatctggggctcccggtcatgaagtccagcgaagactttgccaattatactaagttgagtgcaagccgaattagactgctgcatctgcgcgctgataagttctataaagtataccgtctgcctaagaaaagtggaggaaccaggctcattgctcaaccatccagagagttgaaggccctccagggctggatcctacggaatattctggataaactgcgggcgtccgatcaatccaaaggtttcgagattgggtcgtccatcctggacaacgctgcccctcacacaggcgccaactttatattgaatatagatctggaggacttctttcccagcataaaggccaaccgcatctttagcatatttagatcaatcggctacaacaaggagctctgtgtgctgttgacgaatctgtgtacatactcaggcagacttcctcagggggcacccacctcacccaaattagccaacctgacttgcgcacagcttgacgcacggatccaaggatacgcaggaccaaaggggatcatttataccaggtatgccgatgacatcaccctaagtgcacagaccgctactaaaatctacaaagctcgctatttcctcgactatctgatcgccgatgagggatttactattaaccgtcagaagacgcgagtctatggtacaatgtcccgcaagtgcgtgacaggcttagttgtgagcgagtctgccgttggcatcggtcgagaaaagtaccgggaaattagggctcagatccaccaccttttctctgggaaggccgactcttataggtacttaaacggcctcctcgctttctgcttcagtgtggacaccaaatcttaccgcagggcgtataaatacatgcggaagcttcaggaaaaatacccaaattctaacgccatgaatagcatcattcctgagaaggaatga

SEQ ID NO: 10050 - RNA, 972 nt, synthetic construct
  source 1..972: mol_type = other RNA
atgatgactacacagaacatttatcggttgcgtaatctgggactgcctgcaatgaaaagtctggaggatttcgcctccttttcccggctcagcccatcgaagatcaggcatctcagtcgaagcagcgagtttctttacaagacttacaaagtcccaaagacaaatggcagttataggctgatcgctcagccgagtagggatttaaaggctgttcaagcctggatccttagaaacattctcgatgaattatcttgctcaagctattcaaaagggttcgagtctggcatgtctattctcgataatgccaaaccacacatcggctctcagtatgtgttgtcagtggacctccaggatttcttccccagcgtcagcgcaaacaaagtgtacggtgtgttctcctccgttggctacaacaaggagatgtgtgtgctgctgaccaacctatgtgtctttaagggaggactgcctcaaggcgcgcccacatcacctaagcttgcaaacctggtgtgctctaaactagacagccggattcaggggtatgctggtcccaaaggaatcacatatacccgctacgccgacgatatcactctttcctctaattccgccttaaagatacagaaggccaagagtttcctcggcaccataatcagtgacgaggggtttaaaatcaacaagccaaagaccaccctgtccggggtgaagaagcagaagaaaatcacgggtttggttctctccgacaacaatgtcggcattgggtcactgaaataccgcgaaattagagcagaaatacattacctgtttgcgggtaagtctaataattacagaagggtgaacggattgctgtcattcgtatattccgtagacaagaaaatgtacacgcgattgcacgcttacataagcagcctgaaaaaaaaatttccccaaagccctgccgcttcatctctgaataaggaaatcgtcatttcgcgctga

SEQ ID NO: 10051 - RNA, 975 nt, synthetic construct
  source 1..975: mol_type = other RNA
atgaccattaacaatatctatcgcctgaagaacatagggctgccggttatgcagtctatcgaggacctggcaaaacacgcgagactgagtatcgaaaagattaggtatctgtcagtcagagccgaatttatctacctgacttacgaattgccaaaaacaaacggcaagacgcgggaaattgcccagccctcaagggagcttaaggcaatccagtcttggatactgcgtaatatcctagataagctttcaccctctatctacagtaaagggttcgagaaaggtacttcaattttagataacgccttcccccatattggcagcaccttcgtgttaacaatagatctcgagaacttttttcctacggtgaaggccagtaaggtgtttaccttattcaaatccgtgggatataataaggaaatgtgcgttctactgaccaatttgtgcgtgtacaaaggtgggttgccccaaggcgcacctaccagccctaaactcagtaatctgatctgtgacaaactcgatagccggattaacggctacgctggaccaaagggcatcgtctacacacggtacgctgatgacatcacactttccgccaataatattcagaagctgcagaaagcgaaggatttcattggtactattatctccgacgagaactttaagatcaacaagagcaagactaaactttgtggaactaagcgacagaaaatgatcaccggactggtcctgtcggagagctctgcagggataggacgagtgaaactcagagagataagggctaaaattcatcacgctttcgttggcaagcacaatgagttcgaccacattaacgggctgctgtccttcacatattccgtagataagtccagctataagaaactctaccgctttatcgacaagatgaataaagactatccagactctttggccgtactcgaacttcataagaacctgttgaagaaacaactccagtga

SEQ ID NO: 10052 - RNA, 960 nt, synthetic construct
  source 1..960: mol_type = other RNA
atgacttccaacagcatttaccatctgaaaaacctcgggctccctgctttaacatctctggatgagtttgcccatgctatgaagctgggatctaacacagttcgctcactaagcatctcttccaactcactctataaaacttacaaggagcccaaaaagtcaggcggctttagggagatcgctcagccctgtcgggaattgaaggctgttcagagctggattctgaggaatatattggataagctcaattgctccccttacagtaaaggctttgagaaaggaaagtcaatccttgataatgcacagccgcatgcaggcgcaagctacttgctttctatggacttagaaaatttcttccccagtatcggtagttataaagtgtacggtgtgttctccagcattggatacaataaggaaatgtgcaagcttctcaccaatctgtgtacctattatgacagtttgccacagggcgccccttcttctcccaaactggctaacctaacctgcagcaggctggacgccagaatccacgggtatgccggaccaaaaggaataacgtatacacgctatgccgatgacatcaccctgagtgccaacaccgcagtaaagatagagaaagccaaagcctttatcggcacaatcgtacacgatgaagggcttaaggtcaacaaaaccaagactaagatttgtgggactaagcggcaaaagaaggtgacagggctggtcctgtctggtaattccgtgggcattgggcaaaagaaatacagagaattgcgttccgcactccaccgaattttcgtcggtagatcgactgagtactcgttcgtgaatggctggctgtcctttacgtacagcgttgacaaaaaagcgtataaccagctgtacttagtgattgactccctgagcaagaaatacccacagtcagatgctctggagcacctctatgcgaagaagggatga

SEQ ID NO: 10053 - RNA, 960 nt, synthetic construct
  source 1..960: mol_type = other RNA
atgacgtccaagaacatttactcactcaaaaacatcggactgcccgctatggctagtatcgatgacttcgctaacgaagcgcggctctcgcctggcaagattagatacctttctgccactgccgaatcccactatagaatatacccgataccaaaagtggggggaaagagccgcctgatctcccagccctcaagggaacttaaggccgtacaggcttggattctgcgaaatatcctggacaaactgtctagcagtccctgttctaagggcttcgaaattggcacctcaatcctcgacaatgccaggccacatataggcagtaactacgtcctcaccatcgatttggaggattttttcccgaatgtctctgcatccaaggtgtttggggtctttagctcgattggctataacaaagagttgtccattttgctcaccaatttatgcacgtattccggtggcctgccacagggagcccctacaagccctaagttagcaaatttggtgtgcgcgaaactggacgcccgaattcaaggttacaccgggccaagaggcatcgtttatacacgttacgcagatgacatgacttttagcgcccacacagctagcaaaatcaggaaggtaaaacatttcatcggcacaatcatttccgatgaggggtttaaaattaaccacaagaagaccgccatctgtggaactaagcgccagaagaaggtgaccgggctgatcctgtcagagtcttctgttggtataggaagggtgaaacatcgggaaattcgcgctaagctacaccacctgttcacaggaaaaagtgccgagttcagccatgttaatgggcttctttcttatacttacagtgtggacagacggagctataacaagctgtactcatatattgcaggtctatccaagaaataccccaattcaaacgcaataatcgagatcagccctaaaatcgtgtga

SEQ ID NO: 10054 - RNA, 960 nt, synthetic construct
  source 1..960: mol_type = other RNA
atgacttccaagaacatttattctctcaagaatctgggactgccagccatggtatccgttgacgactttgctaacgaatcgcgattaagctcagcaaaaatcagatacctatcagccaccgccgacttacattacaaagtgttttccatccccaaagtcacagggaagagccgcttgatctcccagccctctcgcgatttgaaggctattcaggcatggatccttagaaacatcctggataaactgagttcaagttcttgtgcaaaggggtttgaaagaggttccagtatactggataatgcacggcctcacatcggaagtaactacatacttacgattgacctggaaaatttctttccgtctattgccgcttccaaaatttatggtgtttttagctcgataggctataacaaacagctgtcagtgctgcttactaatttgtgcacctataagggcggtttgcctcagggcgccccaacttcacccaaactcgcaaacctggtatgcgccaagctcgacagcaggattcaaggctacgctggaccaaaggggatcgtgtatacaaggtacgcggacgacatgactttcagcgccaacaccgctctgaagattaccaaaaccaaacaattcataggcacaatcatcagtgatgaggatttcaagatcaattcccagaagacagtgattagcggcaccaagaaacagaaaaaagttacggggcttattctctctgagaatagcctaggaattgggcgtgtgaagtaccgggaggtcagggtgaaactgcactacttattcaccgacaagctcagcaacttctcttacatgaatggaatgctggcctatatctatagtgtcgataagaaaagctacaacaagctgctctcatatatagctaaactcaagaacaagtaccctaattctatcgcggtgaattttatcaactccaagaataagtga

SEQ ID NO: 10055 - RNA, 969 nt, synthetic construct
  source 1..969: mol_type = other RNA
atgagcagcaacaatatatatagccttaaaaacctgggtctgcccgctctcaaaaagatcgaagatttcgcttttgtgaccagactctctcaggggaggataacctatctggcatacaggaccgagcacttatataaaacgtacgacgtccctaagaaatccggcaagaagcgcgaaatcgcccagcccaatcgtgagctgaaagccgtgcaggcctggattttgcgcaacattctggacaaactttccagttcgccacactccaagggattcgatctcggcaccagcattcttgaaaatgcagtaccacatcaaggagctaactacatcctgacgttggatctggaggacttctttccgtctatctcagctaataaggtttacagcatttttagctccatagggtataacaaggaggtcagtagtctgttgactaatctgtgtgtgtttaaggggggcttgccccaaggagcgcctacaagtcctaagttagctaacctggtttctgccaagctcgatgcacgaattcatggctatgcaggcccaaaggggatcgtctacacacggtacgcggatgacctcacattatcagcccagtcagtgcagaaactggagaaggccaaaaacttcatagacaagatcatcacagacgaggatctcgtgattaatcgctcaaagaccaaattgtgcggtacaaagcggcagaagaaaattaccggactcgtgctatcccagaacaatgtaggtataggccgggaaaaacttagagagattagagccaaaattcactacctgtttatcggcaagaacatcgactactctcacgtgaatgggtttctggccttcacttacggagtcgacaagaagtcttatactaagctatacaggttcatcgagaaaatgaaagcaaagtatccctccagcgaagctgttactgaactgcataacaaagccatcaaacgaatctga

SEQ ID NO: 10056 - RNA, 975 nt, synthetic construct
  source 1..975: mol_type = other RNA
atgccaaataaggcccatttatacaggctgaaaaacttgggactgccagcaatcgaatcaattgaaggttttgccgataaaacacggatctccttggagaagattaaatacatctcttaccgctcaggtcatctctacaaggtatatgagatccctaagatcaacggaaagaagagacgaattgcccagcctaaccgggagctgaaggctgtgcagagctggattttacggaatattctggacaagttgtccactagcgagcactgtaaaggcttcgaaactgggacctccatcctggacaacgcggtgccccatgtggactctaactatgtgctgacggtcgatctggaggactttttccagagtgttaaagccagctccgtgtatcgaatcttcaactcgataggctataacaaacaagtctcatctatcctgactaacatctgtacatctgatgggggtcttccccaaggagcacctacttcgcccaagcttgctaatcttgcatgcgcgaagcttgatagtagagttcacggatatgctggacagaagggcatcgtttataccaggtacgccgacgatataacactatcagctcagaccccaaagaagatctacaatgccaagcagttcatcggcaccataatttctgacgagggattcgcaattaataaggctaaaacccgcatttccgggacaagaagccagaaaaaaattactgggctcattctatctgaaaaccgcgccggtattggcaggaataaataccgtgagataaggtgcaaaatccactacttgtttgtgggcaagaataaagattatagtcacgtaaatggcctgctcagctttacgtactccgtggacaagaaggcctataagaaactctatagctacatcaagatgctcaagaacacctacagtgatagcaaagctggggacctgctggtcgccgaaatcacaaaaataccggcatga

SEQ ID NO: 10057 - RNA, 972 nt, synthetic construct
  source 1..972: mol_type = other RNA
atgtccaacaagtcatatatttaccgactgaagaaccttggactgcctgccatagagtctatcgatgatctcgcagacgcttgcaggctgtctctgggtaaagtgaagtatctctcttatcgtactgaatacctctacaaggtcttttgcatacctaagaaaaccggcaagaccagaacgatctcacaacccaaccgggagctgaaagcactgcaagcttgggttctccggaacatcttggacaagttatctagctctgaacatagcaaaggcttcgataagggcgcctctattctggataatgcatcaccccatgtgggagccaactacatcctgacaatcgaccttgaggacttctttagcaacgtgaaagccagccatgtttacaagatctttcacagtatcgggtacaatgacaagattagtgccatactgaccaacatttgcacttttaaaggtgctttgcctcagggggctccaacatcccccaaattggcgaatctggtctgtgcaaaactggactcccgacttcatggatacgcgggaccaaaagggattgtgtatacacggtacgcggatgatctaacgctgagtggccaaaccccgcagaagatctataaggcttcccagttcattgggaccgtaatatcggacgaaggcttctcagtgaataaggccaagacaaatatttgtggcactcagaaacagaaaaaagtaaccggcttggtggtttccgagcaccacgccggaatcggcaggcagaaatatagagagattcgcagcaagatacactaccttttcgaaggaaagtccaatgatttccaccaggtgaacgggctcctagcctttacttacagtgtcgacagaaaaagctataagcgcatctattcatacgtcaataagttaaagctcaggtatagtgggagcgaagcctccaagaagattgctgcagagatcggtatcaaagcctga

SEQ ID NO: 10058 - RNA, 969 nt, synthetic construct
  source 1..969: mol_type = other RNA
atgaatgagaagcagaaaaaatacgggctcaagaacttaggtctgcctgccattgagacaataagcgaccttgctaacgaaattcgactgagtgataacaagatccggtacttggcctatagggcccagcatctttataaggtttatagtatccccaagaagagcggtggaagcaggctgatcgcacagccttctcgagaacttaaagcagtgcagggctggattctgagaaatattctcgataagctgtccgcctccgaacattcaaaaggatttgagaaggagagttctatcctggataatgctatgccccacgtcggcgccaattatgtactcaccgtcgatctgcaggacttcttcccaagtataaaagccaacaaagtctactctatcttttatagcgtgggatataataagctcatctcctcagtgttgacctctatctgcacttatgacggtcgcctgctccaaggagccccaactagtcctaagttggcgaatcttatttgcgcaaagctagactccaggctctcggggtactccggcccattaggtatcgtctacacaaggtatgccgacgacatcaccctgagcgggcaagctgcgcgcaaaatatacaaagcacgtgacttcattaacgtcataatttcatccgagggctttaaggttaacgaaaagaagacaaagatctgtggcacgcagcgccagaaaagaattaccgggctggttgtgaatgagaatcacgctggaattgggcggaaaagataccgggaaattcgggtaaaactgcatagattattcgtggggaagtctgatgattacaatcacgtgaacggctttttgtcctttgtgtacgatgtggactacaagtcttacaaaaaactgttcctctacatcaacaacctaaaggagaagtatccgagctcaagcgctggcctgaacatcttccccgagatcaacaaatcatga

SEQ ID NO: 10059 - RNA, 975 nt, synthetic construct
  source 1..975: mol_type = other RNA
atgaccagcgctaccccttctcaagtctttagacttcgcaatctcgggcttcccgtcatgtcctccttggaggatatgagtagggagatgcgcctaagcgtggacattctgcgactctacatttatcgggcagataagtattacaaagtgtactcacttccaaaaagagatgggaagagatcccgaataatttcccagcccagcagagaactcaaagcactgcaggcgtgggtgctcaggaatatactcgacaagctgcatagtagccctttttctaagggcttcgagaaagggcagtctatacttaacaacgccagtccacacgtaggcgccaactatgtcttaaacattgatctggaggactgcttcaacacgatcctgattgaaaagatatacactgtgttccactccttaggatataactcaacaatctccaatgcactagcccgcttgtgtagctttaacggatcattgcctcagggtgctcctagctcaccaaagatcgctaatttagtcttgaccaagctggactaccggatccatggatatgccggtagcaagggcattgtttttacaagatacgcagatgacttgacactgtcggctcaatcccttaaaaagatcctgaaggccaaatctttcgtttgcagtattatcccctctgagtctctcaaggtaaactacaataaggtggcgattcacggtcccaaagccaggaaagaagtgactggcctggtgctgagcatcgacaatgtaggcgttggccgtatcaggtaccgggaaatccgctcgaaaatccactacctcgccgtgaagcgtaatagtgactttgaacatgttaaggggctgatcgctttcgtgaaatcagtcgacaagaaaaactatcggaagctgatgaccttcagcaataaaatgtctgagacttatggagtggatctgtccgtgctgtttccgaagaacaagaaagccatttga

SEQ ID NO: 10060 - RNA, 966 nt, synthetic construct
  source 1..966: mol_type = other RNA
atgacttctatcattcaaagccaggtctttaggctcagaaatttaggcctgcctgtcatgtccactcttgatgatatgtcccgtgagatgcggctcagcgtggaaatactgagaatgctaatttacaacgcagacaaatactatacagtctactctgttcccaaaaaagatgggcgacgcgtgagggtaatatcacagccatccagaaaactgaagtcattgcagtcctggatactgcggaatatcctggacaagctgtactcctcaccattcagtaaaggattcgagaaaggccagtctattctgaataacgcatctcctcatatcggggctaattatatcctcaatatcgaccttgaggacttttttgacaacatacccagtaggaaaatttacaccctgtttcacagcttgggatataactccctggtgtcaaatgctctgacacgagtgtgttcccacaagggttctctgcctcaaggggcccccagcagccctaagatcgccaatttgattctgaccaaacttgattatcgcatccaaggttatgctgggggcaaaggtatagtctttactagatatgccgacgatctaaccttgtccacccagtctctgaaaaagatcgtgaaggccaagaagttcctctgcacaatcatcccaacggaagacctcaaggtgaattaccggaaggttgtaattaacggcccccgtgcgaaaaagagcgtgacaggactcatcttatcaatcgacaacgtcggcattggaagggagaagtacagggagattaagagtaagatccaccatctcgcagttggccgcacctctgattacgaacatatccagggacttgttagcttcgtgaaatcggtggataaaacgaactatcggcgccttttagccttcagcaagaagatgagttcgatttacaaactgaacattaaccagttgttcccgagtaagaagtga

SEQ ID NO: 10061 - RNA, 966 nt, synthetic construct
  source 1..966: mol_type = other RNA
atgaacaatttttcttctaccgacgtctttagattgaggaactttggactacctgtgatgtccagtttgacagacatgtcccgagaaatgcgcttaagcgtcgaactgctaacacttctgattactagagcggacgatttctataaggtgtactctgttcccaaaacgggtaccgagaagggagagcgggtcatatgtcagcccagccgcagactcaaagccttacaggcttgggttttgcgcaacatcttggataagcttaattcttcaccttttagcaccggctttgagagggggcaaagtatcaaagacaatgcaaatccacatgtcggctccaacttcgtgctgaatattgatctggaggattttttcccctcaatttcgtcgaacaagatctataccgtgttcaacagcctgggctataataagtatatcagtagcgtgctcacaaagatttgctgtttcaagaataaactccctcaagggtcaccagcctcccccaagctggccaacctcgtgtgcatgcggctggatcatcgtatacatggctatgccgggatacgcggaatcatttttactagatacgctgacgatatcacactttcagctcagtccttaaagaaaatcgagaaggcaaaggactttctgttcagcattattccgaccgaacagctgatcgtgaactacaacaaagtaatcatcagcggtccacggaaacagaaaaaaatcactggcctggtgctttccattgacgacgtagggataggtaggcagaaattcagggagataaagtccaagatccactacctgagtgttgggcgatctgaaaactacgcacacgttggcggactgctggctttcacgaagtctgtcgatgaaaagaattaccggcgtctcattgtgtttgcccagaaactcaacaagaaattcaatctggacctcgataagcttttcaaacacggatga

SEQ ID NO: 10062 - RNA, 960 nt, synthetic construct
  source 1..960: mol_type = other RNA
atgaagagcacagagcacttgaatacctttcgactccgccaccttggactgcccgtgatgaatgatctgcatgacatgtcaaaagcgacgagaataagtgtggaaacgctgcgcctattaatttatcgtgccgactttcgctacaagatctatagcatcaagaaaaagaacagtcactcaatacgtaccatttatcagccaagcagggaactgaaagccttgcagggttgggttctgagaaatattctggacaagcttagtagctcccccttctcgatcggcttcgagaagaatcagagcattcttaacaacgctacccctcacataggggcaaatttcattctgaacatcgatctggaggatttctttcccagcctttccgctaaaaaagtctttggtgtgttccattctctcgggtacaatcggactatctcgtcctccctaactaagatctgctgttacaaaaacttgttgccgcaaggggctccaagcagccctaaactggccaatttaatttgttctaagctcgactatcgaatccagggatatgcagggtcccggggcctcatctacacaagatatgctgatgacctgactttgtcagcacagtcaatgaagaaagtcttaaaggccaaggacttcctgttctctatcattcctactgaaaacctcgtagtgaacaccaaaaagacatgcatctctgggcccaggtcccaaaaaaaagtgacaggcctggtgatctcccaggagaaagccggcataggacgcctgaagcataaggaactccgggccaaaatccaccacctattttctggcagaagtaagaacattgagcatgtaaggggttggctcagttttgttctgtcagtcgattctaagtcctacaggcggcttttcgtttacattggaaagctggagaagaaatacggctggaatccactctctaagaccaaaacctga

SEQ ID NO: 10063 - RNA, 963 nt, synthetic construct
  source 1..963: mol_type = other RNA
atggagaacgaacactacatgaatacttttaggctcaggaacttggggttacccgtaatgagcgacctgtccgacatgagcaaggagacaagggtgtctgttgaggccctgcgcctccttatttatcgggctgactatagataccacatctatacattggataagaaaggacctggcaacaaaaagcgcacgatctatcagccaagtagagaacttaaggcgttgcaaggatgggtcctaagaaacattctggacaaactgtcttccagtcccttcagcatgggcttcgagaaaaaacagagtatcctcaataatgctactccccatgttggcgctaatttcatactcaacatcgatctcgaggactttttcccttctttgaccgcacacaaagtgtttggtgtcttccattcgctcggctataacagagcaatagcatcctccctgacccgtctgtgttgttataagaatctgctgccacagggtgccccctcaagtcctaagctggccaacttaatctgctcacggctcgattatcggatccaaggatacgccgggcgtcgaggcctgatttacactcgctacgccgatgacctgaccatcagcgcgcagtcaatgaagaaggttgtcaaggccaaagatttcttatttagcatcattccatccgaaggactagcaataaacaaagagaaaacctgcatctctgggcctagaggtcagaagaaagtgacagggctggtcgtatctcaggacaaggtgggagttggcaagaggaaatcaaaggaaataagggctaaaatccaccatatttttgtgcggcgaagcaatgaagtggagcaggtgaaagggtggcttgcctacattctttccgtggatgtgcggaatcacaaacgcctggtcgcttacattaacaagctggaaaagaagtacaattggaacccgtttaagaaggaggaccattga

SEQ ID NO: 10064 - RNA, 960 nt, synthetic construct
  source 1..960: mol_type = other RNA
atgccaagtgccactaactctcatgtctatcagctaagaaatcaaggattacccgtgatgtcttccattgttgacatggcacgggaagttcgcctgtcggtagagatgttgcgatttctgacttaccgcactgactacctctacaagacatttgagattgagaaaaaagggacgacatccaagcgcgtgatttgtcagcctagccgtaagctcaaggctatccaaggctggattctgaggcggatcctggataaccttcggtcctctgagttttcaaaaggattcgaaaaaggtcagagtatcctagataatgccgtgccccacgtcggcgccaattttatcctgaacattgatctcaaggacttctttccctccgttgatgctagtaaggtctacggcgtgtttagcagcttggggtataacaaagagatctcatccattctgacaaatctgtgcacttataaaggaaagctgccgcagggtgctccaaccagcccaaaacttgcgaacctgacctgtgcaaggttagacgccagaatccagggatacgctggctcaaaagggataatatacacccggtacgccgatgaccttaccttcagcgcacaaaccttgaagaagataatcaagacacgattcttcattcagactataattcctacggagaagctctccgtaaataatcataagacactgctgtgcggccctaggaagcagaaaaaagtgacaggacttgtgatttcacacgacaaaactgggattggtagacagaagctcagagagatccgttctaagatacacaaaatctataccggggaaaaaaccaataccaatcatgtctacggcttgttaagctatgtgtatagtgtggataaacgcaactataggaagctcatcatctacatcgaaaaactgaacaagaaatacaacaagtctgaattcctgaagatcaagaagtga

SEQ ID NO: 10065 - RNA, 960 nt, synthetic construct
  source 1..960: mol_type = other RNA
atgaccctcgtgacagcgactcatagtcacgtctatcagctcaggaaccaaggtttaccagtgatgagcaccatctcagacatggcccgtgaggttcggctcagcgtagaaatgttgaaattcctgacctacagaacggactatctgtacaaaacatatgaaatcgacaagaagggcaagggttctccaaagcgcattatttcccagccttcccggaaattgaaggctatccaaggctggattctgagacacatcctcgatcacctgagcagttcagaattttctaaagggttcgagaaaggccagagtattctggataacgcagtcccccatataggcgccaacttcctgctcaatatagacctaaaggatttctttccttccatctccgcttccaaagtgtatcggatctttcgaagtttaggatacaacaaagagattagcagcgtgctgacaaacctgtgcacttacaagggcaaattgcctcagggaagcccgacttccccaaagctggccaatctaatatgctctagactggatgcaagaatccagggttacgctggacggcgcgggataatttatacgcgatatgccgatgacttaacactttcagcacagactctgaaaaaaatcgagaaggccaagttcttcataaaaaccatcatccccaccgaagacctgaaggtaaataattccaagacattgctttgtgggcccaggaggcagaagaaggttaccggactcattatcagtcatgacaaggccggcattgggagggagaaacttcgcgagattcgttcgaagattcacaagatctttactgaagagagccttgaatataatcacgtgcgcgggctcctggcttacgtttcttcagtcgataagaagtctcataggaagcttgtgatgtacatcgacaaactgaccaaaaaatactctggagtggagtttattatctga

SEQ ID NO: 10066 - RNA, 984 nt, synthetic construct
  source 1..984: mol_type = other RNA
atgaaaacagaaagcacagccaatatataccgcctgaaaaacctggggctgccgcccttagctactatcgaagatattgccaatgcaacgcgtctttctccagaatatatcaaatacctcgcttttcgcaccaacttcctctataagactttcaccattccaaaacggagcggcggtaatagaaagattgcgaaccctagccgcgccttgaaaggcattcagggatggatactgaggaatatcctggataagctgtcctcatccgagtttagcatgggctttgagaaaggaacctctatcttggacaacgccctaccacacacaggatctacatttatccttaccatcgatctcgaggattttttcccctcaataactggggaaaagatcttcggcgtgttcaactcaattggatacagcagatctatcagccatattttggctaacttatgtctattcgaggggagactgcctcaaggcgccccaaccagtcctaaactggcaaatctggtatgctcgcggttggattctagaattaatggctacaccggtcccaaaggcattgtgtacactaggtatgccgacgacatcaccctgtcctcccagtcgctcaacaagctttacaaggcttacaactttataccctttatcttacaggacgaaggattttccctcaatcccaacaaaacaatcttttctgggacacggaagaagaaaagtgtgacgagtcttattattagtggtgacaccgttggaatcgggcgagaaaagtatagggagatcaggagcaaattccacaaagagttcactgggatcacaaccaacaaggagcatctgcacggctggatctcattcataaattcagtcgatcgaaagtccagcattaagctcaagaattatatagcgtgcctgattgaaaagtatcctgactccgaggcaagtaagaatttcctgaagatcacggagaaaaacaagactcagtga

SEQ ID NO: 10067 - RNA, 993 nt, synthetic construct
  source 1..993: mol_type = other RNA
atgcagaaaaatacaatctacacgcttaagaatctcgggttgccagctattactaccttagacgacctttcttttctcacccgcatctcccgggaacgcattatcctcctgtccacccagcataaacggttctacaacaccttcctgatgcctaaaaagtcaggtggccacagacagatttctcaaccgagtcgtgacctgaaagcactgcaaagctggatcctgagaaatattctagataagctatctgccagtaaattctccaagggattcgaaaaggggagctccacccttgacaacgcaacaccccatataggggcgaattatatcctgtcattagacctcgaggattttttcccctccatcaaaagcggctatgtttttagcatttttcgaagcatcggttataatgtccccgtttctcacactctgacaaacctctgcgtctataacggaggactgccacagggagcccctacaagtcctaagctggccaacttggtctgtagccggctcgatgctcgcataagcggctatgccgggaagaaaggcattacttataccaggtacgccgacgacatcacattcagtgctcagactgcgaagaaaatcaccaaagtgtactctatggctaagtttatcatccatgatgagaaattcgtcattaacaagaacaagacttacttttctgggacaaagaagaataaaaggattactggtctggtagtgacggaaagaagtgtgggtatagggagggttatgctgcgatcaattaaggcaaaaatccaccacctgttggtgggaagaaatgatgatcttccccacatcattggcctgttatcatacatatacggcgtggacaagaagaactacaaacaccttataaggtatatccagaaattgtcgctgaagtactccggcgtaccacaggagctcaaggatatggtggccaagcataataacctggcagcctcaaccttgtccgaggtgtga

SEQ ID NO: 10068 - RNA, 981 nt, synthetic construct
  source 1..981: mol_type = other RNA
atgaccaaaaagatcatctttaagctgaaaacgcctcctaagatcaatgatatccacgatctcgcccgggaaactcgcttgagcgaaaagcttatttcttacattgcttatcgctctaacttcctttaccgaacttactatgtgccaaagaagtccggcggtaaacggctgatcgcccagcctgcccgtgaacttaaagctatccaaagctggatattgcgcaacattttagagctgaggccctcttccaatcagagcatgggcctggaaagagatcaatcgattttaaccaatgccttaccacacatcgggaatgggtacctcttgaatatcgatctagagaactttttcccgtccatcaaatccaagagagtgtttcatttgttcaaaaagatggggtttaacaacaacatttcaacgatattcaccagaatatgcacattcaatgatggcctgcctcaaggggctcccagctctccaaaaatagcaaatctgatttgttcgaagctggatgccaggattcagggatacgtcggcaagaggggcatcaattataccagatacgcagacgacctgacttttagtgcaccaagttacgagaagatcaataagctggagattttcattaagaagctgatctccgacgaggacctctttatcaactcaaacaagaccacattttcaggaccgcgcaaacagaagaaagttacaggtctggtcctaacaaacgacagcgtgggcattggcaggggaaaatataaggccattcgggctcggatctattactacttcctgggtatagagaaagacatcgcgagtattaatggatatctctccttcatctatagtgtagaccagaaacgttactcaatgctccagcattatatcagctctctcttcgaacgattccccgtgataccctctgcaaactttgggcagtttactaacattcacttccttccccagagcgcgctgggatga

SEQ ID NO: 10069 - RNA, 987 nt, synthetic construct
  source 1..987: mol_type = other RNA
atgaaggacagcaaaacagccaaaaaatacagactcaaaagtcttggactgccaatcattgaatccgcagacgactttactcgtctgctaaaaatatcaagcagtatcatccaacagataagcaagcagacaaccaaggatagattttacaaagagtacaggattccgaaaaagtccaagggttttcggcagatagctcaacctgtgagaaagttaaaggcccttcagatttggatcctccggaatattctggataaactaactacttcggatagtagcaaaggcttcgagaagggcaccaatatcaaggataatgtgaggcctcatgtgggcgcccgagtcatcatgtcactggatttggagtcctttttccccagtatcagcagcaacaaggttttcggcattttttactcgttaggctataatacggaagcaagctggcttttcacgaacatttgcacatataagaacaaactgccacagggatccccctcttctcctaagctctctaacttgatttgttggaaactggattttcgcattgaaggttataccaataagcgcgacattgttttctcacggtatgcggatgacctgaccttcagtagcaaatcaatcaaaaagatcatcaaggctaagaacatggtaaagcacataatagaagacgagggcttcgtcataaacgaggataagacaaggatcatgggtccctctcgccagaaaaaggtgaccggattgattgtatccgggcataaggtggggatcgggagaaaaaaataccgggagatgcgagtgaagattatcaatctctttactcacgaatctgacgacttctcacacgtcatgggatggatgtcctacattaattccgtcgacaaaagcgtgtataagaggctgatcctgtacattgagaagctgtctatccagttttccaactctatcgctgttgaagagttcaaagccctcatcaagaacgggaatctgtga

SEQ ID NO: 10070 - RNA, 960 nt, synthetic construct
  source 1..960: mol_type = other RNA
atgtccaacaacggaatcatcaagttgaatatgttcggcctccctgtgatacagactctggatgattttagcttcatctcccacatcagtaaatataccatataccagctgagcaagaattccgactactattacaagatctacttcatcaagaagaagtcgggcaaacaccggaaaatctgccagccttctaggaagctcaaaggactgcagtcttggattcttgtgaatatcctggaaaagattaaggtcagtaattcatgcaagggatttgagaaaaattcttcaacactcgacaacgcaatcccccacgcgggagctaataccattttaacgcttgatctgaaggatttctttccctccatcacatcaaaccagatcttcaacatcttcaaaactctcggctataatgacctgattagcacagtgtttactaatatttgcacatttgacgggtgtttgccacagggtagcccatgttctcctaagctcgccaacttgaccgcctggaaactagactcccgtattcaggggtatgtaggaaaaagaggcatttcctatactcggtatgccgacgatcttagcttctcaggtctaaaccccgtcaaagtggtgaacatcatcccgatgatcaaggaaataattgaggatgagaacttcctgataaacaacagtaaaaccagaatcagttcttctgggcgcgctaaaattgttacggggctggttattaccgacgagaagattggcatcggtaaaaagaagtttaacaacgtcaggtcaaaaatacatcatttaagtatgccaagggaaaatgggaacataaaacttctcaatgaggtacaaggctggctgagctacctgaattccgtggatcgcgaacgattgattaagacccaaaagtacatcgaccatctgaatcaaaaataccccaatagcatgattaagtttctggtgaagtga

SEQ ID NO: 10071 - RNA, 966 nt, synthetic construct
  source 1..966: mol_type = other RNA
atgtctaataacggaatcatcaagctcaacatgttgggactgcctgtcattcagactttggatgattttagcttaatcactcacgtctctaaatataccatttaccagctgagcgagaagagcgatttctactactcaatatattcgatccccaaaaaatccgggaagcctcggattatctgtcagccatctaaaaagttaaagggttttcagtcctggattctcgtgaacgtgctggacaagatcaaagtatctagctcatgtaaaggcttcgagaagaaatcatctacactagataatgcaatcccccataagggagccaatacaatactgacgctagatctgaaggactttttcccgaacataaccagtaagcaagtcttcaacatttttaagacccttggctataacgatctgatatccacaatctttaccaatgtgtgcacctacaaagaatttctgcctcaggggtccccttgcagccccaaactggctaatctgactgcttggaaactcgacctgcggattcagggttatgttgggaagaggggcattaactatacccgttatgccgatgacctctcattcagcggccttaatccagccaacgtcgttagaatcctgcccatgatcagtaatattatcgagagtgagaacttcatcataaaccactctaagactagaatcgcaagctcagcacgcgccaagattgtgacgggtcttgtgatttccgacgacaatattgggattggccagaaaaaatataagaacgttcgagctaagatccatcatctgacaaaaccaatcgagaaaggcaatgtaaagttacttaatgaagtggctggatggctctcctacttgaatagtgtggacaagaacaggctcgccaaggcgaataagtacattaacgagctgtacaagaaacacaccaaatccatgatacaatacctcatcaagttggactga

SEQ ID NO: 10072 - RNA, 960 nt, synthetic construct
  source 1..960: mol_type = other RNA
atgtccaagagcgagataatcaagctgaacatgctgggcttgcctgtgatccagacaattgacgatttcagtctcatcactcacattagtaactacaccatttttcaactgtcgaaaaattccgacaactattataagacgtacgatatcccgaagaagagcggacgacctcggcaaatatgccagccctcaagaaagttaaaagggtttcagagctggattcttgtgaatatcctggacaaaactaaggtatccagttcatgcaaagggttcgaaaaaaagacctctaccctggacaacgcactcccacataagggcgccaatacaattctgactatagatttgaaggacttctttcccaccattacttctaaacaggtgttcaacgtttttaagacattgggctacaacaacctgatctccacaatcttcacaaacatttgtacttacaagggttttctgccacaggggtccccttgttccccaaaactggcaaatctatcagcctggatgttggaccttcgcatccagggatatgtgggtaagcgcggaattaattacacgcgttatgctgatgatctatcattttctgggttaaatccaagcaatgtcgtgaatatttaccccatgataaagaccatcgtcgagtcagagaagttcaaaatcaacaatagtaagacccgggttgccagcagcgcgagggctaagatcgtcaccggcttagtaattagcgacgaaaagatcggcattggaaaacaaaaatacaagaacgttagggctaaaatccaccatcttacactgccctctgaaatggggaacgtgaagcttctcaatgaggtgggcggttggctctcttatctcaactctgtggataaggaaagactgtccaaagccaggaaatacataaatgagctccacaagaaaaaccctaaaagtatgatccagtatctggtcaaatga

SEQ ID NO: 10073 - RNA, 960 nt, synthetic construct
  source 1..960: mol_type = other RNA
atgtcccagactaactccatcaaactcaatatgctgggtctgcctgtaatacaatccattgaggatctaagcatgctcacgcatatctctaaatacacaatctaccagctgtccattcacgccgataagtactataagacatatgagattcccaagaaatcagggcgcaatcggactattagccagcccaacaagaaacttaagggcttccagtcatgggtcctcagaaacattctggataaggtgaaagtcagcgactcatgtaaaggattcgagaaagggtcttctaccgtcgaaaacgcactgccacatcgaggagccaatacagtgctcagtatggaccttaaagacttttttcctaccattaccatccaacgggtgttttccatctttaaggttttcggctattccgacttgatatcgacaattctagctaacatcacaacttatgcgggcgcattgccccagggatctccatgcagtccgaagctggccaatctcagcgcctggaagctggatcttcgcatccaaggttacgtggggaagcgtgggatgaattatacgaggtatgcggatgacctcactttttcctcgttaaacccaagcaacgtcgtaaagatcattcccatgatcaaggaaatcatagagagcgaaagtttcttcgttaatcactcaaaaacccggatcgctggatcaagtagagctaaaatagtgaccggcctggttattagcggtgaaaatataggggtgggcaaacagaaatacaaaagaatcagggctaagatccaccatctgaccctgcctgccgagcaggaaaactctaggctgctgtacgaggtgtccggctggttgagttacttaaattctgtggataagaaccgattgctcaaggccaaggagtacattaaggagttaagcgaaaagcaccctgacactctgatcgcaaaccttaacaattga

SEQ ID NO: 10074 - RNA, 960 nt, synthetic construct
  source 1..960: mol_type = other RNA
atggccaagacagagatcatcaagttgaatatgctgggactccccgtgatacagtctatcgacgactttagcgtcgttacgcacatttccaagtatacaatttaccagttgtctcaccactcagacaagtactacaagacctttgagattcccaagaaaagtggaggaaaacgtaccatctgccaaccttcaaaaaaattaaaaggtctgcagtcctggatcctcgtaaacatactgaacaaaatccaagtgtctccatcatgtaaggggttcaggaagggctccagcacactcgacaacgccctgccccacattggtgctaatactatcctcaacctagacttaaaggattttttccccaccgttagttccaaacaagtctacaacgtcttcaaaacaattggatacaataagctcatcgctactgtgttcacgaatatttgcacctacaatgatatgctgccgcagggctccccatgttcaccaatgctggcaaatttaactgcctggaatctggatctgcgcattcaggggtatgtggggaagcggggcattagttatacccgatatgccgatgacctgagctttagcgggctgaatccaaccaaggtcgttaagatcatacctatgataaagaccatcatcaacgatgagaatttcgaggtcaaccataagaaaactagaatagcttctagcgctagagcgaagatcgtaacaggcctaattgtgaacgaagacagtgtggggatcggtaaacagaaatataaagatcttagggccaagattcaccatttgatcctgcctactgagcagaaaaacgaaaaacttctctaccatgtgggcggctggcttagctatcttaactctgtggacaagctccgcttgcagaaggcaaagaaatacatctcggaactgacaaagaagtatcctaccactctgattgcacggctggataaatga

SEQ ID NO: 10075 - RNA, 1005 nt, synthetic construct
  source 1..1005: mol_type = other RNA
atgtctaaaagcgataagtttaagctctccatggccggcttacctgtcatggagaatctgaatgatttttcccgcctgacacacatttcaaactacacattgttccaactctcgaaatattcggacaagtactacaagcattactacatccccaaaaagtccggtaagccgcgtcttatatcacagccctgccgaaagttgaagggaatccagagttggattttgaataacatcctggacaaactctgcgtcagcaattcctgtaaaggattttctaagggaacctccatcatcgacaatgttgacccacataaacattctagcgtagtgttgacaatcgacatcaaagatttctttccttccataaggagagataaggtgtacaacatcttcaaggccatcggctacaacaagttcatgagcaccatctttactaacctatgcacttgtaatggcgcccttccccaaggaggtccgtgttctccaaagctggccaatctgagcgcatggacccttgatgtgcggatccagggctatgtgggccggagagggataacttacacacgatacgctgacgatctcacttttagcaccacgaacccacagaagcttataaagcggattagtactattacaagcattattgaggacgaaaaactgcacattaacccttctaagactaggatcgcaggtagtgccagggcgcggaaagtaacaggcctcattatcaccaatgaatcattcgggatcgggcgccaggtttatctcaaagtcagggctaaaatacaccacctcaccctgaacagagaacagaagaatttcgatctgattaacgaggtccaggggtggctggcctatctaaagaacgtggacaaactgagatataaaaaagcagcggactatatccgctcattaaaagagaagtatccagcaaccctgataagtcaaattatcctgcctcccctgattttagaggttgctaccgtgattacggctgtggaatga

SEQ ID NO: 10076 - RNA, 960 nt, synthetic construct
  source 1..960: mol_type = other RNA
atgtccaagacagacaacataaagctccatatgttgggcctccctgtgattcagatggtggataacttcagccaagtgacgcacatttctaagtataccatttaccagctctcaaagcactccgacaaatactacaagacttatacaatccctaagaaatctgggaaactgagagagatcagtcaaccctctaaaaaactcaagggcctgcaaagttggatcctggccaacatcctgaacaagttaaaagtcagcaacagctgcaaggggttcgagaagggctcatccatcgctgacaatgcagagccacataaagatgccaatacaattctgactctggaccttgaagattttttcccaactgtgaagaggaatcaggtttactccatctttaagactatcggatacaataaggcaatttcaacgatcttgactaatatttgcaccttccagggcatcttgcctcagggatcgccttgttcgccaaaactagcaaatctcagcgcaagcaagttagacgctcgcatccagggttatgtgggcaaaagaggcattaactatacacggtatgccgacgacctgagtttttccgggctatcacccgctaaggttgttaagatcattcccatgataaagagcattatcgagaacgaaaatttcgtcgtaaaccccgagaagacccgaatagctggagccgcgcgggccaaaaaggtcaccggtctgataatttccaataacacctttgggatcggtaagcagaaatacaaagatcttagggcgaaaatacaccacttgaccctgccatctgaacagaccaacaccaagctgcttaatgaagtgatcggatggctgtcttatctgaatagcgtggataaaaaacgcctcagtaaggccaacaagtacattactaagctgacggataaacatccgacaacattagtagccaaacttaaacgttga

SEQ ID NO: 10077 - RNA, 990 nt, synthetic construct
  source 1..990: mol_type = other RNA
atggtggaatctacatccggcctgattaagaaaggttccaaagacaatttccgcctgaacatgttgggactgcctttaatccagacaatgggcgacctgagctccctcacgcacgtgtcagagtacaccctctacaatctttctaagaacgctgacttccattataggatttatgatatccccaagaagaacaaaaccccacgtgaaatttcacagccctccaaacgactgaaaggcctacagtcatggattttggttaacatccttaataagcttcgcgtgtcaaatcattgtaagggatttgaaaagggaagttccattgcggataatgccgaagcacatatcggagcaaatactatcctcaccatagacttgaaggatttttttagctcaatcgattcgattaggatctacaacattttcaagagcatcgggtacaattctttgatagctactgccttaaccaatatttgcacatttagaggcgttttgccccaggggagcccatgcagtccgaaactcgccaacctgtccgcctggatgatggacgtaagaatccaggggtatgtgggtcaaagaggtatcagttacaccaggtacgccgatgacataagtctgagcggactgcacccttccaaagtagtgaagctgttgcctatgattgagagcattattaacgacgagaaattcgtggtcaattctgacaagactcgaatcgcagggagcgctcgggccaaaaaggtcacaggcttagtcctgtctgataattcgtatgggatcggcgctaaaaagcttaaaaacatacgggcgaagatatatcaccttgttctgccagaagagcaaaagaacatcaaactgctgaacgagctcaagggctggctctcttatatcaatagcgtggataagcgccggctggagaaactccacctgtacatcaagaaactcctaaacaagaaccccgagacgctactggcacagctgagtatttga

SEQ ID NO: 10078 - RNA, 969 nt, synthetic construct
  source 1..969: mol_type = other RNA
atggtgaagaacgagaatattcggctgaatatgttgggtctacctataattcagtcaatcgacgacttctcccacattacccacctgtcaaagtataccttatatcagctcagcgagaaaagcaattttcattacaagaagttcccactgaagaaaaaaactggtggtacccgtactatctgccagccctcgaagaatctgaaaggcctccagagctggatcttggtaaacattctgaacaaactgaaggtttcagactcttgcaaaggcttcgagaaaggcagctcaatcggagataatgcccgccctcatatcaacgctaattgtatcctgacaattgacttatccgacttttttggaactgtcacagacatccaagtttataacgtgttcaagtctataggatacaataaactgatcagtaccatgctgacaaatatctgtacatgtgacgggagtctgccacagggctccccatgcagccccaagcttgccaatttggtgacctggaagctggataagcggatccagggttttgtggggaaaagaggcatcacttacacgaggtatgcggatgatctctctttcagcggactgcatcccgccaacacggtacaaattcttcctgtcgtgaaaagtatcgtcgaagatgaggggttcattataaacccgaaaaaaaccagggtcgctggggcatctagggccaagattgtgacaggacttgtgatttctaacaataagtttgggataggcaaaacaaagtacagaatacttcgaagtaagatctaccacttgactaagcccaaagaacagaagaacactgacctcctcaacgaggtgaacggctggattgcatatctgaaatccgtggataaatcccgctttaataaagtcttcaagtacgttaccaagctaaagaaggaacaccctaagaccctcgttaaccaaattacgatctccaataactga

SEQ ID NO: 10079 - RNA, 972 nt, synthetic construct
  source 1..972: mol_type = other RNA
atgataaagaatgagaacatacgcttaaacatgctgggacttcccattattcagtctatcaatgacttctcccatattactcacctctccaaatatacactgtaccagctcagcgagaagtccgatttccattacaagaagtttcctctgaagaagaaggctggtggaacgcggaccatctgccaacctagcaaaaatttgaaggggctccagtcttggatcctcgtgaacatcctgaacaagctcaaggtgagcgatagttgcaaaggttttgaaaaaggatcttccatcggagataatgctcgtcctcacatcaatgccaactgtatcctgaccctggacctgtctgacttctttggcactgtctctgacatccaggtctacaacgtgttcaagtctattggctacaacaatctgatttcgaccatgatgacaaacatttgtacgtcggatgggagtcttcctcaggggtcacccagcagcccaaagttggccaacttagtctcctggaagttagataaaagaatccagggtttcgtagggaaaagaggcataacttatacccgatatgcggacgaccttagtttttcaggcctccatccggcaaatacagtgcaggttctaccagtcgttaaaagcattatccaggacgaggggtttcggattaatcccaggaaaacacgagtgtccggcgcttcaagggcaaaaatcatcactggcctggtgattagtaacaaccgcttcggaatcggccaaaccaaatatagaattttgcgggccaagatttttcaccttaccaagcccaaggagcaaaataacatcgacctgctgaatgaagtcaatggttggatagcctacctgaagagcgtagataaactgaggttcaacaaagtgttcaagtacgtgtcaaagttgaaaaaagaacacccaaaaacactaatcaaccagatgaccatagccaatattgtttga

SEQ ID NO: 10080 - RNA, 963 nt, synthetic construct
  source 1..963: mol_type = other RNA
atgaacaaaagtaatattatccgcttgaagatgctcggtctgcctgttatggaaaaggtggatgactttgctgagttaactcgtttgagccgttctatcatctaccagatgtcgtcctttgcgaatgaatattacattacataccagaggccaaagaaaactgggggtaagagaacgatctcacagccatccagaaaattaaaagctctgcaagcgtggatcctcgtgaatatcctgaacaagttaagcgtgtctccctcctgtatgggattcgagaaagggacctctacctaccagaacgcaaaggcacacataggcgcaacagccattctcaccgtggatattcaggatttctttcctagcatatcccagcgacacgtttttaacatttttcgagccgtcggctacaataatctgatctctatcatactgagcaagatttgcactttcgagaataagctgccccaagggggaccctgcagcccaaagctcgccaacctggtcgcttggagactggacaacagactacaaggatacgttggcaaaaagggcattagctatacaaggtatgctgatgacctgtccttcagtggacccatgccatctaaggtggtcaggagtcttcctttcattaaatcaatcattacctcagagaggttcgaggtaaatgacaagaaaacgcgcatcgcaggcccgagtcgcgccaaaatcgtgaccggactcgttgtcgggaacgatggcgtagggatcggtcgggaaaaatacaaactgtttcgggccaaaatacaccggctgaccaaacagactgagcagacaaatcttaagttgctttccgaagtgcatggctggttggcctatctgcatagcgtggacgtcaaacggcttaataaggccaagaagtatatcgctaacctcaaaaacaagtatcctgaatcactagtgtccaagattaactggaagtga

SEQ ID NO: 10081 - RNA, 981 nt, synthetic construct
  source 1..981: mol_type = other RNA
atggcgcgtaaaactctgaagaagaccgacaatgtccgattgaacatgctcggcctgcctgtgataggaacactcgatgatttctcagcgttgacccacctgtccaaatattccattttccagctctccaagaactcagggaagtactacaaagtttacgagattccaaaaaagtctggtaagaagagagaaattgcccagccaagtcgcaagctcaaggcccttcaaagctggatcctggtgcacattctgaacaagctcaaagtgagcccctcctgcaagggatttgagaaggggcagagcatattagagaacgcaaaccctcatgttggcagcaacgccatcctcaatattgacctgaaggacttttttccttcagtgaagtctaactacgtgttcaacatcttcaagtctttaggctatgaccataccatcagcactatccttacaaatatctgcacctttcaggggaaactgccccaagggtcgccatgttcccccaaattggccaaccttgcttgctggcagctcgacaataggatccagggctatgtcgggaagcggggcattacctatactagatatgccgacgatctgacttttagtggtctgtctcccaataaggtaatcaaaatagccaagacggttgataaaatcattcagaatgagggtctactgatcaataccgataagacacacttcgcaggaacagcaaaagctaaaaaggtaactggactggtgatcaatgacaaaagcgctggcattggaaaaaagaaatatcatgaacttcgggccaaattctgtaaccttgctaagccggagaatcaggaaaaaaaagataagctgtaccacgctataggctggttgagttttttaaagtcagtggatattgtccgctacaaaaggatcctgcactacattgcagccctgaagacgaagtaccctaacacacaactagacatgatcaaaaccgaccagtga

SEQ ID NO: 10082 - RNA, 966 nt, synthetic construct
  source 1..966: mol_type = other RNA
atgacaagcacaatccgtctgaagatcctgggtttgcccaatatcaccgatcttgaggattttgcctacctcataaatctgtccaagaactcaatctaccagctgagcaaaaactccgaatattactacaagacctatcagattgccaaaaagaacggaaaacttcgcgatatctcacaaccgaacaaacagcttaaaggcatccagttgtggatcctgaacaatatcctgaataagctcaaagtatctgagtacagcaagggtttcgaaaagggtcagtcaattagtgataacgtgcggcctcacattttctctaattgcctgttaaacatcgatatcaaagacttctacccatctatcaattccattaaggtctacaacttgttcaagagcattggctacaataatctcattagcaccttactaaccaatatctgtacctacaaaaactctctgccccagggaagtccttgttcacccaaaatatccaatctgatttgctggaaaatggactcgaggttgcaggggtacgtcgggaagaaggggataatattcactaggtatgctgacgacatcactttttccagtattatgcctgataagctgattggagtgctgccatttgtggaaaagatcattatcgatgaaggctttaccttaaataagtacaagacgaggtttacaggcaaactcagacgccgggagataacaggcctggtgatttatgacaacaactttgggataggacggaaaaaactcagaattattagatccaaggtctacaatttcactaagactactgacaacgtgaaccataaagcactacaccatctttatggctggatgaattacatcaagtctgttgacgaggttcgatataagagtttgctcgagtatatcaaactgctgtatcaaaagaatcccaaaacagacatcaagacgctctataactattataacagctga

SEQ ID NO: 10083 - RNA, 1002 nt, synthetic construct
  source 1..1002: mol_type = other RNA
atgaaaaggaagaataacttcaagttgaacttgtttggcattcccataataaatacccttgatgatctgagccttcttacccatataaccaagtctacgttatttagactctcaaaaaagtcgtacctgtactacaaagagtacactgtaccgaaaaaaaataagggagtgcggaagatcagtcaaccttccgccaagttgaaggggatccagtcctggattctccagaacattctagaaaagcttaaggtcagcccatcttgcaagggtttcgagaaagggactagcacagcagataacaccaaacctcacgtgggtgccaatgccatcttagtcgttgacatcaaagacttttatccttcaatcaaagggaatttcgtgttctctctgttcaagctcatcggctataacaacctgatcagtactattctgactaatctatgtgtgctcaatgactcactgccacagggctctccttgcagccccaagatcgctaatctggtggcgtggaagctggacattcggatccagtcttacgtcggaaaaaggggcattatttacacgagatatgctgacgatctgacatttagctcaataaacccagccaacctgattaagatcttgcccattgtgaaagacatcatagagagcgagaacttcgagataaacaagaataaaacccgctttataggaattagtcgatgtcgcaaaattacagggctcgttctgagtgataataacttcggcgtcggcaagagaaagtacaaaaacattcggagcaaagtgtttaagctgaaggacatcgaaaaaatcgaggacgacaaggaaaagcgaaaaatcaaggaaatgaaggaggtatatggactgatcgcttatctcaaatccgtggataaagaaaggtacttacgtatcctggattatatccgcacattgtccgttaagtatcccaattccatcctcaccaatatttccttcaacactaagacaaccattgcaaaatga

SEQ ID NO: 10084 - RNA, 966 nt, synthetic construct
  source 1..966: mol_type = other RNA
atggccagcccatctcagacctccaagcttaggatgttagggctccccatttttgatgacctagagagcttcgcccaagtcactcgcttatcaaagaagttcctctatctgcattcttcattcagcgaccagcactacaagaagtacttcatccctaaaaaaagtggaggacaaagagagatctctcagccatccaaagctcataaagccattcaaggctggattctccgtaatatcctggatctgttgcaggtgtctcaggcatcgaaaggctttgcaaaaaaacaaaccactgcggacaacgccattccccatattggagctaatgctatcctcagtttggatctggaggacttcttccctagcattaccgccaacaaggtgtacagcatctttcactcactgggctattctaagcccatatctatcatgctgacctcgatctgtacttgtggggggaagcttcctcagggttccccatgcagtccgaagttggcaaacctcgtatgcatcagacttgataatagggtgcaggggtatgttggagcgagaggcgttacttacacacggtatgccgatgatctgacttttagcgctgctcaccccggtaagctaatgcacattttcaacttcatccggaggataatcacagaggaaggcttttccttgaacgaaagcaaaacccggctggcaggcacacgactgagaaagaaagtgacaggactcgttgtcaccgaaggcgccgtcggagtgggtcgaataaagtaccgcgagctgcgctcaaaggtatttaacctcacgaaaacacaggacattttttatgaccagaaggagattaatgagatctacgggtggctgggttacctgaagagtatcgactccaaaaggtacgagaaactggtgtcccagatagaaacgcttaagaaaaatcacaaggaaacctcccttgactatttactggtgtga

SEQ ID NO: 10085 - RNA, 1014 nt, synthetic construct
  source 1..1014: mol_type = other RNA
atgaacacgaagatgcgccttcacctactggggctcccctcaataagcagcatagacgaattatccgatacaacccatctgagtaagtcacttatctttaggctcatcaaatacaacgataagttttatcgcgtctataaactccccaagaggaatggtggttatcgagaaattgctcagccatctaaagaacttaaggccttacaggcttggatcaaccggaatattctggaccgcctggaggtgagccccgcatgtaaaggctttgagagagataccagcatcctggataatgccactccacatgtaggctctaacgctgtgctgatattagacatcgaagactttttcccgtctattaccgcgaataaggtgtgctcgctcttcaaaaggattggctatccctcccaggccgcagctatcctagcgaagctttgcacgtttaagggcagattgccccaagggtcccctgcaagcccaaaaattgccaatttggtgtgtctccgacttgacctgcgtattctcggctatgtcggaaagagaggcatcgtgtacactcggtatgccgacgacttgaccttctccgggccttcaacctcatccctgctgaaactcttgtacgtcgtcaaaacaattatcaatgacgagggtttcgaaataaacaactacaagactaggatcataggaccgtcgaggcagcacaaaattacaggactgatcgttaacaacagcttcgccggaattggccacagacagatgcgcgttatccggagtaaggtacatcgtctgtgcaagtacgatgcatacagtgtgcctcaaaaggagctaaatcacgtgatggggtggctggcttttgttaagggtgtggatacaaaacggagtttgattctgtatcggtacatccaggggctcaaggagaaataccctgattccggaatccagaaactgaagattgatttcctgctgaataagccttctaaaagatctatcgccagcggggagccagacctgtga

SEQ ID NO: 10086 - RNA, 954 nt, synthetic construct
  source 1..954: mol_type = other RNA
atgtcttccgacagaatacgccttggactgattggacttccgaagttggtcagcattagcgacttgagtgatgccattaggttaagtaaaggtctattgttccggtgtgcgaaatacccaaataagcagtactatacctatacgatccctaagaaaacgggagggacacgagtgatctcacaaccttccgcagaactgaaggctgtgcagggctggattctgcgtaccatcctggatcgcctctctgttagcccagcttgcaagggtttcgtgcctggcgcaagcacccgagataatgcaacgccccatatcggcgccaaagcaatcatgtgcctcgacatacaggacttctttcccaacgttaaggcttctcatgtctactccctgtatcggactatagggtatagtacccaggtggcctcgatccttacttctctctgtacctttcatggcggactgcctcaaggcgccccgacatcacctgccttagccaatctcacctgcgtaaggtttgatgcgcggatacttggctacgtggggaaaagaggcattgtgtacactcgttacgccgatgacttgacattttccgcctattcatacagtagcctcccacgggctctcccaatgattactaagatcattgaatccgagggtttcctggtgaatcggcagaaaacccgcatcagaggacccgccagaaggcacacagtgacaggtctagtggtcacccagaacaacgttggggtggggcgcaagacttatagggagctgcgagctaaattacacaggctggccacaatgcccatcaaggcagttaaaaggaaggagattgctaaggtcaagggatcaatggcgtacctcaacagcgtcgacaaagtacgcagagatagactggacgactacctgatccacctgaaaatgaactatcccaagtctatcctgactaagatgtga

SEQ ID NO: 10087 - RNA, 972 nt, synthetic construct
  source 1..972: mol_type = other RNA
atgtcgagcgataaatacagactgagtctatttgatctgccaaaaatcgatagccttgaggacctgtcatatttgtccaggctgtcaaagggtcagctctatcgtttcgccaaatactctgactggttctacaaaagctacaggatccctaaaaaaagcggaggggaaaggattatttaccagccctcttttaagctgaaagcaatccaggcgtggatcctgcgtaatatcctcgaaaggctgtccatttccagtgcctcaaaaggcttcagtattgggtctagcattaaggataacgtgaagcctcatgtcggcgcaaatgccatccttgccattgatatcgagaatttctaccccagcatacccgctaatagagtgtggttcgtgtaccgcaccgccgggtattctccacagattgctgctgtcctcacatctttaacaacctacaattcattcctacctcagggtgcaccctcatctcctcgactgagcaacttagtttgttggtccctcgataaacgaatgctcgcgtttgtgggaaaacgggagataacttatacccggtatggcgacgatctgtccttttcagcctcttcataccaagttttgagtaaaagctttcacactatcaagtccatagtaagaaacgagggattctctctgaacgagtcgaagacacgctttatgggaccggcaaagcagcgcagagtaaccggcctgatcctgtatgaaaaccagtttggcatcggtcgcaagcaatacaggatcttacggagtaagattcataagatgtgctttataccatccgacgaaattgactccttcctccttaaccacattgccgggtggttgtcctatgtgaaagacgtcgacacgaatcggtacaataagctcgctaagtatatcctggacttgaagaagaagttcaacagtagcgctgttagccttctgaacgtggagatctccgcctga

SEQ ID NO: 10088 - RNA, 1005 nt, synthetic construct
  source 1..1005: mol_type = other RNA
atggataataataacaacattgcgtcatacttcctcggaatccctaccatcaataatcagaaggacttagccaaccacctgaacctttccgagtatactttgcataaggtgatcaaatgcactgataagtattacaaggaaatccgcattcccaaaaaaaatgggggtacccgtagactggcctgtccttcaaagaagttgaaagctgtacaagcttggattttacgcaacattctcgaccatctttctgttaatccaagcgccaccgcatttaagaagcggacaaatatcacaagcaacatagagcggcatactgataatcaattcttcctctgtctggacatagataacttcttcgaaagtattccgcagaagaacatcaacaatttttttaaggccctggggtacaataagcacgtgtcctttattttagccaagatttgcacctacaagggatttctccctcagggcggagtgacctctcccgcactgagcaacctgatcaatatcaagctggacaaacggatatcaggctactgctccaagagaaatattgtctatagcagatacgccgacgactttactttcagctccaacaatccaaataagctgatccagtcgattaagatcctgaaaaagatcatcaatgaggagaactatcagttgaacaacaacaaaacaaggatcattcgccccggcaatgcaaaaaaaattacaggccttctcattactgatgaaggtaagatatctatcggacgaaaacaaaggaaaacactaagggctacgatctataacagtctgaacaatgacaaccttacgatccaggagaagatagatatcgaaaatcacattaacgggtggctgtctttcttgaaaggcatcgactataacagttaccagcagctactgaagtggaaagaggagttcgagaaaaaagcgcagaccaacaaaatagctaaacaactcgagaaggaagagtttgaagaaatgctgcgatccttctga

SEQ ID NO: 10089 - RNA, 990 nt, synthetic construct
  source 1..990: mol_type = other RNA
atggacaataacaacaatatcgcgtcatactttctagggatacccaccatcaacaatcaaaaagatttagccaaccatttgaacttgagcgagtacaccttatataagatcatcaactactccgacaagtattataaggagattaacatccctaagaagaatgagggcataaggaagctggcctgtccttccaaaaatttgaaagccattcaggcttggatactccgtaatatccttgatcccctcagtactaatccgtctgccaccgcattcaagaaagagacaaatatcactagcaatgtggagcggcatctggataaccagttcttcctgtgcctggacattaacaacttctttggctccatcccccagaagaacatcaacaactttttcaaaactctggggtacaataagcacgtttctttgatgcttaccaaaatctgtacgtataaaggcttcctgccacagggaggtgtaacttctccagctctcagtaatctgatcaacattaagcttgacaagcggataagtggctactgcagcaagaggaatatagtctatagcagatatgctgatgacttcacgttttcatccaacaatccaaataagctcattcagtccatcaaaactatccagaagatcattaacgacgaaaactacgagctcaacaacaaaaaaacacgaattattcggcctggaaactctaagaagatcacaggcctgattattacagacaacaagaaaatcagcatcgggagaaaacaaaaaaggattctgcgcgcaacaatgtacaccctgtacaataatgatgccctaacccaaaaggagaagattgaaatggaaaatcacatcaatggttggatagcatacctgaaaggaattgactataattcacacaagcagctgctgaaatggaagaaaaagttttcgcatgaacgcgatcaaaaagtgatgaaagagcttctcaagcagtttcagatggaactctga

SEQ ID NO: 10090 - RNA, 1056 nt, synthetic construct
  source 1..1056: mol_type = other RNA
atggtcagcatgttcattgatccactgaaaaatcacaagaagcggctcaacatggataacaataacaacatcgctagctatttcctgggcatccccactattaataatcagaaagacctagccaaccatctgaacttgtctgagtattcactgtacaaggtgattaacttcaccgactggtattacaaaaaggtccagataccaaagaaagacgggacattccggaaccttgcctgcccatctcagacgcttaaagccattcaagcatggattctgcgaaacatcctggaccctctgtccgtgtctgccagcgctaccgcattcaagaaggaaaccacaatcaagtttaatgtggaaaggcacagcgataaccagttttttctctgtctcgatatttcgaatttcttcgaaagtatccctcaaaagaaggtgatctccttttttaaagccctcgggtacaataaacatatagccctgatactgagcacactttgtacctacgaaggaagtcttcctcagggaggggttacttctcccgcgttatccaacttaatcaatactaagctggacaaaagaatcagtgggtactgctctaagaagaatatcgtatatagtaggtacgcggatgattttaccttctcctccaacaatccgaataaactcattcaggctcggaacatcattaaggagattatcaatgacgagggctatcaaatcaacaaaaagaaaacgcgtttcatccgccccggaaacagcaaaaaaattacaggcttggtgatctcagatgataataagattggcattggtcgaaagcagaaaaaaatactgagagcaaagatccaccagtatttcttaaaggaccaattgactccccaggacaaagaggagctgaagaatcatatagagggctggataagctacctaaagggtatcgactacaactcattcaagcaggttcaaaaatggcagagggagttttcattgaaggccaagaaagagaaaagaaagaaagcagctgaaaagaaggaatttcaggagctcctgcgctccttttga

SEQ ID NO: 10091 - RNA, 960 nt, synthetic construct
  source 1..960: mol_type = other RNA
atgaacattgccgcttatacgctgggtatccccaagatcgactcactgctggatttgtctaatgcaattaatctctccgagtatacccttcagagaattctgaactccgttgacgaccaatattacctgattaagattccaaagaaggataatagcttccgggaagtgtattcacccagtcccgcactaaaggctatacagaaatggatcctcgaaaacatcctgcagcctatagctgtggatccatccgccaccgcctttcagaaaggagtcactatcagaaataacgttgagctccatattgataatcagttcctgctttgcatggatatcaaggactttttcccttctattaagaagaacagagtgtaccaactctttcgaagcgtaggctacgatgaacacatctccttggtgttttctcgcttctgcacctataaggagttcttgccgcagggcgcagtcacaagccctagtatatcgaacattatcagtatcaagcttgacagacggttaaatgggtactgttctctgaggaatatcgtgtatagccgctacgccgacgatttcacattctcaagcaacaatactgacaagctgaggaaatccataaacatcttgaaagcgatcatcgaggatgaggggtacaccctgaacactagtaagacccgattactaattccaggtaataaacgtaaggtcacaggactcattatctctgacagcaaaagcatttctattgggcggaaacagcgtaggatcctgcgcgccaaaatccatcactcgatctttaaaatggagaaaaacacagactcctggaggctttttaacaagcacattaacggatggttaagcttcctgaagggcatagattatgaatcatacatttccctcctgaagtaccgggagaatctcaaacagaagaaaaaagaacaagaggacataatctcagtgttttga

SEQ ID NO: 10092 - RNA, 972 nt, synthetic construct
  source 1..972: mol_type = other RNA
atgaatatagctgcttactctcttggtatacccaaaatcgagaatttgaaggacttcagtaacgagatcaatctgtctgagtatacactgcaacgcgtactcagctccgtgaacaaacagtacaacgtggggaaaattcccaaaaaggatcagtcatttcggactattttcatcccaagtaacgcgctccgcgccatacagacctggatcctgcggaacattctagacttgatatccattcacccctctgcaatggcctttcggaagaataccacaattaagaacaatgtggaggttcacattgacaatcagttttatctgtgcatggacgtacaggactatttcccatcggtcggcaagaacaaggtgtatcaactgtttcacagcattggcttcaataagcagatggccctgatcttttccaacttctgtacatacgaaaatttcctgcctcagggagcagtcaccagcccgtccatcagcaaccttgtgaacatcaagctggatagacgcatcaacggtttctgctccattaggaatatcgtgtatacaaggtacgccgatgatttcgtctttagctcaaataatagtgacaagctgaaaaagagcatttcaactcttaagaccattattgaggatgaggggtacaaactgaacgattctaagactaggctcctatctcctggaaacaagcgaaaaataaccggccttatcgttagtgacaaaaacaagatctccatcgggcgtgaaaagaggagaaaattgagagctcgaatccatcattcgatcttcaaactcgaagaggacaagaatttagcatcctggtacgaaatgcacattaatggatggctgagctttctgaaagatgtcgatcaaatctcttaccagcatctcgttgactataagatgaagctcgaggacaaaaaaaaaaagcaggatgaattgatggacgaattaacgtcagtgttttga

SEQ ID NO: 10093 - RNA, 939 nt, synthetic construct
  source 1..939: mol_type = other RNA
atgaatataactgcttattctctcggccttcctcgcgtcgataacattgaggagttgtcctacaaaataaatttgtcagaacacaccctccacaaggtcctgaagacagtagatctgcagtacaaaactatccacatcccaaaaaaatccggatttacaagaaccgtgcatagcccttcaatggttctaaaagcgattcaagcctggatcctgcggaatattctggatccgatcttagttgatcccgccgcaacagcctttgtgaagaacacgaatataaaggacaacgtcaagcggcacaatggcaataggttttttctctgcatggacattgaggacttcttccatagcatcggtcagaataaagtgtaccagttcttcaagggactggggtataatagtcacatgagccttgtgttctcgaaattttgtacctacgatgactatctcccacagggggcagtcacctccccctcactgtctaacttgataaacatcaagttagaccgcaggattttcggctattgctctagtaaaaacatcgtgtattctaggtacgctgacgattttacttttagttgtaataacccccacaagcttatcaaggctaagtacatgctagaaaagattattgaggacgaggggtacgaactgaacgagaacaagacccgaattctcagaccaggtaatgcccgtaagataacaggcctcattgtagccgaagacggaaagatcggcatcgggagaaaaaaaaaacggctgattcgagcaaacatctataacctgtacaataaggatctgcctgacgacgagtataagaaactggaaaaccatatccagggatggttcaactatctgtacagcgtggatcaggtggcctaccatcagcttaagaactaccaatccgaggttaaattgaatagcatcttcgctttctga

SEQ ID NO: 10094 - RNA, 975 nt, synthetic construct
  source 1..975: mol_type = other RNA
atgaacattgctacttatagcctgggcattcccaagattgagaacatagaagagttgtctcacaagattaatttgagtgagtacacgctacacaaaatcctcaaaagtacagaccagcactacaagatcattaagattcccaagaaaaacggtgagtttagggaactgtcttgtccatcattcatccttaaagggatccagaagtggattctcaagaacatcttaaccccgaattcgatagaccctagtgcgactgccttcattaagaccaaagggatcaagaacaatgttaatcggcatcagggaaatcaattcttcctttgccttgatatcgacgacttcttcccttccatacagcaaaacaaggtgtataatctcttcaagagcatcggctataatccccatatctctctggttttatcttcactgtgtacctacagaggagtactgccacaggggggtgtcaccagcccaacaatctccaatctggtgaatatcaaattggaccgccgaatatccggttactgctcgtccaggaacatagtgtattctagatatgccgatgattttaccttttcaagcaataaccctcacaagctgactaaaagcatcgcaacaatcaagagcataattcaggacgagggctacaagctgaacaacaagaaaacaagattcctgaagcccggcaacaagcggaaaattacagggctcgtcctgagcgacgagactggggaatttggaatcggcaggaagcagaaacgcatccttcgggctaagattcatacgctggtgtttaagctcaatgaaaacgataagagttggaaagccctaaacgaacacatcaatggctggctctcatacctcaagggaattgattttgaggcttattcccagttatccacttacaaagaggacctgaaagataaaaaagcaaccttgtctgccaaacaacgtgaactgttcgatctgttttga

SEQ ID NO: 10095 - RNA, 1002 nt, synthetic construct
  source 1..1002: mol_type = other RNA
atgagcaatatagcctccagatttttaaacctgcccacaattaataacctgaaggatctgagtttactgatgaatctcagtgaacacttcctcaatcaactctcaaggaatgtggactaccagtacaaagaagtgaagattaagaagaaggacggatcaaaaagactccttgcttgcccgactcagagactcaaagccgtgcaagcatggattctacgtaacattcttgaaaaactcagctgcgattccagcgctacggcatacatcaagggttataacctgaaaaacaatgcccagatgcatacaggatcatctttcttcttgtgtctggacatcaaagattttttcggcactattccacagaaacatgtttaccagctattcagggctctgggttacaacgagcacgtgtccattatcttgtctaacttctgctgttataagggggtcctgccccaagggggagtgacatcacctatactgtccaacctaatcaacattcgactcgacagacgcatacagggttatgtctctaagaggaatattacctatactcgctatgccgatgacattaccctgagtgccaataaccctgacaaactgatcaaggtcaaagggttcgtagagaagattatcaagaacgagggctatatcctgaatgagaacaaggcaaggtttctgcggcccggcaacctggtgaaaataaccggattagttatctccacagatggctcgatttctatcggccggaagaagaaacggttgttgcgagcgaaaatccacaaactgtactttgacaccaatttgtccaaactggagaaagacaagcttagcctccatataaatggctggtttagcttcttgcgctctatcgatccagatgggcttaaccagctcaaactttacaccaagaagcttaagcagaaaaagatcaagcagaagaagtacaagatcagccaaaaaatgaataagcagaaggaacaccagctgagtatcttttga

SEQ ID NO: 10096 - RNA, 954 nt, synthetic construct
  source 1..954: mol_type = other RNA
atgtccaatctgtttggcatacctaatatagaagggattaatgacttcagcaacaagaccaacatttcgtcttacacgttgtttaaaatgagctctaaaccggacctcaactataaaaaggtgctgatccccaagaacctaggtcgtgggactagagtcctggcttgccccagctataaacttaaagctatccaggcatggattctgcgcaatatacttgacaatattcagtcccatcgaaacgcaacagcgtataacggaaaaagtctggacgttaacctcaagggccatgtggggaataagtttctgatctgtatcgacatcgtgaacttctttcccagcacgaaacgggagcgggtgtatgacctttttaaatccttagggtacaatgagcagtctgccatcatgttgactaaattctgcactttcgaaggtggattgccacaagggggagttacctcccctgctctgagtaatctcattaacaaggacctggatgatgagatctctaaatactgtaacgcaaagtcaatagcctacacccgatatgccgatgatattacaatcagctccaataacaagaacaagctagatgaagccttaaaatacatcgagaaggtgatacaaggccacggctatcaaatcaaccgggataaaacacgccacctccacccaggtaagcagcgcaagattaccggacttgtatattcaaatgatcagaaggtcggcattggcagaaggaagaggaggatcctgaggtctaagatctacaattacgaaaacaaggagaagttcagcagtgagtcaactatgatctacaatcagattattggatggctgagcttcctcaaaagtgtggactccgaatcatataaatacctgaagacctactggaagacactcagaaataacgacttggagacagaggtcgccgctaccaaacaggataagtga

SEQ ID NO: 10097 - RNA, 1113 nt, synthetic construct
  source 1..1113: mol_type = other RNA
atggctgtgcgaaggcctgggcgcaagcagactctcacagctgtgagtcggaggcaagtcgcacctcgagcagcccttgcctctctgctggtattcgttatgtgtttctgggccagagccggaccaccacctaagcctggaggagcccgcgtggcttctgactcatacaggcttcgggtgttcggccttccggtcattgagagcgtggccgagttagccgccgcaacgcatctgagtccagccttactctatcacctgtgtcagtttcccgatagattttaccgcagatttagtatccctaagaaatccggagcaggtgccaggcaaatccgatgtcccgcgaggcccctcaaagccctccaagcttggctgctgcgcgccatattggattccgtgaaggtccaccccgccgctactgctttcagaaagggccacggcctgcgtagcaacgtgacaccacatcgcgagaatcggtactttctctgcctggacatcgaggacttcttcccctcaattggctacgcgaaagtctggaccgtctttcggactctgggctataatgctcacatgtcgcatgtgttcgcgtccatttgcacatgcgatggcgtcctgccacaggggggagtgacttctccagcgttgagcaacatcgtgtgttttcggatggacgcgcgcttagcagggtattgcggtaagcataacgtagcatatacaagatacgctgacgacatgacattgtctgctacctcccctcgggttctcgttgccgcaaggaggatgtgcacgaggataacacgcgatgaaggtttcgcactgaatgagcgtaaaaccagagtgatgggaccccggcagtgtagacacgtaaccggcctggtggtgagcgacagaggtaccgtcggggttgggagaaggagggaacgcgttctaagagcagccattgctaggggcgcaacccgagatactgggctaaccgatgccgaaggccggagactgaggcaccgcatccgtggatggttggattatctccaggacgtagaccgtccgcgggctgatcggctgaaacgataccgaaccgcccttcttgaacggtggcaggtgtcagaccaggcttga

SEQ ID NO: 10098 - RNA, 951 nt, synthetic construct
  source 1..951: mol_type = other RNA
atgtccggcaaccgttacagacttcggatggccggcctgcccctcatggaagacttgaaggacctggctgactatgttcacttaagcgccggactgctgtatcggctgtcaaagtacaacgacaagttctataagagtttccagctgccgaaaaagtccgggggctttcggatcatcagctgtccctcaaaggacatgaaggctgtacaggcgtggatactaaggaatatactggaccaaatccacgttgcagactctgctacaggattcagaactggaaagaacattcttgataatgccaagtatcacgagggcaatcgatactttctgtgcttggatatcgagaacttctttcctagcatccagtacgccaaagtgtacaccgtgtttaagacaatcgggtacaatactcatatttcccacattttcgcatccctctgcacttgccgagggaagttacctcagggtggcgtgacaagtccagccctgtcgaatatcatctgcattaggctggaccatcgcatttctgggtatgtgggaaagaggaacgtagcgtacacgcgctacgccgatgatatgacgttttcatctctgagcccagggcggctagttgggattaaacgcgtcgcattaaaaatcatcagggacgagggctttgaacttaacgaaaggaagaccagattcctcggcccttgtagacaaagaaaagtcactggtttgattatttccgatgactcactgggtgtgggtaagaaacgcaaaagaatacttagggccacaatccatcgactcgtgaccgctgatctcagtgagattgagcgtcagaaactgcggaatcacatagatggatggttcgcttatatgaacagcgtcgatcccaaaggattcgagcagctcaaaacctatgaagaacgcctcagcttggcatgttctggcgaggataccatctga

SEQ ID NO: 10099 - RNA, 1011 nt, synthetic construct
  source 1..1011: mol_type = other RNA
atgaccgataaaagcaaaaagagttacctgctgcaactattttcacttcctatcctaaacaatctcgaggatttgtcagtttgcacacacttcagtaagaagatcctctaccgattgtctaagttcaattcgaaacattatgcacgatttagtatcccaaagaaatctgggggcaacagagagattctgtgcccctcgctggaaatgaaggccatacaggtctggatactgcgcagcattctcgagaaaatccaagtgagcaaggctgccactgccttcagaccaaagaccagtatagctcagaacgtcgaccagcatctcggaaatcaatatgtgtattgtctggacctggaaaatttcttcccgtccatcagctacagcaaagtttatacaatcttcaataccatcggctatattccccatgtggcacacatccttgccagcttatgcacttgtgacggcaagttgcctcagggagcagtaaccagccctgctctgtccaacatcatttgtctgcgcctggacaacaggctgaatgcttacgttggagcaaagaacatctcttacacgcgttacgccgacgatatctgttttagtgctctttccgactcacggctgtggggcattagaaacacggtcaagcggattatagaatccgagaagtttgtgattaacaagcagaaaacacgcatgcaggggcccactggttgccggaagataacagggctcgtgtttaataaagattcttatggtgtggggaggaagaagaagagagttttgagggccaaaatctttaactacatttctaccttcacctccatgtctcccgacgtgcagctcaaaactgcccagcacattcacggctggatctcctttctcaactcagtagattcccagggatgccaacagctgaccaaatttagcaagattgtgttcaatcaggccgtcgtggcgaaaaaaattgatcctgcgaagatcccagcaccattccttaaagtcttatcaaggtga

SEQ ID NO: 10100 - RNA, 957 nt, synthetic construct
  source 1..957: mol_type = other RNA
atgctggatacaactgatatactgcgcatcccacggataaaagacctgaaggatctggctttccaaaccaaattaagcattggtctactgtataagatggtgaatatccccgataagttctacattcagattgaaatcgacaagaagaatggcagaaagcgcaagatcgagtgtccttcaaaaaagatgaaagctattcaggcatggatcctgcgaaatgtgctggataagatcgatgtgaaccccagtgcaaaggccttcaggcgaaggatgaacttgagctcgaacgttaagccgcacgacaacaataactactttctgtgtctcgactttaaagacttcttttgctctatcaacttcgggagtatttacaatatcttctctgtgttggggtatgatgactcaatgtgctttattctgacaaggctttgctcttacaacggaagactcccacagggaggggtgacctcccctaccttgtccaatatcgcctgtatcaagctggacgagcgcctctccaactatctcgggatacgggatattgtatatacgcgttatgctgatgatattacgctcagcgccaagcagcctgacaaactgcttaaagccttaccaactgttaaacagattatagaggaagagggatacaccctgaacaatgacaaaaccaggattttgggccccaaactacagcggaagataacaggccttatttatgatggtagtaaatttggcatcggccgcgagaaaaagagaacactccggtcagcgatctacaactatgtctacggtcgtgacgaggaagacgaaagggaaagaaaatttcaatggatcaacggatggatgaattacctgaagagcgtcgacaaaaactcctacaatatccttaagaactactggatccagttatcttgcaaggccgaggtcgcagtgactaatgagaatactttcgactga

SEQ ID NO: 10101 - RNA, 957 nt, synthetic construct
  source 1..957: mol_type = other RNA
atgtctgaggtcaaacaccggctacggctcctggaccttcctttctttgaaacaatcgaagacttggctgcgctgatccgggtggacgcaggtagattacgcttgctgagttcacatccagagaaattttatcggacatatcggatatccaagagaagtggaggctggcgcaagatctgttcaccttccaaggaactcaaggccattcaggcttggattttgagaaacgtgctggataaactatcaccatctcaatacgcgaccgcctatgtatccggcaagcgactccttgacaacgtgagcccccacgccaacaatcgttacttcatctccatggacattaggaacttcttccccagcgttacctcgtttcgcgtcagggctatctttgaggccttggggtatagcatgctggccggcagcacattagctagactgtgctgctactttcatggtctgcctcaaggtggcgtcacttctcccgccctctctaatcttgtgtgtctgagactcgatcgacgtttagcaggcctggccgccaggagaaatatagtgttcacccgttatgcagatgatattacattcagctccaataaccggaacgcactctgccgcatgctgccaatcacttacaaaatacttattagcgaacgctttcagccaaatgaggacaaactgagggtgatgggaccgcgagttaggtgttccatcacggggcttgtgaaagatgcgtctgtgggacggttcgggattggcaggcacaagaagtgtgccatgcgagccgtgatgcataatctgctggctagacacgaagcttcacctgactacactgatgaggcatcgatcgtaggatggttgagtttcctccagagtgtcgatggggagtcttacaggcagatgacccgctactggaagcagcagaaggacaaatggctgtgcagcgtcaggcccgtttga

SEQ ID NO: 10102 - RNA, 942 nt, synthetic construct
  source 1..942: mol_type = other RNA
atgaacaatatcgtgcacaggatgcagctcattggtctgccgttctttgacactgtcgaggaactggctgcgctcattcgaatcgagcctggcaggttgaagctactcagcattcatcccgaacgcttttacaggacgtatcatataaggaaaaagagtggcggctggcgcaagatttcttcaccatccaaggagctgaaggccatccaggcatggatcttgcgaaatatccttgacaaactgtctccttcaccttttgcaaccgcctacctgaaaggaaagaaactgatcgataacgttagcccacacgcctctaatcggtatttcttatccgtcgacataaaagacttcttccccacagtgatgaaggatagagtgtgtctgctattcgaagccctgggatatagtaacagagctgccctcgctctgacaaggttatgcagctatttctcagggcttccacaaggaggcgtcacttcgcccgccctttccaacctggtttgcctgaggctagatcgccggttagccgggttgtcttcacggagaaacatagtgtttacccgttacgctgatgatatgacattttccaccaacaatagaaacgcactgtgtcgactcctgccactggtgtgtgaaatccttcggagcgagtggtttgaacctaacgagaataaacatcgcttccttgggcccagagtgcagtgccggattactggactcgtaaaaaatgcgtctgaggcaagattcggtatcggcaaggctaagaaaatccgtatgcgggccatcattcacaatttgctggcagagaatcgtccacacccggactatcctaccgaattgagcattatagggtggctcagttacctcaagtccgtagaccccgattcccaccgccaaatgatgcagtactgggagaaacagaagagcaagtacaagcattga

SEQ ID NO: 10103 - RNA, 951 nt, synthetic construct
  source 1..951: mol_type = other RNA
atgctagaaaatatccaaaggctaagactgttgggccttccggtcttcgataacatcgaaaacctggccgcattgatcagggtggacagcaagagactcacaatactcgtgctgcagagtgagcgattttataggacctatcgaattcccaagcggtcaagcggttggcggaagatttccagcccatctaaagagatcaaggccatccaggcttggatcttgcgtaatattctcgataagttgtcaccctcagcctacgctactggttacattcttcgcaaaagacttgttgacaacgtcaatcctcacgcaagcaaccgcttctttctgagtgtcgatatacgggatttctttcccatgattggctcctggagaatacgcagactcttcgaggtgctgggctactctgagatggcagcggtaactcttaccaggttatgcacatatttcgggggactgcctcagggtggagttacctctcctgctctgtccaatttggtgtgcctgaaagtcgatcgcaggttagggggactggcctctcaccggaacatggtgtttacccggtacgcggacgacataactttctccaccaataatcgcaacgccttatgtcgggtgctcacactggtgttcgagattatcagaaatgagggctttgaacccaacctggagaaagtgaggcttctcggcccacgaacgcaatgtcgaattaccggcctggtaaagaatagctcggaggctcgtttcggtatcggaaaaaagaaaaagatcaggatgcgggccgttatgcataacctgctggtgaaaggccgtcatgatagtacttacccagacggggcatccatcgaaggatggctgtcatttctcaagggggtcgaccctgggagtcacgaacagatgacacgctattggaacacgctaaaggccaaatacgggagcaagacaagatga

SEQ ID NO: 10104 - RNA, 945 nt, synthetic construct
  source 1..945: mol_type = other RNA
atgaagagcaactctgaattgttgaggttgctgaatctgccagtgttctccgacgaggaggaattggctagcctcatgcacataacccccgagaggatcaagatgctgtccaagttccctcatcggtactataagaaatacaagatccctaaaagcaacggcaaacttcgagaaattagacagccgagaaaagatctgaaggccatccaagcctggattctgaggaatattttagacaaactcagccctaccacattcgccacggcatacataaaaaacaggaacatcagcgataatgtgaccccccattccaataatcgccactttgtccttctggatttagaagactttttctcctctatctcaattcggcgtgcggcaaaagtgttcctcctgattgggtattctaagaaggctgcgtcaatccttgcacgcctctgcacatgtgatggctctctcccacagggtgccgttacctctccaagtttaagtaatcttattgcagctaagctcgacagaaggatcgctggttatactagccgacggaatataatatatactcgctacgccgacgacatcacactgtctagtaacaaccccgctacactgtcactgtcgcttcctcgcatcattaagattatcaaatccgagcacctgaagccaaatatggataagctaagagtgctaggacccagaaagcggtgctcaatcactggcctggtaaaaaataactccgagccggaatttgggatcgggaagaaaaaaaaaaagcaaatgcgtgccgttattcatcactttctctttaacttgtccaaagacgataagtataccaataaggcctcaataatcggatggctgaactacctgaagagcgtcgacaaggagtccttcgagcagatgaataactactggaaccagctgattaaaaaaagtaacagtgtgtga

SEQ ID NO: 10105 - RNA, 975 nt, synthetic construct
  source 1..975: mol_type = other RNA
atgagctcacctcgggtgtggacctcactgccaaacattatcatgtctactacagaattgctgcgattacgggatctgccggtgtttgataatatcgaggagtttgcatccctgtgccatatttcgaaaatcgatatttctgctatccaatacaacgcctaccctttctataggcgatacccgatgctgaaaaagaacggtaaaattcgcatcgtgtatcagcccaatccaactgtcaaggctatacagtgctggatacttcggcacattctggacaaagtaaacccctccgagtattccaccgctttcagaaagaataaaagcacactagacaacgtttcaccacataaacacaataggtttttcttccgtacagatatcgtcgacttctttcctaccattaataggagccgcgtgttctttctctttaagaacatcggctacgacacgaagcaggcgatcttattggccagactgtgtacgtgttcaaatctcctgccccagggagcagtgacttcccctagtatttctaacttggtcgtgaataagatggacagaagacttgctggctatgccaataagaaaaacatcgtgtataccagatacgccgacgatcttacattctcatctaataatcgctccgtgcttaataacagtattcggctgatcaagcgcatcatcgaggaggaagaattcattgtcaacctcgagaagacaaatttcataggaccaagtaagagttgcaaaataactgggttgattaagaatacctccgaacccagttttggcatcggtaaaaagaaaaaaaacaggatgcgttgtgttatgtactaccacatcgttaaaaagatcaccattgaccccaattactctagcgacaacagcattatagggtggctaagcttcctgaactctgtagataaggccagctttaagtatatgaacaactattggctctccctcaaggcactgtga

SEQ ID NO: 10106 - RNA, 978 nt, synthetic construct
  source 1..978: mol_type = other RNA
atgcgttctaacaggaccgtcctccgactgttcgatttgccaccattttccagtctgaatgaattttgtgctctagcccatttcaacacggcaagagttagggtgatcgctaccgagtcgaagcgattttacaagagatacaacatacctaagcggtctggaggcgagcgcgagattctgcagccgacagcagaagtgaaagccatacaggcatggatcctgagaaacattctcgataaactgaaggcctctaactccgccactgcgttcactaggggggtgtctctaatgctgaacgtgcagccccatgccagtaatcgctactatctgtgcatggacatcgaaaattttttcccctctgtgtcctcattccaggttcagcaagtgttctcggctatcgggtacagccctaatgtgtcatactggatgaccaagatctgtacagttggaggccggttaccccagggtggagtaaccagccctagcttgtccaacctggtgtgtctcaagctcgatagacgccttagcggatacgccgcaagtaagggcctggtatttactcgctacgcagacgatatgaccttctcctcaaacaatcctaaactcttgcgaaattcagtggccaccgttcggcggatagtgcaggccgagggtttcatcattaatacgaagaaaacacaccttgcgggtccaaaccttagatgcgtcgtaactggcctggtgaaaaacgccagcatgccggcgtttggaattgggaggaaacgttatcgcatggtcagggctgaaatccacaacttcgtcatgcgtgggggggccaagcggtataattccaaagagagcatttccggcatgattagttttatcgagggcatcaatcgcgctcaaggcgagtctttacggaagtattggtatggtctggagcagtgcagcagagctcaagtcataattgacccagaaacagacaggcccacacagtga

SEQ ID NO: 10107 - RNA, 933 nt, synthetic construct
  source 1..933: mol_type = other RNA
atggccaagtacagccagagtctctacacccagcgtcttctgtctctgcctatccttcagtcaattgaagacctctccgttaagacccgcctgccgtcccctctgttgtctcagtatttgaacgataattcccggtactattgccacatttccgtgcccaagaaaaatggagggtataggcccattgactcaccaaatcggcaactaaaagctattcaaagatggatccttagacatatactggagaaattgcaaccaagcgtatacgcgacaggctttgtgcccggaatcgcccttaaacgaaatgctataccacacactggaaatcagtacatactgaagctcgacctgaaagattttttccccagcataaaagcatcgtacgtgtacagcgtctttcgggcggcagggtactctaaacagatagcatatagcctgacaagcatctgtaccctgaacggctatttaccgcaaggcgctcctacttccccatgtctctcaaacctggtgtgcctccgtttagatcagcgaattggaaagtattgcgacagacacgccctcacattcacgcgctatgccgacgacattagcatctctggtaacaagctatccatcgtgaaaaaggcttgggtagtcatcaaattgattctgagtgaggagggctatgtgatcaacaagaaaaaagagatgctttctgggcccagaagtaagagggaaatcacaggcttagtcgtgacccctaagctggggattggtcagaggaagtacaatatgtaccgcaataagatcttccacctgtgtcataagaacgataacgaatcaattctgatcatccagggtatcctcgcctacattaagggcgttgatcatgaccggtatagtaagctgaaaaggtactatgatgccttgaagaccaaggaggttactgaatga

SEQ ID NO: 10108 - RNA, 912 nt, synthetic construct
  source 1..912: mol_type = other RNA
atggccaagcactcccaaagcttatatacacagcgactactgagtctgccaatactgcagtcaatcgaggatctcagcgttaaaaccaggctcccccacgccctgctaagtcagtatcttaccgataactccaggtactactgtcacatcaaagtgcctaagaagacatcaggttaccgctcaatagactctccaaatcggcagctgaaggctctgcagcgttggattttacgcaatatcctcgaaaaactgcagagctccccgtacgcaaccggatttatttctggcatttctctgaagcaaaatgtgcagcctcatagcgggaatcagtacatcttgaagctggatatcaaagatttcttcccttctattaaggcctcgtacgtttattccatctttagagcagcaggctattcaaaaaagatcgcgttccatcttacgtccatatgtacactgaacgggtatctgccccaaggcgctccctcttctccctgcctctccaatttggtgagtctgcgcatggaccagagaataggcaaatattgcgaccgacacgccttgacttacactaggtacgccgacgacatcagcatcagcggaaacaaactttccgtgatcaagaaagcctggacagtcgtcaagttgatcatttgcgaagagggttatagcatcaacaagaaaaaagagatgctcagtgggcctcggagtagacgggagattactggtattatagctaccccaaagttaggcattggacaaaactcgtataactcctaccggaacaaaatttttcacctcagcaagaagggagatccaaatagcaaggaaattatcctcgggatcctggctttcattaaatcagtagatctggagaggcatgacaaattgcttagatactacaagaagctttga

SEQ ID NO: 10109 - RNA, 918 nt, synthetic construct
  source 1..918: mol_type = other RNA
atggtgaatcactcacagtcgttatacacccaacgactgctcagcttgccgattcttcagagtctggaagatcttagcgtaaccatgagactgcctgtcagtctgattagccaatacgtgaacaacaacacaaggtattactataacatccccttagcaaagaagaatggaggtctgcggtctatcgattcacccaatcgccagttgaaggccattcagcggtggattctgcgcaatatcctagaaaatctgtctccatccggctatgctaagggattcgtcccaaaattatcgctgctggataacgcgttgccccatggcgggaatcagtacgttctcaaaatagaccttaaggacttttttccttctataaaagccacacacgtctattccgttttcagagcagtgggatacagcaaaaacataagctattacctgactagcttttgtacgctcaatggctacctcccacagggctcaccttgttctccttacttgtctaatttggtgtgcctgcggctggatcagagggtgggtaaatatagtgacaagaatgctctcatctacactcgatatgctgatgacatcacaatttcagggaacaaactatccacaataaagagggcctggaaagtgattcgtatgatcatcgaggatgagggctttgtcatcaacaagaataaagagatgctgagtgggccaagatctaagagggaagtgaccggcctgattacccaccccgtagtgggacttgggaccaaaaaatacaacttctatcgcaacaagatcttccatctcactaagaagaacagctgcgaatcccatgaggtcattaatgggatcctggcattcgttgcctccgtggactccaaaaagtacgagaagctcaagctttactatgacggtctaaacatctga

SEQ ID NO: 10110 - RNA, 939 nt, synthetic construct
  source 1..939: mol_type = other RNA
atggctaacagatatcaggggctgttcacacaaagattactctctttacccattctccagagtatagacgacctggccatcaggactaggttacctgtgtcactcattagcaagtacctccgcaacaatacccggtattatcggcatctggttttgaagaaaaaaacaggcggcttgaggccgatcgacaatcccaacgtggaactgaaagctctgcagagatggatactgaagaacctgcttattaatctgtccccatccatctatgccaaaggattcattaagggaatttcgatcactgaaaatgccgcgccacacagcgggaaccagtacatcctatcaatcgatctcaaggattttttcagtacagtgaaggcaagccacgtttttaccgtattcaagagtgtgggatactctaaaaagatttcctacgccttgactagcatctgcaccctgaacggtgtgctgcctcagggagctcccacatcacctgctctttccaatcttgtgtgcctgaggttggatcagcgtattggaaagtattgtgacaataaagccctgacatatacccgctacgccgatgatataacgattagcggcaataaactagcagtgatccgaaaagcatggcgtattgtccgacttataattgaatccgaaggctacttcatcaacaaaaacaaagagatcctctcagggcctcaatctcaaagaaaagttaccgggctgatcgtcacccccaaggtaggcatcggccgcgaggagtacaatcattaccggaaggagatctttatactcgtcaaaaaggatgacgagtattctacttacaaaatccagggtatcctgagttttataaagtccgtcgacatcgagcggtataagaagattaaggaatactacgagtctattgtgaagaagccaacgaagaaaagcgagtga

SEQ ID NO: 10111 - RNA, 921 nt, synthetic construct
  source 1..921: mol_type = other RNA
atggcctctcgatatcagggcctttttactcagcggttactgtctttgcccatacttcagtccgtgaatgatctggccattcggacaagattacctgtgaatctcgtttccaagtacttgcgggataatcatagatattatacacgcctccctctgaaaaagaaaaccggagggttcagacctatcgactccccaaacacagaactgaaagcactgcagagatgggttctcaggaacctgctggctaacctctcgccctcaatctacgctaagggctttataaagaaaagcagcatcacggataatgcggcaccccacgcgggtaaccagtacattctgagcatcgacctgaaggattttttcacaaccgtgaaagccagttacgtcttcactgtgtttaaatccgtgggctactcaaagaaaatatcttacgctctgacgagtctatgcactgtaaatggggctcttcctcagggcgccccaacatcacccacactgagcaacttggtttgcctgcgtctggaccaacgaatcgggaaatactgtgaaaataaggcactcacctataccaggtacgccgacgacattaccattagcggaaacaaacttactgtgattcgtaaggcctggggaatcattaagttgatcattaaagacgagggttacaccatcaataagaagaaagaactactttcaggaccacaatcccagcggaaggtcaccgggctgatcgtaacgccgaggatcggcatcggcagggataaatacaactattatcgcggggagattttcaaactcgtcaagaaaggtgacacctatagtatagatcgcttaaacggaattttgtctttcatcaagaacgtggataaggacaagtataataagctcaacgagtactataagaagataactactagctga

SEQ ID NO: 10112 - RNA, 927 nt, synthetic construct
  source 1..927: mol_type = other RNA
atgccaaaccaatatcaagggttgtatacacagaggctgctgagtctacctatactccagaccctcgatgatctggccactaagacacggttacccaagactctgcttgttaagtacatccacgacaacgagagatattacaactcctcctacattaagaagaaatccaaagatctcagaactatcagcaatcctaatcgcgaactgaaggctattcagcgctggatcctgcgaaatgtgttgtcatctttaagtccctccccttatgccaacggcttcataccgaagaagtcaatcatagataacgcccggccacatagggggaatcagtacatcctgtccatcgacttaaagaacttcttcacaaccgtgaaagcttcttatgtgtttacagtgtttaagagcgtagggtacgccagcaaaatggcatactatcttactagcatttgtacgctcaacggagttttgcctcaaggagcaccaaccagtcccatgctttcaaatctggtgtgcctacgaatggacgaacgtatcggaaagtattgcgaaaacaaagctctgacctattcgaggtatgccgatgatattaccatttcaggcaacaaactggcagtcatcaaaaaagcttggattattattcgcaagatcatatctgaggagaatttcacagtcaataagaagaaagagatgctgagcggcccccagtctcagaggaaagtgaccggtgtgattgtaactccagaaatcgggattggtagagagaaatacaactactttagaaagcggatctttatcctcgttaagaaaaacggcgacaatatgagtaatgtcgtcaatggaatcttggcgcacgtgaagagcatcgacctgggcaagtacaagaaacttaacgactactacgagcagctcataaataaaacgatttga

SEQ ID NO: 10113 - RNA, 933 nt, synthetic construct
  source 1..933: mol_type = other RNA
atgatgaaaaaccagggaatctatacccaacggctgctgagcttgccaagtttaaatgatctcaatgacctgagcatccatactagactttctcatgacttgatttccaaatatgtgagcaacaacaagcggtactatcaccattttaatatgactaaacgcagcggcggagtgcgacccatcgaaaacccagatgaggaactgaaggccatacaaaggtggattctgagaaacattttggacaagctgtttccctctatctatgctaaaggtttcgtcaagaagatgtcgattttaaacaatgccaaaccccacttggaccatcagtacatcctcaacatcgaccttaaagattttttcagccacgtaaaggcatctcacgtttttacagtgtttaatgcgctgggttactctaaaatgatgagttactacctgaccagtatatgtaccctgaatgggtacctcccacagggcgctccgacctctcctagcctctccaatttcgtgtgcctccggctggatcatcgcattggaaaatattgcgaaaacaaggcactatcatacacgcgatatgctgacgacatatgtatttccgggaataaactcacagtgattaaagacgcatggcacatgctgagggtaatcatcgagagtgaggggttcataattaactcaaagaaggagaagctgtccgggcctaaaagtcgtcgcgaagtcacaggacttattgtgaacccctccctcggcatcggcagatcaaagtataattactaccggaagaagatcttcattctattaatggccaacgatcctaagagggagcagatcatttctggcatcctttcctatgtcaagtcagttgatgccaaaaggcacatctacctgtgcaagtattacgattcaatcaagctgaaagcctccactagcatatga

SEQ ID NO: 10114 - RNA, 948 nt, synthetic construct
  source 1..948: mol_type = other RNA
atgacctatatctctaacaagcagaaaacgaataacagcggactgtacacacagagaatgttggccctgcctgagctccagtcactgaatgacttcgccgctaagatcagggtaaccccagaacttctcacaaagtataccgggaataataaacatcactatgccgtgcatcaagaagaaaaaaaaacgcccgggcagtaccgtgaaatctccagtccaactagtgagttaaaggccctgcagcgctggattttgcggaatatattggacaaactgagtccctcaccatacgctaaggggttcatcaagaagaaatgcctgtttgataacgctaagcctcacgagggaaaacagtacgtcctcaacttggatctaaaggactttttctcaagcgtgagcagcaagaatgtttgtaccctctttaaatctcttggctacccgcctctcctgagctatcagatgaccaacatatgcactctaaacggttgcttaccacaaggcgcgcccacaagtccggctttatcgaatctggtgacaattcggatggattataggattggcaaatactgtgagaagtacgcactcacttacactagatacgcggacgatatgacaatttctggcaacaaactgtctatcgttaagaaagcacggatcatgattaacaagattatcagagaggaaggattctatatacaccccaagaagaataagctgagcggtccttcagtcaggcgagaggtgaccggtctggttgtgaacgagtcccttggaatcggcagagaaaagtataacttttaccgcaccaaaatgttcaagctgcacaaagagcagcaccccaattttgaatccgtctcctccgggatcattgccttcgtgaggtctgtagacatagtgcgagcccaaaaactgcatgcatattttgagaagcttcgcatcaaaaactga

SEQ ID NO: 10115 - RNA, 930 nt, synthetic construct
  source 1..930: mol_type = other RNA
atgaatacccaccagggcaagtacacccagcagctgctatccctgccaattttggagaatgttgacgatttgagccagtcgctacggttgccgaaggaggtgatctctaagttctcactgaataacgataagtactatcaccgcatcgaaatgaaaaaaaaaacaggaggcatccgacacatagagagtcctttacgggaactcaaagccatccaacgctggatcctccggtatattctcgataaacttgctccctccatctatgcaaagggctttgtgagaaaaaagtccattatcgataacgccaagccccatgagggaaatcagtatgtcctgaatttggacctccaagatttcttcactaacgtgcctgcttcacatgtgtatacactctttcggaacattgggtacaacaacaatatagctttcatactgacctctttttgcactaagagtggataccttccacagggtgcccctacaagtccagccctgtccaatttagtgtgcctgcgcctggaccatcgtgtctccacctactgcaaaaagagggcgcttacttacacacgttatgccgatgacttatgtatcagcgggaataaaattctgatcctccaaaaagcaagctacctgataaagatgattatcgcagacgagggctttacggtgaacaccaagaaagaaaaatttctgggccccaaagtccgaagagaggttactggtctgacagttacccccagaattacgatcagcaaaaaaaactactgtgtgtataggaagagaatctacgacctcgtaaggaacgaggtccagaacaagaatgaaattatcagggggatactttctttcgtacaatcaatcgacaaggaaaaggggaagaagctgagcaccttctaccagaagcagatttctctgattactgacatttga

SEQ ID NO: 10116 - RNA, 924 nt, synthetic construct
  source 1..924: mol_type = other RNA
atgaacacccaccagggcaaatatactcagcagctgctctccttacccatccttgagaatatggatgatctcgctcagttcattcggctgcctaaagaggtgatctccaaattttcgttcaacaaccacagatactaccatagaattgaaatggagaagaaatcaggcggtattcgatatattgagagccctgtaaaagagttaaaagcgatacaacgttgggtccttcggtacatcctagacaagcttagtccatccgtttacgcaaagggatttgtgaggaaaaaatcaatcctggacaatgccaagccacatgaaggaaaccagtatatattgaacctggacttcaaggacttctttaataatgtgcaagccagccacgtgtataccctgttcaaaaacatcggatacaacaacaacattagctatatactgacctcattttgtactaaagaggggtatctccctcaaggggctcccacatctcccgctttgtccaatctcgtctgcctgcgtctagatcatcgcctgtctacatactgcaataagagagccttgatctacacacgctatgcagacgatctgtgtatctctgggaataagatactgatcctgcagaaaagcagctacttgattaaggaaatcatccgcgatgaaggtttcacgattaacactaagaaggagaaattcctcggcccaaaggttaggagagaagttactggccttacagtgacgccgaagattaccatcagtaagaaggactactgcgtctacaggaaacggatttatgatttagtgcgaaatgaggtacccaataaacacgagataatcaagggcatcctgagttttgtgaggtccattgacaaggacaaggaaaagaaactcaccgccttttacaacaagcagacctctatcattcggtga

SEQ ID NO: 10117 - RNA, 939 nt, synthetic construct
  source 1..939: mol_type = other RNA
atgaataatcaccagggcaaatatacacagcaactgctctctctacccatcatcgaaaatatggatgatatctccctttcctcacggctgcccgtagaagtcatcgccaaatttagcttcaagaacgacagatactatcacagaatcgagatgaagaagaaagctgggggtgttaggctgatcgagtccccaatccgcgaactcaaagccatccagaggtggattctgcgaaatattctggataaattgtccccgtctatttatgcaaaaggctttatcaagaaccgcagtatacttgacaatgctaagcctcatgagggcaatcagtatattctcaaccttgacctgaaagacttcttcacaaatgtgaaagctagtcatgtgtataccttgtttaagaacattggctacaacaatactgtcgcgttcgcccttacctcattctgcactaaaggagggtacctccctcaaggagcacctaccagcccagctatctctaacctcgtttgtctgcgactggaccaccggattagtacctattgcaagaagagagccctcacatacacgaggtacgccgatgacctgtgcatatcagggaacaaactgcttaccattgaaaaggcatcctacctaattaaggagatcttgggggatgaaggatttagcataaacgagaagaaggagaaactcttaggccccaaagtcagacgtgaagtgacaggattaactgtgaccccaaaaattacgatcagcaagaagatctactgtttatacaggaaacgcatatacgatctggtacggaacaagatccctaacaagcatgagatcatcctgggtattatttcgtttgtgcagtcaatagacaagggtaagggcaagaagttgactgccttctatgagaaacagaagagcctgattctgccctctttgatagtgtga

SEQ ID NO: 10118 - RNA, 942 nt, synthetic construct
  source 1..942: mol_type = other RNA
atgaatgcctatcagggcaaatatacacagcagctgctgtctctgcccatcatcgaaagtgtagaggatcttagctacttgatgagactccccaaagagacaatcatcaagttctcaacgaaaaacgacaaatattaccacaagatcgaaatggtgaaaaaaaatggaggaattcggttgattgagtccccaatcaaggagctaaaagcgatccagagatggatattgagaaatatacttgacaagctgtctccctccgtctatgctaaaggcttcataaaaaacaagtccattctcgataacgcaaagcctcacgagggaaaccaatatattcttaacctggaccttaaggatttcttcaacaacattaaagcctcttacgtctacaccacatttaaaagtatcggttaccaatccaacattgcatttattctgaccagtttttgcaccaaaggagggtatttacctcagggcgctccaacctcacccgccttgagtaattttgtgtgcctgcggctggactaccgtatatcaacatattgtaaaaagcgagccttatcctatacgcgctatgcagatgatctctgtatcagcgggaataaaattcatactctgcagaagagctcttacctcattaaggaaattttactggatgaagggttcatcatcaacattaagaaggagaagtttctgggccctaaagtaaggcgcgaagtcacaggcctgaccgttactccaaagatcaccatcaacaagaagaattacaacatttaccggaagaggatctacgacctagtgaggaatactgttccgaacaatgtggacatcattaatggtataatctcgttcgtgaagagcatcgataatgacaaagctaacaagctcaataacttttacaagaagcagctcgacgagatcaagaatagcactataaaagtgtga

SEQ ID NO: 10119 - RNA, 948 nt, synthetic construct
  source 1..948: mol_type = other RNA
atggtgtatagctctaaaaactccacaagttcgacctatagagcccgcatgactggcttgcctgaaatccgatcagtaaaggagctaagtcatctcctgagaatcccagagagcacgctgcatagttttagcaagaagaatcataccattggctatgtggaattctgcatacctaaaaaaccgaacggtttcagggtgatccacgctcccgtcaggacattgaaatacatccaggcttggatcctgcagaatatactttaccactttaagagccacaagtctgccaccgggtttgagaaaggctgctctatcttagagaatgccaaaccacatgccggccagagctacgcaattaacgtggacattaaggacttctttaattccatctcttccgacaaggtgttcaacctgttctccactattggttacgagagggagatagcatggatcctgaccaatttagttacattcaaaggacacctccctcaagggtccccctgttcacccaaaattgccaacttgatttgtcatagactcgatgcacggatttacggcttttgcaaaactaagaatatgcagtacagtaggtacgcggacgatattaccatctcaacttctcacagaaagaacatatcacagacacttcggttcattaacaacgtgatcgagtacgagaattttagccttcggaacgaaaaaacaaatgttttcgggcgcggaaacgctaaaattattaccgggctggttgtctccaatgaaatccgcgtcggacgtgaaaagtatcgggaaatccgagcgaaaatgtacaaggctataaaggaagatgataagtacgagaaggaatatctcgacggatatctgaactttctcaaaggtgtagatgccaagacgcaccaactgctgatcacctatcaggagaagatcactaaaaagctaaagagcatctga

SEQ ID NO: 10120 - RNA, 1137 nt, synthetic construct
  source 1..1137: mol_type = other RNA
atgaaggaactaggcttattttgttccattaagtcgtataactgctcattccttgggacaattgagatcgtgccttttctctttagacggatcttcacgaatatgaatagtgatgcactgtacaatctctcccaacagatggataccaaatatccaattatcaccgacgtgctgaggaataaaaaacatcattacaaccagctggatgcgaagaagaggaatgggaagatccggaaactctacagcccgagcaaaatcttgaagtattaccagaaatggatcgccactgagattctgagtaagacaatgatacatgagtgttgtaccgcataccagaagggcatctcattgaatgagaacctgattccacaccagaaacacatgtacttcctttgcgtcgacatcgaggactttttccagtcaatcaacttcaaacgcatacttcatctcttcaagaaactgacaaacgatactcaaatggcctactctttgtccgaactgtgcactttgcacaagaccctcccccaaggtgctgttactagccccgtcttatctaacgccgttaactatcgcctggacaagcggatccacggctacgcaaaaaaacacggactggtgtatactaggtatgctgatgacatcacgattagtggaaatgacatgggtgctatcaaatccgcctactacacagtgaaatgcataattgaaagcgaaggctataagttcaacaaggagaagactagaattctgaagcccggagtaaagcgaaaagtcaccggcttgcttataaatgaggaacaagagatcagaattgggcgtgaaaaataccgggagctgcgctccatgatctatacatacaagaatagtcgagccattaccggagtggaaaaagagcatctcttccttagaataaagggttggataagctatctgaaacacgtagactttaagacatgtaagatgctgctagagtatattaacaagatctatgtgaacgatgagaagaatcctttttcattcctcgacaaaaggtctgatgaaatggggtacatcattcctcagctgcagcagctagaatctaatatgaactttctgaccagcgagaacacccacgttaacttagtgattaagaattga

SEQ ID NO: 10121 - RNA, 1035 nt, synthetic construct
  source 1..1035: mol_type = other RNA
atgaattctgacgctctttacaacctatctcagcaaatggatacaaaataccccatcatcacagatgtcttgcgcaacaaaaaacaccactataatcagctggatgcaaaaaaacgcaacggtaagattagaaaactctacagcccgtcaaagattctcaagtactaccaaaagtggatcgccacggagattctgagcaagactatgatccacgagtgctgtaccgcgtatcagaaggggatctccttaaacgagaatctgataccacatcagaagcatatgtatttcttatgtgtggatatcgaagactttttccagagcataaacttcaagcggattctgcacctgtttaaaaagctcacaaatgacactcagatggcttatagtctgtcagagctatgtacactccacaagaccctccctcaaggagcagtaacatcccccgtgctttcaaatgccgtgaattaccgcctggataagcgtatccacgggtatgccaaaaagcatggccttgtttacacccgatacgccgacgatattacgatcagtggcaatgatatgggagctatcaaatccgcctattataccgtcaagtgcattatcgagtctgaaggctacaaattcaacaaggaaaaaacacggattcttaaacctggtgtgaagcggaaagtgaccggactgctgataaatgaggagcaggaaattagaattggcagggaaaaatacagagagctgaggtcgatgatctacacttataagaatagtcgagcaattaccggagtggagaaggaacacttgtttctgaggattaaggggtggatatcctatctcaagcatgttgacttcaaaacttgcaagatgctgctcgaatatatcaataagatatacgtgaacgacgagaaaaacccctttagctttctggacaaaaggtccgacgagatgggctacatcatcccacagcttcaacagttggaaagcaacatgaacttcctgacttctgagaatacccatgtaaacttggtcatcaagaactga

SEQ ID NO: 10122 - RNA, 942 nt, synthetic construct
  source 1..942: mol_type = other RNA
atgggtgaactagtgttcaccaaagtgaccaaagatctcaagaccaaatatcctatcctcaaggatgttatcaacttcaaagagaagcattaccagactatatcgatccgaatgaagaatgggaagctgagaactatccataacccatctaaggccctccggtattatcagcgcgcaatcgttgagaagtttcttaatgaggtccccatacacatttgctgcaccagctatcaaaaaggtaaaagtctgaaagcaaacgtacttccacatgccaataacatgtatttcttacacgtagacatcgccaatttcttcgaccacataaagttttcacaagtgcacaagctgtttacggatttgattgaagacaagtatgaagctaagttctacgccgagctgtgtactctgaaaggcactctcccccagggagcaataacatctccctccatttcaaatgctgttaacttcagaatggatagcagaatttttggctacagcaaaaagcacaatatcgtctatacaagatacgccgacgacattactctgtcctctaatgactttgctagcatccagcgctcactttacgtggtgaaacagatcttgcaagatgaaggataccagctcaatacgcggaaagtccgcatcacaaagcctgggatccagcggaaggtgaccggcctattaattaacgaggatcaggaggtgcgtgttgggaggaagaaatacagggagctgcggtccatgatttacaactacaagaacaatacaagcgtgacaaggaaggagaacagggcgctgttccgaaaaattgtgggctggcttagttacctgaatgtcgtggacgaaaagacctacagtttgatggtcatgtatataaagaagctgtatggaaacaccaaaaacccgtttgaaacaatgctgatctccaaggagaaaatttga

SEQ ID NO: 10123 - RNA, 2058 nt, synthetic construct
  source 1..2058: mol_type = other RNA
atgggaaagcacaataaaggcaaagtgatcaagaagtactacaatcctctgaccccactggaggtattctttaacgagcttaattcctttctcagagtctacggcctgaaattcagctacgaagactattgcaacttcatcaagaataagaacgagtactatacgacctttaccatcaaaaaaaagaacgggggactcagaaggatcgatagccccaacaggctgcttaaacacatccataggtacatcttgttcaagcatctgtacaacttcaaggcccatccttctgctacaggttttattagaggcaggagcatctttgataatgccaattatcacgtcaacaagaatcatgtgtacaaactggacctggtggactttttcccatccataacaaaagatatggtgttcaacgtgttcatcagcaagggttataattccgagatttctacggtcatgtcagaactctgcactctgaacaatgttctaccccagggagctcccactagcccggcaattagcaatcttgtttgctatcgcctggataccaggctgagcagcctcgccaaaaaatgtaaactctcttatacccggtatgccgatgatattacattcagtggctggtacattaaaaaaggcgtcacaaagctgattgagaaaattatcacagacgaaggttttaaggtttcaaaggagaagaccaaactgatcaagaataaaaagaacttccgtcaggtcgtcactggcgtggttgttaataagaagctcagcatgggggaaaagcgctatctcatgttgcgcgcaatgattcacaactgtaaagtgaaaggtatttaccaggtgcagatggagacaaaagagaagcacggcaaagggtattttgcgaggagagacttgtatagtgcaaaggtggatatgttcaattaccttctggggatcgtagaactctttcggcagatgaaggactataaacgatatttgacgatgctgcgggacctctattaccttgactgggttagatactacgtcgaagccggagaactgaatgcaaacgaactaggaatcatgagaaagaaaattatcgagaggcggatcaagaaatttgtgcgatccgagctaaaggatataaaatcccggtcagattctctgaacaacaagctcaaacgctataactcacggctcgagcggctgaaagagtacattcgccaaaatacctatagtgaaaaagagcggctgatcgacgaattcctgagactgcaggaacggatagataccttaacacaagagactaacaacatgtccaggtttctcagctttgtcagtgacttcattagtaagaactggggaagaagcctgatgaaattattgaatagcgtgaccgaggaggtggaggagactatgagtaccaagtacactgtgcagaacaattttataaagttgggcaatgagttccttgagaagaatattaacgtgaacctgtctgtcaactacaacaatataaacgttgaagggtccctgtcaaaacatatttcgccagataagccctttagcaacatctcatacttttggggattaatcaggtccaatcgtgggtacatcaagtggttggacaagtacttcaataagtctggattccgtttacttactgacgagataggcgatgatccaaagtacaagtccataagtatcctaatgtccatatacccttttgtgggcggggaaaataaggaatctgctatccgaaaggtggaacgctttatcgacattttcaaacgcttcaaggaggagatgagaaacaagggtatatctgtagagttacgcatcttggacaaagactcatctgccgaaatacacgacagggtgatcatcttcgaagagaatgcttacacagtaccttccattgacaccctgatgcgagggcaacactcatatattttccccattaatccgatcgatttcccttttgatgaatattggaaccgttcgttcgatattctttctgaccgaaacaagattaatgagctgatcgacaaatatgtgaacaacaagaaaaagtga

SEQ ID NO: 10124 - RNA, 1779 nt, synthetic construct
  source 1..1779: mol_type = other RNA
atggtgaagaaattcattaacaggaatagcgaatcaaagttcctggatgatctacgtcgacatattgattttgaattgactcaggaagatctggacatattcttccaggacaagtataacaagaagaacaagctccattactcttcttattcaatcagtaagcactccgggaagaaacgcaggataaacgctccaagcagagagttaaaaaaagtacaggagtacatactgtacaaacatctttactacttccccgtgcacaaaaacacatacgggtttattaagaacaagagttacgtagacaacgctaaacagcatatccggaagccgcacgtgtttaaaaccgacgtggaagattttttccccaacatccggcatgaaaggatcttcagcttccttgtgaatgggttttcatccaaggactacgactcagtcttcgattccaatccccaactggaaattagaaaacagcgaagaggttatagcgagaaaattgctacccttataactgaattggttactctggacggatccttacctcaaggagccccaacatctccagcgctgtcaaatctcatctgttttcctttagactatagattgagcaggtttgccaagaaaggacgcctgacctatacacgttacgcagatgacatcacatttagcggtaagtatattaggaaggacttcatcagtaagatcaagacaattatcgtggacgaatgtttcaagattaacgaggacaaaagtaagtttatctcccgtaagcgcgcacgaattgaggtgacagggctggttgttaataccaaactgtcttacggtcgagagagatacaggaaaattaaagccatgttagaccaatgcaagaagaacggcatttcttccctgaataaggataacaatgacgaaactggcattaaaaatcacatcgacttttaccaacacattataggcaagatcgatatcttcaatcagatcaagcactacaaaaagcacatggtactcctgaaaatactctttcagatcaattgggcagactactatacgaaacaagaggatcttctcgagagctataacaagcacaatcatagttcattcacatccacggagctgggagagattcgcaaaaaaagcatcgagaaactgacccacaaagccgtgctcaaacaggaaagggaagataaaaaacgggatacccggcgggccgcgtattatgcaaagaagaataaatcgatcctggaggacataaagaccaaactttcccagcaagatcagttgatttccgtgtactcagagacactctctaaggagtatgaggacaagtataacttgattgaaaagattcaggctgatcgcctgaagatccaggagctggagaaaaacctcgaagatgccaataaaaaagctaagcaggctgaaaagttcaataccgatctgactaagatcttggaccgggtggacaagaattctaagacccttgagagactggagaaacagggccagaaaacgcaagacatcgttacttccatcgataagaaaattgatagcatcgcggacaggctaggcaagaacatggtcagtctgtttgatgccataaaagagtctaaggaagccatcactaaggagattaaggcaaaccatatctcgctcgagaaaggcatcgaagagattcacaaggccacccagatgctggtcgaaatacagaaagacaaggaccctgatctctgggaacggtgccgcgagaaggtccagaagagactaagctggtggaaggtctga

SEQ ID NO: 10125 - RNA, 1626 nt, synthetic construct
  source 1..1626: mol_type = other RNA
atggagcaactttcacccatttgcgggcgggtcaaagttctcaacgaggctgactataacaacgagttccaatatttcaaacagctgaagagtaaaaagctgccatacatttatgatatcgaccacttctgtaagctgattcaccttagctctaaccaggtaaagttcttcctgtcacacaaagaaaaagcttacgtcacctttcgggtcccgaagaaaaatggggacttccgcgagattaacgctccttccaaaaaaatgaaatacatccagaggtggatcctggacgaaatactttacaagcttaaccctggagagtacgcccacggctttatccctggcaaaacagtttatacaaatgcagagtctcatgtcaacaaggacctggtgttaggaatcgacattaaagatttctttccctccatcaagtttgtgtctgtgtacaatgtttttaagagcgcagggtatacagagaaggtggccaggcagctagcagacctctgcacctaccattggaaattgccacagggagctcccaccagtccaatgctcgccaatctggtggcactcgatctggacaagaaaatatcccagtattgcaagagagctaacttcggttattcccgttacgccgatgatattactattagtggtagctacgacctggccatccacaaggagacaattgtccgcatcatcaatggggcgggattcgaggtgaataaccagaaggtgagaatggtttctaagggctcaaggcaaaaggtgactggcttggtggtgaaccataaagtttcaataggacgaaccaagaaaaagacgataagagccatcgtccacaatatactgatgaatggaccggtgttggagaatagatgtaacgacccatttttcagagaacggatcttcgggcacctcggttgcgcttctgccattgaccccgaatttgccctgcctctaattgattcgttgaaaaagattgactggtctgagtattgtgaacacatcaaggaagtaaaagagagcgagattaataagaatcggatcaagcggataaacaaggtcttaatcgtcaagttcgacgaactgggcttcttcaggaagattggggaagtgcctcgagatgcatttacggaagagtttaaaatcaagttgggcaccctgcaggagatgtgcagtaaggagatacacggcgtagttgcatgttccaactgcctgaacgtcaaaaatgaaatctacaaaagctgcatgaagtacatactcgggcagtatacaggcactaccggcggtcatcatcatggtcatgagatctacgacatgaaagcggtaacagattacaatggcgaaaatattgtggtggcctttctgatgaagtccgggactaacagtcccactaaagaaaattcagtgtttacccaggcttttgattgtgccggatataacgagaacatcgaccttattagcttagtgagcaatcacaatctctccaataagctctgtgagcgtctggagatcatgattcgcgataaaaaccgcggaaaagaaaaggagcaactgtactgtcttatcatgaaaagcgaaatggaaaggatcctatatgatttcaacaagaacaaggattgctga

SEQ ID NO: 10126 - RNA, 1683 nt, synthetic construct
  source 1..1683: mol_type = other RNA
atgactgaaaagcttacgaaaaacgaacggctcaaggtgttattcgacgataggatagaagaaggcgttgtacccaaactatcagaagaagactacaacaaggagttcaaatactttacccaattgaaaagcaagaagctgccgtatatctacgatattgaccacttctgcaagttgactaattcctctagtaagcaggtgaagtttttcctaagtaacaaggagaaggcttatgcgacattcaaggtccctaagaagtcaggcgatttcagggagattaatgccccatcgaagaaaatgaagattatccagcggtggatactggataagatcctctataaacttaaccctggcaattacgctcacgggttcattcccggcaaaacgatttacacgaatgcaaaggctcacgttaataaggatctggtacttggaattgacattaaggactttttcccctctataaagtttgtggcagtctacgacgtcttcaaatttgcaggttacaccgctcgcgttgcccgacagcttgccgaactgtgcacatatcactggaaattaccacagggagccccaacttcaccaatgcttgccaacctggtggccctcaacctggataaaaagattagccagtactgtatcagagagaactttgagtattcccgttatgctgacgacatcaccattagtggatcgtataatttagcgatgcacaaggaaataatcatcaagatcatcaacgagaatggcttcgaggtgaactacaaaaaggttcgtatggtgagtaagggatccagacaaaaagttaccggactcgtagtgaatgacaaagtaggtatggggaggaccaaaaagaagaccctgcgggctatcgtgcacaacatcctcatgaatgggccggtgtttgaaaatcgggacaacgatcccttctttagagagcgcatattcggctacctggggtgtgcaaacgccatcgatcccgagtttacatctcctctgatcgacagcctgaaaaaaattgactggtcagagtacgaggagtgcattaaggaaatcaaagagtcagagatcaatgtcaatcacatcaaacgcatcaacaaagtcctgctggtcaaattcgatgaattgggcttttttcgaaagatagcagagctacctgaaggagcattctccgaagaatttaagactaaattggaatctctccaagaaaaatgtgacgtgaaaattcatggtgtggaggcttgctctgattgtctggatgtcaaaaaggtgatctataacaagtgtatgaagtacgtcctcggacattacacaggcaccacagggggtcatcatcacgggcatgaaatatatgatatgaaagccctcacagactacaatggcgagaatataactgtggcctttctgatgaagtccgccaacaagcctgccaaggagaataacagcaacaaagagaatagtttggtggttcagaccctggattgtactgattataatgacagcatcaaccttatttccatcgtgtctaataacaatctcagcaacaaaagctgcgagagactggagaaaattattaagggtatgagcaaagggaaggagaaggagcagttgtattgcttcatcatgaagaaagagatgaagaggattctgtacgacttctataaaaactaccagtcctcctga

SEQ ID NO: 10127 - RNA, 1695 nt, synthetic construct
  source 1..1695: mol_type = other RNA
atgactaaaaggctgacaaagaatgagaggttgtccattcttttcgacgattgtatcgaggagggcattgtgccggttttgaatgaggccgagtataaggaacagttcaagtacttcaagaagctgaagtctaaaaagctgccctacatctacgacattgagcacttctgcaaattaagcaatagctctagtgatcaagtaaggttttttctgtccaacaaggaaaaagcttacactacctttaaagtgcctaaaaagtctggcggttttagagagattaacgccccttccaaaaaaatgaaaaatatccagcggtggatactcgacaacattttgtacaagctcaattatggggactacgctcacggattcgtgcccggaaaaacgatctatacgaatgccgaagtccatgtgaataaagacctagtgctgggcattgatatcaaggatttcttccccagcatcaagtttggggcggtttataatatttttaagagcgccggctatagcgttagggtggctcgacagctggccgacctctgcacctatcactggaagctgccacagggggcccctacatccccgatgctggctaatctcgttgcattaaacctggatcagaagatatcccaatactgtattagacgtaactttggctatagtaggtatgcagacgacattaccatttctggaagctacaagctgcccatgcataaggagaagattatcaagatcattaacgaaaacggtttcgaggtcaataataagaaagttcgcatgctgtcgaaggggagtagacagaaggtgaccggtctggtagtgaatgataaagtctcaataggccgtactaaaaaaaaaaccctgagagctatagtccacaacatacttatgaatggtcccgtcgtggaaaatcgcaatgaggacccattttttcgggagaggattttcgggcatctgggatacgccaaagccatcgatccaggcttctctacccctctaattgaatcgctaaaagagatcgattggtccgaatataacgagcatatcaaagagatcaaggagaacggcattaacacaaaccagctcaagcgggtgtataaaacaatcttggtcaagttcgatgagttgggattttttaccaagatcgcagagctcccagagggggcattcactgaggaattcaaaatccagttgaactccttaaaagagaagtgcgatgctaaaactcatggagtagaagcatgtagtgattgtcttgatatcaaagacgagatctacaacaagtgtatgaagtacatcatcgggcactacactggtaccacaggaggacaccaccacgggcatgagatctatgacatgaaggcgacaaccgagctgtacgacgatacaattgccgtggccttcgtcatgaagtcaggcgacatatctaataagaaagaacgccgaaagggcactgatagcgaaaactcagctttccggcagttctttaaatgtacctgctatgaggacctcgaccttatatcaatcgtgacgaactttaacctcaacaacgaactttgcgaagaactcaagatcatgatgcgaaataataacaaagcaaaggaacgcgaccaattttactgcctgataatgcggaacgaaatgaagagaattctttacgacttcaacaccaaaaaggccgaaaatctgacatga

SEQ ID NO: 10128 - RNA, 1653 nt, synthetic construct
  source 1..1653: mol_type = other RNA
atggagatcagcaataatgagaagctgaagatcctctttgactcttacattgaaacagccatcataccctctttgaatgaagacgagtataggaaggagttcaagtccttcaaacgcctgaaaagcaagaaactgccctacgtgtacgacatcgatcacctgtccaacctgacgaactcttctagcaagcaggtccggttctttctgagcaataaagatatcggatacaccactttccgaattccaaagaaaatgggcggttttagggaaattaatgcatcctccaagaaattgaagattatccagaagtggatcctgaacaacattctttacaagcttgatagttcagactatgtgtacggttttattcccggcaaaacaatttactcgaatgcccagatacatgtgaatcatgacttagtcctgggcatagacattaaggatttcttcccgagtatcaagttcgggagtatctaccacatttttaaatccgcgggttattccaataaaatcgcttggacttttgccgatctgtgcacttatcattggaagctgcctcagggcgcgcctacatcacccatgttatccaacctggctggcaagcgactcgatatgagaatcgccaagtattgtaaccgtcggcatttcacttacagtaggtacgccgacgacataaccatttccggatcttataagctgccaatgcacaaagagaaaatcatcaagatcattgaggggaacggctttaccgttaataagaaaaaaacccggttgttcagtaaggggtcaagacagaaggtaacgggcctggtggttaatgataaagtctcaataggtaggaagaaaaagaaatggatacgcgcaatcgttcacaacatacttatgaatgggtttgtggccgagaataaagaaaatgacccttttttccgcgaacggatttttggccacctcgggtataccaatatggtggattctgaatttgcaagacctctaatcgagagcttgaagaagattgacctgtctgaatataacgaggctattatagaaactcgagagtctgaaatcaaggtgaactacctaaagcggaagagcaaaagcattcttatcaagtttgatgatctggggttttttcaaaaaatcgccgaattcccagagggcgcattcaacgatgacttcaaaaaccaaatcaacaatttgctggaaaagtgtgagaaacacggagtggaggcttgtagcgattgccttgacatcaaaaacgaaatctacaagaagtgcatgaaatacatcattggtcattacacagggaccaccggcggacatcaccatggacacgagatttatgatatggaagctgagacaagactcttcggaaagacaatagctgtcgcattcatcatgaagtcaggaaccagcgactccacgaaagagaactcgatattcaggcaggtggccaagtcattccgctttgatgggattgacctcatcggcattgtcaccacaagtaatttaaaatcagagctcctagaagacctcaaaagcctcattatgaatcacaacaacggaaaaaagaaggagcagctgtattgcctcatcatgcgtccagagatgaaaagaatcctttatgacttcaacaaggtagttactaactcctga

SEQ ID NO: 10129 - RNA, 1692 nt, synthetic construct
  source 1..1692: mol_type = other RNA
atggtgtcagtggagaacaagctgactgaagacgagaaactccaaatcctgtttaagaactacactgaagaagggataattcccaatcttaccgaggaggaatatgaggagcagttcaagagttttaaaagactcaagtccaaaaacctcccttatatctatgatatcaaccacttctgcaagctcaccaattcctccctgaagcaggtcaacttgttcctttcgaacaagaagaaaggttatattaccttcaagcttcccaagaaaaatggagacttccgagagatcaacgcccccagcaaaaagatgaaatacattcagcgttggatactggataatatcctgtacaagttgaacagtggggactacgcacacggcttcatcccaggtaagacaatctttacaaacgcgaaagtgcacgtaaatcaggatttggttctgggggtggacatcaaggacttctttccctccatcaattttaggagcgtgtattacgtattcaagtcagccgggtatacaaagaagatcgcatggacactggctgacctatgtacctaccattggaaactgccacagggagctcccaccagccctatgctggctaatctggtcgccttaaagttggacaaaaagatagccaagtattgcgcaaggcgcaattttaggtactctagatacgccgatgatgtgactattagcggctcatataagttaccgatgcacaaagaaaagattattggcatcattgaagacgacggcttcgttgtcaaccatgagaaaacccgaatgttcagtaagggatccagacagaaagtaaccggcctagtggtgaatgataaagttagtatcggccggaataagaaaaaaaatctgaaggccattgtgaacaatatacagacaaacggacctgtggccgagaatcgttcaaatgatccgttttttcgcgagcggatctttggccatcttggctgtgcaaacgccgttgacccagaatttgccacgccattaatcgaatctctgaaaaagattgactggtccgaatacaacgagcacatcaaagagataaaagagagtgaaatcaacacaaatcagcttaaaagagtgtcaaagactatcctggtgaagttcgatgaactcggatttttcaccaaaattgtggaactgcctgaaggtgcttttactgaggagtttaagaagcagctgaacaacttgaaggagaagtgttctactaagattcatggggtcgaagcctgctctgattgtctagatgttaagaacgagatctacaagaaatgcatgaagtacatcattggccactatacaggaacaaccggcgggcatcaccacggtcatgagatctatgacatgaaggctaccactgagttctatggagacactattgctgtcgcgttcgtcatgaaaagctccgacatcagcgacaaaaatgaaaggaggaaaaacacggactctgagaactctacatttcgccaattcttcaaatgtacctgctacgaagatctcgatctcattagcattgtcacgaactttaacctcaataatgagctgtgtgaggaactcaaaataatgatgcggaataacaacaaagcaaaagagaaggatcaattctactgccttataatgcgggacgagatgaagcgcattctgtacgatttcaataaaaattgcgggtga

SEQ ID NO: 10130 - RNA, 1509 nt, synthetic construct
  source 1..1509: mol_type = other RNA
atgagtaacaaagaaaaagcttactccacctttaagattcctaagaaaaacggaggactgagggagatcaatgcacctagcaagaagatgaaaaatattcaaaggtggatcttgaacaacatactgtacaagctcaatgccggaaatttagctcacgggtttattccagacagatctatcctcacaaacgccagcattcatgtcggccaggacttggtgctcgggatagacataaaagactacttcccgagcatcagctttcggagtgtctattacatatttaagtccgctggctataccaagaaaatcgcttggagtcttagtgacctgtgcacttaccattggaaactcccacagggggcacccacttcccctatgctagcaaacctatccaccgtggatcttgattacgaaatcgataactattgcacacgtaggaatttccgttactcacgatacgcggacgatatcaccatttcgggctcttataaactgcccatgcacaaacagaagattatcgaaattatcgagaggaatggttttgtgatcaacgaggagaagactagagtgctttccagagggtcccagcagaaggtaacaggacttgttgtgaacgataaggtttccatcggaagacggaaaaagaagatactacgcgccatcgtgcacaacatccagaaaaatggggccgaaaccgaaaaccgggagaaggatcctttcttcaaagaaaagatctgtggcgagctggccttcgctaagatggtagatcccgatttcgccaatccgctcatagagaagctcaaaggttttaattggctgagctacgacgaaaacctgaaaaattctcgagattctgaactgattgtgcgctctctggaaaaaaagcactacttccacccagttgacgccaataacatcatcgagagtgaaagcgacttcttaaaggctattgccactacgattacagaactcaagcattatattgaggatcggcgatggacagagccattttgggacgaagcgagagaagtagagatggacggcaaaaaatataagatcccagcagtcccaaagaaggagtccaaaatacaacccacaatccatatattcttctgtcgcaatttacttccttttggaattcacgtgctccgcgagactgacgaagggattggtaagctcgatttcaaattcctggtgaccattaaaggcaatattcctgtcaacgtttgtgctgagttcaaacttgcccataatgaggagctggagcacggcttgaccaaacagttgccgctgtatctgaaggcgagccccagcaaatcaggtctgtttctggtcatgtggtttaaggatgagaaggaggagtattttaagcggcccactaaccagaataagacgcaaatgctgaagtacctggaggaaaccatcaaaaagatcaacgagtgcggcaagttcaagatcgaatcagtgttgattgacgcctcgaaaaggccctctgcatcacactcatga

SEQ ID NO: 10131 - RNA, 1719 nt, synthetic construct
  source 1..1719: mol_type = other RNA
atggccaataggctcactaaaaacgagcgaatgaaagtgctgttcgataactactttgaagaaggaatcatatccccgctgagagacgtggagtacaatgacaacttcaagtcctttaagaaacttaagagccagaaactgccttacgtgtatgatgttaaccatttctgttttctctccaattccagcagcaaacaggtgaactatctgctactcaagaaggaaaaagcgtacgtgacgttcaacctccctaagaaagcgggaggctttcgagaaatcaacgccccgtctaaatcaatgaagcacattcagaggtggatccttgaccatattctgtacaaaatgtcactgggggattatgtgcacgggtttgtacccaaaagaagtatcttgactaatgcctctatccacgtaagtcaaaatcttgtcctaggtattgacatcaaagactttttcccttctattgatttcaacagcgtgttcaggattttcacaagtgtgggttacacacaaaaagcagctcatttcctggccgccctctgcacctacaagtcgaagctcccccaaggcgcccctacctctcccatgttagcaaatctagcaatagcttccttggacattattatcgacaaatactgccggcgccggaactttaagtacagccgctatgctgatgacataaccattagcggcagtcataatctgccaatgcacaagcagaagattattgagataatcgaagggaacgggtttaccgtcaatgaggagaagaccagattacacagcagaggctcacgccagaaggttaccggacttgtggtcaatgacaaggtcagtattggacggtctagaaagaagaccctgcgggctatcgtccacaacatcttgaagaacggatatgaaattgaaaaccgtgagaaggacccctttttcaaagagaagatctttggcgagctggcattcgctcgaatggtagagccagattttgccaatccactgatcgagaagctcaagtgcgctaattgggcgagctatgatgagcagacaattgattcaagggagagcgagttactcatgcggagcctggagaagaaatcctatcacaaaccagtggacgcaactcaaataatcgaatccgaatccgatttcctgaaggctatctcttccacaatagcagagttgaaacactacatcgaagatcgtaggtggatagaacccttctgggacgatgcccgcgtgattgaaatcaatggggagaaacacaaaatccccgcctccccaaaaaaagagacgaagatccagccaacattgcatgtctttttcaataggaaccttctgcctctaggtgttcaggtgctgcgcgagactgacgaaggggttggaaaactcgatttcaagttcctggtgacattgaaaggtaatatccctctgaacgtttgtgctgaatttaagctggcccataatgaggagctcgaacatggcctgactaaacagcttcccctgtaccttaaggcatccccaagtaaatcaggcatttttttagtcatgtggttcaaggacgacaagggcaagtatttttctaagcctatcagccagaataaatctcagatgttgaacatgatcgaggaagcgattaaggagataaacaacaaagaggagttcaagattgaaagtatcctgatcgatgcctcaaagaagccctcagcctcgaataactga

SEQ ID NO: 10132 - RNA, 1743 nt, synthetic construct
  source 1..1743: mol_type = other RNA
atgacaaggaaagttgccgagaatatcaagttgaagatcctcttcaatgattatttcgaggacggaatcataccgacactcaaaggtaaagagtatagcgacaatttcaactcctttaaagtcctcaaatcgcaaaccctcccttatatctacgatgtgcaccacttctgttttctgtcaaacttctctgcaaaacagattctctttttcctgaagaacaaagaaaagttctacgtcacttttagcattcctaagaaaagtgggggattccgggagattgatgcccccagtaaacagatgaagctcattcagcaatggatcctgaataagattctgtacaagatctccataggtgattatgtgcacggctttgtaccaaagcggtcaatccttactaacgcttccaatcatattaaccagaatttagtgctgggaattgatatcaaagactttttccccagtattgacataaaaagggtgaccgagattttcttgtgcatgggttacactcagaaaactgcatctttcctagcggaactttgtacatacgagggcaaactcccccagggagcccctacatcaccaatgctcgctaaccttgccgttaaagagcttgatatcgctattgatgactattgtaagaagcggaactttaagtacagcagatatgcagacgacattaccatatcaggcagccagaaactggccatgtacaaacagaaaatcatcggtattgtcgaatcgaatggctttgcggtgaatgaaaaaaagacccgtctacacagtaaatcctcacgtcagaaggtgacaggcctggtggtcaacgataaattgtctatcggccgcgagaacaagaaaaagctgagggctatcgttcataacattctgatgaaagggcccatcgcagaaaacagaaacaatgacccatttttcagagagagaatatttgggtacctggggtatgccaacacaatagctcccgaattcgcaaccccacttatcgagtccattaagaatatcgattggagcgagtactacgaaagcatcaaggaaatcaaggaaaatgagatgaacatcaatcacatcaagaagatgaacaagaccatacttattaagttcaacgatctggggttttttcgcatggtagtggaatttcctgaaggggtcttctccgaggctttccgaaatcagctggacaatctacaagaaaagtgcggcgaacatggaatcgtggcctgctctgattgcctggacattaaaaaggagatttacagcaagtgtatgaagtatgtgattgggcagtacactggaaccaccggtggccatcaccacggccatgagatttacgatatgaaatccaagaccgatttatatggagacagcataacggtagctttcctgatgaagagctccgcgccgaagaaggagagtaaaacgaagaataaagccaataagacctctaatcggcgaattacggccgttgacgattctctctttcgccagttttatgagtgcacaaggtacgagaacatcgacgtgatagccatcgtcactaattccaacctgaataacgagttgtctgaaaggctggaacagttaatcaagaagataaacaaagccgacaacaaggaacaattgtattgtttgatcatgagaaacgagatgaagcgcatcctgtacgacttcaataagaaaacaaccaatgagactggccaatatgacaatgcatttaacaacatgtga

SEQ ID NO: 10133 - RNA, 1683 nt, synthetic construct
  source 1..1683: mol_type = other RNA
atgacaaataagatcaccgaaaacgagaaattcaaaattcttttcgacgactacttcgaagagggtgtagtaccgtctttaagcaaggaagagtacaatacgaatttcaagtccttcaagaaactcaagaagatgaagctcccgtatatttacgaccttgaacatttttgcaacttgtcaaacagtagttctaagcagatcgggttttacctgtcacacaaagacaaggcttattccacatttaacttacgtaagaagactggagggcttcgggagattaacgccccggccaagaacctgaaacacgtgcaaaggtggatcctcgaccatatattgcacaaaattgatgttggaaccagcgcgcatggcttcgtgccaggacgctcaatcgtaaccaacgcaagcatccatgtgaaccaggatctggtgctggggatagacattaaagacttcttccctagtatttcagcaaatagcgtgtattatgtcttcaagcgggtgggctatgccagagaggtatcgcgactgctcgctgaagtgtgcacccataattggaggcttccccaaggggctccaacttcccctactctggccaacttggtggccctgtcgctggatagtgatatcgagaaatactgctccaaaaggaactttaagtattccaggtacgcagatgacattactatctcaggaagctctaacctcccaatgcacaaacagaaaatcctggagatcatcgagaagaatctgttcattgtgaacgaggataaaaccagaatgtttagccagggaagtaagcaaaaagtgacaggcttggttgttaatgacaaggtgtccataggccgtaacagaaagaaaaagatacgcgccattgtccacaatattctgaagaacggtcccgttagggagaatagagagaaccatccattcttcaaagaaaagatcttcggcgaattggcgttcgtgaagatggtcgatcccgagtttgcaaatccactgatagttaaactgaagcagctcgattgggaggattataacaaaaaaatcgaggatagcaaggaagccaaactacgagtcaattctcttatgcgcaaatcttacgcagagcctatgtacgttaatcagaagatcgaatcagaggatgatttctttaaagccattaccgacatctttgaaaaactccggtggtacgtggaggaccagcgctggactgaagctttttggaacgattgtaatcctcctacccccaagaaagaaacgaaaattcagcccacactcaagatgttttttaagcaggagctgaatcccataggaatccatgtggagcgggaaacacacgaggggatcgggaccctggactttaagttcctcatcacaattaagggcagccctctggtcgtgtgtgccgagtttaagttagctcaccacaaaaagctcgaacacggtctaacgacccagctgccattatatttgaaagccagcctgtccaaatccggcatatttcttgtcatgtggtttaaggacgagaaagaggaacacttcaaggaacctactaacaagaataagagcgagatgctgacatacctggagggcaaagtcaaggaaattaatgagaacgaagacttcaagatcgaatctatcctaattgacgcgtctaagaaaccctctgctagtcaatcctga

SEQ ID NO: 10134 - RNA, 1980 nt, synthetic construct
  source 1..1980: mol_type = other RNA
atggataagctaccgaatgacgacaagctgaaaataatgttcaaccactacttcgaaaagggcatcattcctaagctctctaagaacgagcacatcaacaatttcaactcattcaagaagttgaacgccaataatctgccctacatctatgacagggatcacttctgtagcctgtccaacagcagctctaaacagatcggatactatctgttcaaaaaagagatcgcctattctacctttaaccttccgaagaagaatggttctctgagagagatcagtgcccccgctaaacccatgaaatatgtacagagatggattctgaaccatatcttatacaagctggatgtcggggacttttcgcacggattcgttcccgggaaaagcattgttaccaatgcatcaattcacgtcaaccaggatctggtgctaggcattgacctcaaggacttctttccaaacattcaatttaacagcgtgcgttatatctttaagtcagcagggtacagtccaaaggtcgcctcattactggctgagatatgtacgtaccatcacactcttcctcagggagcccccacaagtcctacattatcaaatttggtcgcactcaagctcgacaaaaagatagcgacctattgtgcgaaacgcaatttcaagtattctagatatgccgatgatataacaatctccggaagctccaatctgcctaagcataagcagataattatcgagatcatcgaaaaaaacggctttattgtgaacgaggacaagactagaatgttctctcaggggtctaaacaaaaagtgactggtttggtggtcaatgataaagtgtctattgataggaagcgaaagaagaatatccgggcaactgtacacaacattctgaaaaatggtccagagatggaaaatcgggagaacaatccttttttcaaggagaagatctttggcgaactggcgttcgtaaagatggttgatcctgactttgccaatccacttatcgataagctgaaacagcttgattggattaactacaacaagaaactctccaatcccagggagatggaactgatggtgcgcagcctccaaaaaaaatcctgcatcgacccagagacttataatcagccaatcgaaagcgagggcgatttccttcaagtcatttgcgacgtgatagcagaaatgaaaaggggcattgagaagccgcgggcctacaaagcattttggaacgagggttctacagaaattctagacggaaatgaacataagatcagccccacgcccaaaatcgagaagaacatccagaacataatcgttctgttcatcgaggaccgactgctgcaccaggggatacagaccatcgaagagagtgacgaagagatcggctacttcggattcaagttcttatttaccacccagaaacgtaaagctttgaatattagcaccgggtttaagcttgctcacgatagtcaactcgaacatgggttgattaagcagctcccatcctatctggaggcctccagctccaaatcaggcatttttctcgtcatgtggtttaaggacgaaaacggaacatttttcaataagcctatcaatcgctcaaaatcggagatgctcgcctacctgcgggaaacagtgaaggaaatcaatgagaacgaggatttgaaaatagagagtatccttatcgacgtgtgcgagaaaagtagcgccagcaaaactgaatacaagaacgaccatgacgatgaaggtggcaaggggaagaacattagctattacctgtcgataataaagtgcaagattcagaaactgtggaaaatcatcattggcctcttagttctcattggcctgttggctgatgctattaatggatggcctgtgatcaaggaatttatgacgtctatatccaccagtttcattaactactcctcttacattttctcactaaacattcagctgtcctccatctttgctgtgtttttcaaatga

SEQ ID NO: 10135 - RNA, 1707 nt, synthetic construct
  source 1..1707: mol_type = other RNA
atgcccgaatccatgatactcaccgtctcacagtttgaggaatttatggagagcattaaacccccattatcttccgaggacattgagttccagcgtaaacactttgagaagttgacctacaacaaactcccatacttttttaacgttgatcatctggccaatagcatagggttctcctctccacagctccatttattcatctcaaataagcgcgtggcctattccactttcaagctgcctaagaaaaatcgggggttcaggctgatcgatgcaccatctaaagacatgaaaatcgtccagaggtggatcctggataacatcctctacaaactgaacgtcggcgagtatgcacacgggtttgtacccggcaagtcaatcgccaccaacgcttccattcacgtcgcgcaagacctagtgctcggaattgatctcaaagactttttccctagtattactcttggacgcgtgattgggctgttcaggggcatcgggtacaacgaggaaattgctcatgcgctgggcgaactgtgcacctttaattggaaacttcctcagggggcccccactagtccgatgataagcaatttgatcgcctggaatattgacattaaactctccggtttctgcaagaagcgaaacctaaattatagcaggtacgcggacgatatcaccataagtggaggcaagaggctgccaaagtataagacccttattttccgcaaaatcgaggaagaaggctttagcatcaactgggagaaagtgcggctccatgatcggggttcaagccaaagagtaacaggattggtggtcaacgacaaggttacactgggacgaaagaagaagaagacacttagagccatagttcacaacattgtaaagaatgggcccgagactgaaaatagagaaaatgagcccttctttaaagagaagatctttggtcaacttgccttcgctaaaatgatagaacccgattttgccgatagtctgcttgactcactgaaacacgtggactggaactcttacgacaagaaactgacaggtttaatcgagggagaactgtcggtgcggtctttggagaagaagaaatactgcattccagttgttgaggatcaggacatcaaatccgaaacggacctgctaaaagtgatctgtgatgtcataaccgaactgcgctattatgtggaggatagacgatggattgacgctttctgggacgatagccgtgaggtggaagttgatggaaataagatcaagctgcccgctttccctaagaaagagacgaagatacagcctactttgtacgtatttttcgacaggcgcctgtaccctctcggcatccacgtctctcgggaaacagatgagggcatcggcaaactcgatttcaaattcatggtgacaacgaaaagtcacatcccgttgctaatttgtgcagagttcaagttggcacacagcacaaagcttgaacatggtatcactgtgcagctgccagcttatctgaaagccaatagatccacctctggcttattccttgtgatgtggtttaaggacgaggaagagaagtttttcgataagccgaacgatcaaaacaagctgcagatgattgaatttatcgaggacaagattaacgtgataaagtacgaggaggaaattgacatcaagtcaattctgatcgacgccagcaaaaagcctagtgcatcgaatctctga

SEQ ID NO: 10136 - RNA, 999 nt, synthetic construct
  source 1..999: mol_type = other RNA
atgcgcatgaccaaggatcagatcctgaccgaagaccagtttaaagtgttcatctcctcaattaagcctccactctcggaagaagagcacgaatctcagtgttccagctttaagaaacttaaaagaaacgaactcccctacatcctgaatatcgagcaccttgcagagctgactggctccagtcccgcccaactccacctgtttataagcgataaacggaaggcctatagctctttcaaactgccgaaaaaacggggcggatttcgtaagatcgatgctccatctaaaaagatgaagactgttcagagatggattctggataatatgctatacaaactagacgcagggaactacgctcacgggttcgtgcctaataggagcatagcaacaaatgcttctgtccacgtagggcaggagctggtattgggaatcgacattaaggattttttcccatccattacactgaaacgggtcgtgggattattccagagtatagggtataacgaagaagtttctcacggtatgggtgagctctgcacctttaattggagattgccgcaaggcgcgccaactagccctatgatttccaatttgattgcatggcatatcgacatcaagttaagcaagttttgcaacaagcggaatctttgttattccaggtatgctgacgatatcacaatctcaggcggcacagagttgccccgctacaaaacgcttattttccgtaagatcaaggaggagggcttttcaattaacgatgagaagacgagggtgcatgggaggggtagttcacagcgagtgactggcctggtggtcaacgacaccataaccctcgggagagagaagaagaaacgactgcgcgccattgtgcataacatcgccaagaatggacctattgccgagaaccgcgacaacgacccctttttcagggaaagagtgttcggacatatcggtttcgcgaaaatggttgagcccgacttcgccaagagtctgcaatga

SEQ ID NO: 10137 - RNA, 1647 nt, synthetic construct
  source 1..1647: mol_type = other RNA
atgatcctgatagatagccagtttaagaaattcatggactccatcaaaccacagctaagccgagaggagtatgatctgcagctcacttcttttgaaaagctgaagaaaaacgagctcccatacatactcaatatcgaccacctggcacatctgtccggtatttcaccccagcagctccatctgttcatcaagaacaagcggattgcgtacagctctttcaaactgccgaaaaagaatgggggcttccggagcattgacgccccttcgaagaatatgaagcttgtccagagatggattctggacaatatactgtataagctcaatgccggcgagtatgcacacgggtttgtaccaaagaaaagtattgccaccaacgctttggtacatgtgggccaggaattggtgctgggtatagacatacgcgatttttttcccaccattacccttaatcgggtggaaggactctttaaaagcatcggttacaacgaggaaatctcttacgctttaggagaactgtgcacattcaactggaggcttccacaaggagctccgactagtccaatgattagtaatctcatagcctggcgaatggacatcaaactgtccaagttctgcgaaaaaagaggcctgatctatagtcgttacgcagacgatattaccatctcaggcaacaagaatttgccccgctacaaaacactgatcttccgcatcattgaggaggaagggttttcaatcaacgagaagaaagtcaggctcctaggaagagggtcatctcagaaggtgacaggggtgattgtgaatgataagatcagcctgggaagaaaatcacgtaaaaggctggaggccatcattcataacattctgaagaatggacctatcgccgaaaatttgaacaacgatccttactttaaggagaagctcttcggtcacctaggcttcgccagcatgattgagcctgatttcgcattgcctctgcttcagtctctcaagaagatcgactgggaaccctacgactgtgcgcttgaaacttctaaggagtcagaattaaactacaagagcctgtctcgcgactcccactccaatctgattaagtttgacaaccttggattctttaaggacgtggaaaccctgcccctgaagtggaaagatgagctaatcactcaattagacgagcttaaggaaaaatgcgaagagcagagtatcgacgcctgtaagaactgtatgcacgtcagaaaagagctctatgagaaatgcattaagtatatcctcgggcattatgtcggatgtacatgcggtccccaccacggccacgaagtttttgacgttggcggggaaacggacttatatggggatagcgtgtttgtcgcttttcttgccaaagctggcaaactcgaccgcaaatcgaaagattccctattccatcaattcttcgagtgcaccattcaggagggcttggatgttatctccgttgtgacgccagagatactggataaccggctgaaaatggatctgaggatcctgtttcgggattgcggcaaagagaagttgttctgtttgatcatgcgggatgagatgagtaggatcttatactccttccaacgaattatatccaataacatgtgtgaggacgaaaagaaggcaccttga

SEQ ID NO: 10138 - RNA, 1683 nt, synthetic construct
  source 1..1683: mol_type = other RNA
atgaattgctctgccatttgtgatgagaagcaattcgaggaatttatggactctctgcagccctctatctccaaggaagaatatgatacccagtacgaaagctttctgatgctctccgagaaaaacttgccttatatttacgacctaaaccatctaagcctgctcattggcgagagtaccaagcagctcgacttttttgtgagaaacaagcgcaagatttatgtgtcctacaggatgaagaagaaaagaggcggatatcggactatcgacgtcccatctaaaaagctgaaattcgtgcagcgctggattctccagaatatcctgtacaatatcaaggtttccaagcatagtcacggctttattccaggaagatctatagccactaacgctaaaatccacgtggggcaggagctcgtcatggggatcgatctgaaagacttctttccttcgataaagttcaaccgcgtgcgggggtttttcaagtcagtgggttataacaatcacattagtaccattcttgcggatctatgcacctttaactggcagttaccacaaggcgcgcccacatccccgatgatatcaaatttaattgctagtcggctagatcgtaggctggccggattctgcaagaaaaaggagttgctttattcaagatacgccgacgatatcactatttcgggtggcaaggtgcttcctagatacaagacactcatctttaggatcattaccgaagaaggatttgagatcaattgcgaaaaagtgaggatccagggtcgtggttcttgccagcttgttaccggcctggtcgtcaacgataaagtgtcaattgggcgaaggaagaagcgaatcatcaaaagcttagtccacaagatatccgaaaatggatctattgaagcaaatgagacggaaaatccttttttcaaagagatggtgtacggactgttgtcatttactaatgttgtggacccggagttcgctcagcccctgattgaaaaactgaaccttatcgattggaaggagttcaccgaggcatacagtcagtaccagaaaagcgagatcatagaacggtcctttaagaaatgcccaaccataaggcgaattctgttcaacgacctggagttctttaagggcataaaacttatcccccaaaatgagctgacaaaggagttcttgaaagaactcagcttactgaaagagaaatgtagcgagcataagaaagaaaactgtcaggactgcctgcttacagaagaaataagcgataagacatgtatgaagtacattctgggtcactatatcgggtcaacgggcggcgctcatcatgggcacgaggtctacgacatcggcgagatcacggagtataaaagtcaggaggtattcgtagccttcctcatgaagagcaaagacgacactaattccaagaactccctcttcactcaattctttgattgtaccgagaatggagggatagacatcatctctgttgtgagtacagaggatctggaccacaagacaatcctgcgcttgcaaagagtaatgaaacagttcgccaaggagcacctgtattgtctcattttgcgcaaggaaatggcaagcattctctactcctttaaaaaagagttctccaaaaacaaccgggaaaagagcttgttccataacggagatcaaagctcactgctgatctga

SEQ ID NO: 10139 - RNA, 1602 nt, synthetic construct
  source 1..1602: mol_type = other RNA
atggacctggaaagacagaagatcaatttcgacattccctaccaaagctttaatcagtatcgtagggacttcaggttcgccaacaagcacctaggcacacagtgcattaagttctgcattaattatgccaaagctttgaagaagaagaatctcccgatcatttacaatctggaacatctgagccaccatgtgaaactgtctaagaaatccctatacttcatcatcaagcagaaggagaaattttatcagcttttcgagattccaaagaagaaagaaggagtaagaaacattaccgccccatcaaagatcctcaaaaatgtccagagatggatcctagactgtatcctgtacaacatagatatccataagaatgccacagggttctacctggataaatccatcatcaagaatgcgaacttccatttaaaccagaagatggtcctgaatatcgacctgaaggatttcttcccctccatcaaaaacaagcgaacttaccacatatttagcagctgtggttacaaccattccgtatgtaagatcctgagtgagctctgcacctttaataacgagctccctcaaggatcacctgcatcccctatgatcagtaatatagtgtgtaagtctctggattcgcggctgtttggcttctgtaagaagaacaacctgaattactcgaggtatgccgatgacattaccatttctggagaaaggaacctcaccaagtacatcctcttcattttcaagatcattgagaatgagggttttaagatatctaccaagaagattcgacttactggaagagggaatgcacaaattgtgaccgggataacggtgaacgacaaaatttcattcgatcggaagaagctgcgcaagattcgggcgataatccacaattgcaaaaaaattggaccagagaaagctaataagaataaacacccctttttccgggagtatttgtatggctatgttgcttttctgaaacccatcaaaccagaactctctaaaaaatggaaaaaggagctcgacagcatcgattggggcgcatataaaaagaaatacgacgtggacatcatcattaacgattctgaaaaggaattgagtaacccaactgcctttatttcctactcctgggacagcaaaaaacaccgcgagtgggtcatcaggtttgctgctaaccttattaagaacggtattaacgtgttaatcgatgaatgggaccttaaagactataacgatgacctgaactactttatcgagtgcgggatacgtgattcaaaccacgttatcattatatgtacacccaaatacgcaaagaaagctaacaaacgccttggtggagccggcattgagacagccattatcacaggggagatatacgagaaaactaatgcaggcaaatttatcccgatagccttgaattaccagaaaagcatgaaagaatgcctccctacgtatctgaagaacaagttcacttttgatttcaatgaggaagaacgctatgaagagaagatcgagctgttgttaagaaagatttataagaagcccaagtacaagaaacctaaacttggcaccatacctgactttaaaagtaaggatatctga

SEQ ID NO: 10140 - RNA, 1173 nt, synthetic construct
  source 1..1173: mol_type = other RNA
atgatccttgagagtctgaacttgcccaagatttacaacctggagtccttctctactgagatcggcttgagcactaccatcctatatttattatcccaaaggcaggacaagttctatcatcaggtcattatccccaaacggaagtctggtaatcgaaccctcagtatcccatcaatgagcatgaaaatcgtgcagaagtggataaaactcaagattctcgacaagattcctgtgagtaattgtgccatggcctttcgcaaaggcaattcttatggcatcaagactaacgccgagttacacaaatacaatacgtacattctgaggttggatctgaaagacttcttcaacaacataaagaaggagaaggtgtttttcctgttccgggaaatcgggtacaataattacattagcaacatcctctctaacatttgcacatttaatgagagtttgcctcagggtggcatcacctctccgtccatttccaacctcatatgcaaaaaactggacattagactggagagcctggcatcgaaaagagatattacctatacacgatatgccgacgacctgatcttttcatgcaatgacgaagttcttcttatcaagacaaagaatgcaatactggacattctgaagagtgaaggaatggaggtcaacaaactaaaaaccaagttcataaggcccggctcacggaaaaaaattactgggctccatatcgataaaaaccgtgttattgtgcctcgcgatacaaagcgcaaggtgagagctatgatacactatagcatcgctactggagattattcaaagctggacgagatcaaggggtatatcagctttattagctccatcgaagagaattatatctccaagatcaaatcctacatcaacaagatagcgaataatgagcaatacaggctctttgaagacatcgtggaatcttacaacaagaacaaaatcttcaaggacctggacaccatgaacttcattgatgagtacatagaggaaattgacggaatcgagtatgatcttagctcaacatacttttacaacagaatcgacttcttgaagaaaaatgaacttcaggaagtcattgataacataaccaatggggaggataataacgtagatgatattgctaccacatacctggataatgaaacgtgtccattttga

SEQ ID NO: 10141 - RNA, 1140 nt, synthetic construct
  source 1..1140: mol_type = other RNA
atgcacctcaaatatagtaatctgatgaccctggaaagtctgaacctcccaaaaatttataacctggagtccttctctaccgagattgggcttagcactacgatcctgtacttattgtcccaaaaacaagacaagttctatcaccaggtgattataccaaagaccaaaagtggcaatcgcactctgtcgataccttcaattagcatgaagattgtgcagaaatggatcaaagtaaagatccttgacaatatccccgtgtcaaactgtgcaatggcgtttagaaagggcacaaattacggtatcaagatgaatgccgagttgcataagtacaatacctatattctcaagctggacctaaaggattttttcaacaacattgagcgcgagaaagtcttctatctatttcgggagatcggctataacaactacatttctaatatcctctccaatatctgcaccttcaacgaagtgctgccccagggtggggtcacatctccttctatttctaatctgatctgtaaaaggctcgacaggaggttggaaaacttagcaagcaaacgggatataacgtacactagatatgccgatgacctgatctttagttgcaacgacgaggtgctgttgatcaagataaagaacgtcatcttagatatcctgaagtcggaagggatggagataaataagctcaagacaaagttcattcgaccagggtcccgtaagaagattaccggactgcacattgacaaaaataaggttgtggtgccccgagataccaaacgcagagtgcgggctatgatccattatgccatcacaaaagaggactactcaaaacttgacgagataaaaggatacattagctttatctcctctattgaaggcaactacatcagcaagattaagagctacatcaataagatcgttaacaatggacagtgcagactttttggtcctatcgtagaaagctacaacaagaacaagatcttcaaaaaccttgagctcgtctcctgtattgaagaaatggattgggttatcactaaaggcgctttctacaatagggagaagtatgaactgaaagaagtcatagagaaatcaacagagtacggcgaagataacataaatggagagacttccccgttttga

SEQ ID NO: 10142 - RNA, 1137 nt, synthetic construct
  source 1..1137: mol_type = other RNA
atgtttataattaaggacgacatccgcaaatatgggaatctgatgattctggaggccttagacctccctaagatttatgaccttaactcatttggcagggaaatcggtttaagcaatacaatcctgtaccttttgagtcaaaagacggaaagattctataagcagaccaagattcccaagaagaaatctggcacacggcagatttctataccctccatcagcatgaaaatcgtgcaaaagtggattttgatcaacattctggagaaaatacccatatcaaattacgctatggcatttcgaaagggatcaaagtacggtatcaaaaccaatgctgagctccataagtataatgagtgcatcatccggattgatctgaaagacttcttcaactctattgaaaaggagaaggtcttttacctattcaaatccattgggtacaacaacctgatctccaacatcctcacaaatatctgcactctggatgggtgtctgccacagggagcactcacctccccgatcctcagcaacttaatttgtaggaatctcgatagacggcttgagggcttgtgctccaaacgggatatgatctatacaaggtatgccgatgacatcattctgagttgtaacaacgaagtcctgcttatcaaaacgaagaaaatcgtttctgccattttgtgcgatgagggttttaagattaaccagtcgaaagtgaagttcatgggagttagttccgccaagagagttactggcctacatatagaagaaaataaagtagtggtcccacgtatgctgaaaaggaaagtgcgaaccatgatccaccacactattgtggtaggcgattactcagaaatagacaagattaagggatatatcgcgtttataagctctattgagcctaactaccgcaagaaggtgatcgagtacataaataagatcaccagcaaacagcagtaccgcatctttaaagaaatcgtggacgggtacaatagcaataagatcctgaaggagtgtaaagatatggaatatttcaacgaggaatgcaatgaggacattgagaacgatttctacagtgagagagagaatttcataaacatgctgctcaaagaaaagaacgacactggaagctatggcgagtga

SEQ ID NO: 10143 - RNA, 1209 nt, synthetic construct
  source 1..1209: mol_type = other RNA
atgtttactatcaaaagggtgaagtaccgaaatattattatcctcgaggccctgaatctgcccaagatcttcgacataaagtcattttcaatctccattgggctgacccctacaatactgtatctgctgtctaaggaaacggagcgctactacactagtatcaagatccccaaaaaaaaagtgggtacacgtcagctaaggattccgagcttttccttgaagctggtgcagaaatggatcaaaatcaacatacttgacaagattccaatctccgactcagctatggctttcagaatcggcaaggattatggcattaagcaaaatgccgaattgcacaagtacgatagttacattttcaaaatcgacctaaaggactttttccactatatacatcgggagaaagtcttttacttcttttacaacctcgggtacaataaccttataagtaacatcttgagcaacatttgcaccttcaacgatgtgctgcctcaaggcgcagtgacctcccctagcctcagcaatctgctctgcaaaaagctggattcaagactcgaaggtgtggcttcgaagcggggaatttcttacactaggtatgccgacgacttgattttctcttgcaacgataaggtcctgttaataaaaacgcagaagatgatctatgagatcgttgaagatgaaggatttcaggtgaattctgagaaggttaaattcatggggcccgcgacaaggaagagtattaccggcctcttaattgtcgagaacaaggtcattgtaccaagatctctgaaacgcaaagtccgacgtatgatacattacatgatcgcaactagtgactattccagacttgatgtagtgaaggggtatatttcctacatttcaagcatcgagaagaagtatatcgagaaaattaagcggtatatcaacaacatggtcaacaatgaccagtataaggttttcgatgacatcgttaatctctacaacgagaatatctttcttgagtgtaatgaaatggagcatgtttcttttgagagctgtattgatatagtggacggaaccgtgctggatttcggggaacactacgtagatgaacgcatcaccttctttaaaaaacacaacatctgtggacggctgagctccttaggcatcgaatatgaggagattgcagccacagtgaatgtgacaagcgaaaatgacggcggaggtaaatga

SEQ ID NO: 10144 - RNA, 1191 nt, synthetic construct
  source 1..1191: mol_type = other RNA
atgaaagtgaaatacgaaaataccgtggtgcttggaattctcaatctgcctaagatttacgacctctatagtttttccgaagaaattggactgtctaccacaattatctacctgctttcaaagaaaaccgaccggtattacaacactattcacatccctaaaaagaagaagggtcgcacaagacagatcgacatcccctcattctccatgagaatcgtccaagaatggatcaagaataagattctagacagcattccaatctcggattcagccatggcatttcggaaagggaagaaatatggcataaagaaaaacgctgaactccataagaataaccagtacatcctcaagttagacttcgaaaacttcttttcgaatatcaacaaggagaaggtattctatatctttaagtccatcggatacaacaacaccatctccgatatcttgacgaatatctgtacatacaatgagtctcttccccagggggcaattacctccccgagcatctcaaacattgtttgcaagatgctggactctcggctggaaggactaagcaataaacgcaacatcacttatagtcgttatgcggatgatctgatttttagttccaatgatgaggtactgttgaaacgcaccacgaaagtgattttcgacattatcaatgatgagggcttctacatcaacaaggagaagatacgattcatttatccacagatgcgaaagtctattacaggcttgcttattgcagaaaacagggttgtcgtgcctaaggagatgaaaaggaaagttagagccatgatccacaacatgatcgccagcgctgactacactgacattgataaggtgaaagggtatatcgcctacattagcgggatagagtctgagtatatagagaaagtgcgtgaatacgtcaacaaaatgatagaaaaggagcagtacaaagtctttgatgacgtggtcaccgaatacaacaaaaataaactgctgaagggcactgaggatatggagctcttacccataggtagctgcatagaagaagacgagctgggcttttattctcaggacttcgccgaggattattacgaggaaaggatcgagttcttgcaagagaaatacccagaaaaggtgaagaagctgagcatcacatataaggaggctaatagtgagaacaatgaggagctcctgatatga

SEQ ID NO: 10145 - RNA, 1227 nt, synthetic construct
  source 1..1227: mol_type = other RNA
atgcttaccatcaataacctcaaatactcaaactccatcattatagacaccctgggattacccaagatatacgatataaacagcttttcgacagaaataggcttgtcacccactatcctgtatctgctgtctcagaaacaggatctcttctacaaggacacctatatcccaaagagggatggcagcaaccggcaaatatccattcctagtattagtatgaagctagttcaaaagtggatcaaggtcaagattcttgacaaactttacatcagtgacatgtccatggcgtttcgacggggtaatagctatggcattaaaaaaaacgccgagcttcacaggtatgacctgtacatcctgaaaattgacctcactgacttttttcatagtattgatcgcatgcggatattttatctgttcaaagggatcgggtacaataacttgatttccaatatcctcactaacttgtgcacatacaaggagagactgccacagggagcagtaacgtccccggtgttatctaatttggtgtgcgaaaaaatggataagcggctatcaggcgttgcctctaaacgcggtatttcttatacaaggtatgccgatgatatgtacttcagctgtgatgacgaaatactgctgagaaaaacgcagtccatgatttatgaaatcattaaggatgaggagttcaagatcaataataagaaggtgaagttcatgggacccagcagcaggaaatgcatcaccggcctggtcataaatgactctaaggtagttgtgcctagagaaatgaaacgaaaagtccgcgtcatgattcaccacggtattgctacaggggattactcaaaagtggactccatcaagggatacatctccttcatcagcagtatcgagaaggactatgagaacagaattaaaaagtactgtcagagcctcatcgataaagatcagtataaggtgttcgatgacctcattgagaagtacaaccagaacaagtttattgacaccaatgagatgaagcaagtggatgaggacgagttactgtacgaattcgaaggcattgagctcaatcatatcgactcatacatctatgagcgtattgagttctataagaagaacaatctggagaacaagatgaaagacttttacatcgagaacaaagaaatcgcttgtgtgctgaatgaagaaatcatcatgaattctgacgataacaacgaagacttcgggttttga

SEQ ID NO: 10146 - RNA, 1062 nt, synthetic construct
  source 1..1062: mol_type = other RNA
atgctgaccatcaagaaccttaaatactccaattcaatgatcctcgaaacactggggttgcccaagatttatgacattgagagtttttccacagagatagggctctctccaaagattctgtacctgcttagccagaaacaatacttgttctatcagaacaagcagattcccaaaaaagacggtagtagccgccagatttctatacctagtacgtctctgaaattagtgcagaagtggataaagattaagatgctagacaaactcccgctgtcagattttagcatggcctttagaaagggcaagagttacggcattaaaaagaatgcggagctccataagtatgacagctatatcctgaaaatcgacctgaaagacttctttcactccatcaataagaccaaagtgttctacctctttaaaggcgtaggttacaataaccttatcgcaaatatactgaccaatatttgcacttacgaagatagggtccctcagggcgctatcacttcaccagtcatatctaatctgatttgcaagaagttggattatcggctgtctggagtggcctctaagagaggaatatcctatacacgttacgccgatgatatgtattttagctgcgatgatgaaatcctgctcaggaaggctcagaacatcatttacaagatcattaaggaggatgacttcatcatcaacaacaaaaagatcaagttcatgtccccccattcaaagaagtttgttaccggattaatcatcaatgataccaaggttttggtgcctaaagagatgaaacgaaaggtgaggagtatgttacaccacgcaattgccaccggggactataataacattgacagcatcaagggctacatatcattcatctcctcgattgagaaagactaccgcatcaaaattgagaaatattgtgaagagctcatcgacaaaaaacaatatcgggtgtccaacgatctagtcgacaaatataacaacaacaacttcctgaagacaaagagcatggaatacatccaagatactgaattcaatgagtacgaggaacttattttctga

SEQ ID NO: 10147 - RNA, 1215 nt, synthetic construct
  source 1..1215: mol_type = other RNA
atgagtcaaaatatccctacactgctcatgaattccctcaagctaccctactttgaaactatagaagagctcagtgaattaacccggctcagcactcagcttctgtattgcctgtcaaccaagacgtctaaatactacatcattaagaagatcccgaagaagaatgggggtcttagagagctctctatcccctcttacacactgaggattgtacagaggtggatcttgacagaaatactgaacaaaatactcccatccgatcgagcaatggccttcagaaaagggaaggactttggacacaagcagaacgcctattatcacgccaacacattgtatggcctgtcaatcgatattaaggatttctttccctctatcacagtgaataaggtgtacactatctttagcacgttgggttacaactcctttgccgccactatactcactaatctgtgcacactggagggcaaacttcctcaggggagcccttgttcccctgctatatccaatatcatttgtagctccctagatcgccgtttcgttgggctttgtgaaaaaagaggaattcggtattctcgctatgcagacgatatgtacttcagttgcgacgataagattcttctgctaaagaacttccccatcattacgcgcatagtggaatcagagggctttatcctgaacaccagaaaagtccattttcacactccatcgaataagaaacaaattaccggaatcaccgtcagccccaccaacattgaggattatgtggagttaaaggctcctaggaccctgaaacagaaaatccgggctgagatcttcacatgtttgattagtggacagtaccagaacaaagaccatattttgggtgaaattgcgtatgtcgacttcatcgaaaaagagaataaaagcaagtacctggaacgaatcaaaaactacattggcaaacagctggtgaaaatccagctgttcccagagctggtgatggagtacaacaataataagttctacgaggacttaccactggctatctctatagacattaacatagttaccgaggaggacttcgatgatatcgagtgtctgtttcgggagaggaagaagttcctccaaaagaatggcatcaaagacatctgcaagtatagcaagtggccggacatcatcattaactcatcctataacattgccgaaaatattgcagacattgaatgcccattttga

SEQ ID NO: 10148 - RNA, 1035 nt, synthetic construct
  source 1..1035: mol_type = other RNA
atgagtcaaaaaatatcaccactcctgattaattctctaaaactccctgtgtttgagactttagaagagctcagcgaaattaccagactctctacacggctgctgtactgcctaagcaagaaaactgacaggtattataatgtcatcgagattcccaaacgcaacggtaaaatgagggagatttcaataccttcctatacccttcacattgtacagcgctggatcctgatggaaatactgaacaaacttgtgccatcttcaagcgccatggctttcaggaagggcgataacttcggacacaagcagaacgcaatctatcacgctgacactttgtacggcctcgcaatcgatttgaaagattttttcccctcgatcacggcgaataaggtgtacacacttttcagtaatctggggtacaaccacttcgcagccgctatcctgacgaatctttgtaccctggacgggagacttccccaaggctccgcgtgttctcctgctatctccaacataatatgcatgaatatggataagaggctgatcggtctgtgtgagaagcgtggcattcgtttcagccgctatgccgatgatatgtacttcagctgcgacgacaaactgttactcctgaagaactaccctatcatcaaaaagatcatagaggacgagggatttttgctgaacgaacggaagacacattttcacaccccatccaataaaaagcagattacagggattaccatctcccccggaaaggccgagaacgccgttgaactgaaggccccgcgaaaactcaagcagaagatcagagccgaaatttttacttgcctaatgacaggcgactataagaatagagaacatatcttgggggagattgcatatgtggaattcattgaacgagagaataagtacccctacaaagatcggatccgccattacatcgaggaaaagagtaccaaaattcagtacttcccagagctggtccaggcttataacgagaaccggttttttaaggacatgccgttattggagggaaaatga

SEQ ID NO: 10149 - RNA, 1206 nt, synthetic construct
  source 1..1206: mol_type = other RNA
atgaggaaaatctctcagtctttactcattaacagtctagggctgcctagattttctaccatcgagcagttttccgaaataacaggtctttctacccgtctactgttttgtctcagtaatctcaccgagaagtactatcgcaataaaaagattcccaagaggaatggagatatgcgggagatctttataccatcctacaccctgcggatcgtccagaagtggatccttaaaaacatactgaacaagatcgtcccgagcaatcagtcaatggccttcagacgtggttcttcttttgggaacaagcaaaatgcggcatatcacgcatatacactgtatggactttccatcgacctgaaggacttcttcccatcgatttccgctaataaagtttacaacatcttcagcagcctcggatataacgagtttgccgccacaatattaaccaaactgtgtactctcgacagtaagcttcctcagggatcaccctgttcacccgccattagtaatcttgtgtgcattacactggataaccggttggctggtctgtgtcagaaacgcggcattatctatacacgatacgctgatgatatgtatttcagctgcgacgataagactttattgctgcggtactactacgccttcaaacagatcattgagaatgaaggcttcgtgatcaatgataggaagacacattttaacaccccttccaatcgcaagcgaatcactggcgtaaccatcgttcaacaccatctggatgaaaagtttgagctgaaagcaccaaaggagatgaagagaaaaattagggcggaaattttcatgtgcctgatgagcggcgattacaaaaataagggcaaaattctcggcgagatcgggtatgtgagctttattgagaaggacaataacttcaactacatctccagcattaagcagtacatcactactacggcagaaaaaatcatatactttccagagctggtggatgcctataataacaacctcttcttcgacgacttggaagaaattgaatcagctctcattgatccgaaggacgaagaggagttgtactattatggggacatgtacaactccagaaaaatctacttgaacaaacgcaacctaagtgacgtgtgcacgtacaaggattggcctcaggtcataacctcccaaaataattcaagcacggacaacactgacctgcccttctga

SEQ ID NO: 10150 - RNA, 1149 nt, synthetic construct
  source 1..1149: mol_type = other RNA
atgaaggtaaataatctgctcataaagtctctaaacctgcccgagttcaaaaacattaaggagctgtctatcctgatcggcgtgtctagtcgactgctttactgcctgagccaaaacaccgagaagtattacacccacaaaatcattcctaagaagaatggaactaaccgctgtctttccatgccatcctataccctgaaaattgttcaaaggtggatactgaagaggatcatagagaagataatcccatccaaatcagctatggcatttagggtggggaaaaattttggctataagcagaacgcgtcatttcattcggatactttgtacatgctgagcatcgacctgaaagacttcttcgacaatattaaatcgttcaaggtctattgcttctttatttctatcgggtactgtgagtttgccgccatgatcctcacgaaaatttgtacattggataataagctcccacaggggggagtgtgcagtcctgctcttagtaatctcttactttcatccctcgataagcggttgattggattatcagaaaagagaggtattagattcacccggtacgccgatgatatgtgcttttcctgcgataataaggtggaactgctgaagatttttcctaccatcaagaagattatcagcgaacagggattcattatcaacgaccataagacgtattttagtactcccagcaacagaaaaaaaattacaggcatcactatcagcaaaaagaacaacatcattgaactcaaagccccccgcaaattaaaaaagcagatccgtgtcgaaatatttcagtgtattgtgtccggtgactactctaaaaagaatcacattattggggagatcgcccacgtaaactttatcgagaaagagaacaagatcaagtatatcaacaacatgaagaagtacatcgaaacaacaggcaaaaaaattagctgcagccccgaactcgttaccgcttacaatgaaaaccttttcttcaacgacataaacaaactagagatcatgccgctgatcaatatcgcatgccgcaggaatgcagtggatttcttcaaaaatcggaaagagtacttgggtaagcgacatatagtcgacatatgtaagtataatggcctgatgatttactgtgacatatga

SEQ ID NO: 10151 - RNA, 1227 nt, synthetic construct
  source 1..1227: mol_type = other RNA
atgtcaaacttgaagcgcctgaactatatttacataaacacgctgaagatccccgcttttcagaatatttacgagctgtcacgcctcaccgggatctcttctcggatgctctattgcctgagcaaaaataatgtggagtactacaagactttcacgatccttaaaaaaagtggagatccccgaacgatcaatgcccccctgtacagcatggctataatccagaagtggatcttacgcaacatcctagaaaaaattacaccttccaatagggccatggcctttcggaaagggtccgagttcggttgcaagatgaacgccaagtatcatgttggaactctgtacggtctttcgattgacctggcagacttttttacttccatcaaaagcaacaaggtctattgtctgtttcgtaatttaggctatgctgaaacagccgccaccatacttaccaatatatgtaccctagatggtgcacttccccaaggcggggtgtgctcacctactataagtaatctcatctgcatcacactggacaatagactgattggaatgtgtgaaaagaggggcattaggtatacaaggtatgcagacgacatgtacttttcttgcgacaataaagatttgctgaagaaaactttcccgaaaataaagactgcaattgaggaccaaaacttcaccattaacaacaacaagacaagatatcacaccccaagcaatagaaatcagattacaggcgtggttattgtcaaaaccaaccagtacgaagagtacgaactaaaggccaagaggaaactgaagcagtctctgcgtgccgaaattcacaacgctatcatgaccggcgattacaagaacaaggggcacattctcggcattatcagctatattaactttgtggagaaggaaaacagtgacaattacctcgaaagaatcaaagagtacatcgtgaagtgcgcaaacaagatcatcttcttcgaagagttgattaaagcgtacaacgagaaccttttcttcaataacatggagaagatcgcgtatgataaggatcagatcgtagacttcttcaaagaggaggattcctacctcaagttgctggataaacgcatagagcgggaagcttatctccagaaataccatcgggacgatatctgtatgtatttagattggccacgaggattggaccctaacaataataatgacatcggactgatggacgattgtccattttga

SEQ ID NO: 10152 - RNA, 1239 nt, synthetic construct
  source 1..1239: mol_type = other RNA
atgcagaaaaacaacctcctgttgataaactctctggggatcccttacttcgagtgcttagaagagttttcccggataataggattaagtaccaagttgatctacctcctaaccaataagaccgagatttactacagttttaaggaaattcccaagaagaatgggaaaaaacgcattatcgccatcccctcctacacactgaaaatcacccagaggtggatcctcaaaaacattctgaacaagattaggccaagcgactatgtcatggcttttcgcaaatctagcaataacaacaagttcgacatcaagaaaaacgcctactatcacagtgatagcctgtatggtctatctattgacctgtctgacttcttccctagtataaatgctgcgaaggtctacagaatttttaaaggaatcggctacaacaacacagcgagcgctattctgactaatctgtgcacattggaaaacaaattgccgcagggtgcagtgtgttcacctgctctgtcaaatcttatctgcatgcgtcttgatagacgactttttggcctgtgcagcaagcgcggcgttctctatacgcggtatgcagatgacatgtatttctcctgtgataataagggccttctgctcaaaatgtttcccatcatagagaagattatcaaaagcgaagggttcattatcaatcaagacaagttacactaccacaccccaaaaaataagcatctgatcactggagtagtgatcagccattcaaacgatacatccgaactcaaggtgtcgaaggaattcaagagaaaaataagagcagagatcttcaggtgtatcatgacaggcaattatgaaaacgccgcccatattaaaggagaaatctcctatgtgtgttttattcaatccgaaaacaggcaggattacaagcagtccatcattcagtatattaaccggacctcaaaaaagatagagtatttttgcgaactggttgacgcctacaatgaaaatttcttcttcgatgagcaagagccattggaattccttgacatcaataaactcgagattgattgccctgagaaggacaccgacaactatgatcagtacctgtttgagacaatcgaggcaatttttcagtaccgaaaagagtacatcaagaataataacctgactgacatatgtaagtaccagaactggcccaagaacactactgagaatgagtttgatgcctcttctgaggagacgccattctga

SEQ ID NO: 10153 - RNA, 1182 nt, synthetic construct
  source 1..1182: mol_type = other RNA
atgaacaaaaatttcactaacagcttcatcctcaacgcccttaatctgccaattatacgcgatctcgataccttctctaattccatcggggtatctaaacggctgctttatctgttatcacagtcaagtgaggagtactaccggagtttctttatatgtaagaagaacggagatcagcgggaaattcatactcccacctacagcctaaaactcgtgcaaaggtggattctggaagaaatccttgagaagatcgacgtgtctgaggagtccatggcatttaaaaagggacccggcaacgggatcaaaaagaatgccgagatccatctgtactcgctctatttactgcagctggacctgaaggacttctttacatctataaagcgcgagaaagtcttttacctatttaaggatctaggctacaatatcgtcgtttctaacatactcgcaagtttgtgtacgtataacggctatctcccacaaggcggggttacctcaccttatatttccaatttggtgtgctacaaactggacaaaagactcaaaggtctgtgcgctaaacgcgacatcctttatacacgttacgctgacgacttgacctttagctgcgataatcgagaaaccctcaaaaaggtgcagaaagtgatcgaggatataatcgaggacgaaggcttcaatgtgaattccttaaaaacaaggcttctgagcccttccagtcacaagaaggtgaccggtatcactgtcaatgagaaaaccgtaaaggccagtaagaagctgaagagagaagtccgtacaatgatccaccacgcatttgttacaactgattatagctccaatgacaggattaggggctacattgctttcattagctccattgaggaaggatataaggacaccatctacaagtacattaataaactggtgaacaacgagaactataggatgttcagagacattgtggaggcgtacaataacaacaagatcttcaagaacatggaagacatgaaagacatgaagtttgagaagagcgggtacctggtcgaagaatatctgaatgatttggcccaggagcgggcctcatttctgagaaaccgagatattcagactgacctgttcacaaactcgagcgctgatgagatcgcctctacgtcaatggaacgcaaggattttaaagatttgttctga

SEQ ID NO: 10154 - RNA, 1188 nt, synthetic construct
  source 1..1188: mol_type = other RNA
atgaagaaatcctataccaactcattcattctgaatgccctcaatcttccaatcatacgggacttggatactttcagcaactcgataggcgtgagtaagaggctgatttacctactgagcgaatctactgaggattactacaagaactttctcatccctaaaaaaaacggtgaacaacgggaaattaacacacccacttactcactaaaattggtgcagagatggattctagaggagatcctggagaagattggcgtcagtgaggaatccatggcctttaaaaagggccctggtaacgggattaagaagaatgctgaaatccacttatactctctttacctgctccaattggacattaaagacttcttcatcaacatcaagagaaaacgtgtgttttatctgttccgtgatttgggatacaatgtggctatctccaatattctcgcaaatttatgcacctataaggactatctgccccaggggggcattacatctccatacctctccaacctcatatgttataagcttgacaagcgattgaaaggcctgtgtgccaaacgggacatcctgtacaccagatacgctgacgatctgacctttagctgtgacaatagagagtcccttaagaaggtacagaaagtgatcgaggagattatcgaagatgaaggattcaaaacgaaccccctcaaaactcgcctgctgtcaccttcttcacataaaaaagtcacgggaatcaccgtcaatgagaggtatattaaggccaacaagaagcttaagaaaaaagtcagggcgatgattcaccacgcattcatttccgccgactattctagcaatgattgcatcagggggtatatagcattcatatctagcattgaggagggatacaaggacacaatctgcaaatacatcaacaagctggtgaataacaaaaactaccggatctttgaagatatagttgaggggtataacaacaataagatcttcaaggacatggaggaaatgcgcttcaaggaaacagtttttctggatccggactatccactgaattcgcatttaagcgatatagttcaggtacgcaccgattttctccagaatcgagatatcaagatcgacgtgtttcccgatagcagtgaagacgagatcgctagtgccaatatggaagagattgagatcgatgacctgttttga

SEQ ID NO: 10155 - RNA, 1197 nt, synthetic construct
  source 1..1197: mol_type = other RNA
atgaaaaagcattacactaactcgttcatcctaaatgcattaaatctgcctaatatccgcgacttggaaaccttttctaatagcattggtgtgagccaacgactcattcagttacttgccaattccgcacacgtgtactacaacaacttcagtatcccgaaaaagaatggaactcagagagagatcaacactccaacctatagcctcaaactcgtgcaaagatggattctgaaagagattctggaaaagatcgatgtgtcagaagaatcaatggcctttaaaaagggcctggggaactctattaagaagaatgccgagatccataaatacagcgtctacttgctccagctggacataaaggacttcttcatctcaataaagaaggagaaggttttctatctcttcagggatctgggatataatatcgtggtgagtaatttgcttgcaaacatatgtacgtacaacggctttctcccccaggggggcgtctgttcaccatacataagtaatcttatctgctacaagctggataaacgcctcaaaggtttgtgtgccaaaagagatattctgtataccaggtatgccgacgatctgacattttcctgcgataacaaggaaacactaaagaaagttaggaacatcatcgaagacattataaagaacgaggggtttgagattaaccctcttaaaacacggtttctgtcaccctcttcccacaagaaagtcacaggcattaccgtcaatgacaaccggatcaaagcatctaaaaagctgaagaagaaagtaaggtccatgattcaccatagcttcgttagcgcggactatagcagtaacgaccagatccgcggatatgtgtcttttatcgattctatcgaggagggctacaaagacaagatttgcgaatatatagaccgtcttgcgaacgataaggactacaagtattttgaggacattgtcgtggctttcaacaacaataaaatcttcaaggagctggctgacatgcccttcgaggatttatcctttaacgaccccgatgatcctgacgatctggttacctactttatctccaattccgtggaagaaagatacagttttctgaaggatcgacggattaaaattgatgccttcccagatgagtatgaagacgaggtggctgccgctaatcagaatgaaatagaggtagaggacatcttctga

SEQ ID NO: 10156 - RNA, 1110 nt, synthetic construct
  source 1..1110: mol_type = other RNA
atgaagaacgatttcacgaattctttcatcctgtactcgctcgatttaccgataattaaggatttcgaaagcctatctaactctgtgggcattagtaaaacaatgctgtacctcttgtcgaaaaaaacagacatgttttacaactccttcgacatatgcaaaaaaaacgggaccaagcgagaaattaactcacctacctattctctgaaacttgtgcagcggtggattctcgccgagatccttgagaagattaaggtgagcaatgaatctatggcatttagaaagggcattggcaacggctgtcgcaaaaatgctgaacaccacagatatagcctttacctgctgcagttagacatcaaggattttttcacttcaatcaaccgggagcgcgtgttttatctgtttaagagtctggggtacaattctttggtgtcaaatatcctggccaatctatgcacctataagggttatctccctcaaggaggagtatgtagcccctacattagcaatctgatttgctataagcttgacaagcgtttaaaaggcttgtgtagtacaagggacgttctgtacaccaggtatgctgatgatctcaccttttcctgcgacaataaagttatcctccgcaaggtcaagaatgtgatcgaggacatagtaattgatgaaggattcgcgattaatccaagcaagacacggctgctttcccccagttcccataagaaagtgactggtatcacggtcaatgacaacaagataaaagcatccaaacagatgaaaagaactgtgagggctatgatacattatgcactggtcaacagggactactctgaaaaaaacgtgatccgagggtacgtctcatatatcgactccatcgaggaggggtacattgataagatcaagaactacatcaacaagttgactgagaaagattactcctcctcaagtgagatcgtcgagagcttcaataaaaacaagctgttcaacgatctgaacgacatggtttataatgaggccagcatcatagacgaagcctttgattgggatattttcgagctcgacacatacaagcacatcagcgccaccaagcaggaagacgactttaatttctga

SEQ ID NO: 10157 - RNA, 1053 nt, synthetic construct
  source 1..1053: mol_type = other RNA
atgaccacagatttcaccaattcgttcattttgaattcactaaagctgccgatcattactaacatagattctctggcaaacactcttggcctgagcaagaccattatctttttgctgagccaaaagacatcatactactacaagccctttaagatccttaaaaaagatggcaatagccgacagattttttctccctcatattccttgaaactcgttcaacgctggattctcaacgagattctggaaaaaattgatgtgtcccatgagtcaatggcctataagaagggtaatgacaatggcatcaagaaaaacgcggagatgcacaagtataatctgtacctgttagaattcgatttgaaggacttctttacttccataaaacgggagagagtcttcttcatgtttaaaaacctgggatataacaacatggtcagcaatatcctcaccaacatatgtacatataacgattacctgccacagggcggagtgtgtagtccttatatttctaatctcgtgtgctatagactagataagaggttaagtgccctgtgtgggaagaggggtatcgtttatactcggtatgctgatgacctgacgttttcttgcgacaacaagcagagccttaaaaaggtgaaggacataatcaaagacattattgagagcgaacagttcaaaatcaacgatagtaaaacacgcctgctgtccccaacgagccataaacgtgtgactggaattacagtaaatgacaataagctcaaagccaacaagaatatgaagaagctcgtcagggctatgatcatcaaaagtttattctcgatggactacatcaacaataatatcatcaaggggtacatcgcatttataaattccatcgaagacgggtacaaatgcaagattatagagtacatcaacaagaccatcaacaaatctcttccttattccaacgaaatggtgattgcctataacgagaacaaattcttcaaggaaaccaatgatatgtgctaccacggctacgacaatatcgatgacaaatacgaggactacgaggggtga

SEQ ID NO: 10158 - RNA, 1179 nt, synthetic construct
  source 1..1179: mol_type = other RNA
atgatccaaaaggattacacggactctttcatattaaatgcacttaatctcccgaccattagcgacttggactccttgtcagatgcctttgcaatcagcaaacggctaatatttcttctgaccaagaagaccgagaactactacaaaaggttctacatcaagaaaagggatggcacttcccgtgagatcttgtctcccacatactctcttaagctgatccagcgctggattctcaaggaaatcttagagaaagtgtcactgtctgaacaggccatggcctacaagaaagggaaaaataacgggattaagaagaatgccatgcaccacagatactcactctatatactggaaatggacattaaggatttcttccactcaatcaagagggaacgtgtgttctacctctttaaaaacctgggctataataatatggtgagtaacatcctgaccaatctgtgtacatataatggctatctccctcagggaggtgtttgcagcccctatataagtaacctgatttgttaccgcctggacaatcggctgtccggcttgtgcggaaagcgggatatcctgtacaccaggtatgctgatgaccttacgtttagtagcgataacaagcaaactctgacaaaggcgatcaacataatcatcaacattattgaggacgagggttttaaggtgaacaagaacaaaacaagactcttatcaccaggcagtcataaaaaagtcaccggcattacagtcaacgattccaagatcaaagcttccaaacagctgaaaagaaccgttcgcgccatgattcatcaggccattgtcactgcggactactcgcaaatagaccggattagaggaatcgtttcctatatcaattctattgaggtcggataccgcgagaaggtaatcacttacattaatagcctaagcaacaaagactatgcttttttcgaagaaatcgtggaacgattcaacgataacaaaatcttcaaggagatccaagacatgaattataagggttatgattacgacgatcaggtgagtttggagcttgagaaaattgtatccgctcgacaggaatatctcgggaagatagggaaggtggattttctgtctgcacatattcagagccagcaggacgagttcaaaaccaatgccgcagctactaaggagacatacgaatga

SEQ ID NO: 10159 - RNA, 1182 nt, synthetic construct
  source 1..1182: mol_type = other RNA
atgaaatctgacttcactaattctttcatcttgaacgctctgaatctccccgttatgaaggatctcaatgacatttcttacctgaccggactgagtaaccagttgctctttctgttaagtcagaattccgagtcgtactacaagaagttttatctggacaagaagaatggcgaagtgcgggaaattaactccccatcatatagcatgaagctagtgcaacggtggatcttgtcagagatattagagaaggtgaaagtgagtaacgaatctatggctttcaagaaagattttggcaatgggagtatcaaaaacgcccgctaccaccagtattcactgtatatcctgcaactggatcttgagtctttcttcgattcaatagacaaggaacgaattttccttgttttcaaatcactgggatacaacacgtatatttcccacgtgctaaccaatatttgtacactgaacggcacactccctcaggggggcgtatgtagcccttacctgagcaatctgatctgctataagttagataggcgtttgacaggcctgtgcagcaaacgcgacgtcctctacacccggtatgccgatgacctcaccttttcgtgcgataacaagctcacacttaagaagattaagaatatcatcgaggacatcatcattgatgaaaacctcaaaatcaaccatttcaagacgcgactgctgtcccccggttctcataagaaagtgaatggtattactgtcaacaatggaaacctgaaagcaagcaaagaactcaaaaaaaaagtgagagcgatgatacaccacagcatagtaagcgaggattacagtaagaacaacattattagggggtatgtctcctacataaattctatcgagaagggttacttggagaagatcaaagagtacattatcaacatcttcaagaaggactacaaccatttctcctccaccgtcaatgccttcaacgagaataaactttacagagacattgaatccgccgagtacgttgagtttgtgggagcaggctatagcgacgactacgaatggttgtactatgaagaaagaaggtttgagtttctggtcgagaaaggatatcttaaggggcttcgcgactattttaaaaaagctgagaatctgctagtggaaaataaggatgatgaggacccaactagcatcttttga

SEQ ID NO: 10160 - RNA, 1221 nt, synthetic construct
  source 1..1221: mol_type = other RNA
atgaacaacaaaaacaacgtgaccaattcctttattctcaacgcactcaatctgcccatcatcaaagatctagagtccctgtcaaaccatatcggcatatcagaaaaactcatctacctcctgtcagtacgcaatagtgaattttatgaaagcttcaccatccctaagaaagacggcactgaaaggaaaattgaatcccctagctatagcttaaaattggtgcaacggtggatcctgaaggaaatcttagagaaaataccggtgtcagtccactcgtttgccttcaatccaggacggaatgggattaaagacaacgccgagctacacaagttctctttgtacctgctccagatggatattaaagacttcttcaccagcatcgagtataaacgcgtcttttacttgttcaagaaccttggctacaattccttcattagcaagattcttactgagatctgcacgcatgaggaacgactgccccaaggaggcgtctgctcaccctacatttccaacctcatttgttacaggttagacaatagactgcagggtctgtgtagtagcagagatattatctattctcgctatgctgatgacttgacatttagctgcgacaacaaagaggcacttcggaagattaagaaggtcatcgaagagatcatttttgacgaagggtttaaagtgaatcacaagaagacacggtacactagcccttcctctcataaagttgtcaccgggataaccatcaacgaccagaagatcaaggtccagaaggaccttaagagaaaagtgagagcactgatccaccacgcgatagtgtgtggggacttctctgagatcaacacaattaagggttacgtgtcctatataaatagtattgaggtgggctatcgtgagaaggtcataacctacattaacaagctgctgatggagaaagattataagtactacaatgacatcgtggagtctgtaaatggaaatctgatgatgaaggagcagatcagtatggtttatgacgagtacgttgacgatgagtacgttgatgacgaatatattccagccgacatcgtgtttgccgaaacaattctgaggaagcgaatagattttttcaagaaaaggggaaaggagctggaaatcgaagataagtataaagagtacttcgaggacgaggtagcttctactgtggttgtggatgctgatgatgatgatgaactcccattctga

SEQ ID NO: 10161 - RNA, 1287 nt, synthetic construct
  source 1..1287: mol_type = other RNA
atgaacaacacccacagcaacaccattctgctgaataatctccaattgcccatcatccacgacattttcgacctcagcgataatacacgcatctctgacgggaagctctacttgttattccagttccataactactactacaacacgttctttatcaacaagaagaacggcaaaaagcgggagatcagtagtcctcaaagaccactgaaacttcttcagaagtggattttggaggagatactgctgaatatcaaggtgagcgccgaatcacaggctttcatacggaagaagaatggcattctggagaatgctctcctgcataaagacaacttgttcttgcttcaaatggatatcgaaaactttttcccgagcattgatgacaaacgcatcttttatttcttcaggcagattgggtataactccttcgtgagcgacatactgaaaaatgtatgtactttcaagggcaaactccctcagggaggtgtttgctcgccatatctctcgaatcttatttgctatagccttgatcgacggattgctggactgtgcgcccggagagatatcatatatagccgctacgccgacgatctgtccttttcttgtgacaataaagacaatctgaggaaaattcgtcccctagtggaattaatcctgtcaaaagagggctttaaggtgaataagtccaaaacaaggttctccttttcacacaaaacaatcactggactgaacatcgcaaaagataataacaacatgaacgtcgtcaaagtgcctcgtaagttaaagagaaaagtgaggagtatcatacattactcatttgtctccggtgatttttctaatcagaatgttgttctggggtacatcgcctttatctattctattgagcccgagtacatttccaagatcataaagtacattcagtccctgcagaacaaggactataagttctttagcgatatcgtgaacgcatttaataagagtgacctggcaaagatttccaacttttgttggaatttcgatgacacctatgaatctaagatagacgtagagaaggtcctcagaaaatacaaaatttcagatcgcaaggacctggatctgttcgcggagtatctaccagatgaatactggggcttccaggaaaagtttgagaagcgatttttttacctcaagaggcataaagtccttactgaccacttagtgtctatctaccaaaacaaactgtatgacctcaacttcctaaatagagaagactctaccaacagttttcaccaggatttgttcgaattctga

SEQ ID NO: 10162 - RNA, 1245 nt, synthetic construct
  source 1..1245: mol_type = other RNA
atgagcaaggaccctacaaatattttcatccttaactcgctcaagttgcctattatagaggatctctacactctgtcgaatagtaccggcatatccttgaaaatgatctacctgctgagtaagaaccctggaaatttctacacaaaccacaaaattccgaaaagcgatggaacattccgcgatatctatagtcccaatttatctctgaagatcatccagcgatggattttggaggaaatcctgtgtaacattgaaaattcatcagaggctactgcttttaagaaagggcttaatggaccctacgagaacgccgcttatcataaagacagcctgtattttctacagatggacattaaagacttctttccatctattactcgtaagcaggtgtactatctattcaagaacctcggctataacaaatttatttccaacattctggccaatctaagtacgctgaataacaagctcccgcaggggggcgtatgtagcccatatctctccaacctgatctgctataaaatggacagaaggctgaagggactgtgctctaagagggatatcttatatacccgatacgccgatgaccttaccttttcttgcaataataaggtcgccctccggaaagttaaacaggtcgttgagaagattgtgattaacgaaggctatctcatcaaccacaagaaaactagatattcttcaccaatctctcccaagaagatcaccggtgtgacaatcacctcccaaaagaaactgaaagctgacaggcaaataaaaaagaaagtgcgggcaatgattcataaagcaatagttacaggggattaccagcataccaacaagattctgggctacatcgcctacatcaactccatagaaaaggattacaaggagaaaatcatcagctacatagagaagctcatcgacaaacagtataagcacttcgacaaggtagtgaaggcatacaattccaataaattctttcgcagcttgcctgacatgacccaagtggatattaacactcaattagccgatgagaagcttaaatgggagctgggtatcgacgtctatgactactacatcttcgaggaatacaaaaacatgttggaacagcggattgacttcatggataagaaggggatttttgatcaggagctgaagaatgagtttgagagaatcaatgatgaagtggcgagctcacttgaagacgaaataacgcccccaaaagacgatgacatccagttctga

SEQ ID NO: 10163 - RNA, 1119 nt, synthetic construct
  source 1..1119: mol_type = other RNA
atgattaagcaacaggatcagttctactcttcttttcaactgttgaagaaaaacgggagctacagaaatatatccaaacctaagttctctctgaaattaactcagcgttggatccttgaggaaattctatacaaaatcgagacaagtaacgaggccctggcgttcaaaaagaacgttaacgggcccaaggacaatgcagaacatcacaaatatagcttgtacttacttcagatcgacctggagaattttttcccgtcgattaccaaaaagcaggtgttctacatctttaagaacatcggctatgataataaggtatccaacactctttcgaatttgtgcacctataaagacgtcttaccacagggtgcagttaccagtccttatctcagcaatctcatctgctataaactggacaggaggttgaaaggactttgtggtaaaagaggcatactctatacgcggtatgccgatgatctgacattctcatgcaataataagaacgacctcaagaagattttcaaggtggtccagaagataatcaactcagagggataccagatcaatagcgataagacccgctttctgtcacctgtgtcccataagaagatcacaggaattaccgtggacagcaaaaacaagttgaaggctgataaatctctcaaaaagaaagtgcgagccatgatccacaaggctatagtatctggcgattatagccagagtaacaagatcaaaggctacatcagttacatagattccattgaaaacgggtattacaagaagattatcgagtacattcacaagctaatcaataaggaatacaagtcctttcatcaagttgtcgattgttacaattctaaccgcaacaaactgctgaaggaccttgagaaaatggagtatgaggactttattgaggaaccacccgagaatctggatgaatccgacatagaggattatatcggggaacaatttaaagactacgtggacattctcaaggaacggaaaaaattcctgaacaagcacaatttcagcgtgaaagagattaagcacgaactgtcactgctgactattggagaaaaacccctgcccaagaacacaggcaaaccagaggacctcttttga

SEQ ID NO: 10164 - RNA, 1227 nt, synthetic construct
  source 1..1227: mol_type = other RNA
atgaaaagagactttaccaacacctttatccttaatagcttagagcttccagtaattgacagtctcgatacactgtctaatcaggttgggatttcgaaaaggatgctgtatctgctgtcacaacagacaaacaaatactacaaacagttccagatccccaagaaaaacaatacatttcgtgagatctctagtccgtcctacagcttaaagctggttcaaaggtggattctagaagaggtcttctataaaatcaacgtgactgacgaggcactggcctttaaaaaaggcgttaatggaatcaaacagaatgccacgtatcacctctactctctctatatattaggcatagacatcaaggacttttttcctagtattagcagggaaaaagtgttctacctgtttaagaatctcggctataataacttcatcagcaacgtgctgagtaacttgtgcaccctagataattctctgccacagggggcggtgacttcaccctatatcagcaacatcatctgttataatctggatcgacgcattaaggggctctgcgaaaagagagatattgtgtacagccggtatgccgatgacctgaccttctcgtgtgacaataaggatacactcaagaagatgtacaaggtgcttgaaggaattattgtcgatgaaggattcgaggttaatcgctctaagacacgatttctctcacccatcagccacaagaaactcaccggaatcaccattgaccaccaaaagactaaggcagataaagaactgaagaaaaaggtccgggccatgattcataaatccatagtgaccggtgactactccaacaataacataatcttgggctatgtatcattcatcaactccattgagaatggttacaagaagaaggtcataaactacatcaacatactgatcatgaaggactacaaacactatcctgatctagtggacgcatacaataaaaacaagttgttccaggagctcaacaatatggtgcagattgacttccacacgtctttcgcttttgacattaaaacatactaccggcagtactttaagcatgggttcgacctggatgaaatggagtattacgagtatcttaacatgctggaatcccgcagagtctatttggagaagtaccatttgaaggacactgagctggagaaagagcttggcaccctgcaatccgctgctgatatcgaagaagatactgatcttttctga

SEQ ID NO: 10165 - RNA, 1152 nt, synthetic construct
  source 1..1152: mol_type = other RNA
atgataaaggagtacattaacaagacctttatcgagtctttggacttgccaatgatgaaatcattcgacgatctggtccagaatctcaggctcagcgcaaaactgatgcactggctgacttcttcttcctccggaaagtacaagacgttctacctcatcaagaaggacggctccaaaaggcgcattgatgcaccagctagaagcctgaaaattgtacaacgctggatacttgataacattctggccaaaatcaaagttagcccctattcatttgggttcaagtctggcgagaagggtagtcctctggtgaagtgcgctgagaagcacaagaacaacctgtacatcctgaaagtggacctgaagaatttttatcctagcatcaacaaggagcgagtctactacacctttctcgacctaggctataacagttccgtggcgaacttacttactgacatatgtgtgcgcgacggatatttgccccagggcgccgtaacaagcgcttatctggcgaatcttatttgtcgagatttggattaccgggttgcaggttactgtaacaagagagacatcatttacacgagatatgctgatgatctgaccttctcttgcgacaatcgcgaaactctccataagtcattattcacaatacggaggataatcgaaggagagaagttccagcttaatacaaacaagattcacttcatgacccctaaatgcaaaaaatccatcctcgggattaccctaaatgacacctccattaaagccccccgggaaatgaagcggatggttaggtcagtgatccattatcaggtggctacaggagactacaccgataatgacaaaatcagagggtacatcagttatatcaacagtatcgaagagacatacaaggatcaagtcctgagctatatccagaaacttgccgagagccagctgtgcctatttgaagaattggtcgacgccttcaacaaaaataaactctaccaggagctgccggatatgattctgcgtgatgccggggactttgtgaatgcctatgaagaagacgagtttatgactgcagtgtattacgaacatcgtgaattcctgatcaagtacggcctgctcgaggaggagacagatacttcgaatttagaggaaattcccttttga

SEQ ID NO: 10166 - RNA, 1113 nt, synthetic construct
  source 1..1113: mol_type = other RNA
atgattgacaacaagaacaagatcattttggactctctgggactgccctgtctcgtcagctttgaagatctggtgaaggcaattcgtctggactccaaactgatttattggctatcctccgaaacagagaataaatacaagactttcgagataccaaagaaaaacggaggcgtgaggataattcacgcccccgtgtactctctgaaacaggttcagaagtggatcctctgcaacattatctacaagataaaaacctccccttatagcctcggcttcaagcgctcctcaaatcttggatcaccactgtatatcagcgcgcagaatcacaagtataacctgtacgtgctcaaattggatctgaaagatttttatccgagtattaccaagaagacagtttacaatctctttctatctatcggctataactcacagatcgccttccttctgaccaatatatgtactcaccatggtgcattaccacaaggcgctgtgacatcggctcacctcgctaacctgatttgtcggaaaatggactacagattggccgggtactgtcagaagcatgacattgtctttactcgctatgctgatgatatggccttctcgtcagataatcgagacacccttaagaaagcctacaagacaatttgcaaaataatcaaggacgaaggatttatcgttaatgatcttaagaccaggttcatgactccaaaatgcagaaagcaaatcctgggcattacgatcaatgacaaccagattaaggtgagcaaggacttgaagcggaaggtcagggcaatgatacatagaagtattgccacaggggaatacaacaataacgacgtaatcaaaggttacatcagctatatcaactccatcgaacccgggtacctggagaaaaccaagaaatatatcagcgagttaatcacgaattctcctttggaactttatcccgagatcattaaccggttcaatagcaacaaaatctacagtgacttacctaatatggaactgaaagagccttcttactttgtagagagtccgtacgatactgattatatgaataacgagtacgagctccaccaggattatctggaggggataaagtgcaaatga

SEQ ID NO: 10167 - RNA, 1104 nt, synthetic construct
  source 1..1104: mol_type = other RNA
atgaagaaatacataaataagactgtgctggatagtttaaaccttcctatacttaccagctttcaggacttagtcgagcagctgcgcctcacggacaagaaagtctactgggcttcctccaatcacattatcgacaaatacaacacattctacatcaagaagagcaacggaaataagcggagaattgacgagcctaaatattcactcaagatcatacaacgatgggtgctggagaatattctgtataagatcaaggtatcaccctactcttacggattcaagtacacggaaggttcaccattggttgcatgctctaacaaacatcgcttgaaccttttcgtgctgaaaatggatctgaaggacttctacccatctatcagtaaggagaaagtgtatttccagttcctcaatatagggtataatacaaaggtcagcaacttgcttaccaacatctgcacttataacaactccctgccacagggcgcggtgacttcagcctatctagccaacatcgtttgccggaaaatggattatcgtattgccggctattgtaataagagggaaattgcttacacaaggtacgctgatgacttgatctttagcagtgacaacagggagctgttacacaacacatacggaatgattgaaaaaatcatcaccgatgaaggctttacactgaacaaggataaaacaacctttatgagccccaaaaatcataaaaaggtcctggggatcactatcaacgataatcaggtgaaggcacccaaaaagctaaagagagaggtgagagccaagatccactaccagattgcaacctgtgattactctgaacagatgaaaactaagggctacatatcctatatcaatagcattgagccgaactacaaagagaaggttaccaaatacattaccggtctgagtaagtcgccactgtgtctcttccctaatgtagtcaaggcctataacgacaataaatatttctctgagctgcctaatatgatcctcaaatcctatggggactttgtgcaaccctctctgattgaagagtttgaggagcacattaattccgaatatctcaagtacctcagcgaacattccaaatga

SEQ ID NO: 10168 - RNA, 1158 nt, synthetic construct
  source 1..1158: mol_type = other RNA
atgaacaagtattccaataagatcgtgatagagagtctggggttacccatgctaacttgcttcgatgacctggtcaaggaggtatccctttccgaaaaactggtttactggctgaccaagcgcgacgctgagggaaggtacaatcctttcttcattaagaagaaagacggcaataaacggaaaattaacagcccttcactggccctcaaaatagtgcagagatggaccctggagaatatcctctacaagatcaagacatctcagtactcatatgggtttaaaagagatattcggaaagggagcccattggtctactgcgcagagaaacacaagaataacctttacatcctgaagctggacttgaaaaacttctatcctagtatcaagcgtgagtcggtgtattacatcttcaagaatgttgggtataacgccgacatctccaacttactcaccaatatctgcgtggtgaatgatgaactcccacaaggtgcagtgacgagtccctaccttgccaatctcgtgtgcaggaagctggatttcaggattgcgggttactgcaataaacgcaatattgtctatacccggtacgcagacgacctgacttttagctgtgatgacagggagctcctgcgaaagatctacggcatgattaagaaaattgtagaagacgaaggcttttgtctaaaccaacggaaaactgtatttatgacacctaaaaaccacaaggaagtccttggagtgacaataaatgatggcctcttgaaagcccccaaagaggtgaagaaagatatacgagcaatgctccattatgaggtggcgacaggcgattatgctatgaacgatgaaatacgcggctatgttgcctatgtcgattcaatcgagaagaattacaagaacaagtgtattagctacctgaagagactttctgagtctaccctatgtttgttccccgatgtcgtgaaagcctataactctaacaagatctacaaagagttgccagacatgaaggagaagcaggttgctgatttttgtgaagaggacgaagacgagttcgctaacatgatctaccaggaacatgagcagtatctgattctgaaaggaatcttaaacaagacgaatgaagaagacattactgacctgcagaacccgttttggtga

SEQ ID NO: 10169 - RNA, 1152 nt, synthetic construct
  source 1..1152: mol_type = other RNA
atgaaaaagtacagcaataagacagtaatcgagtccctgggcctgccaatgctgacttgtttcgatgacctcgtgaaagagctgagcctctcggggaaactcgtgtattggcttaccaaacaagacgcagaaggtaggtataagacctttttcatcgagaagaaggatggtgacaaaagaaagatcaacgcgcctagcctctctcttaagatagtgcagaggtgggtcctcgagaacattctttataagataaaggctagccagtatagttacggctttacaaagggcgacagaaaaggaagtccactggtgtactgcgccgagaagcataagaacaatctgtacgtgtttaaactcgacctgaaggatttttatccctcaattaagcgggagaaggtgtactatgccttcgccaatatcgggtataacgcagacgtctccaatctcctgaccaacatctgcgttgtggatgatgaactgcctcaaggagcagtaacgtctccttacttagcgaatctcatctgtcgaaaactggacctgcgtatcgccggttactgtaataagcgcaacattgtttatacgcggtatgctgatgatttgactttctcatgcgatgatcgggaactattaagaaagatttacggcatggtgaaaaagattgtagaagacgaagggttttgtttgaatcagaaaaagaccgtcttcatgacccccaaatctcataaagtggtgctgggagttacaatcaatgacagtcttcttaaagccccgaaagaaattaagaaatcaatcagggctatgatccactacgaagtggccacaggggactacacaatgaatgataaaatccgcggctacgtcgcctatgttgactctatcgagaagaactacaagaacaaatgcataagctacctacagaagctgtcagagtccaccctgtgcctattccccgatgttgtcaaagagtacaactccaacaagatatataaggagctgcccgacatggtcgagaaacgagcaactgatttcgtggaattgaaagacgctgatgacttttatgacatgatttactacgagcacgaagagtatctgatttccaacggattgttaaatgagaaggaagacattactgatttggaagagccattctga

SEQ ID NO: 10170 - RNA, 1116 nt, synthetic construct
  source 1..1116: mol_type = other RNA
atgaaacaatactccaacaaagtgatcattgactcactccacctgcctatgctgacctgtttcgaagatatagttcgcgaggtgcgcttgtctggaaagctggtctactgggttacaaaaaaggatgctgaaggcaaatataagactttctacatcgacaagaaggatggaacaaaaagagagattaacgcacctagcctcagcgttaagatcttccagaaatggatcctggaaaacatcctgtacagaatttcggcttctcagtatagttatggatttgaacgaggaaggcggaagggctcaccacttgtgcactgcgcggagatgcacaaaaacagcctttacgtcctcaagatggatctaaagaatttttacccctccattaaacaggaaagagtatttttcgagttcaggaacaaggggtacaacgacgaagtcagttccctgttgactaatgcttgtgttcgtgacgacaagttaccacaaggtgccgtgacctccgcctatctggctaatctgatttgtcgcaagctagatgcgaggattgccgggtactgcaataagcggaatattgtatatactcggtatgccgatgatctgacatttagctgcgatgacagggacttacttaaacgaattttcgggacgatcaaaaaaatagtggagaatgagggtttccttctcaatgagaataagaccatctttatgaccccaaaaggccataagaaagtgctcggtgtcacaataaacgataatctgatcaaggcccccaaagagttgaaacgtatcatccgggcagtgctccattatgaagtctccacgggcgactatagtatgaatgacaaggtaagagggtatattgcatacatagatagcatcgagaacaactacaaaaacaagtgcatctcttacctgataaagttgtcacagagcaccctgtctttattcccggacattgtggaggcctacaacaataacaaaattttcaaggagctccctgacatggaggagaagaaccccatcgactttgtggacctggaggatgtgaacgacttttcagatatgatctactgggaacatgaagaatatctgattagtcacggcatcaataagtga

SEQ ID NO: 10171 - RNA, 1113 nt, synthetic construct
  source 1..1113: mol_type = other RNA
atgaagaagtacaacaataagatggtaatcgaatccctgggcctacccatgtttgaggacatcgagacgctggcagaagaaacgcggcttaccgagaaacttgtcttctttatcactaaagaggatgccaaaggccgctacaagaaattttatatccccaagaaggatggtacctccagagagattaactcaccatgtatgagcctcaaggtgattcagaggtgggtgttggagaatatcctttataaagtgagggtttcacagtattcaatcgggtttgtgaaaaacggaaaaggaagtcccctggtccagtgcgccgaaaggcacaaaaataacctgtacattctgaagatggacttgaagaatttcttcccttctgttgagagagggcgggtatataaccagttcctccaactcggctataacacatatgcttctaatctgctcaccaacatctgtacactcaatggatccctgccgcagggtgccgttacttcgccttacttggcaaatttagtctgctacaagatggatattcgaatagccggctattgcaataagcgggatattacatacactcgctacgcggatgacctcattttctcttctgacaatcgtgatctgctgagaaagatatacgggatgattaaaaagatcgttgaagacgaaggcttcgtcgtaaacgaggagaagaccagatttttaagccctaaagtgcacaaagaggttattggcgtgacagtgaacgacggagtgattaaggctccaaaagaaatgaagcgcatggtcagagcaatgatccattacgagattgtgaccggagactatagcgacaacgagaaaatccgtggttacattgcttacatagacagcctagaaaggaattacaggaacaagatcatcaagtatatcgagaagtacttggatgacactatcaccctgtttcccgagcttgtggagaaattcaatcaaaacaagctgtacaaccagattccagacatgaaacagcacgacatctcccgatttgtgaatttcgaagatgaagccgattattacagtatggtggtcaacgagcgggaagattatctgagtcgccatgggatagctatatga

SEQ ID NO: 10172 - RNA, 1065 nt, synthetic construct
  source 1..1065: mol_type = other RNA
atgtttgaggacatcgaaaccttagccgaggaaacacggttgactgaaaagctaatatacttcctgtgcaaagaagatgcagagggaagatatgtcagctttaagatacccaaaaaagatggcagatacagggatattaacgcaccttgtatggctctcaagaccctgcagaaatgggtactgcagaacatcctgtacaaagtgagagtgagtccatattccattggcttcaaaaaagatgggaagggttcccctctactgcagagtgccgaaagacataagaacaacctgtacatcttgaaaatggacctcaaagatttctttcccagcgtcaagagggagcaggtgttcaatcaatttcttcaactcgggtacaatacgtatgcttccaatatgcttaccaatatttgtaccctcaacggatgcctgccgcagggtgctgtcacatcaccttacttggccaatctcgtttgctataagatggatgtacggatcgctgggtattgtaacaagagggacatcatatatacccgctatgcagacgatcttattttctcttgcgataatcgggacgggctgcggaatatctacggtatgatcaagaagatcgttgagaacgagggattctgtttaaacgagaagaagacgcgatttctgactcccaaatcacacaaaaaaattgtcggcgtaactgtcaatgatggccttgtgaaagcgcctaaagagatgaagaaaatggtgcgcgccatgctccactattcgattgtttctggagattactccaataatgacaggatacgaggctatgtgtcttacattgacagcattgagaagaattaccgtaagaagattgtgaagtacatcactaactacatcaacgactcaatcacattgttcccagatgccgtgaagaagttcaacgacaacaagctgtttaacgagatcccagatatggtgcccaaaaagataagcgacttcgtggactacgaggaggaagacgactattttcagatgatcacatatgaacgcgaagaatttctgaccaagcatggcattgaggtttga

SEQ ID NO: 10173 - RNA, 927 nt, synthetic construct
  source 1..927: mol_type = other RNA
atgcaaaacatcttatacaaggttagagtctctcagtactctatcggctttattaaaaacgggaagggcagtccactggtgctctgtgctgaacgtcataaaaacaacctgtacatcctcaagatggacctaaaggatttttacccttccatctgtcgcgccaaagtatacaatcaattcctgcagcttggttacaatacttatgccgcgaatctgatcacgaacatttgcattctagacggaaagtttagccagggcgcagtcacgtccccctatctggcttcactcgtttgctacaaaatggacaccaactggcaagatatcgtaataaaacgcgacatcgtgtatactcggtatgccgatgatttgacctttagctgcgacaaccgggacgaactgcacaagatctacgggatgattaaaaagattgtggaggacgaggggttcacccttaaccagaagaaaacacagttcctcacacccaaaggtcataaaaaagtggttggcgtgacaattaatgacgggatgctgaaagcaagcaaagatttgaagagatccgtgagggcgatgatccactatcaaattatcaccggagattatacaaagaatgaacagataaggggctacattgcttatatagactcaatcgagaagaactacaagaagaagatcattaagtacgtcactggatactgtcaggacaccataactttgttctctgatgctgtgaaggccttcaatgccaataaactgtttaaggagatcccggatatggtgcagaaggacatttcatcctttgcaaaatgggaggaagatcagagcgattatatggagatggtcatgtatgagcgagaaagttatcttgccaagcacggactgatcgaatcggatatagaggacgaaagtaatttagagatgttcgagtga

SEQ ID NO: 10174 - RNA, 1110 nt, synthetic construct
  source 1..1110: mol_type = other RNA
atgaaaaagtacaccaaccagaaccttattacctctttgaatctgccattcgtgactgatatacacagcctttccatgcaattaagactcagcgagaaattggtttactttctgacaaatgagcgcacctacaagaagtatcggatctttagaatcccgaaaaaggatgggactttcagaaccattagtgcacccatcgcctccctgaagattgtgcagcggtgggtcctcgaaaacattctctacaagattaaagtctcagactatagctacggattttcaaggaatcgtaaggggtccccactcgcagcctgtgccgagaaacatcggaataacctgttcatgctgaagatggacctcaaaaatttctaccctagtatacagcgcgaccaggtcttttttcaattcctgaacatcggctacaatacctatgcggccaatttgcttactaatatttgctacaaccaggatggcctaccccagggtgcagtgacctccccttacctggcaaatatgatctgttacaagatggatgttcggatcgctagttattgcaataaaagggacattacgtatacgcgctatgctgacgatctggcgttttcctctgacaaccgagatagcctgaggaacatctatggcatgataaagaagatagtcgaggatgaaggcttctctgttaatgacgaaaaaacatgtttcatgacaccaaagaaccacaaagtactcttaggagtaactattaacgatgccaacattaaagctcccaggcagatgaagaaaatggtgcgaagcatgatccacagagccgtcatcaccggtgactattcactgaaaaatgtgatctgcggctacgtgtcgtatattgactctattgagaagggatataaggacaagatcaagaagtacatccataaatactacgaagaccctataacactgttcaaagacgctgtggatgcctataataagaacaagttttacgaggacatgcccgatatgaagaaccgtaacatcgacttctttttggatggggatgaatgggatgaggacgaagtgcttacagctttttatgaggagcgcgaagccttcctaatcactcataaatga

SEQ ID NO: 10175 - RNA, 1014 nt, synthetic construct
  source 1..1014: mol_type = other RNA
atgattgacaagaccaataagctgattctggactccattggtatcccttatttttgggacatcaactcatttgcgcagaaggtgagatataccaataaactcttattcttcctcagcaattacaaagccgtcgagagatacaacattttctacctcactaagaagaatggcaaaatgcgaaaaatcatggcccccagctttagtctgttgatgctccagcgctggatccttcacaatacactgtataagatacgagtgtctgagtacagctatgggtttgtaaaatctaactccgactctgaatccccattagtcgaggttgccggcgcccataaaaatcacaagtacatcctgaagatcgatataaaggatttttacccgagcatttcaagggctcgggtgttctttttgttcaagaacctggggtacaacttctgctgcgcaaacatgctggccaacatctgcactaacaataacgaactgccccagggggctgctacaagtgcccgtctggcaaatattctatgtacaagattggatgctcgtatttcgggctattgtaataagagggatataacatacaccagatatgcagacgatctgatttttagctgtgataataggaacgtgctacatcacatatacaagatgataaacaccatcattcaggatgagggtttcgagattaatcaatccaaaactcggttcctgagcccaaagaatcacaaagtggtacttggagtgacgattaatgacggctactgcaaagcagaccggaaactcaagcgcaaagttcgcgcaatgatccattcttcaatcgtcaatggcaattattccgaacgggccatcatccaaggatacattgcctatttctcatctatagagaaagactataccgaaaagatcaagaggtacatcaacaagttttatggaactcttcctaaagataaggctatcgcgtacaacaacaacaagttccttaacaaaatgcccgacatgagtacgcagagttga

SEQ ID NO: 10176 - RNA, 1128 nt, synthetic construct
  source 1..1128: mol_type = other RNA
atgtttatgatcaaccaaaccaatatctctctactcaagttgcgtagtttgcctatctttaatgacctgagctctatgtcaagagtcaccggcttttctgaacaactgctgtactactatgctatttcagacgatgcgaaaaaatataccattttcgagatcccgaaaaaagattcatgtaatacccgcaagatatacgccccaaactatgcccttaaaattctgcaacgatggatcctggaaaacatcttatacaaaatcgagtgctccgagtacgcattcgctttcaagagagatatggggtcccccctgaagaagaacgcactagtgcataaggaacatgtattcttattggagatggacctcgaaaacttcttccacagcatcaagaggcagagaattgtctacctgttttccaatcttggctataacgtccctatctcgaactggcttgctaatatttgtacttatgaggacattctgccccagggtagtgtgacggccccctacttgtccaacctggtatgcctgcagctggacaaaagaatagcgaagtactgttcgaagcgagatattgtctatagtcgctatgccgacgacatcacattttcttgtagcaataaagctgtgatcaaaagcatctacggaacaataaagaagattatagagagcgaacacttcactattaaccagaagaagaccaggtttattgggaaaagctctaggaaatccgtgactggcgtgatcatcgataacgactgcattaaagcaccaaaagagtacaaacggctcgttaggtgcctcatccatcgggccataatctcaggcgactattccaatattaatcggatccgtggttacatagcctatatctctagtatcgaggatgattacatgcagaaggttgtgaagtatattaacactttcaagaccaagcgggatgttatatttctcgatagcacagtggagatgtttaacgcaaatatttttctcccaggagtcgaccagatctcccagattcgcatgacaatggaggaagaagataatttcggggactacgtgacggagaggctggagttccttaagaaacgccacatgaaggtgcctcccgaactgggaaagttatga

SEQ ID NO: 10177 - RNA, 1029 nt, synthetic construct
  source 1..1029: mol_type = other RNA
atgaatattggaaacaatgtggtcctaaacactcttggcgtgcccgttattaactctttcgagcatctttgtgagcaactgtcgatcactgagcagctcttatactatctaacttatcggaaggaacattgctactacgaaaccgaaatccctaaaaagaatggaaaaacaaggatcctgcatgtgccaaacttgtctctgaaagttgtgcagaaatggatcctgaccgaaatcctggagaagattttcgtgagcgagcagactatggcttttgtgccccacaagaacggcttgagagaaaacgcagagagacacaagaaaaacatattcttactcgagatggacattacgaacttttttggtacaataaccgaagaacaggtctactccctgttctgcaacattggctacggatcaaaagtcgcagggatactggctaatctttgtacctacgataattacctgccgcagggagccgtgacctccccatacatcgcaaatttggtgtgctatcacatggattctaggataaatggctactgttcacggaaggatatcgtttatacaagatacgctgatgatctcaccttcagttctaataatcggatgctgctcaacaaagtcgagcgctttattaaatatatcgttgtagacgagggctttacgattaacgaaaaaaagacccgctatttttccaacgatgtgaagaaaacagtaactgggatcacaattaacgatgacgacattcacgtcgacaagaattttaagcgtaacttgcgcgcccagatctacaatagtatcaagacaaggagctatgataataattcccagatccttggtaagatcgcctatgtaaattcaatagaggacgggttccgagacaagatggagaagtatatcagcagcataattatccgaagtgaattcgtgcaagacctggatattgtgaacgcctttaacgcgaataagctgttcgccaaactccccgacatggtcttcatgaatgaggacaaaaaccctttcatttga

SEQ ID NO: 10178 - RNA, 1029 nt, synthetic construct
  source 1..1029: mol_type = other RNA
atgaacatcggaaatagcgtggttctgaacaccctgggggtgccagtcatcaattcatttgagcatctttgtgaacaacttagtgtaacagagcagctcctgtatttcctgacttacaagaagaagtactgctactttgaaaagaagatcccaaaaaaagacaagaccgagcgtacacttaatgtcccgtccttgagcctgaaagtggtgcagcgctggattctgaaggaaatcctcgagaagatatatgtgtccgagcaagctatggccttcatacctcataagaatggccttcgagaaaacgccgaacggcacaaaaaaaacattttcctcctggagatggatattacgaacttttttggaactatcactgaacaacaggtttaccgcctattttgcaacattggctataactccaaggtcgccggagttttggccaatctgtgtacgtatgatggttacctccctcagggggcagtgacctctccttatatagcgaacttagtctgctaccatatggacgctaggattaatgggtattgtagccggaaggatattgtgtacaccagatacgcagacgatctaaccttttctagcaataacagaaccctgttgaacaaggtggaaaaattcatcaagtacattgtagctgacgaaggctttaagatcaacgacaaaaagactaggtatctgtctaatgatgttaagaaaaccgtcacagggataacagtgaatgacgattcaattcacgtggacaaaaagttcaagaaagatttacgggcccagatctacagatcgattaaactgaaagactaccagaacaactcacagatcttgggtaagatagcttatgtgaattccatcgaggagggctatagggacaaaatcttcaaatacatcacagacgtgattactaaacccgagtttacaggccacatcgatatcgtcaacgcattcaatgataataagttctttcccgatctccccgacatgatgttcaaggaggtatgggagagtccattcgactga

SEQ ID NO: 10179 - RNA, 1029 nt, synthetic construct
  source 1..1029: mol_type = other RNA
atgaacatagggaattccgttgtgctgaataccttgggggttccagtgataaattcattcgagcacttatgtgagcagctgagtgtcacagaacagttgctttacttccttacctacaaaaagaagtactgttactttgagaagaagattcccaagaaggataagactgaaagaacactgaacgtgccatccctgtcactgaaagtcgttcaacgatggattctcaaagagattctggagaagatctacgtttccaaacaagcaatggcctttatcccgcataagaatggactacgggaaaacgctgaaagacataagaagaacatcttcctgctggagatggatatcacgaacttctttggcaccatcaccgaacagcaggtataccgcctcttttgcaacattggatataactctaaagtggcaggaattctcgccaatttgtgtacatatgatgggtatctgcctcagggcgcagtgacatccccttacatcgccaacctcatttgctatcacatggatgctaggataaatgggtactgcagtcggaaagatatagtctatacgcgctatgccgacgatctgacttttagtagctctaacagaactcttctcaacaaagtggaaaagttcatcaagtacatcgtgactgatgaaggcttcactatcaatgacaaaaagacccgttatctttctaatgacgtcaaaaagacagtgacaggtattaccataaatgacgactcaattcatgtcgacaaaaagtttaagcgggatttaagggctcagatttatcgatcgattaagttgaaggactatcagaataacagccaaatcctgggtaaaatcgcctacgtaaacagcattgaagagggctacagggacaagattttcaaatacatcaccgatgtgatcactaaaccagagttcaccggccacatcgacatcgtgaatgcgttcaatgacaacaaatttttccctaacctacccgacatgatgtttaaagaggtatgggagagcccctttgattga

SEQ ID NO: 10180 - RNA, 1020 nt, synthetic construct
  source 1..1020: mol_type = other RNA
atgaacttatccaataacgtgattctgaataccctcaatgtgccaatcatcaacggctttacacacctggcagagcagttatcactgacgcaagggctgctctacttcctcacgtacaaaaaagattattgctacacccttaaggaaattccgaaaaaagacgggactttcagaaagatatgcgtacccaatttaagtttgaaagttgtgcagaaatggatcctcgttgagattctcgaaaaaatcgacgtctccccacaggccatggccttcgtccccaagaacaacggactgaaaagtaatgccgaatatcacaagaagaatatcttcttgctagagatggacatcaagaacttttttggcaccatcaaagagggtcaagtattcaagctgttttgtaacatcggatataacactaaagtgtccactattttgacaagcctgtgcacttttgatggggagcttcctcagggggctgtgacaagtccctatctagcaaacctgattctgtatcatttggatatacgtctgaacggactctgttctaggaaagacatcgtttacaccagatacgcggatgatctctcgttcagctccaatgaccgcgccaaactgaatggtatcgagaacttcgtgaagaatatagttagcgatgaaggatttgagattaacgagaagaaaacccgctatctttcaaatgacgtcaagaagagcatcaccggcataaccatcaacaacgaagaaattcatgtcgacaagaagctgaagcgggacattcgagcacttattttctctagcattgcctctaagaactatgctttgaacgacaaaatacggggttccattgcttacgtgaattctatagagcctggctaccaggagaagatgatcaattacatcgagaggatcatcaataaagatgagctgaagaacgaccttggcgtggtgaagacattcaatgaaaataagctgtacaaggtcctgcctgatatgaagtacgaagaatcaccctttatttga

SEQ ID NO: 10181 - RNA, 1020 nt, synthetic construct
  source 1..1020: mol_type = other RNA
atgaacatgtctaacaacgttattctcaacaccctaaatgtgcccataatcaatgatttcaagcacctcgcggagcagttatcactgactcaagaactgctccatttccttacctataagaagcagtattgctacacccagaaggaaattccgaagaaagacggcacttcccggaccctttatgtgccacatttggctcttaaggtagtacaacgttggatactgaaggagattcttgagaagattaatgtgtcttaccaggctatggcattcgtccccaaaagaaatggattgagggtcaacgccgagtaccataagaagaacatcttcatcctggagatggacatcaagaagttttttgggagcattcaaaagaaacaggtattccagctgttttgtaagattggctataatactgacgtgtcagctgtgctggcaaatctctgcatctatgaggatgtcttgcctcagggagccgtcacgagcccttatattgccaatctggtgacataccacctcgacgttagattgaacggtctatgttctcggaaagatatcgtgtacacacgctacgccgacgatctgagcttttcctccaataatcgaacaaaactgaactccatcgagaaaatagttaagtatatcgtgaaggaggaagggtttgagattaacgagaaaaagactaggtacttaagtaacgacgtcaaaaagaccataacaggaataaccatcaataacgaagaagtgcacgtcgataaagctctcaaaaaaaagattcgcgccatgatctttaatagtatcgtgaacaaagactacacacggaatgataaaatcaaaggtagcattgcatacgtggatagtatcgaaatgggctataaggagaagatcctgaactacattattcagatcacggaaaaagggcagttcaaaaacaatatagacatcgttaacgcctacaacaagaataaattcttcaagtcactgccctatatgcaatacgaagagtcgccattttattga

SEQ ID NO: 10182 - RNA, 1005 nt, synthetic construct
  source 1..1005: mol_type = other RNA
atgaatacaaattcaaacctcattctcaacacactgggtgtgcccatcatctacgacctggaaagtctctcagagaggctgtcaataaccaagaccttcctgtatatgctatccaggaagcagcacctcttctacgaaaccgcagaaatacctaaaaaagatgggagcacacggaaaatccacgctcccgtgctctcccttaaggtcgttcagaagtggatccttgttgaaattctagagaaagtccgagtttcgccatacgcaatggcctttgtgcccgggaagaatggcttgaaagagaacgccatgctgcataaggaccggttattcattttagagatggatatccatgacttcttcggatccattactcagaaggacgtgtttcagcttttcaccaagatcggctataattacaccatcagcgcaattctggcaaacctgtgtacttatgaagaagtcttaccacagggcgccgtcacttctccgtatattgctaatctcatatgctacaacttggatatgcgcttgagcgcgctgtgcaataaacgagacattgtatacacgcggtatgctgatgaccttagcttctccagtgataatcgcactcggttgaatcgtatcgagaggctgttgagagagatagtgcaagatgagggttttgagattaacgatcgtaagacacggtatttttcaaatgacaggaagaagaccgtgacgggcatcacaataaacgaccgcgagattcacgccgatagaaaacttaaacaacgcatccgatctaaaatctttcatgctgtctccgaggccgactacagtgaggccgctcagattagaggactgatcgccttcgtagattctatcgaagacggatacagagatcagatggcgtgttatctggaggggctggccctgaaggaaagcctaaggagatctgcaaaggtggtgaaagcttacaacaacaacaagctgtttcaagacctcgaagacatgatgcctctgtga

SEQ ID NO: 10183 - RNA, 915 nt, synthetic construct
  source 1..915: mol_type = other RNA
atgaaaaacattaaagatttcgcgaaagagctgtctctcgacgtcaagactattgaaaaacttacgagggacaatttcaactattatcacttcaccattccaaaaggcaatggagaaaagcgtctaattacagctcccaagggtaaactcaaagtgatccagaaatggatcctcgtgaattgtctagaaaaatttgcagtcgctgaatgcgctaccgccttcattaagggaaagcatggtatacgggtgaatgcagagtcccaccaatacaacaaatacattctggagtttgacttaaaggacttctttccgaacattagtttttgggacgttcagaacctgtttctcaggatgaatctgtctcagaagctgtccatcttgtttgccaagctatgcacatatgatgggtatcttcctcagggagcaataaccagcccctatatctctaatctgatctgttacgacctcgatctgaaattacttgagctctgtgattactacgacatcacatataccagatacgccgacgatcttacctttagctccgatgaactgtacctgttgctctcattaatgcaggagatcagctcaattatccattactatgggttcaaggtaaactacaataagacaaaagtgctgcttcctagcaataagcaaactatcactgggatcaccgtcaacaacggcgagataaaagtggacaagaagctgaagagaatggttcgcgccaagctctactatggcattaagaacaatgacataaaggacttcgatattttgctgggcttcatttcgtatatctgctcaatcgagatcgattacaaatccaagatgatcagttacgtgcagtatctgttgaataaattcggccgacacgataactgggggctgctgaagatattgaacaagtga

SEQ ID NO: 10184 - RNA, 915 nt, synthetic construct
  source 1..915: mol_type = other RNA
atgaaaaatataaaggacttcgccaaagagctgtccctggatgtgaagactattgaaaagcttaccagggacaattttaattactaccacttcacgattcccaaacgcaacggcgagaaacggctgattacagcgccaaagggtaagttgaaggttatacaaaagtggattctggtgaactacctcgaaaggtatgctatcgctgaatgtgctaccgccttcatcaaaggggagcatggtatcagagtaaacgcagaggcccatctgaacaataaatatatcctagagttcgacctcaaggactttttcccaaacatcaagttttgggcagtccgagatttatttctgcgcatgaatttgactcgtaaaatcagtctgctgttcgccaagctctgcacatacaataaaagattgccccagggcgctattacctcaccttacattagtaacctgatctgctacgatctggatttagaattgcttgagctttgtaacaactatgacattacttacacgaggtacgcagacgacctgactttttctagcaattccctctatctcctgttttcgctgatgaaagagatctctgatatcatacggagccacggattcaagatcaactacgagaagacaaaaatcctttatccttccgccaaacagaccataaccggcattacaataaacaatggaacaattaaggccgacaagaagctcaaacgaatgatcagaactaagttgtactacggggtcaagaataataacatcaccgagctcaccaaactcattggatatatcgcgtatgtgaacagcattgaatcagactataaattacggctgtacgattatttctcttccctacttcagaagtttagcaaggaagatagctgggggctactgaaaatcctgaataagtga

SEQ ID NO: 10185 - RNA, 1002 nt, synthetic construct
  source 1..1002: mol_type = other RNA
atggtgaatttcttttataacagtgacaagctgcaggagtacctccaattgccccaaatctatacgctggacgatcttgcgtactttctattatttacgaaggaacagctgcacgatttcagctatcgaaaaaacgaacattacgtgacattcctgatcccaaagaaaaatagcaccgaaaaacgggtgataaatgcccctaagaaacgtttaaagatggcccaaaagctaatcctcaaagagatattggagaaagtaccctgttcttctgcttctgctgcctttattaaaaaggaaaatgggctgctcaagaatgcactgactcacaaagagaatctgttccttctgaaaatggacttcaagaacttctttcagaacatcaatgaagccaaaataatccagatctttgagaaccttggatattccccctacattgcacttcaactggctaaactgtgcacctttagcaagaaactccctcaggggggcatttgcagcccatatttgtcgaatctcgcgtgctacgagtttgacaaagatatctcatcctattgtgacgaaaagaatattgcctacactagatatgctgacgatttgctatttagtgccaacgatattgatctcctgaagaatcttaagaacgacatttactcatacaccaagaagcattccgttgcaggtctgaacattcagataaatcacaagaagaccaaactgatcaagaatactagtcacaagaaggtgacaggcatcaccattaacgaccagaagatcaaagcctccaagaaactgaaaaatacaatccgccagaacatacggtataacttgattcataaccagttcgacaataagctgatcggaaagatcgcattcgtcatctcaattgaggataaggagtacaaaaacaggatcttcaaatactgtaagaggattgagaacaagttcaaactcaacaaaaaggaaaaccagctcctgaaagtcttatacaagatgacaaagtga

SEQ ID NO: 10186 - RNA, 981 nt, synthetic construct
  source 1..981: mol_type = other RNA
atgaacaagattgaacttctcaagctgcctaagatcgagaacctgaaggatcttaatcatctgctgctttttacagagaaacagctaaacgactttgtgcggctcaagtccgagcagtacgtgagtttcaaaataccgaagaagaactcaatagaaaagcgcatcatcaacgcacccaaaaagtacctaaaactggcgcaaaagattatcttgaatgagatcctcgaaaaagtcccctgcagcaatgctgccaccgccttcatcaaaaacaagaatgggctctttgaaaatgccaatatgcacaaggataatctgtatctcttgaagttcgacttctgcaacttttttcaaagcattaagttcgagcggatccgtctcttgtttattgagttgggctataacccaaagatttccaagattctggcagagctgtgcacatattgtaaagaacttccacagggtgggatctgctctccttgtttatctaacctaatatgtctggagttagataatgacttgttagaatactgcgaaggaaatgatatcaaatacactaggtatgccgatgatctgtttttctcatcgaacaataaagaagtgctgctgaaactgaaggaagacattgagacgctgattctgaaacatcgaaccgagttctttgacataaagattaacaggcagaagactaaattcatcacagagccctggcataaaaaggtgacaggcatcaccataaacaacaacaagatcaagaccagcaaaactctgaaaagagatattcgcagagagctctatttcacgatcatcaaaaacaaaaccgactacaataagctgataggacagatcgctttcgttatatctatcgagaaagactacgccgaaaagattaaaaaatacgctctctccatctgtgagaagaataatatccacgagcacaagattattcagattcttgacaaaatggtcaagagtcaggtatga

SEQ ID NO: 10187 - RNA, 1014 nt, synthetic construct
  source 1..1014: mol_type = other RNA
atgaataacgtgaactctcgacctttccttctgggtattaacgggttgccagtcatgaccaatatctcagatatctcgcgtcagattggcatctccagcaggcggatatacgaatataccaactataccagcagtttttaccacacattcgaaattcccaagacagacaaatctattcgcatcattaatgccccctttagtgggcttaaaatggttcagaggtggattctggaaacgatactgtataagattaaggtggacacaccttcatacggatttcttaaaggtaaaaagtcaccgactaagcagaatgcggagatccatagcaataacttatacctcttccagaccgacatcatcaatttcttcacaaacgtggatttcaagcgagtctatagcatttttctcaaaattggctacaacaaggaagtgtctctcactttggccagactatgctgcctggatggttatcttcctcagggcggggtaacctccccatacctgtcccatctcgtttgtttccgcatggaccgtcggattatgggcctgtgccagaaaagggagatcgtctactcacggtatgcagacgacatcacgttgtccagcgacaataagaatgatctgaaaaaagctagagtgtacctagagcaaataatatcagatgagggattcgaaatcaacccacgcaagaccaggtactcctttcagaaaaagctggtcactggactgacaattcacaataacaaagttctcgtgcccagaatattgaagcgcgaactcagatccaagatctataacaccattgtgtttaacgactattctagttgtgaggtcatcctgggctacgtaagctatatcaacagcatcgaaaatgggtacatcaacaaggtgaaagattatatcgagactctgctgaataataagtctatagagcccgagaggttatctattatccggctcaactacaagaaatcccctctgggaagttggatggagaatgtgcacactcaatga

SEQ ID NO: 10188 - RNA, 906 nt, synthetic construct
  source 1..906: mol_type = other RNA
atgaatcggttagacaaactcatattggaaattggtctgtctagaaacgtgatcgaaaactacattacattcgctgacaagcactataagtcccattacttgccgaagaaggggggcggaaagaggaccatagattgcccaggtaagaatctcaagaccatccagcgatggatccttaaagagttccttaacaaactagaggttaacaaacgagcaaatgggttcgtcaagaataggggaataaaacgtaatgcgttgtaccacctcaaaaagaagcacattctcaccgtggatattaaggacttcttctactctatcagccaaagacaggtgtttgagacactgaacgccaattataacgatagggactttgcactgaagatcgcaaaaatttgtacctaccagcggtatctgccccaaggcgctcctactagccctgctctttcgaacctggtgtttaaacccattgacgatgagattatgaagtactgcaattcagaactgatccactatagtaggtacgccgacgatctgacgttttcaagtgataataaacagagcctgcagtacgcttacagatttatcaacgacctgctctataagaatggcttcaacctgaactcaaaaaagactcgctatctgagcggcaaagggaatatgtccgtcacaggcgttaatataaacacaggaaagcccaaggccgatccaaaacttaaaaaacaagtacgggccgaattacaccattacatcattaaggagaaggagattaacctaaacaaactcgccggaaaaatctccttcatccgcagtatagaggaagactattctcagaatttggacttctacatcaagcgcctgtataaaaaaaaggcctttatccagaagatggcgtccaagactcattga

SEQ ID NO: 10189 - RNA, 903 nt, synthetic construct
  source 1..903: mol_type = other RNA
atgaagaagtttgaaaatttcattctggagatcggccttaccaagagcgctatcgaaaactatgtgactttcagtgatgcgagctacaacactttctacataccgaaaaaaaagaagggcgaaaaacgtgtgatcgactgcccaaacgccaacctaaaagccattcagagatttttcctgaagaagtacctgaacaaggtggaagtcaacaagcgagtgaatggttttgtacctaaaaggggtatcaaaagaaatgccctgttccatatgaaaaacaagtatctgctcacaatagacatcaaagatttttttcccagcataagccagaaaaaggtttttgaggtgctttacgagatctattatgataaggactttgctctgaaaatggccaaactgtgtacgtacaagaggtccttgcctcaaggagcaccaacttcccccgccctctctaatctcgtcttcaagggaattgatgacgagatcatgaaatactgcaattctgagatggttaactactctcggtacgcagatgacttaacattcagttcagacaacaaaaactccctacagtatgtttataagttcgtatcacacctgttgtacaccaacggcttcaacattaataaaaagaagacccgctatctttcaggcaaagggaagatgtcaattacaggagtgtacattaatagtgggaaacccaaggtgtccagcgagctgaagaagcaactccgggctgaattacaccagtacattatcaatggcaaggagatcaatttgaatcaggtcagtgggtatattagctttatctcgtctatagaggatgactacttgaaaaaagtggagtcctatatcgaaaagctcaaaaagaagaagaccctgatgcttacactgaaagcagaatga

SEQ ID NO: 10190 - RNA, 1038 nt, synthetic construct
  source 1..1038: mol_type = other RNA
atgaatagtttccgtgacacatatttgtataactacaaggacaccttagatgagatcatttcaaaaatcaaggacttcttactgacagaaacatacaagaagattttcaaggatgaagacaaactccagtatataaaccacttcaccttccttgatatactgagcaacacgaaaaagttctataccaaacggatcatctataccaacaaaaaggaacggattgtgtttgagccctctgtggagctgtacctgatccagaagttcattttgtacaactacttgatacagagagacagctccttaagtgaaaatcttacttcctatcggaagaattactctgttaaaaacaacgccatcaagcacataaataagaggaccatcattaagattgacatcaagaacttcttcccgactatcaatagatatcggatctacaaatgcctgttgaatctaaacatcgaggaaaagaaagcatatctgtttagcagactgctttcttatcaggacaagctcattctcggaacccctagctctccatttctgagtaatctggtttcccgcaaactggatctacgaattgaagggtacattaaagcttaccaaaaatcaaaggtgcatatctcttatactcgctactccgacgatatgacattttcctttaaccagaggatcaatacccagaagtttatctcgtttatttaccagatcatcctcgatgagggctttgtccccaattacgagaaaacccagataatttccagcaatcacaaacaaaaggtaactggcatcattgtcaacagggacacgatatcagtgagtaaaaaagagagggatgacgtggagttcatcatcaaactctggcttaattatagcaaggacatagccctccagaaatacaacaagatcttcaagaagaactacacaaatgaacgcgatttccatcaaattctgaaatcgaagatactgtacatcaagtttatcaacgatgaacaagggaaaaagctgattcgaaaatttgaggagattaagattggttga

SEQ ID NO: 10191 - RNA, 969 nt, synthetic construct
  source 1..969: mol_type = other RNA
atgcatcggctgaagtacaattacggctcagaaaacaatagcctcgacttgttaaacctcttcggcttcaccaataatgaacttcgttttttcagtatgtccaagaaacgccggtataaaaaaatcataatccccaagcgggacggttcaaatagaatcctgcatgcaccagtttataaactgaaaaacgctcagaggatcattctcaagaacattctgtacaagaagcacaatgatctgctgatagacaatatcactgggttcatccccaataaaaacattaagaacaacgccaacttccatgttgggaagaagtacatactaaaggtcgacattaaggacttttttccaagcatcactcaagatcgagtctatggtcttttgaggaaagagtacaatttagatcactctaccagcatgtatctcagtagcctgtgcacatataacaatcagctgccccagggagcgcctacatctcctatgctggccaatctcatcgccagatttttggattaccgaatcattggcctgcttaaatcttataatctgaatgaggggcttgagttaagttactcacgctatgctgatgatctcacgttttcctttaataagaggatcgacataaacctgttcattaactacgtgatctccatactaattgaggaaggcttttacccgaattacaagaaaattcacatgatctctagcggaaaacagcagaaggtgaccggcttggtggtgaacgataaagtctcagtgggacgcagatactacaagaagtttaagtcgatcttctacaatatctccaaaaacggtttcgatgacgaactgaaaaagtggaacaacattaactccaaaaagattgagtcggtggaaaagtttaaacaagtaatcggagggtatataagcttcattaaggacattagtcctgactattatgagaaactcaagcagttcaacgtactgtga

SEQ ID NO: 10192 - RNA, 966 nt, synthetic construct
  source 1..966: mol_type = other RNA
atggcccagaggaaaaaaatcccacagatccctgcagaacagagccacctgtacggcattaagtctccccacgctttggctaacaggctggggtgggagctggataagcttcgggatttggccaaatcaggtggctatcgtatttataatcaccgaaagacaggtcgcgagatccaagagccaggtgccgcgttgcagtcactgcataagcaaatccataagtacctggccaggatccaggcacctgactacttacactccgccgtgaaagggaaaagctatctgagcaacgcacaggctcacgtaggcgacatcccgctcatcaagatcgacattgccaaattttatcagtctgtcccgcagcacaaggtgatgcatttctttcgggatgttatgaactgcgctaccgacgtcgcagggcttctggcaaacctcatttgctttagaggagccctccccacaggaagtagcgtctctcctataatctccttctacacgtacaaattcctttttgatgatctagctgacttggcggctggccacggactcactatgacttgttacgtggatgacattaccatgtctggccctatggcctcgagggaagtgctacacgaggcccgaacaatgatattccgggctggccttcgggcgcataaagacagaagtttcagtcctgatggaccaaaaatcgttaccggagttgcggtgagcaagcatgggattggcctgccctttgggcgctggcagaagataaggaatcagatacgggaactcgagcgctgtgacgacgacaatcaaaagctggcaatctatcagcagctgatttcacgcctctacgaggcaacccaaattgatccacgatgcagaatttccgccgagtatcaccatgcccgtttcagagaactgaagagagtattagctcaagctgcatccgaacccgtgcccttgaagctggccgcctga

SEQ ID NO: 10193 - RNA, 966 nt, synthetic construct
  source 1..966: mol_type = other RNA
atgacccagaggaagcgaaatcagcctatccctatagagcaatcacatctgtacggaattaaatcaccacacgcccttgccaatagacttggctgggagctggataaactgcgcgacctgacaaagtcaggagattacagggtttacaaccacaagaagactggcagggagatacaggagcccggtgctgccctgcaatctttacatcgccagatccataaataccttagccgcattgaaacaccggattatttgcactcaaccgttaaaggcaagtcctatattagcaacgcacaggctcatattggggaggtgagtctcatcaagatcgacatagccaagttctaccaatccgtgagtcagcacaaggtaatgcacttctttagagatgtaatgaactgtgccccagacgtcgcgggtttcttggcaaatctgatctgttttcgcggagccttgcccaccgggtctagtgtgagccctatcatcagcttctatacctataaactcctattcgacgacctagcagtgctggctgactcccacggcctgacgatgacatgctatattgatgatatcacgatgagcggcaaactggcaagtagaaagatcctgcatgaggcccggcggacaatattcagagccggattacgtgcacacaaggacagatcgttttccccaaacgggcccaagatcgtcaccggtgttgctgtcactacttatggcatcgctctgccatttggccgttggcagaaaattaggaatcagattcgggaactcgaacgatgctctgatgacaacaaaaagttggtgatctatcagcagctcatttcccgactgtacgaggccactcagatagaccctcggtgccggggaagcgctgaatactaccatgcgcaatttaaagaacttaagagggtgctcgctttagtggggcacgggcccattgccctctctatgaccgcatga

SEQ ID NO: 10194 - RNA, 951 nt, synthetic construct
  source 1..951: mol_type = other RNA
atgtccacaaagtctccaaaggagaaagcactggtccgcattcccattgaacgttgccatctatacaaaatcgggagcccacacgccctcgcaaaacggttaggctgggatcttaataagctggatgatctcgcagcctacgggggatataaagtgtacaagcataaatataccggaagaaccatcgaagaacctggtgcagctctgcagagtcttcatcgacaactgcatcgctatctgtcacggatcgaggtgcccccttatctccacagtgccgtgaaaggaaggtcctacttgtctaacgcgcgagctcacgttggggacggccgaatcatcaaaatcgacatagccaagttttaccagtccgttcctcaacaccgcgtgatgcacttcttcagggacaggatgaaatgcgcgcctgatgtttccggccttctggccgcgctgatatgttacgatggacacctggcaacaggttctgcaatctcgccgctgattagcttttacgctttcgagagtctttttgatgacttggcaaacattgcttgcaagtatgacctggaaatcacatgctacgtagacgacataacgatgtccggtaagcgcgcttcattcaaggtgttacatgaagtccgcagaaccatctttagagccggcctacgggcacataaagaccacgccttcgcctacaacagccccgggatagtaactggcgtggtggtcactggccaggggatttcattgccattcgaaaggtggaagaagattaagaatcagattaggctcctcgaggcctgtgagatcagagatgacaagctggagatctttcccagcctggtcagccggttgtatgaggccgctcagattgatccagcctgtcgttctaaggctgagtattatcacgccgcgtggagaaaactcaagtacgagaaaatggcccgggctgcttga

SEQ ID NO: 10195 - RNA, 978 nt, synthetic construct
  source 1..978: mol_type = other RNA
atgccaaaggccaaaaggaagtcctcgcaacccatcccaatcgagcgttgtcacctctacggcattcgctctccccacgccttggccaatcgcctgggatgggaccttaacaaactagatcagctcgccgcctatgggggttacaaagtgtaccctcataagcagactgggcggatgattcaggaaccaggggaagccctacagtccttacacagacagatccaccactatctggctagggtggaggcacccgcctatctccattcagccgtgaagggccgctcatacgtttccaacgcgcaggctcatgtgggcgcaggaggactggtgaaacttgatatcgcgaagttttaccagagcgtaccgcaacacaaagtgatgcatttcttcagagacgtcatgcattgcgcacccgacgtcgcaggcctgttggcaaatttgatctgttttcacggtaaactcgcaacaggaagcgcagcctctcccataattagctattacacctacaaatccctgttcgatgaactgaaggctctggctgactgtcgcggcctgaccatgacctgctatgtcgacgacattacaatgagtggtccgggggccggtagagccgtcttacacgaagcccgaattctcatccatagggctgggctgcgggcccacaaggattgtgccttccagcctggcgcaccacggcttgtgactggggtgattgtaggagatatgggcatagatctccctttttcacgttggcggaagatcagtgaggcggttagagaggtcgagaggtgcgtggacccagtgcagcgactggagaagtatcctaagctggttagtcggctgtatgaagctgctcaaataaacagcagatgcatgacgcgcgccaggtaccaccatgagagatggcgagcccttaaaaggtctttacaggctgcacctttgaatgctggaggcggccaacccgttatcgcggcttga

SEQ ID NO: 10196 - RNA, 972 nt, synthetic construct
  source 1..972: mol_type = other RNA
atgagccagggcaagcaggccaaacagcccagaatcccgatagaccgctgtcatctgtatgggattaggtcacctcacgcgttggctaaacgcctgggctgggaactgaataagctggattcacttgcagcctacggcggttatagagtatacaaccataaagacactggcagagagatccaggaacccggggccgctctgcaaagtctgcaccgacaattgcacagatacctggccaggatagaagtacctgtgtacctacacagtgctgtgaaggggcgaagctatttgtctaatgctcgtgctcacgtgggagatggaaagctcctcaaaatagacattgccaagttctaccaatccgttccacagcataaggttatgcattttttcagagatgtcctgtcctgtgcccccgacgtggcaggattactggcgaacctcatttgctatcgcggcgtgttggcgaccggctcgtcaatcagcccaattatctcatactacgcctataagtcccttttcgacggactagctggcctcgctgcgcagcatggccttgtgatgacgtgctacgttgacgatattactatgagcggtcctggtgcatctagggccgtgctccacgaggcacggtctgcaatctttaaagctgggctgagggctcacaaagaccgcagtttcacaggagacacagtcaagatcgtcaccggggttgtggtcggacctgatgggatagccctgccattttcccggtggcagaaaatttctcacgccgcaagagagatcgccgcctgcagtgacgacgccgagaagcttcgcctgtatcccaaattagtcagccggttatatgaagccgcccagatcgattccaggtgccgaagccgggcggagtttcatcactgtcagtggagggatctcaagcggcgtattgccgcaggcgctctgatcgcagcagcagtggataaggccgcttga

SEQ ID NO: 10197 - RNA, 972 nt, synthetic construct
  source 1..972: mol_type = other RNA
atgtctaccaatcgccgcaggacagatcagcgaatccccattgaccggtgccacctttacgggataaggtcccctcacgccctggctaagagactgggatgggacttgaacaaactagacggattggccgcatatggctcttacagagtgttccaacataaagagactggtaggttgatccaagagcccgggccggcactccagagtttacatcgtcaactgcaccgctatcttagtagggtccagatgcctgaatatttgcacagcgccgcgaaggggcggagctacttaaccaatgcgcggtcacatgttggcgccggtgcccttatcaaagtcgacatagccaagttttatcagtcagtcccacagcacaaggtaatgcactttttcagagatgagatgcgatgcgctgaagacgtggccgggctgctggcaaatttaatttgctttgagggtaagctcgcaacaggttcggccattagtcccataatttcctactactcttacaagaacctcttcgatagtctcgctaacctagctaataaacatggcctggtgatgacctgttatgtggatgatatcactatgagcgggcctaacgcaagcaatctggtgctgcacgaggcccgtacaatgattttccgagccggcctcagagcgcataaggatagacgctttccctcatctgcaccaaaggttgtgactggcgtcgtcgtgaccgaccagggagttgaactgcctttctccagatggcagaagatccgggcacagattagagaaatcgagggactgggcaacgccgcagacaaactgaggctttacccacgcctggtgtcccggctctatgaggctgcccagatcgatagccagtgtcgggccagggctgaatattaccacgctcaatggcgccaggctaaaaggcaggtggccatcggctccatggctgacggaacggaggctgtagccgcgtga

SEQ ID NO: 10198 - RNA, 963 nt, synthetic construct
  source 1..963: mol_type = other RNA
atgtctaaagcacggaagaaaaaactgccacagatacctttaaatcagtgccaccttttcagaattctatctattcatgccttggctaaaagaataggatgggaactggacaccctgaacaagattgccaaagatggcagctatcgaattttcaagcacagggaaactgggcgtcagattcaggagcccggcccgttactgcaaaacctccaccgccaattgcaccggtaccttagtcgtgttcagactcccgaatatctccattctgccgtcaaaggtcgctcttacctgacgaatgcgcgcgctcacataggctgcgataacctgatcaaaatcgacatagcaaagttctaccagtcagtatcccagcataaggtcatgcacttttttagggataccatgcaatgcgcccctgacgtagccgggctactcgcaaatctgatctgttttaacgggatgctggcaaccggcagtagcataagtccaatcatctcatacttctcctataagaagctgttcgatgatatccacaatatcgctctacgcgagaacctggtgatgacctgttacgtcgacgatatcacactcagcggtaagaacgcaagcgggaaaacattgcataaggtgagaacaaccattttccagtacggattacgggcccacaaggacagccagttttcggagggaaatcccaagcttgttacgggtgtgatcgtgggcaaagaggacattgctctgccattttccaggtggaagaaaatccacctccagatcagagagattgaaggctgttcagacatcgagcagaaactcaggctttatcctaagctgttgtcccgactgcatgaagctatgcaaattgaccctaagtgcacagctttggccaagaaacatctcactgattttcggctcctgaagagacggggagtggtgaagactctgccccttccaagggccgcgtga

SEQ ID NO: 10199 - RNA, 942 nt, synthetic construct
  source 1..942: mol_type = other RNA
atgaagaccgctaagaagcaccgaccacttattcctctggaccgctgccacctttaccggatcggcagtccgaaagtgctggctaagcgtatcggttggaagctggacaccctagaagatttatcaatgaacgccaagtaccgcgtatttaggctcaaacggtccggaaggcaggttgaagaacctcccccgccccttcagtctctgcatcggcagatacatggttatctgtcaagaattgagacacccaactacctgcactctaatagaaaaggccgctcctatatatctaacgcaaaacctcacgtgggggcattggcgatgattaagatcgatgtgaaaaagttcttcccctctgtggaacagcacaaagtcatgcacttttttagggacgatctgaagtgtgctgctgatgtcgctgggttgctggcggccttattgtgcaaggatggcaaactccctactggctcctcaagtagccctatcattagctattacgcttataaggccatgtttgacgacatccagagtttcgccgcaaagaaccacttggtgatgacttgctacgtcgatgatataaccctcagcggagcgaatgcaacactccgccagctgcatgaggttcgaaagatcatcatgagacacgggctcagagcccataaagccaagtggttcatgggtctgggcgccaagccagtaacgggggttatggtgacaaaaaatggaattgagctgccccacagcagatggaaggccattaaagccgacctcaaggctatcaaacagtgtgccaatcgggaggaaaaactggagatctacccaaagctggtgtcgaggctgtatgaggcttcccaaatagacccaggatgtaggaaactcgcagacattcatcatcgtctttggaaagaggcactagccggcgacgtccaattagccgcatga

SEQ ID NO: 10200 - RNA, 942 nt, synthetic construct
  source 1..942: mol_type = other RNA
atgtctaagacaaagaacaagactattgtgcccattcctttggaacgctctcacctctttcgtgtacgctcaatccacctgttggctaagaaactgggttttaccgtcgatggtctggagagattagccaacgacgccaaataccgtatctttaatctgaaggagtcaggaagactcgtggaggaacctccgccagtgctgcaggctctccacaggcgaatccaccggtatctcgcaaaaatcgaagtgccggagtacttacacagcgcagtcaaaggccgaagttatataaccaacgctaaggcccatgtcggggtaggccctatggtgaaaatcgacgttaagaagttctttccaagcgtccctcagcatcgggtcatgcagttcttccgagacactatgttgtgtgcggctgacgttgccgggctccttgcaaatctgctgtgtcggaacggaaggttaccaacggggtccagcgcctcacccattatttcgtattactccttcaaggcaatgttcgatgagatcgagggcctgtgcgtggctaatcagctgaccatgacctgctacgtggatgacatcacaatcagtggcgccggggctaatagggcccttctacatgacgttagacagatcattactcgcaatggactagcctcacataaagcgaaatttttcgatcaaagtagaccaaaagaggtgacaggcgtgattgtgaagggcaacggaatcgatctgccccatagcaggtggaaggccattaaagagagcataagggaagtaaagaaggcaggttccgatgaggaacggcttgcactttatcctgctctgatatctaggctccacgaagcttcccagatagacccctcctgccggcccattgccctgcatcacaaccaaaaatggcgcgaattgcgcagagcggtggttgcccactcttga

SEQ ID NO: 10201 - RNA, 963 nt, synthetic construct
  source 1..963: mol_type = other RNA
atgactcgcaaaaaagctcgccgggaccttgaacctgagcagtgctggctgtacgcaattagttcccccgccgatctcgctcataggctgtccaccccgcgacataaacttaaagcttcagatttgtcccctctcgcgcgcgatactggcaattataggttgttccaaattgaagatggcaacggtaagtctagagccattcagtggcccaagagacgactccaaacattgcacgctcgggtgcacaccctgctgagcagggtagcagtccccgcctacttgtactcagccgtcagaggcaagtcctacgtcgacaacgcatctgcccacaatcctctggtcccgacaatcaagattgacgttaagaagtttttcccaagcgttagccgggctgtgatcttcgattttttcttccagcgcatgaggtgcaggagggatgtggccggcctgttagctgacattttaacatttgacgcgcatctacccacaggaggtgccgcaagcccaatcatcgcttattattcttttaagcccatgtttgacgaaatccacaaattcgcgctctctcagggcctgataatgacgtgttatgtggacgatctgactctaagtggggtacgggccagcaagaatacactccacgagatagggaagatcatctcacgaagcgggttaaaatcccataaagcccgtgctttcgcagcgagtcagccaaaagtgataacgggagtgtgtaacaccaagtcgggaagaagagtgccaaataaactgcaccttaagattaagaaggggttcgatgacctgaccgccgccaaaactcctctggagatcaaccggatcgcccagccacttctgggaagactccgggcagcaggtcagatagaccccaaatttcgtgctcgcgctgacaccgtttctgccaacattgccgcaagttcagtgcaaaccaagacttccccttga

SEQ ID NO: 10202 - RNA, 993 nt, synthetic construct
  source 1..993: mol_type = other RNA
atgacgagctgcgagctggtcgatcccatgcgaaaaaagcccaggaccgatctcccgctcagcgactgctggctgtcagcgatcgactcaccatccacgctggcgcggcgtttatctaccccaggccataagttgtgcgttgatgatctctcttcttttgccagagacacagggaattacaggttgttccctatctttaacgagaaggggaaggcaagaccgatacagtggccaaagcgcagactgcagggagtgcatgcgcggattcataagttgctatcacgggtcgctgtgcccaagtacctgcactcggccgtgagggggaaaagttatatctccaacgccgcagctcacgaccctaaaatgccaactatcaagatcgatgtgaaaaagttcttcccctctgtctcccgagttgtcatctttaactttttcgcaggaccgcttaaatgtcggcgtgacgtggcaggccttttggccgatattctgacttttgacgcccacctgcctaccggaagcgcagctagccccattatcgcttactattccttcaaaccaatgtttgacgaaattgcccagttcgccgagagtctcggtctgactatgacctgttatgttgatgacatggcactatcaggaccccgcgccaataaaggggtgctgtatgcaataaggggcattattgcaagacacggtttaaaaagtcacaaggcccacacattcagcggattacaacccaaggtagtgacaggcgtctgtaacaccgctgccggtcctagggtacctaataagctgcatctcaagatcaagaacggcttcgacgctcttgccaaggcacagaatgcggtggaggaaggcaaaatactccgcccacttctgggcagaatggaggccgctgctcaaattgaccctgcctttaaagcccgagctaagacagttcgggctaagtactcccgccctaaagatgtggggggtctggaaaaaatcgaatga

SEQ ID NO: 10203 - RNA, 966 nt, synthetic construct
  source 1..966: mol_type = other RNA
atgctagagatttccgattgttggctatcagcgatcccatctcctgctatactggcagcccgcttatcaactgatgcaaacaagttaacagttgccacgcttcaagagttgactaaggacgacggcaactttagagtgtttcccctggtgggaaacaatggtaaggtacgcataattcaggagccaaaacgccagctgcagaggattcatagtagagtccacactctgctgtcccgggtgatggctcccgattatctgtattctgctgttaagggaaggagctacgtcggcaatgcccaggcccacgatcctaatcaccctaccgtgaaagtcgatatcaagaatttcttcccgtccatccctcgggtagctgtgtacaacttcttccaccggcagcttaaatgtcgcgtcgacgttgcagggattctcgccgacctgctgacgtacgatggccatctcgccacagggtcagccgcaagcccaattctcgcttactacagctacgaagctttgtttgacgaagtgcatgagtttgccaaggccaggggtctgaagatgacatgttacgtggacgacatggcattatccggaccaggagcagacaagagcaccctctatgaagtcaaaaaaatcatagcccgacacggcctgagatctcataaggctcatgcgttttcgtctgctcagccaaaagtgatcacaggtgtctgcaataccgtgagtggcccgcgtgtacccaaccgactgcaccttaaaatcaaaaacgggttcgatgccttggcctccgcaagtacccaaagcgaaaagctgaaagcactcaatccccttattggcagactcgaggccgccgcccagatcgaacccatctataaggcacgggtggcgactttgcgtgcggattatgccgacgttctcctgaccgctagaaggcccgtgtgcgctgagcctgcttgcgttgtggggtga

SEQ ID NO: 10204 - RNA, 930 nt, synthetic construct
  source 1..930: mol_type = other RNA
atgaataaaagacggaccaacctgaagctcagtgactgttggctatacgcacttgccagtcccacggatcttgcgcgccggttgcagactgcaaagcatccaataaaggtggctgagctgagcatgctcgctaaagatgccggaaactttcggctgttctcccagaccaatgcggccggcaaatctcgacagattcaagaaccaaagaggcgcctgcagtgggttcacgggaggatccacgcattgttgagtcgcgtggaggtgccaggttacctccactctgcagttaggggaagatcttatatctcaaatgctgctgctcatgatccaagcatgcctacctttaaggtcgacgttaagaagttctttgccagcgtgccccggtccgccatcttcaatttcttcgtcggccccatgaagtgcaggagagatgtggcccgtttactggccgacattcttacctttgacgcccaccttcccacaggttcagcagcctcgccgatcctggccttttacgcgtttaaaccaatgtttgatgagatagagcagttcgcactggcccacggtctgactatgacatgttatgtggatgacatggcactgtctggaccccgcgccaacaagtccaccctgttcgaagtgaggaagatcatcgcacgacatggcctcaagagccacaaggcccatgtgttcggcgctaaccaacctaaagtcctaacaggcgtatgcaacacacctacgggacctagagtcccgaataaactgcatatgaaaattaaggctggcttcgacaaactcctcgccgctaccacacctgacactagatcagaagctctgcgacccctgttagggaggttggaggcagccgggcagattgaccctgggtttcgggcgcgtgccttaactgtacgcgctgcttattccaaatga

SEQ ID NO: 10205 - RNA, 969 nt, synthetic construct
  source 1..969: mol_type = other RNA
atgactattgctggcccagtgaagctcaggcggagaaaacgggcccgcttggatctgaaactgtctgagtgtggactgtacgcactggccagtccggctcacttggctgggatactcagtacacctggctgcaagttttcagtcgaagagctccagggactgagccgcgatgaggggaatttccgcctatttgacctggtgtcagacggaggcaaggcgcgtaggatcgaatggcctaaacgcaggctgcagcaggtccagcggcgcattcacgtgctcctgtcaagggtggaagtgccagactacctccactcagctgtacgtgggaagagctatctcaccaacgccgccgtgcactccgcagagatgccaacagtgaagctggacgtcaagaaattttttgtgtccgtccccagagttgcggtattcaacttcttcgcaacaaccatgaaatgcaggccggacgttgcaggcctgctcagtgatctgttgacttttgatgcacatcttcccaccggcggggcagcctctcctatcatggcgtattatgcttttaagagcctgttcgacgagatatacgctttcgccagctctcaaaatgtcactatgacctgctacgtggacgatatgaccttctctggtggagccgttggcaagcggttcttgtatgaagtgcgacggatcgttgccaggcatgggttaaagtcccacaagtccagaatgtttgatgccagacagcccaaggtcgtgacgggtgtgtgtaatacgacagatggtgccagagttcccaacaaacttcatgcgaaaatcaaagacggattcgataagctttcgaaggctgacggatccgcccagaaagccaagattcttcctccactgctaggccgattagaggctgcagggcaaatcgaccccagatttaaagcccgagccgtaactttacgggctgcacatcagagcggccgttga

SEQ ID NO: 10206 - RNA, 969 nt, synthetic construct
  source 1..969: mol_type = other RNA
atggcccctaaaaacaaggcctcattgcgcattgaggactgctggctgtttgctgtagcgagcaaagaagacctcgctcggaggctcagcaccgatagacaaaaaataagcgtgagtgatctcgagaggttaagcgcagacgcagggaattatagattattctccatccgccagggcacaaaagaacgacctgttcaggaaccaaagcgcgaattgcagcagattcatgccagaatccatagactgctgtccagggtggttgtcccagaatatcttcattccgccgtgaaggggaaatcatatttgacgaatgccagagagcatggacacggaatttctataatcaagatcgacgtgaagaagttttttccatcagtgccgcggttcagggtgttcacctttttcaagatagtcatgaagtgtcggaaggacgtctctgggctgctggctgacctgatcactttcgatcagcgtctccccactggatctagtgcttctcccatcattgcttactacgccttcaaacccatgtttgacgagatttcacggtttgcagagtctgcaggcctcaagatgagttgttacgttgacgatatgactttttctggctcgaatgctaacagatttaatctgtacgagatccacaagatcatttcaaagtatgggctgaagtcccacaaaatgaaatacttcgtggatcaggagccaaagatcattaccggtgtctgcaacacacctagtggagagcgtgtcccgaacaaactgcacctgaaaattagcataggcttcgaggaactacgcgccgcaaaatcccacacaagcgccgtaaagttgctgcgaccccttcttggcaggctcgatgcggcaggccaaatcgatcctcgtttccgggctcgggccctaacccttcgatccacattcaagaccaaatcccgcattagcaacggtgccatcaagggtagggtgtga

SEQ ID NO: 10207 - RNA, 933 nt, synthetic construct
  source 1..933: mol_type = other RNA
atgcgtaaacgccgcaatgacctcaggttagacgagtgttttctgttcgctatcgagagccccagggacctggctaggagactcagcacaaagtctatgcagttttcggaggcagatctactgggactgagtgccggcatcatagggaattacaagctgtttaagatcgatgggcgcccaatccaggaacctaaacggcggctccaggctgtgcacttgcgagtgcacagactgctctccaaagtggcagtccccgagtatctccattccgccgtcaggggccgttcctacatttctaatgctgccgcacacgcacgcgatgagccagtgattaagatcgatatcaagaagttcttcgcttctgtgcctcacgccgccattttgcgatttctgagaacctcactgaggtgccggtcagacgtcgctaagcttctggccaatcttctgacctttgagggaaagatacccactggctctagcgccagtccgatcctggcctattacgccttcaagcctatgtttgatgaaatatccgcattggcgacgtcattaggtctgaccttcacatgctacgttgacgacatgacgttcagcggtcgtgccgccacaaacagcactttgatgcagatccggactattgtagcgcggtatggtctaaagtctcataaagttcgaaagttctcagctaacgatcccaaagtgatcacaggagtttgtgtcgcgtccgaaggcgacagaataccaaacaagctccatcggaaaattgcagccgacttcaaaagcctcgaagtaggggatgaaggcatgcagagagagaaaaccctgtccagtcttttggggaggttacaagctgctggacgcattaaccctgtgtttaaagcacgagcaagcacccttagagcgtcggccagtcgcagaaggcaatctatttga

SEQ ID NO: 10208 - RNA, 933 nt, synthetic construct
  source 1..933: mol_type = other RNA
atgaaaaaaattaggagagatcttcgactcaacgaatgctttctgtatgccatagatagcccggccgaccttgcatggaggctcagttctaaggctatgaagctggacgccaaggatatcgacttcctcgttagagggagcgccaactacaaattctttaagatcaaggatcggcctattcaagagccaaaggcgaggcttcaggcagtgcatttacgggtacataggttgctgtctcgcgtcgctgttccagcctatctgcactctgcggtgaaggggaaaagctacctaagtaatgcactggctcacgatgcctcccagcccctgatcaaggtggatatcaagaagttttttgctagcgtccccgaagacgcagtggtccggttcctgagatcagactgtaaatgtaggagtgacgtcgcgcgcctcttcgcatccatgttggtctgtaatgggaagattgctaccggttcatccgcctcacccattctggcctactacgcattcaaatccatgtttgatcagatcgcaactcttgccggcgagcacggactgactttcacctgctatgtggatgacatgacactgagcggacctaccgccacaaatgccatggtgattaaggttcgagctatcattgctaaattcggcctgaagagccataaggtgcgtcgattcaacgcctcctctccaaaggtggttacgggcgtatgcatcatgccagacggcatacgcgtgcctcagaagctccacttagcgatttcgagaaactttcaggaaagaagcaccgagacagacacaaaaaaacgcgagaaaataacggccagtctacagggacgtttggacgccgctggtcggatcgacgctaaattcaagtctcgggcagatacttttcgcgcttccaccaaaaaagcccaaccttcagtgccctga

SEQ ID NO: 10209 - RNA, 960 nt, synthetic construct
  source 1..960: mol_type = other RNA
atgaagaggtatgcactggaccaatctccatttttcaaactaaagagtcgacaaaagctgtcaaaaatattggacgctgatcttaatgagctggaggtttttgctagaaatgaccccgtcgataactataaattgttcgaaacatctggcggtaaacctcgacccgtgcagtgccctaagcatagattacaggtgattcacagaagggtctgtgatctgctggcgcgtattgatactccagattacctgcactcagccattaaaggccacagctacttatccaacgccaaagcccatgccgctaatgtgccgatggtcaaagttgacatcaagaagttttttccctccgtaaccatcaacgctgtcaagcgcttttttcttaaaactatggaatgctcacctgatgtggctgccctccttagtaaagtgctgaccgtttacggccatctggcaaccgggtcatccgtgtccccaatcctctcctattacgcacaccgcgacatgttcgaagagatcgctcatttgagcgcgggaaggggcgcagtgatgacctgttacgttgacgatatgtgcttctcgggagagacagtaacacggaagttcctaagcgatgtaagagtcattatacggagccacggcctcaagtctcataagatccactatttctcatccaatatgccccgcattgtgacaggtgtggtcgtgactaacagcgggattaaactccctaacatacgtcacaagaagatcgtggacggatacgcccagttgcaggccgctctgtctgacgaggaaaagcttaaactgctgccgagcctcatagggcggatcaatgaagcagcacagattgaccctcgctggacccccaaggccaaacagctcacgctggagatgaagaggatcagctctatcgcggccagtagtatgaacccaagctcccggccatctagttgggcctga

SEQ ID NO: 10210 - RNA, 939 nt, synthetic construct
  source 1..939: mol_type = other RNA
atgaaccgacatcctctcaaccaaagcccgttcttcaagttacggtctaggaaaaaactcgcgaacattctcggactgggtctgaaggatcttgaagtgttcgcgcagaatgaagccgatgagaattacagactgttcgagatcagaagaggcgggaaagctcggcctatccaatggcctatcccctgcctgcagcgcatccacaaaagggtgtgcgacctattggcccggatcgagacgcccaattatcttcactcagctataaaaggtcggtcttatctttccaatgccaaggctcacagtggcgatacagccttggtgaaggtggacatacgtaagttttttccttcggtcactgtacagagcgttaaaagcttcttcttaaagaccatgggatgtagcccagatgtcgccgcagtcctgtccaaagtcctgaccgtatacggacatttgccgaccggcagtagtgtgtccccaatcttatctttctatgctcatctggatatgttcggggagatagaacagctggcccgtaagagaggggcagttatgacatgttacgtggacgatatgtgtttttcagggaggtcagtgacacgcaagtttctctatgaagtgagactgatcattcaccgccacggcttgaagacccataaaattcactgctttgcacccggcgttccacggattgtcactggggtggtggttactggagacggcatgaagctgccaaacaagaggcatcaggccatcgccgaggacttcgctaaatttcaatcctcactcgacgagaaacagaagctaaagatttttcagtccctgctgggccgcgtaaatgaggcaagccaaattgagccccgatggaagaacaaagcaacatctctttgtcaggaagtgaacaagatgctctactgcggaaggcagaatgacggttgctga

SEQ ID NO: 10211 - RNA, 906 nt, synthetic construct
  source 1..906: mol_type = other RNA
atggccctacacgcactaaaccagtctcaactctacaaggttatgtcgcccgcagaccttgccagaaggctgggcatcttggccgaagacctggaggaactggcgaacaggaccgacaactataaacgctttaaagtaggggcccagaagaagcgccacgtgcaggagccaaaggaccggctgaaacaggcgcacaataaggtgaccagatggctcagcaggatagagacacctgattacctgcattcagccgtacggggccgttcttatatcacgaatgctgccgtgcactccgctgattccaacctggtcaaagtggatatcagatcatttttccagaatgtcactacgcacgccgtctatttattcttcgctaagaccatgaagtgtcgaggtgacgtggcaatgctcctggccaaactccttactgttgacggccatttgcccacagggtcatctgtgtcccccatactttcctatttcgctcataagccgatgtttgatgaaatcgccaagctggcatctcacgtggatctgcgcttcacagtttacgtggatgacgtctgcctcagtggggagaaagctagcaggagtgtactcttccaggtgcgcggaattattgcaaagcatggactgaagagccataaatgccacttctttccaacaggagtgccaagggttgtcaccggaaatgctctgacccttggcggtgtgcggttacctcatgttcggcacctgaaaattaagaaggcctttgacgaactggataaaatggcagaggggcccgcccgtgagaaggctttgaaagccttaaaaagccggctctacgaggctgcacagttggaacctgtctggggtgcccgagcgagaagcctgtttggcagaaaggctcaagtgactagttga

SEQ ID NO: 10212 - RNA, 951 nt, synthetic construct
  source 1..951: mol_type = other RNA
atgaagaattaccccatcgatcagagccctctctacaagctccattctaaacgaaaattggagaacatcctgtgcaccaatctggatatcgagaagatggcaaactatgagggtaagaacttcaagttcttctatattacccaggggaataaaaagagaaaggtcgagtccccaatccctgagatacaagagcttcatcggaagattgctcgcttgctgtgccgcatcgacccacccgattacctctatagtgctactaaaaagaggtcctacttgagtaacgcccagcggcacattggccgacacgccttgatcaaggtggacatttccaagttttttccgtccgtgtcccggctcaaagtgtataactttttcaggttcaagatgaagtgctctcccgacgtgtctgccattattgccaaacttttaaccgtcgatgggcacctggctactgggagctctgccagccctatactgagctattacgcaaatatcgatatgttcgaggagctctaccttctggcaaaaaatcgctcagctaccatgacgtgttacatcgacgatgtgtgtttttctggtgaacacgtctcaaagaagctactttacgaagtacagaagataatccgcagacacggatacgtgaaccataaacaaaaagcccggtattacagtcctggcgaagtgaagttgatcacaggcgttgccgttacaagcctgggagttagattaccactaagacgtcatagggccattcgagacggctatacacacatttttaccgcaaaaactgactccgataggctgacacagctggaaaaacaggtaggacggctgtttgaagcctcgcagatagacccaagtttcaaagacaaggctaaacgcgcgtcacaagctagggcaaatctcaaacgtagactgctgagcaaggcgttccatcccagctcaccgtga

SEQ ID NO: 10213 - RNA, 921 nt, synthetic construct
  source 1..921: mol_type = other RNA
atgaatacgcataaaagggtaccgctcaagggatctgcacttttccgactaacgtctcccagacggttagccgagatgttgctggtgccaagggctactttagagcgcctagtggaagcaggcgacgataactatctggtcagaccagatcgaaagtccgggcgtattatcgaggagcccaaacctcagcttaagctgatacatcaaagatttgctagactcctggcccagatcgaaacaccagactacctccacagcggggtgaaggggcggagctacataaccaatgcaaatgcacacggagccgatgacgcgtgtgtgaagctcgacattaaaaagttcttcccctcctcttccagccatcacgtccaacgcttttttgaagatgtgttggaatacccccctgatgttgcttcacgcgccaaacagctcctgacccatgatggccacctgccgacaggagggaacgcttcaccaattctgagtttttgggcatacaagcctatgtttgacgagatcgacacccttgctcgcgagaatgactgcgaattcaccctgtatgtagatgatatgtcgattacaggagtcttcgcaaaccgcaagttccagcaggctgcccggaagatcatagcgaggtatggccttcgcgcccacaaggccaaaacttttagcccaaaccagcccagggtgctgactggcatcgccaagaccaggagaggtagggaggttcctcaccgtcgtgccaaaggtattgcccagctggagcaacaggaggccgaggcagaaacaaccgccgacaagctgcgggttatgcctagtttgatcggtaaattgtcagaagcggctatcgtcgacccctcctggactgctcggaaaaacgctgccgtgcagcggagacgaaagatgaaagcgagtggctga

SEQ ID NO: 10214 - RNA, 939 nt, synthetic construct
  source 1..939: mol_type = other RNA
atgagcatgtctaagcataaacgcattgccctgaagggctcagcgctctttcggctcacatcacctaggcggctggctgaggtcctgctactttcaagaagtgccctggaacgcctcattgtggcgggggacaccaattatattgttcgcttcgatcagaagtcaggccgaatcattgaggaacccaaaccccaattaaagttgatacagaagagatttgcccgacttctgagccaaatcgagacacccaattatctgcatagcggagtgaagggtaggtcctacataacaaatgccgatgcccacgaagccaaccaatcctgcgttaagctcgatatcaaaaagttctttccatctagcaactcccaccacgtgcagcgctttttcgaggatgtcctggaatacccgccagatgtagctgcccgtgccaaacagctgctgacttatggaggtcatttgcctaccggtgggaacgcatctacgattttgagtttctgggtgtataaacccatgtttgacgaaattgaggctctgtcccggcagcacaattgtaagttcactctttacgtggacgacatcagcataactgggttgtttgctaacagaaggtgccaacaggctgtgcggaaaatcgtgagccggtacggccttagaactcataagaccaaagcattctctgccgggcagcctagagttctgacaggagtcgccaaaacccggaggggccgagaattacctcacagacgcgctaaaggcatcgcagagttagaacagctagagacagccaccgattcgacggcgaaaaagatgaagctcctgtccactctgattggcaaactgagtgaggcaaccatcatcgacccactctgggcaggacgcaaagaggcagctgtaaagaggaggagaaagctcaagcaggaggacaggatcaagcgttga

SEQ ID NO: 10215 - RNA, 942 nt, synthetic construct
  source 1..942: mol_type = other RNA
atgtcaacccacaaacgggtgcccctgaaggccagcgctctttttaggctcacaagccccagaaggttggctaacatacttatggtcacccccactgcccttgagcgcctggtacgctggggagatgaaaactatttggtgcgacctctcgcccaggtcgaaggtaaggcgcccagaatgattgaagagcctaagccacagcttaagctaattcaccagaggttcgcccgactgctggcccagattgaaactcccgactacctgcattctggcgtgaaggggcggtcctacataaccaatgccaacgcacatacagcagacaaggcttgcatcaaactcgatatcaaaaagttcttcccaagcagtagctcgcactacgtgcagcgctttttcgaggatgtactagaatatccacctgacgttgcggcaagggcaaagcaactgttgacgtacgacggccatctgccgacaggcgggaatgcttctaccatcatgtctttctgggcctataagccgatgtttgatgaaatcgccgccttagcagtcgagctcggctgcgagtttaccgtctacgtggatgatatgtccatcacgggcgtgttcgctaaccgcaaatgtcaacaggccgctaggaaaatcatcgcacggtatgggctgaaagcgcacaaagccaattcattttcaccaggccaacccagagttctgactggtattgctaagactcgacgggggagggaagttcctcaccgtcgtgccaaaggtattgccgagttggagcaggtggaagcagccgcaagtaccgtggaggacaagatgaaagtgctgccttccctgattggaaagctcagtgaggctgcaatagtggacccatcctggacaggaagaaaagacgctgcggtccatagacggcgcagattaaaggttggagccggggctgagtga

SEQ ID NO: 10216 - RNA, 927 nt, synthetic construct
  source 1..927: mol_type = other RNA
atgagcacacacaagagagtgcctctgcgcggaagcgcggtatttaagctgacctctccgcgccgtttagcagagatgctcctcattccccgaagtacccttgaacgcctgctcgatttcggcgatagcaactacctggtcagacatgacagaaaatccaaccgcacaattgaggaacctaaacctcagctgaagttggttcagcaaaggttcgctcgactgttagcccaaatcgaaacgccagattacctacactcaggggtgaaaggtcggtcatacatcacgaatgcaaatcaacatggggccgagcaggcctgtattaaattggacgtgcagaaatttttcccatcttcaagttcccattacgtgcagaggttctttgaggaaacccttgaatatcctgctgacgtagcctctagggcccggaggctgctcacttacgatggccacctccccacaggaggaaatgcttcaactatcctgagtttctgggcctataagccaatgtttgacgagatcgatgctgcggctaagagactcggctgcgagtttaccctgtatgtcgacgacatgagcatcaccggcaagttcgccaatagagaactgcagcgggaggcggccaagattgtggcactttatggattgcggactcacaagctgaagaacttttcgcccggccagccacgagttctgacaggagtcgccaaaacaaaaagggggcgggaggtgccccataggagagctaaaggcatagcagatttagagcaggaagaagccagcgctaccactgcagtggagaaactgagactgttgccgtcccttatcggtaagctctctgaggccgcagtcgttgactccagttggagcggtaggaagaacgctatggtgctacaccggcgtcgcttgaaggcagggatatcccgctga

SEQ ID NO: 10217 - RNA, 966 nt, synthetic construct
  source 1..966: mol_type = other RNA
atggcaaggcggtgcgccaaaagagttagccttaggggctctgctcttttcaagcttaccagccccgcccgtctggcccacatactgtgcatctctcctggccagctggcgtacttggtgcgcaacgctgaagccaactacctcgttaggacagatagaaaaactggcagactgatcgaggagcccaaggcactgctgaagcaggtgcacgcacgcgtggcaaaactgctccagcagattgaaactccagactatctgcattcgggggtaaggcagcgcagctatgtgactaacgcttcacaacatggagcaaaggactctgcggtcaaattggacattaaaaagtttttcccgagtgtgcgtgcagctgccgtgtattcatttttccacgaactcatggaataccccgcagacgtcgctagccgcatgactaggctactgacaatcggtggacatttaccgacaggcgggaacgccagttgtatcctgtctttctgggcctacaagccaatgtttgatgagattgccgagctagccgtggccaagtcctgtgcctttaccttgtatgtcgacgacatgaccatcagcggcaggttcgcctcccgcagtatgcaacaggcagctcggcagattgtaggcagacatcgattgagagcccacaagaataaagtgtttgtccctaatcagccacgcgtggtaacaggggttgctgtgacagtccggggactggagttacctaatcgacgggccaaggcgattgatgatgccacccaagttgtgactcacaccgccgatgggtccgcgaaattagctctgcttcctgtgctcatcgggcgggtttcagaggctgcagaaatcgatcccgcgtggaacggaaggaagacggccgctgtcaatctcagacggacgctcaccggcagaatagctaccgcttcccgacctggtggaggtgagccacccgcatga

SEQ ID NO: 10218 - RNA, 939 nt, synthetic construct
  source 1..939: mol_type = other RNA
atgaaaggaaaaccacacaaacgtgtcagcttgcgcggctcagcactgtttaagctaacttctcccgtacggctagcacagatattgtgcatccccccagctcaacttgaccgtctgttaagacggggcaataccaactactgcgtgcggaccgatcgaaagaccgaaagactgattgaggagcctaaggccctcttaaagcaagtccatgctagggtcgctcatttgctcgctcaggtggagacgccagcctatctccacagtggaatcaagaagcactcctacatcactaacgcggcagaacacagggtggaaggtggtgccgtgaaactggatgtgcagaagtttttcccttctgtccgagctgcggccgtttgtcattttttcgccgacgtgatggagtatcctatggatgtggctagtagaatgacaaagctgctgaccattaacggacatcttccgactggcgggaatgccagctgtatcctgtcgttctgggcctataaaaacatgtttgacgagattgcagcactggccgcagccaagggctgcactttcacactctacgtggatgacatgaccatcacagggcagtttgccacacgagccatgcagaaggaagcgcgcgccatcattgggcgctaccggcttaaagctcacaaaaccaagatattcagccacaggcagcccagaatagtaacaggagttgcaattaccgcccgcggcccagaactgcccaataggagggcacgcaagattgcgatcacaatggccggagtagaggccgctgccactgactcacagaggctcgccctgatgccttccctgattggtagagtctctgaggctgttgaggttgatccgctttgggcagggcggaaagcagctgctgtgggcatgcggagaacgatcaggtcccgcgtggaaaaaagcagatga

SEQ ID NO: 10219 - RNA, 912 nt, synthetic construct
  source 1..912: mol_type = other RNA
atgtctcacgatagaaatcagagcatcctgtataaagttacatcacctcagatgcttgctgataggctactcataagtcggggggagttgcacgcacttctggctaacgcggatccttacaaacgctggatcgataagaagtccggacgcgcgattcaggaacctcggccaaagctggctaaagtgcatcgacgcattgcaactctgctcacacgtatcgatactccagcctacctgcatagcgccaagaaggggaggtcttacatctccaatgctgccgctcattccgttgacgacggatgcgtcaagattgacgtgcgtagattctatccttcagcgcgggctcaggctgtgtaccacttgtttctggatcggatggcttgtgacggcgacgtagccggaatgcttgcaaagctcctgacggtcgacggtcacctgcccacaggttcgagcgcaagtcccattttgagctattttgcgtatgaggacctgttccacgagcttgccgtcttagccgaggcctccggatgcaagatgactgtgtacgtcgatgacatagtgtttaccggcgcaggcgccacccgaaggctcttattcgaagctagaaaggcaatcgggaaaagacatctacacgggcataagaccaaactgtttcgaccaggccaaccccgcattgtgaccggtgtcgccgtgacaaacaatggccttcgattgccgaaccgccgccaggtgaggatagcagaggaccaaaaactgttcgatgacttgcccctcggacgtgagaaactcattgttgcccggagactcaccggcaggctgttcgaagcctctcagatcgatgcaggctggagagtaagggccgaagccatggccgctctgagagacgatatccagaggaaaatcgggcggtga

SEQ ID NO: 10220 - RNA, 909 nt, synthetic construct
  source 1..909: mol_type = other RNA
atgtcttatccacgcaatcagtccatcttctacaaaattacctctccccaaatgcttgccgatagactccgggtgaccctggacgaactcaatgaactctgtgctgcctccgataattataaaagatggacggacaagaagaccggccggccgattcaggaacctaagcccaaactggacaaaatacacaaacgggtggctgccttactggccaagatggagacacctgattacttgcatagcgccattaaggggaaatcgtatatcacaaacgcctcaggacattctgtgggcacaggatgcgtgaagatagacgtcaggaagttctatcccagtgtcagatcacaggctgtacaccatttctttctcgatcgaatgctgtgtactggcgatgtggcagggatcctgaccaaactactgaccgttgacgggcacctccctacgggctcttcatccagcccaatcctgtcctattttgcctacgaggacatgttcgaggcgttggccgctttggccaaggcgaacggctgcattatgacagtatacgtcgatgatgtggtgttcacaggtaccggggctactaggggtcttttgtacgctgcacgtaaggtctttgcaagttaccggttatacggccacaagaccaaactgttccgcccaggacagcctcgcatcattacaggtgtggccgtcactaaagagggaatgaagctgcccaacaaacgccagcgaggaattgccgatgacctagcaacttttgacagccttccgaacggcagggagaagcttgttgttgctagaaggctgactgggcgtctctttgaggctagccaaatagacccagcatggagaagcaaggcggaagcaatggcagccgaaagggacagtctgcagcggatcatctcctga

SEQ ID NO: 10221 - RNA, 927 nt, synthetic construct
  source 1..927: mol_type = other RNA
atgccagagaggaggagttatccgagggatcagagcaggctttacaaagttaaatcaccagcccagctggcggacatcttctttctgcagcctcacgagctggatcttcttctcgacgccaatgagaattatatccgctggaccgacaaaaagaccggacgagaaatccagcgccccaaaccactgttggaaaaggtccaccggagggccggcatgctgctaagcagaatcgaaactcccgattttctacatagtgcgataaaaggtcgatcttacattagcaacgcacaaagacatatgcccgatgaacccacagctaagattgatgttcgcaagttctacccttccgcccgggcacaggctgtattccacttcttcagagacaggatgttatgcgacggggacgtggccggtatgttggcacggttgctcacggtggacggacaccttgctaccggttcctccgtctctccaatcctgagcttttttgcatatgaagacatgttcacagacattgaggctttggcaattgagagaggatgcgaaatgacgtgttacgtggacgatatggtgtttaccgggcccggcgccacaagacggctgatttacgatataattcagattgtgcggcagtatcggctctggggccataaaactaagctgtttaagcctggccaacctaaggttataactggggtagcagtgatccgcgtgggacaaagactgccgaaccgtcggcagaagaccatcgctgatgaaatggatgtcctgaaatcgactagagatgacgctgagcgactcgccatcatccgtcgcctcctgggccgattatacgaggcggcccaggtggactcttcatggtatgtcacagccgatgctatggccgacgagaagcgcgggttagagcgtagatccgccagggcttga

SEQ ID NO: 10222 - RNA, 1029 nt, synthetic construct
  source 1..1029: mol_type = other RNA
atgaatatgcccaaagctaagtcaagtaaaaaactgaagctggaggagtgcttcctgcacagtgtggcgtctcctgtggaccttgcaaggcggctcctcatagatcttccagacttagagagactcgcaaacgctgaccataggtttaagcaatggacaaccaaaaaagggagaaagattcaggagccggttcgcgaactccaagtcgtgcatggtcgcgtcatgagactactatcagcagtcgaaccacctttatatctgtattccgccgttgcaggccgcagctacattaccaacgcacgtcagcatgtcggagcttatccgaccgtaaagctcgatctgcagaaattcttccccagcgtgaagcgggcagctatccggaatttctttgtcagggagatgaagtgtgccggggacgtggcgagtatcttggcgaagattcttacatgcaacggcgccttacccactggcagcagggcttccagcataatgtccttttacgccttcaaatccatgttcgatgagttgggcgacctggccatcgccaataactgcacaatgaccgtctatgtagacgatatcgccatttcaggtgaaggagctcgacctcggctcctggttaaggctcgtagaatcatcgcccgatacgggctgaagtcgcacaaaactaagttttttcaggcattgcaggcacgcataattaccggggtggtggtagacccagcgggaattgcattgccccactccaggagggttcagatcgaaagaggccttgccgtgctcgcggctgaatgtgacccaaagtggaagctggagatcctgacacgcctggtgtctcgtgtgtacgaggctgcccagattgcccccgctgaatttctggccctggccactgagcttagcaaggcccgggcagagttgctaaaaaaagccagtgaactggctgtggccagcgttgctcctgatcggcgctcccacctgcgactcgtgcactctgatgcctcaacgtctgatagagtcgcctctccttga

SEQ ID NO: 10223 - RNA, 1017 nt, synthetic construct
  source 1..1017: mol_type = other RNA
atgacacactacaggaaatcatatgcgatctcaaattcaccctttttcaagctgtccagtaagaagaaattgtctgaacttttgggagtgagcttacacacgattaccgacattcgccaaagcgggctacacagacagtaccgtatctttaaggataaaaagacgagacgccttatcactgagccagttggcgagcttctgagggtgcacaaaaaaatcttaaagctgttcaaacggatccagccacccgcctacctgcatagcgccataaagaaaagaagctacaagaccaatgccgaggctcatctgcagaaccggaggaccctgaaaatcgacctcaagaaattctttccctccatcaggtttcaccacgtctacggcttctttctgaagaacatgcagtgtagctccgatattgcgaccattcttgcaaatctgtgtaccgcagacaccaaatctcatggcacccacctccctactggttcgtgcataagtcctctgctgtcctattggattaaccagaacctctttgaccaacttcatgatatcacatctcaggaagggtgccatatgacattgtacgtggatgacattactatttccggagaaaaagccacacccgaattcctgaataagatagcaatagccatcaactctcacggttataagtaccacaaagttgcctgctatggcaatggagtagctacaatcactggattgatcgtcaatgaaggcaagctagagctgcctcatgtgagggcccagaagatcagacgtctggaaaaggaattgatggaggccgagaatgatatcgatcggaagagaattctgaacagtttaatgggccggctcactgaggcagagcagattgtgccagcatataccgctaaaaagaacgagatcatgaaactcttcaagaacatttggggggacattgtccagcaacgcgctcaacgagctcagctcaagcgccgaatcaagaaacagccggtgctcgccgacatagctgggggttga

SEQ ID NO: 10224 - RNA, 1014 nt, synthetic construct
  source 1..1014: mol_type = other RNA
atgatgaccagccggagaagcaaaaccccccacagatatgagattgagttcagccccctgtaccgcctgtcaaataagaaaaaacttgccgcactcctgaacgtggacgtgtccattatatcttcaccggataagtctaagctgtgctcacagtataggatctttgtcgacaagaaaaccaagcgatttattacagaaccaatcggagatcttttggctattcaccagcgcttactgaagttcttcagcaggatcgcacctcccgaatacatacacagcgctatcaaaaaacgctcttatctgactaatgccgaggcccaccggaaatcttcaaatatcctcaagatcgatatcaagaagtttttcccctccattaagttccaatgtatctacggttttttcctgaataccctcaagtgttcctctgatatcgctactattttagccaagatctgcacagttcagacaaacaattatggtacgcacctcccaactgggtcctgcatttccccaatcctaagttttttggcaaaccagcaactttttgactccatcaagattatttgcgagaaggaaaaatgtaagttgacactgtatgttgacgacatcaccatcagtggggaaaacgcttcaccagctttactcacgctcattgccatggagatcttcaaacatggctacggataccataagattaagatctacaaggatcagcctgccattataactgggctggtggtctacaacaaaaaagtgtgtctgcctcatgagagagccaagaagattagggagctgatcgatgctctgaaaataagcgtgggccctttgcggcagaagatgctggcgagtcttgtaggcagactaagtgaagcagagcatatagaaagtcaatataaagcgaagcgtgtctccatcatatctcagtaccggaaagagtgggacgaagtagtggccaatcgaaattcgaagtgcaaagttagcaggaacaaaaaattggcaaaaaacaacacctga

SEQ ID NO: 10225 - RNA, 1002 nt, synthetic construct
  source 1..1002: mol_type = other RNA
atgacgaaaaatcccacacggggttccaaaaaatacgacctggagagctccccactgtacaggctaagcaacaaacggaagctggcggatcttctcggcgtggagccatcgaaaattctcggactgaagaagtccgcaatttgctctcagtacaagatattcaaggacaaacagacttctcgctttattaccgaaccccactccgacctgctgctagtgcacagaaggttgctggacctcctcacccgcattcagtgtcctccctatttgcactccgccagaaaaaaacacagttacaagactaacgcggaggcccatcaacacagctctgccgttctgaagatcgacatacgaaaattttttcccagcgtgaaattccattatgtttacgacttcttcaagaatgagatgtcttgcgctcctgatatctccactatcctcgctaaattgtgtacagtgactaccctgaagtttggcattcatctgcctactggttcatgcatcagcccacttctcagctttctggtcaataaggtcatgtttgatgaaatcgacgctctgtgcagagcccacgactgtaagttcacactttacgtggatgatatgacgatttccggcgataaggccagcagagctctgttaacatcgatcgcaatgatcatacatagattcggctatgggtaccacaagatcaagacctaccaccaggtaccgaccgtgatcacagggctcgttgtgtataagggaatgttaaggctgccacatcggagggcaaagctcgttcgtgtggcatcacaagccctggcccaggccgtcagtggcagtatgcgcaagaagctgttagggagtttgataggacgcttgtcagaggctgaacagattaaccctctatataaggtaaggaaggaggtccttctgacacggtataaatctgaatggcagaccatcatggatgagcgagtcgaaaagtcacttaaagtgcgtggaaccaaatctaaatga

SEQ ID NO: 10226 - RNA, 1026 nt, synthetic construct
  source 1..1026: mol_type = other RNA
atgaaaatcaccaaagcgaaggagccgcagcgatatgagattgaaagatcccctctgtacaaactgtctagcaagaggaagctgagtgaattactcgaagttgaattgaccaccctcagttctttggagaaatccgggctgactagccagtacagaatcttcaaggataggaagacaagaagggtgattaccgaacccatagagcagctggccgtcatacacaagcaactgctgaagctgttctcccgcatcgctccaccctcatatgtgcactcggcgattaaaaaacgcagttacaagaccaatgcggagcagcataaggatcccgccaacgtgctgaagattgacgtgaagaagttttttccctctattaagttctcccacatccatgacttctttctgaatggtttatgctgttcaaaagacattgccgtgatcctgtctaaactgtgtactgtccagacggtgaaacacggcgtgcatctgcctactggctcatgcatcagtccaatcttgtcctttttggcaaacaggcgcatgttcgatgccgtgaagaaaatctgcgatcgggagggatgtgtctttacagtctatgtagacgatatcacagtaagcggagtcaacgcaacacgagcactcctcagcgagataactaccgttattcacaagcatggctatcagtatcacaagattaagacttaccatggacaacctgcactcgtgacgggccttgttgtagccgacgggcgtctcagacttccacacgaacgtgccaagaaaatcagagagctatccaaagcccttaaggcactgcgggcttccaaaagcacaccactacggtcaaagatgcttgctagcctcgttggtcgattgtcggaggccgaacacatcaacaaagcttacaaacctcttcggcagaaaattttaagctcttacagcgccgagtggtcaggggtgatcgcttacaggctgcgcaagagtcggacaaagaggctaatgcgcaattgcgtgataaccgcttcttga

SEQ ID NO: 10227 - RNA, 1062 nt, synthetic construct
  source 1..1062: mol_type = other RNA
atgacacagaaaaagaagactggcacaccacagcagcataggtacacaatcgatagatctccactgttcgggttgagctcaaagaaaagactctccgagctcctgggcgtggagctccgtcttatacgagacgtggagaaggcagggctgacacggcagtataagatcttcgtagatcgaaagtctcggagatttatctgccaaccggttgacgaactggagaagatacacagacgcttgctcaaatatctgatacggatagcccccccttcctatgtgcattcagccatcaagtccaggtcttatcggagcaatgccaacgctcacttactgaacggccccgtcttaaagatcgatatcaagaaattcttcccttccatcaaatatgaccgtatccattccttctttttcgataccttcaagtgcgctccagacattgccactattcttgcaaaactgtgtgtcgtgtgctccaagaaccacggagtacatattcccaccggttcatgtctatctccggcaataagctacctggccaatattaaaatgtttgacaggatcgcggaaatttgtgccaaggcaggatgcagatttaccttatacgtggatgatattaccattagtggcgccaaagccaatcatcagctgctcggggaagttgcttcggttatttttcagcgcgggtacaaataccacaaaaccaacgtccagcaaagcggccacgctctgatcacgggtctggtggtgactcctcaaggactgagattgcccttcaagcgagttaagaaaattagggacctatcagagactctctttgctgcgagcgtgctgaatttggcacaggcccggaaacgcgagatccttgctagtctggtgggatgtcttagcgaggcggaacagattgaaagtaggtacaaattgattcgcgcacgcatcgtcgaggagcactgcgacacgtggaacgaaatcgtcaagaacaggaccaaacgcgcagctctcaagcgtcaacaggctacacgggccgtgatccctccagccatgaagaattgtacctctaagtga

SEQ ID NO: 10228 - RNA, 993 nt, synthetic construct
  source 1..993: mol_type = other RNA
atgacaagtagtttacgcaaaccaaagcagtacgagttagagaagtctcccttcttccagttgaagagtaaaaaaaagctcgcagagttgctgaacgtttctctgccttcactcagtcggactcaaatcgagaagttggcttcctgctaccgcattttcgtggatagagagagccgcaggtttattacagagcctgtcggagagctgcaggtaatccatcagcgtctgctccaatattttagcaggatcgcccccccagattaccttcactccgccagaaagaaaaggtcatataagtccaatgctgaacagcatattggcaacactaatgtgctgaagatagacatcaagaagttctttcctagtgtgcaattctcttacatccatgacttctttagcaatcaactgcagtgtgcaccggacattgcggcaatactggcgcgactttgtaccgtgaagacgtccagacacggcgtacacctgcctaccgggtcctgcatctcaccggttctgagctttttagccaacaagcccatgtttgatcgggtcgctgctctttgtgcctctcagaggtgcactttcagcctctatgttgatgatattactatttccggcgctggagccacgcatgccctcttgacatctattgccgtggaaatcaacaacgcaggttatgggttccacaaaatcaaatcgtactttagcgaaccagccgtcgtcacagggctcatagtcacccacgaccgcctgtgccttccccacgaaaggcagaaaaaaatcagggaagtggctgaagcgctgcgtatctcaattgacaccggcatcagagagcggctactggcctcactcgtgggtagactgagcgaggcagaacagatagataccaagtacggaaattaccgaaaaattgtgctagccagatattccgctgactggaagcgagttgtggcacatcggctggctcggatgaaaaaatctgccaagcgcccatga

SEQ ID NO: 10229 - RNA, 1068 nt, synthetic construct
  source 1..1068: mol_type = other RNA
atgaagcctagtcccaggaagccgaaacagtatgaactggagcaatcaccattatacaaactttcctcgaaacgtaagctggcagagttactgcaggtcgacctcgtcactctcggagtgaccgaactggctaagctgacatccaattacagaattttcgtccactgcgagacaggacggtttataactgaacccgtgggcaccctgataccggttcataagcgtcttctgtctttgttcagccgagtagtgccccgggactatatccacagcgccacgaaaaaaaggagttacaaaaccaacgcagagaaacacatcgggaaccagaacatcctcaagatcgatataaagaagttcttcccaagcgtcaggttctgttacgtgcataattttttcgcgaatacgctgaaatgcagccccgaccttgctactatcttagccaagctatgcactgttcggacaaaaaagcatggagttcacctgccaactgggagctgcatcagtcctattctctcttttttggctaatagggacctatttgatagaattgagaagctgtgtattgaggccgactgcacctttacgctctatgtggatgatgttactatctccggtccaaacgcaacccgcgcgctgctgacacgcattgcaatggaaatccacaaaaacgggtatggctaccataagataaaaacctaccacgctgtccccgccatggtgaccgggttgattgtgaccgagggacggctcattctgcctcacgcaagatgtcaaaagatcaggcaatacgcggaagccttagaatgttctgtgggcggccagattcgcgaaaagctgctcgcctcacttgtaggtcgactgtcagaggcagagcagatcgacgctaagtatagaacagccagacaggacgtccttaagagatatgccgtagattggggtcgagtgatggccctccgcattgctagtgccaaacatcgcgctcggaagacagcttctgtgaataaaccttccacaaccttgttggatcagcagggcgacactgtgaggagcatcaccgcctcctcatga

SEQ ID NO: 10230 - RNA, 1035 nt, synthetic construct
  source 1..1035: mol_type = other RNA
atggcaaataaccctacgcacaagaggaaacagtatataattgccaaaagccccttttttcgcctgcattcacgacaagcactggccgaactcttaggaatcacattgccacagatggaagcactggcctcatcaccaagcgatgccctctaccggatgtacgacgatgaagcatcaggccgctatattacagcccctttgcctgagctccagcggatccataaaagaatcgcccgtctgttttccagggtgattcctcccgcataccttcagtccgccaccaaaaagcggagctataaaaccaacgctgctatgcatcggaagaatttgaggattgccaaggttgacatcagacaatactatccctcgattacttttggcgcggtcttcaacttcttcaagaaaaagatggagtgtagtgtggacgtgtctaccgtgttaactaaaatttgcaccgtaagcgctcgaggcagaacacacctgccaaccgggtcctccctgtctcccatcctatcttattgggtgcactccgatctatttaaccgcatcaagctgatttgcgacagtgcagcctgtgtgatgagtctgtacgtcgatgacatcaccgtgagtggaacaaatgctactgcgtctctgatctcaaaaatagaggcagagatagcgaaggccggcctgacaagccacaagattaaggtgttcgatcgcgtcccggcaacagttaccggggtgatcgttcacaaaggtcggctcgctcttccacacgagagggccaaagatataagactcttgagaggaatcatggctaaactcccgcttgccgaagctgaggccgacgcaactctttcccgtctggttggtaagctgaatgaggcagagcagttcgtcaccgggtacggcgccatcaaaaagaatgtcctgagcgaacatgctagcgcctggaaccggattactgcggcgagggtagctaagtctaaggccgccgcccgccgaaagaggttaaaggctgctgctacgagaatcagtaagtcttcctga

SEQ ID NO: 10231 - RNA, 1026 nt, synthetic construct
  source 1..1026: mol_type = other RNA
atggctacaatcttgacgaagagaaaccagtacgccattaccaagagtccctttttccgtctgcactctcgccagacactcgcgaagctgcttggaatcacactgctcgaaatggagacacttgcttccaggccctcaaatgcgctatatcggatgtacgatgacagcgcctctaaaaggcatattactgcaccactccctgaattacagcggatccacaaaaggatcgctcgcctgtttagtagaattattccccctgcgtacctgcagagcgcaacaaagaagaggtcctataagaccaacgcagccatgcatagagacggacaaaaaatagccaaagtggatataaggcaatattaccccagcattacattcggcgccatattcagctttttcaaaaatcgtatgcagtgtagcccagatgttagtaccgtcctgaccaagctttgcactgtttctacgaaggggcggacacacctgccaaccggttccagtctctccccaatcttgagctactgggttcactcagagcttttcgatagaatcaagtctatctgcgatgacctgggctgtaaaatgtcattgtacgtggacgacatcaccatttcgggaaagaatgccgacgcagctctggtgactaagatcgaacgcgagatagagaaaaccggtctgaccgcccacaaaattaagatctttgatgggattccggctactgtgactggcgtggtggtacacaaaggacgcttagcattacctcatgatagggcgaaggatatccgaatgctgagagaggcattgaacaaactccctgaaaaagacgccgactcaacactctctaagctaatcgggaaactgaatgaggccgagcagtttgtggcaggttatggcgccattaaaaagaacatactctcggaccatgctccggtctggacccgcattaccactgtacgagtcgaaaagtccaaggctgctgcccggcggaaacgactgaaggccatcggcacgagcgggtccaagacttcttga

SEQ ID NO: 10232 - RNA, 1020 nt, synthetic construct
  source 1..1020: mol_type = other RNA
atggccaagtcccagactactagaaagcagtacaccaaaaatcggtcgccattttttagactggagagtaggcgcaaactggctaccctgctggctacaactctgaaaagcttagaagagttggccgggttgccttcaaatcagcggtataaaatgttctttgaacaagagagcgggagatacatcaccgagcccataggtgagttacgacgtgtgcacaagagaatagcaaagttactctgcagagtttctccccctgatttcctgcagtcagcgaccaaaggtaggtcatacaaaacaaatgccgaagcacacattggtggacagaatatcatcaagttggacatcaaggagtactatcctagtgtcacatttggagcaatctaccattttttcctcaacaaccttaagtgttctcaggacgtggccacactgcttactaaaatttgtaccgtttctgcgtgcggcagaacccacttgccaaccggatcttccttgtctccaattctgagttactgggcatattcccaccttttcgatgagataaacagcctatgtgccgccaagggatgcacgatgaccctctatatcgacgatattacggtaagtggcccgaatgccgacaagctcctgcttgccgaaatccgcaaccgcatagatgcaactggcctagtcgcccacaagttcaaagcgtcccaggggatgcctatcaaagtaactggcgtgatcgtgctccgggatggcattacactgccccatgaccgggccagggatatccggaaactccaagctgagcttgccacaacgtccccagaagaagtcgaccccactctgagcaagctggttggaaagctcaacgaagcacagcaattcgtggctacatatggggagattaagagggccgtgctgaggcagcattcaaacgcttggaatcgaattgtcaccgagcgcgcaacccaaagccgtagggctatgctgcggcgtcgacgcaagacagctgtgaagaaagctagcggctga

SEQ ID NO: 10233 - RNA, 930 nt, synthetic construct
  source 1..930: mol_type = other RNA
atgtcagagcagccaaaacgctaccctattgaccaatctccactgtattcgctatgcggtaaaggcaagttcgaaacggtgatcggggtgagttgggatgcggtacctgagctctgctccagctccaattatcgagtatggaccaatgagaacggacgggagatccaggccccattcaagggcctagccgctactcacaggaagattgggctgctgctgtcaagaattgacgttcccggatatgtgtattcacaaaaggggcggagctacgcagacaacgccagacagcacctgggacaccatcccgttatcaagaccgacatccaaggattttacccttcgatctctagagcccgggtctacggcatgtttagacaggatttccactgtgctgccgatgtggcagcccgactggctgatatttgtagctaccagggtcttcacctccccacaggcagccccttgagcggaagagtcgctttcttagccgcccgccatctgtttgacgatatagccaagctcgcttccgcgagcgactgcacatttactgtgtacgtcgacgacataacccttagtggggctaatgcaactaagaggctgctggcagaggttcgaaggttgatcgagaaacatggcctgcgctctaagaggggcaaatctaagtcattctctccctcctccccgaagagtgttacaggagtgattttggtgggcgaagatgtgagactccctaattcccgccaccagaaaatctgggaaacccgccgtgcacttctcacagccaccggtgaagagcggttgaaactggaacgtcagctcaaagggagggagcaggaagctaaccaggtgctttgttctccacggaacatagagccgcctagggtcagttggcggttagtcggcctgagccatgctgggatggcatgctga

SEQ ID NO: 10234 - RNA, 903 nt, synthetic construct
  source 1..903: mol_type = other RNA
atgtccgggttccgcaatgctatgccgagcagcgcccctaggaaagcctacgccctcaaccagtcaccacttttcaggctgcggggcaagggacgttttgaggatgtcattggggtgaaatgggaatctgttacagatctattagccgccgagagttttcgtgtgtggaagggccctaaagaccgggagatccaggcgcccatccattggatggccgcggtacataaggtcattgctgatttgctggctagaattgaagtgccagactatgtattctctcagaagggcagaagttacgctgacaatgcccggcaacaccttgggaaccaccccgtgataaagacagacatcaacaagttctacccatccgtgactagggcaatggtgttcaggatgtttgtcagagactttgaatgtgccgccgatgtggccgatcgactggctgatatttgctgttacaggcagctccacctgccaaccggttcccctttgtccgggagagtcgccttttttgccgcgagaggattattcgaagacatcgctaaactggctgtggcatcgggctgcaaactgaccatctatgtggacgacattgcactcagcggcccgaacgcaacaaagcggctgctcggtgaggttcggatgctgatcgcccgccacgggttgaaaagcaagggtaagaagtctgcaactttcgccgctggagctcccaagagtgtcaccggcgcagtaatcgttggtgaggagctgcgactgcccaatgaacgccatcgcaaactccacgagacgcgctcagcatatgttgcggctgatggcgacgaacgagccaaactgggaaggcagcttcggggacgtcagcaagaggccgcacagatactaagacctgtggcacgcgctacctga

SEQ ID NO: 10235 - RNA, 936 nt, synthetic construct
  source 1..936: mol_type = other RNA
atgaagtcaaaaggcaccccagagaggtaccccctgcaccagtctccactgtatcggctaaagggaaaaggccagttcgaaaaaatccttggcgtcgagtggtccgccgtcaatcgcctactcgcagcgggtaactacagagtgtggaagaatgataagggacgggaaatccagcaacctctgggctggttagcccatgttcacggaagaatcgggaaactcttgtccaggattgagctgccggattacctctattcacagaaagggaggtcttatgctgataacgcccgggaacatgttggtggcgtgcctttgattaagaccgacatccacaaattctatcctagtacaacaagacagatggtgtatcgcatgtttgtggtcgactttatgtgtgctgaagatattgctcattgcctcgcggatatatgttgttacagacagcgacatttgcccactggcagcgcgctttctgggcggattgccttctttgccgccaagcacatgttcgacgacatcgctgacttggccaatgacgaacaatgccgtatgacggcatatgtggacgacgtgactatcagcggacccgctgcaacaaagaagctgcttggggaggtgcgaaaagtagtttccaaatacggttacaagacaaagcaacgcaagtcgaagacctacgccgccaccagcgtcaaagtcgtaaccggagcagttgtggtggggcgggaactgagattacccaacgagcgacacaggaagatatggcaaactaagcaggagctgctgaggtgcgagagagaggagaaagccccactgatgagggctctgcgtggacgcctgcaggaagcatcccagattctcaataacctgagcggcgacttacacaatagtgatctcatgcttgggcggagcctgtctaaccgcgatggcagttcatga

SEQ ID NO: 10236 - RNA, 921 nt, synthetic construct
  source 1..921: mol_type = other RNA
atgagtgagagcctttctcgtctgatgcctaagcagtacgccataaaccagagtccactgtataaactagtagggctcaggcagttagagttatgtttaggcatcgacctcgagagattggacaaactcctgaaggatggttcctatcggacttgggttaacgataacgaccgagccattcaacatcccctgggatggctggcgcaagtccactctaagatagctcactacctggcgaaaattgaaactccggactatgtctaccacaagaagggccgctctcacgtgaagaacgcttcagagcatacaggttaccatctggtagccaagaccgatattagcaactactatcccagcatcacaagagcaatgctaaaatcgatgtttgtgaagaagttcaagtgcgccctggatgtggctgggatccttgcagacatctgcacctaccagcgcacccacttggctaccggtagtggcgtcagcggctacctcgcattctgggcaagtaaagacctgtttgacgctgtctatgaactgtcccgggccagaggatgtgtttttacattgtatgtggacgatctcaccatttccggaaatgctgccagcaagaagttgctgactgaggtgcgggccattgtcaagaggaatggccttaagaccaaggaaactaaaagcaaaactttcgctgcccacgccacgaaaatggttacaggggtggtgcttaaggggaatgaatctctgctctctaataaacgacataaggaaatcgctgataaccgcatcgcaattgcaaatacaggcaatgcgaatatcaaggccaccctgcagaaatccctcaaaggaaggctgatggcagccaaacagataatcgattccaacgagatcaaaacagtgacgtcatcagaccttatttactcatga

SEQ ID NO: 10237 - RNA, 915 nt, synthetic construct
  source 1..915: mol_type = other RNA
atgcagtccaagaaaacgcctgaccgaccttatccccttgcgtcaagcccattgtacggaattcgggggaaggggcaattcgagcgcgccataggcttaacctgggaccagacagatagattactgcataggaggtattaccgggtttggacaaccaagaaggacagggagattcaacagccactctacgagctggaaaagctgcatgcccggatcgccaacttgctggcaagaatagagatgcctagttatgtgttcagtcgcagggggcggtcttacgtggagaatgctgacagacacaagggcctgtcccccctcatcaagaccgatctcactaagttttatccgtccacaagctggccgatggtgtttagactgctagtatctcgctttaactgcgccaaagatgtcgcacacagactcgcagacctgtgttgctaccagcagaaacacctgccaaccggatctgcattgtcaggctatctcgcattcttcgctgcacagccaatgttcgaccggatcgccgatatccttgggcgacacggatgtgagatgactctttttgtagatgatctgaccgcctcaggcgcgggtgctacaaaacacgctctggaggaagtcagggccgaaattcgtcaccatggcttcgctactagtgaagcaaaatccaaagtctaccgcgctgctgcccctaaactggtgacaggtgcaattgttacccccacgcgcctgatgcttcccaacaagcagcatctgaagatttgggccgcccgtcggagcttgcctgttctacctaaaatcatgcgtgcggccgctcttagagctctccgaggtaggatccagcaagcccatcaggtgctcaattacagcggccccacttttgaattagccgcgcccgtggagccatcgggatga

SEQ ID NO: 10238 - RNA, 918 nt, synthetic construct
  source 1..918: mol_type = other RNA
atgagcgcacggccaacctatccactggaccagtctcccctgttccggctcccctcaaagagacgtgccgctgaggtcctgggtatagacttgcaccaaatagagcagctggtaggcgaacgcaactatcgggtctttgtcaatgcaaagggtcgcaccattcagcatcctgtgggagagctggcgggcgtgcataagaggattgcgtccctgcttggccgacttgacgtgccctcgtatgtgcgctcagtgaaaggcgaaagttacgtgagcaacgctgggagtcacgttgggaacgggccgctgatcaaaacggatatcgcccagttttatcccgggacaaacttcagtgcagtgtacggatttttccggagagacatggggtgcgcacctgacgtcgctcacttactggctcgcctgtgttgtttccgccagcgccacctacctacaggaagctacctctccggcccactcgcctttttcgctcatagagccatgttcgatcagatctactgccttgctcaggataggggttgcgtaatgacatgttacgtggatgatatcgtcatctctggaccaggagcctcaaaggaactcttgtacagggtgcgagggctgattcgtgctgcaggtcggacctccaaagatgacaagtccaagacctttccggcacataagcctaaaactgttactggagtcatcgtgacttctgacgccttgcgtctacccaatagccggcacaaacaaattcacgaggcaagggccgcgattagagccgctggtggcgatggagaacagatgagccttagagcctctctgcgagggaggttacaagaggccggccagattgccaattggaacgttaggaatcctggcggcggcgtactcgtgagaggggttgttccagacgtgtcctga

SEQ ID NO: 10239 - RNA, 1026 nt, synthetic construct
  source 1..1026: mol_type = other RNA
atggttaagcaaatcgatcgctacccactggagaggagccccttgtacaacgcgaagagtctgaagaagatctcgtgtctgctaagcctgtctagcttgaaggtgaacaaaaatgacagatccaaacccatgctccagaagctgtataagcttacaccgactgacctggacaattttgctgcccagcagaactatactataaaggagctgattgacaaaaaggggaagagtcggtcaaccgaaatccccgcgatcgatctgaagtggctccattacagactggagcacttgctgaaaaaaattgagccacctccttaccttttctcagcaattaaaggacggagctgcaaggataacgctagaatgcatgccaccaatacgcagctgttcaagattgacatcaaaaccttctacccaaacatcaacttcgggaaggtctataatttttatcggcacatcctccattgtgaacaccacattgccacaatcctgacaaaaatttcaacgtacaatggccatttgccaaccggttcccccttatcacccattttatccttttacgcctgtaagccgatgtttgatgaaatttatcagcttgctctcgaacacaattgcgtcatgacactatacgttgatgacatctgcgtgtccggagataaagctaccaaagctctgctgtggaagatcaaacagataatacataggtacgggctcaggtatcacaaggtgaaattttacttccagaaacagccaaaaaccgtgaccggcgtcatagtaacagagaacagcattaagctccctaaccgccgtcaccaggcaattactgaacgaataacctatatccagtctccttctatcactgcaaaggagaaacgacaagccaataattctctgctcggccagcttaacgaggcaatgcaattagagcctaaactggccaagacaaaagccttgctaatccagcaaggtgtgcttaagccccacatgtccctccctcgcagtaacagcaagagaaagactaaatga

SEQ ID NO: 10240 - RNA, 954 nt, synthetic construct
  source 1..954: mol_type = other RNA
atgacctcaaagtacagcctcagtcaatctccgctctttaaattgaagtctaaaaagaagctggcagatttactgggtcagtcactgggcgatttacagtccctggccaaatcgaacgataactataacgtctataccctaagtcctaagagcaagctagaccacccctactttctcagaaaggagcgacaggtgcaggaggtgcggcctcatctgaagaatgtacacgagcgcatcttgaatctgctgaaaagagtacaaacccctgactacctgcactctgcaacaaaaggaaaatcctaccgtagcaatgctgaagcgcatttaagcaaggacgtcatttacacagtcgatattaaatccttctacgagtcagtgacgttcggcaggatataccatttctttcactccacacttaaatgttcccccgacatatcccacctgcttaccaggttgtgcgcgtataaacgcaatctgccaaccggcagttgcatctctccactgctgtctttttggactaatgttacaatgttccaggaactggacctgtttagtaagaccaacggcttgaccatgacgctctatgtggatgatctgactttcagcgggacagacctcccaaaaaagacttgcttcaagatcgacaagatcatagccagctatggatataaaccccataagcaacagttgtacatcaacaagaaggccaaaattgttacaggccttgccctctgtggagctagacttgatatccctaacaagagacgtggtaagattcgggtgctcattgaggcaattgccagggaacgcgacgcagaaaagaaagagaaactatgcaactcacttgtggggatgacttatgaagctgcccaatttaatcgagggtacgccaggctgatcgctaaacagatccggaagaagtgtccctgtactcggcagcagattaatctctga

SEQ ID NO: 10241 - RNA, 954 nt, synthetic construct
  source 1..954: mol_type = other RNA
atgaaaaccaaatactccctgtcccaatcacctttttacaagctctccacgaagaagaaactcgctcaattactggggcaaccactggctgatctgcaggccttggcgaagtcaaacggtaattacaacgtctataccctgctgcccaaaagcaagctcagccatccctattttgtgaagaaagagagacaggtccaggaagtgcgcccacatcttaaaaccgttcacactagaattcttaacctactcaagcgtattaagacccctacatacttgcactcagctacgaagggtaagtcttacaaaactaatgctgagtcgcatctgaataggaatgccctttacaaggtcgacatcaaatctttctatgagagcataagtttcggcagaatctatcacttcttccacgaaatcatgaagtgcaacgaagacgtggcccatctcttgacccgactgtgtgcatatcagcgaaatttaccaacaggcagctgcattagccctctcctgagttactggaccaacgtaacaatgttcgacgacctctacatatttagtagggcacacggcctgactatgacactgtatgtggacgatcttactttctccggaaacgagatttctaaaaggacctgttttgagatcgacaaaattatagccggatatgggtacaaaccgcataagcagaaacagtactcaaccaagaaaactaaaatcgttacagggttggcactttgcaatgatcgcctggatatccccaataaacggaggggcaagatcagagtgttgctggaggccatatcccaagaaaaggatgccgcgaagaaggagaagttatgcaactctctagtaggaatgacttatgaagcagctcagtttaacctgcgctacgcccagatcattgcaaaaaaggtgcggaagaagtgtccctgtgcccggcagcacatcacaatttga

SEQ ID NO: 10242 - RNA, 966 nt, synthetic construct
  source 1..966: mol_type = other RNA
atgtctagggaccggtacgccatcgaccagtctccgctgttcaaactaaagaccaagaaaaagctcgcaacactgctcgactccagcgtgagggaattacaggcattatctgtcagcagtgatagctatagagtgtttgacttgcccgctgagtccctggttcagcaccccctgtttgcccgaaaatcaagaaagattcagcagctgaaacctgaactggatgcgatccacaggactcttcataagtacctcagccgcatcaacgtgcctgactacctgcatagcgctgtgaaatgtaagagctacgcaacaaacgccaagactcactccggctgtctctatctgtatcgtgtggatatcaaaaagttttacgagtccgtgaactggagaacggtctaccggttcttttataaaaccctggactgcgctccagatgtatccgccctcctaaccaatatctgctgctacgaggacaagctgcctacgggtagttgcctgagtccaattctttccttctttgtgaaccaagagatgttcgatgaactttatgagtacgccagtcagcgggatttaaccatgaccgcctatgtggacgacattgttttctcaggacgcgaatttcaccgcattaatgcgcacagcatccgagggataatcaattcttatgggtatgagtgtcataaagagcggatatgtcccccacgcaaatcaaagattgtcactggcctgtctgttacccgtacaggcgtagccataccccataagagaatggctaaggccagggtccttttgcaagaattggccaaaaggatgcggcagtcacataaggaaaagctctgtgcatcgctcacaggtatgatcactgagatgtctcaattcgatcgagcaaaagctaaatacctggctactctgggaaagaagtactgcagaacaattcagaatattcacttcaagttgtgcaaatga

SEQ ID NO: 10243 - RNA, 906 nt, synthetic construct
  source 1..906: mol_type = other RNA
atgcagaagaaaagacaggggaattatccactgaatcagtcccccctttataaactatgtaacaagcggaaccttgcagctgagttcaacctgacactgcgcgagctggactccttactcaaacgccaaaacaattaccgggcttttttcctgacccaaggtgaaaaaaagcggccagttgaagcgcccaagcccatcatcgaacgcgtgcacaggagactgtttcagctcctcacgcgtatcaccccgcctgagtacctgcatagtggagttcgtgggaggtcctacgtatcgaatgccgagcagcataggaaaaaccctgtgctgtacaagttagatatcgtgaagttctatcccagcacaaagcaatggcacgcctttgaattctttaggtccactatgaagtgtagcagagatgtcgccggccttttagctaaaattgtcactgtagatggacacctgcctactggcagttgcctctctcagataatggcattctacgcacactttgatatgtttgaggcattgtatgggctcgccacatcttacaacctggtgatgacatgctacgtcgacgacattgtcttcagcggaaataagattcccaaatctttccagctcgaagccaaaaaaataatacagagctcaggcttgctctcacatccacgcaaggagaaattgttttttggtgagaagcctcggattgtcaccggcgtggtgatttcccagtctcagctgaaaattccgaatagacaacacctgatgatcaaggaggctctattcgaattgccaacccttgtggccgactcacctgagcgagagaagctgtataggcaggtggttggccgaatcgttagcgcgagtcagatcgaaccaaagttcttcaagcataagaaagtgaagtga

SEQ ID NO: 10244 - RNA, 924 nt, synthetic construct
  source 1..924: mol_type = other RNA
atgaaaaaggaggagaagaaaaggggcaattatgccctgaatcagtcccctctctttaagctacgctctcagaggagactggcccaactgctgcgtacccctcttaatgatatctatgggttgctgaacactggtaacaactacagagtgtttccacagggaaaccggacttgccatgaccccaagccaaagatgaaaggcatacataaacgcctccagattcttctgaatcgcattgctccccccgagtacttgcattcagctacgaaaggtcggagctacgtcaccaacgctgccgcgcacttgggcaatgacgttctccacaaactcgatatccgaaagtttttcgacagtacaacctataagcatgtccacgacttttttaagaacaccatgcagtgctccgcagacgttgctgctctcctctcccgtatcacaacatacgatgataggctgcccactgggagccctatctcgccaattctagcttacttcgcacacaaatctctgttcgaccagataaatcaagaggccacggccaccaacgtgatgatgacttgttatgtagatgacctgtccttctcaggctctaccgtgccgaaagcagtcctgagaaaggcgaaaaaagggattattcagagaggacttgagtaccataaggaaaagcggttccagaagggagacacaaaaatcgtgacaggagtggccttacgcgacgagcaaatgttactgcccaataagagacacaaaaagattcacgaagaaaaacaaaggagtcttgagatcgatgatgccaagaagaagcgggaaatcattcacaaattgataagccagactggcgaggccgcacgaatcgaacctagccagttcgaacctctgaagcaggcactgatgcaggtgaggcggaacttaccaaagccgtga

SEQ ID NO: 10245 - RNA, 1068 nt, synthetic construct
  source 1..1068: mol_type = other RNA
atggcaaagaccctcaagctccacgaaagtccactgtacaggctgacaagtaagaagaaactggccgcccttttcggagtgaaagtggccgatattaaatttctgaggaagctcgacgggaattatagagtgtggcccctaaagcagaaacaccaagatgtgctggccggcatgcccgtaagcgataaagtgcggatggtgcagcagcctaagcctactctggatgcctttcagcggcgtcttgctaagttcctgggcgctatcgaaaaacctgactatgtgtactcggcaacaaaaaagcgctcttacctcgagaacgctctggtccatcgccacagtcagccggctttgaaggtggatatcagatctttctatccttctgtgaagcgcagggccgtcaaatctttctttgaggaacagttgggctgtgcagaggacgttgcacatgtacttagcgagttgtgttgccatgaaggcaagctaccaaccgggtccgcgctgtcccctgtcttaagctacttctcatgcgcccccatgttcgccaggatcgcagctctggccgacgccaaggggttacgatttaccctgtacgttgatgacatggtttttagtgggaccggtctggacgacaaattcttggctcaagtactgaacgagctcaatcgggaaggatatagcggacacaaagtccgattttataaggccaggcggccgaaagttattactggtgcggtcgtctggccatcacgtgtcgatgtgccccacaagagacgatggaagatgaggctctatgagcgtgctcttaaggtggccaaacctgaggacaaggcgatcctgggacgcgcgctgttagggcagtacagagagtccagccggataaacccatccttcaaggtggcagctagcagactccaaaaatttatggacgatatgggaggtaagacgaaggcagccaaaccccggaaacgacccaggggcagatcctcctactcactattccttagccgcatttcacggttgagagctgaagtggccgctgttcgcacagtagcaggctctgccccatga

SEQ ID NO: 10246 - RNA, 1077 nt, synthetic construct
  source 1..1077: mol_type = other RNA
atggtaaaaaactcaggatatagcatcgatcagtccccactatttaggctctccagcaagaaaaagttagctgggctactcggcgtgtctgtcaagtacctccacagcattctgacccttgacaactatagaatctgggaggcgccccaaaagtaccaggacattctggctgggtttcctcctccatctaaaacacgcaaaattcaggagcccaagcagttgttgctccgcctccacaagaagttatcaattttcctgtcaaggatcaagaaacctgacttcgtttattcggctacaaagggtaggtcttacgtcgataatgcccgggaacacatgaatttcggcagagcaatcaaaatcgacatcaaggacttttaccccagtgtaaggcgaaaactggtgcgcgattttttcattaacgacatgcaatgcgcacccgacatcgcctatgtgctgtcactgctgtgttgtgtgaaggattccctgccgactggatcccctctgagcccagtgttgtcatacttcgcctgtagtcgcctgttttgcaaaatcgcccatatggctgccgttaagaatctgaagttcaccctttacgtggatgatatggtgttctctggcgcgaatgccacacggagcttctgctaccaggttgtcaaggaacttgcttataatggtttcataggtcataagatcacaaggttttccagcagacaggtgaaggtgatcactggagtggccgtatggcctcacaaaatagggataccccataaaaggcagaaacgcattcggttctttgagcgtgcatttaaactgaacaacaatccggatgagattaagattttgggcgggaccctgatcggccaatatcgagaggccgaacggctccagcccggatctagcatgcgagcaagaccaatccaggaacggcttaacctcattaatttgcagtgcgtttccgtcagtccagtcactaaaaaacgtcggagacgtagattaagcagtaagctttctaagggcatcatagacacgctgcaaacccagaagaacaaaaagaaaaacgacatttccagtgagtga

SEQ ID NO: 10247 - RNA, 1065 nt, synthetic construct
  source 1..1065: mol_type = other RNA
atgatgcacagcctctgctatccactagatcagagccccctttacatggctggcagtaaagtacggctgtgtgagttgctgggcatcaccaccaaggatctgaggctcttgctggctctcgagaactaccgggagtggaccgcaaagcagaagctggccgacaaactcgccaacctcccggcgaagtcccgaaacattgaggagcctaaaccactgctgcgcctcctgcacaaacgcatagcgttgttacttgacaaaatcgaaaagcccgatttcctatactctgcacgcaagggctgttcatatttttccaacgctttacagcatcagaggtcagagggggcggtccgtgttgacattaagtctttttatccctccgttcgacagcgcatggtgaaagaattctttgagagtcaaatgcggatgcctgccgacgtagcacatactcttgccaagctctgctgtcacgatgggaaactacctactggctctcctctttcaccaatcctgtcctacttcgcctgcagcccctttttcagtcgggttgccgctatcgctgaccggctgggattgcagttcacactttacgttgatgatatggtctttagcgggaaaggggctaatagagctctggccgaccagattaaacgcgaactggcgggcgtggccctgattggacacaaagtctcgtatttcccagcaggaggcgccaaggtgatcaccggggcagctgtgtttcccgacagaattgaagtgccgttcaagcgacaacgcagaatcaggaagttcgaggaagcctttgccaagacgacaaatgtggcaactaggggagcgggtacaccttgggcagcttggggccctggagcaggaagacctggtccaggtccacgtgctaggcccgtggaggtgagattggcagccctggaggcacgtacaccggaaatccacggcaaggccaatgccaagaggcgaaagaaacccgtcgggaaatctataatgagagaaatagccagaaaggccgccgtgctgcgggagcataggttagaagctgacgtctgcagctga

SEQ ID NO: 10248 - RNA, 942 nt, synthetic construct
  source 1..942: mol_type = other RNA
atggtcgagcctcgaacatatccgctgcaacaatctccattatataggctgacctctaagaagagactggccttactgctgggtatctcagcctccgagctgaagctgctgtgtgatctccaagattacaactttaaaagatgggaactcggtcagcgcgagagagataaactgatcggtctgcccgctaaggcgaaaaaaaggagtattcagcagcccaaaaccgccttgcatgccgtgcacaagcgtattgccctcttgttgggccggatagaaaaacccgctttcgtgtattctgccacaaaacggaggtcctacgttgataatgctatccagcaccagagagacgaaccatgcgtgaaagtggacgtgaaggagttttacagacatgtgaagttcggacgcgtgaggcgattcttcctagagaatcttcagtgcgccgacgacgtggcacatgttctagcgatcctgtgttgtgtcgacggggccttggcaactgggagtgcggtgagccctgtgctctcgtattttgcctgcgcttccatgttcgccgagatcgaggactttgctcagcggcgaaggctggttttcacactctatgtcgacgatatggtcttctcaggagctgctgctaaccgggctttcgcagatggcgtaagataccttctcaagggaaaggggttcgtcggccacaaagtcacctgctaccgcgcccacgacgttaaggtggtcacgggcgtagcagtacgagccggctttgtggatctcccttttagccggcaggggcggatacgtcgcactgaagtggcatttgcgaagagcaccgacccaaacgagctgcgcattttaggaagagcccttctgggacagtacagggaggcagaaaggatccgtcctggcattaaggcaaaggcagctcccgttgaagcccggcttcgctga

SEQ ID NO: 10249 - RNA, 1119 nt, synthetic construct
  source 1..1119: mol_type = other RNA
atggctaatgcccgtgcataccctctgacgagctcgcccttttacagactagcttcaaaacagaaactggccgctattctgggcgtgagtctcagagatctccggctgcttctgaagcagccagacaactatcgcctctgggatacaagacgccgacgtcgggacgaactggtggggatcccacacaaagctcgagccattcagcagcccaagcctctgctggcgatcatccacaaaagattggcaattctgatcggccggatcgagaaacctgactatgtgtactctgccaccaaggcccggagctacttcgataacgccaggcctcatgccattggggaacccacggtcaagatagatatcaagaacttctacagtaacgttaccaggcggttcgttcgggatttcttcgagcgtcgcttacagtgttcccccgacgtcgcacacgtgctgaccgaactgtgctgtatcacaaccgcatcaagttcagcgctcccaaccgggtccgctgtatctccggtgctgagtttctttgcctgctctgagatgtttagaagaattgcggagatagctaaggaccatggtttgattttcactctttacgtggatgacatggtcttctccggctccaaggcaaacagacatttcacttccaaggtggtgcacgaattggccaaaaatggatttgtcggccataaaatcacacactttcggggggatgccactaaagtggttaccggagtagcggtatctgctggccgcgtggaccttccgtttcggaggcaaagaaaaatccgccagtttgaggaggccttttgggcagccacaaatcctgaggacatatcactgctcggtgctaccctcctcggccaatatcgagaagctgagcgcattaagccaggtactaagcttcgcgcattggcagttgccgcccgactggaaaagcttgggctatccaacggactgcctccatctgtgaagaaaaggaggggatatcccggaaagaggttagatgcaaagcgattcgacaggttgaggagcgctgtcagcctaaatcccagcaccactagcggaggtccagagacattagttaatacaggcgtcgtgatggccgcttga

SEQ ID NO: 10250 - RNA, 1107 nt, synthetic construct
  source 1..1107: mol_type = other RNA
atgaaggcccccaaacgatacccctatcaccagagccccctttacgctttaacctccaagaggaggctcgccgatatcctgggtgtgccactgaaggacctggttttcctggcctctcttaaagaccataattaccaggtttggccgctgaaacagaaacgtagagatcagctcgcgggcatcaagcctcctgaaaaatcccgatttgtccagcagcccatgcccttgatgaggctacttcacgatcgtatcgcctcacttctcgggaagattgagaaaccgcagttcgtgttctccgcaactaagggacgcagttatctggacaatgccctgcagcacagggacaacatcgcgcagccagcgttcaaggtcgatataagaagcttctaccctgccgtgaaatcacaatgggttcgccgcttcttcgaggtcgacatgaaatgtgcaccagatgtggcccggtttctcgcccggctgtgctgtgtcaacggagcattgccgacaggcagtccaatatcccctacacttagctactttgcttgcgctccaatttttcgatggatggcagaatttgccgagtccaatggcttggtgttcacactctatgtggacgacatgttcttttctggtgctaaggctagtaaggacctctcaaagctggtgctgggtcatctggccgcgaacgggttccgaggccacaaagttgctcattttagagccggccaaccccgtgtaatcactggcgctgccatcagccaggacggagtctcgatcccctttaagcggcaaatgcggattcgcctgtacgagagagccttcgcatctacaaacgaccctgaggcaattcaaacgttaggaaaagctctgttgggacaatatagggaaggggaaaggctgcagagggggagtagagagagggccaagcctatacaggatcgcatggatgctattaacgcagtacggtttgaggaattaactcaggtgcaaccaaaacggaagaagagagggcccctaagcaccgctgcaatgaaaaatcacgtgcagaagctcagagagcggcgctctggccagttgcatcctgtgaccgataccccacagtggcagtga

SEQ ID NO: 10251 - RNA, 969 nt, synthetic construct
  source 1..969: mol_type = other RNA
atgatctccaaaaagcagtacaataaagaccaatctccactgtactctataaaaagtaagagacggctagccaggattctggaaacagacgctaaaaccattatccgcctggccagtgacacttcaaagcactataaactgtgggaaaccaagcagaagcccagagataaaatctgcaacatcacgcacacacctagaaaaatccaggagccaaaagaggacctgctgaagatccataaaaagattgctaagttcctgagcaggatcaaaaaggaggaattcgtatatagtgcaacaaaagggaggtcgtacctcaataatgctgaattccataaggaccgtattcatgagcctagctttaaggtcgatattgagaagttctacccttctgtcaaaattaagaaggtgcacaacttctttcagaacgaaatgaaatgcgcaccagatatagcccgcttgctcgccaaaatctgctgtatccacggcgcgctacctaccggatcccccatctccccgactctgagctattttgcatgtaaggatatgttcagctggattggcaatcttgccaggtcaaataatctctgttttagcctgtatgttgacgatatgtttttctccggggaggcagctagccaagagctgagaaacaaagtgataacacacctgaaaaagaatgacttgcgtggacacaagatttcccatttttcagccaacaagactcgggtgattacaggagtggctatcacgcccaaaggccttagaattaccaacaagcgacataagaagatacggatctacagtaacgccttcttccgctcaaaatctcccgataatatccagaccttagggaagactttacttggtcagtaccgggaagcgagccgagttgagccacacctcttgcaacgcaccggtaaggtgcagtctaggatggacctctttaaggataagtcccagaacatgtga

SEQ ID NO: 10252 - RNA, 1131 nt, synthetic construct
  source 1..1131: mol_type = other RNA
atgaggccactcggccggttccttttcatgctgcagggtgaacaagagatggttcggaaaaaggaggagaagaggtacagcattacctctagtcccctgtatggcctctctagcaaaaagaaattcgccgaacttctcaagatcgatctggccgacctgagatttctggccaagttcggggattccaactttaaggtatggtccactgcccagaagttggtggatgaagtggcagggctgcctgccaaaaaatccagggtcgtacagcagcccaaaattgtgctctcagtggtccaccggcggatcgctgagtatttatcgcgcatcgagcgtcctgaatttcttcacagtgctacaaaaggaagatcatacctgaccaatgccatggtacatgcttggaacatgccggggtgcaagatagacatcaaggagttttacccatctgtgaaaaggaatcttgttaagtcattctttgagaatcgcctgaaatgtacacatgacgtggcgagcttcgctgctgacctttgcacctacaatggcgccttgcccacgggcagcgctgtttctccaatactgagctttttcgcctgccttgagatgttcgaacggattgatctgctcgcacgccaaagagatctgagattttctctatatgtggacgacatgttcttctccggtgacaaggcagacaaggggatggccaagtcggtcgtggatctgttgtcccgccatggatttgtggggcacaaagttgtgtgttttagtgctaacgaaaccaaactaattacaggagtcgctatcaacggctgtgaaacttccatcccaaacgcacgacaaaataagatgaggttgttctcacgtgcattacgccgagagcgcaaccgagaaagagcaattctcctggcccaggcgctggttggtcagtttagggaggccgagcggctacagcctggaacaaaagcgagggcactgcccttcgaacgacgcctcataaagctcaagggcgcagagaagaaaactgtcagcgtcgtgcgtagaagaagacggaggagtcgaccgaaagtcttgacgagcaccctgctgagggccattgccttaatgcgggcggctcctaagatcgtgaatgtgtga

SEQ ID NO: 10253 - RNA, 954 nt, synthetic construct
  source 1..954: mol_type = other RNA
atgcccaatgggtactccattaaccagagcaggctgttcaaattagccaacaaacgcaagctcgccggtattcttgggatcactattaaagaactgagtctgtgcgcaaataccgcaaacaactaccggctgtggtcaactaagtccaagtatccgtctaagctgcagatcctcagccacaaaccccgggatattcaggagcctattggcctgctgcgacggatacaagatagactgagtgatttattggtgagaattgaaacccctgaatatctgctaagcgcaaagaagggcggctcctatgtgaagaatgcgtccctacatatggggtttggacaggtgattcgcatcgacataaagggattctacaaaaacgcttccgaggtgttcgtgttccgttttttttggcatgacctgcaatgctctcaggacattgccagaattctcacagacctcatatgttggaatggttgccttcccacgggaagtcccgtttcaccaattatctcattttttgcataccgacctatgttcgacgaacttcacgctcttgctttagctatcaatgcagtcatgacagtttggatcgatgatatcgtgttcagcggagacaacgtaaatggcaccttgatcccaaaagcgaagatcgtgatcaagaaatctgggttgcaggggcacaagatctctgtcttcaataggggccaggcctcagtcgtaaccggagttgccatcacagctgacggccagctgcatatacctaacaagcgctataggaaaatccgggctctggagaacgagtattgtgccgcatcgaaccaagctgacagagccatatacggtaaagccctgatcggtcaatactttgaggggagccagttggatccaggcctcgcgaagaaagccaaggtcctccaggccgatatgaaatgtaagaacagcaatcacccaaggtga

SEQ ID NO: 10254 - RNA, 936 nt, synthetic construct
  source 1..936: mol_type = other RNA
atgtctaaagttctgaggaaatcatacccagccgctcaatcacctctgtttcgtctcagaagcaaagcccgattggctgagctcttggacgagactcccagacgggtcagagaactgatcacagacaagaattattgcgagtggttcaccaaagcaaagtatcccgactctacacacccagctctggtgcataaaccccgtgcaattcagcagccgctaggtgctttagatatggcgcaaaggcgactcaactcactactgtctcggattgaacttcccgattatctccacagtgctagaaaggggagatcttaccggaccaatgcagccgcccattccagtgctggacgagcgataaaggttgacatacgccaattttaccggagcatcaacgacagttacatccatgcattctttcgggacgtcatggaatgttctcctgacgtgacccacatcttgacagagttagcatcatttgaacgatatctgcctactggaagcagcctcagcccaatcgtctccttcttcgcctattggcccatgttcgataagctgaactccgttgccagtagcgtaggcgctcagatgacagtgtatgtggacgatgtggtgattagcggtcctggcgtctcggggtcacttattcctatttgcaagcgcataatgaaggatcacgggctgaggggccataaagtggcttactaccactccggcaagactagggtggtgaccggggttgccgtctctcccagaggactgtccattccaaataaaaggctgatgaagatccgggcacttcgccaggagatggatgccgccgtagatccggcaaccaaggccttgtacaaacaggccgtgctgggccagcttagggaaggaagtccactcgacccttcctttcgcacgtactcccaggccatcgagcgcatggcgtga

SEQ ID NO: 10255 - RNA, 954 nt, synthetic construct
  source 1..954: mol_type = other RNA
atgagtaccgctaaaggataccagctggatcagagccccttatataagctagagtctaagcgaaagctcgcaaagctcctgttctgggacctttcgaggttacaagctctcgccaatagaactgacaattaccgttcaaaaaagaccatgcatgcaaacaaggaaaggagcttagaggttccaaaacctgctctagaaaacgtgcaacgccggatataccagctgttggatcggattgagaagccagactacctgcacagcggacggaagcagcggtcatacatcactaacgcccaagtccatgccggtgccgtctggctgatcaaattggacatcaaaaagttctacgcagccgtgagctcagcgagggtgtaccgattttttcaggacgtgatgaggtgcagccccgatgtcgcctcccttttggccaaactgtgcacagcaaggggccacctggccatcgggtctagagtgtctcagctgctggctttctttagtgctaaacctatgtttgacgagctgcacgccagagccctggagtattccatcaaggacacttactatgtggacgatctgacctggtctggcacccgggcaacagctggctttctgtgggaagtaaagaagattgtacaccgccatggattcgagtatcatagagccaggctgtatgcgccaaataacccgaaacttgtcacaggggtgcagatcattggggatcggattgctgttcccccctatcgcgatagagaactctgggatgctatacgcacactgaagaagccttccgcctgtacgaccttgaaagttgcagagactcttttgtccaaagctgccgcgtatgcacaggtggaagaccgtttccagctccaagtccgccagctcagagcgctccgagcatccatgaaacttaccgccagtacggaccacattgatggccctcagggtgtgtga

SEQ ID NO: 10256 - RNA, 915 nt, synthetic construct
  source 1..915: mol_type = other RNA
atgcccgcttcacgatcttacccgattaatgaaagccccctgtacaagatccgttctcggcggaggcttgctgcagtcctgttttccaatctgcctaagttggaggcccttgccaaccagacagataactacagacgctttgatgtggtttacgctggaaaaaaacgatcagtggaactccccaagccggccttagcccgcttgcatcggaggatattccagatcctgaattgcatcgaaaagcctgactacctgcacagtggctgcaaacagagaagctacatcaccaatgcacgcgtgcatgttggcttggtccccctcgtgaagctcgatatcaaaaagttttatgcctccgtgtccagtgcgcacgtctatcgcttctttaactccggtctacagtgctccccagacgtaagtggccttctggcaaggctctgtactgccaacgggcatctgcctatcggtagctctgctagccagctgctcgcttttttttctgccaagccaatgttcgacgaactccaccggcactcagtgcgccacgaggttagggacagctactatgtagacgatctgacttggtcaggggtaaatgcgacccctcggttcctttgggcagccaagcagattgttcacagacatggattccgttatcattcggatagagtgtataccgctagtcagcccaaaattgtcaccggcgtgctgatagctggagacaggatcgctgtgcagccaagacgggagctggagctgtggaacacgattaatacactatgtatgcaagatccagccaagaggttagagacaattaacagcttgattgggaaagccgtggccaacgcgcagatagacgagagattcctggcacgcgtccgtcaactccgagcatataagatcaaaatgcaattatga

SEQ ID NO: 10257 - RNA, 942 nt, synthetic construct
  source 1..942: mol_type = other RNA
atgaaaagctatgcgctcaatcagtgccctctctttaagatggctagtaggcggaagcttgccagcctactgggatttgacgccggggtgcttcagactctagctaacaggaccaccaactacctgtgctttgacatcgcgcagggctccaaaaagagaagagtggaggttcccaagcgtgctttggagagagtacaccggcgcttgttcgccctcttggaacgcatagagaagcctgattatctgcactcgggaagaaagaagagaagctacattacaaacgcccaagtgcacaccggtctggccccactcgtgaaactcgacctaaagaagttctatccgtcagtggcctcctctaggatctatcggttcttcaacgaggtattactgtgctcctgtgacgttgcagctattctgactaaattgtgtaccgtggatggacatctccctactgggtcatgtatatcacagctgctggctttcttcgccgccaagccaatgtttgacgaacttcacgagtactcctttaaattaggcaatagggactcctgctacgttgacgatctgacatggagcggcagtaacgccacacccgccttcctttgggcagctaaacaaatcgttcatcgccatggctttaaataccataaagatctggtgtaccgggctgatcagcagaaggtggtcacaggagtgttaatctctgggggcgagctgacggtacaacgatctcgtgagcacgaactgtggcggagcatccacgcactgggtggtcaggatcccgccaagcgactcaaggcgattgactcacttattggcaaagtcatcgcaaatgggcagattgaaaatcgattcctcctgagggtgcaaggcctgagagcacgccgggtcatgctgatggggtctagggcagaagtcgtcagtagcttgcagcgcggatga

SEQ ID NO: 10258 - RNA, 969 nt, synthetic construct
  source 1..969: mol_type = other RNA
atggccattagaaagaaatcctatgctattcatcagtgtcctctctttaagattgcgtctcgcaagaaacttgccgcactcttaggattcgacctctcggtgctggaggggctgtcaactgctaccaataacttccggaccttcgagatcaaacaaggcattaagttacggaaggtcgaggtcccaaagcgtcgacttgaacttgtgcaccggaaggtgtttagtctgttggaaagaatagagaaaccagaatacttgcactccggcattaaagggaggagctacatcacgaatgctaaggtgcatgttggccctgtacccctggtcaaactggacttgaaaaagttctacccctccatcgatggagcacgcgtgtaccgcttcttccagcaggccctgcagtgctccccagatgtgagcggtcttctcacaaagctgtgcaccattgacggccatgttccgactgggagctgtgtgtcacaactgctagcctatttcagcgcaaaacctatgtttgatgagctccacatgctcagttcacagtggggcctgagggacacatgctacgttgacgatttgacttggagcggagaaagggctacacccgcttttttatggaatgccaaaaaggtggtgtatcgacatggttttaagtaccacaaggaccacgtgtatacagcagacgagcagaaactggtcaccggggtcatgatcgacggagatcgtatagccgtactacccagtcgagagctgaagctatggaaagacatcaatgccctcggaatgtcagaacctgtggagaggctggccgcggttaactctctgatcggtagtgtagtcgcaaacggccaaatagagccgaggtttctgcagaggttgagaagactccgggatacccgcatctctctgatccgccagcttgaagtgaacttcagccggcagccctctctgctgccatccgatagatga

SEQ ID NO: 10259 - RNA, 933 nt, synthetic construct
  source 1..933: mol_type = other RNA
atggctacccggaaaacatacgcgctggatcagtgccccctttataagatagcatcccgtaaacggctggctcaggatgtgttcaatgtagatctgccctttttggaacggcttgccgccaacgaggggaatttcagagtcttcaccattaagcagggtgacaaagataggcaggtggaagtgccaaaggtggtgctggagcgtatccaccggcgactttttaatctattagagcggatcgagaagcctgactatctgcactcaggagtgagaggccggtcctatatcagtaacgctaaagttcatgttggtgctgtcccactggtcaagctcgacctgaaaaaattttacccttcggttgacggcgcccgcgtatctcgcttctttacaggaacgatgaggtgcagccccgatgtcgccgccttgctcaccaggttatgtacttttgagaatcacgtgccgactggatcttgcgttagtcaactcctcgccttttttgcggcaaaacctcttttcgacgagctccatgctctggcggaaagcgcagggttgcgcgatagctgttacgttgacgacctgacctggtccggccatggggctacaccagcattcctctgggcagctaagcaggtggtccacagacacggcttcgcccatcacaaggacagatgtttcgcagccggcgaccgaaagctggtcactggcgtgatgctggaggggaaccgaattgccgtattgccttccaaggaattcgatctttggaagaacattcaggcgctgggaggattccagccccaagaacgtatagtggcagtgaactctctaatcgggtcagccgtggccgccggtcaaatcgagagcaggtttctgcgccgcctcttgaggttaaggagagtcagagctgcagccattgctgaagctgccctgacatga

SEQ ID NO: 10260 - RNA, 948 nt, synthetic construct
  source 1..948: mol_type = other RNA
atgaagtcccggaaaacgtatccgatcgatcaatgtccactctacaggctccagtcccgtaagaaactcgctaaggacgtattcaatctcgagctcagccacctagagtccctggccaaaaacacgtctaactaccgcatttttaaaattccaagcggtgataaagagaggcaggtcgaggtgcctaagccaatactagagaggatccatagaaggctcttcgccctgctggaacggatccacaagcctccctaccttcaatcgggagtgaaggggaggagctacattactaatgctcagctgcacgtggggcttgcccctctggttaagttggacgtgaagaaattttacccctctatcgactcagcaagagtttaccgattcttcaacacaatactgctatgtagcccagatgtaagtggtctgttaacaaagctcaccacatgcgagggacacgtgcctaccggctcatgcgtctctcagttactggcgttttttgccgcaaaacccatgttcgacgagttggattatctggcaaccaagcagtctcttcgcttcagctgctatgtggatgatatgaccttctcgggcacacttgccacaccctcactgctgtgggctgccaagcaaattgtgcactcacatggctttggatatcataaggaccgttgttatactgccgaacaggacaaacttgtgaccggcgtcatggtcactagtgaccgcatcgcaatattgccgtccagagagttcgaattatggcgcaagactcaagatttgggaaccggcgacattgaacagcggatcgccgccgtgaattccctgattgggactgttgtcgcggcgtcccagatcgaagctcgactgttgagcagactgaagcggctgaaagggatcaaagcagcttttgaacaggaggctagtaccagcagtccctctcagagatga

SEQ ID NO: 10261 - RNA, 927 nt, synthetic construct
  source 1..927: mol_type = other RNA
atgaaggtcaggaagacataccctctgcaccagagtccgctctacaggatgcagagcaggaagagactggccgccgaaattttcaacgcagacatcgacttattggagagaatcgctggccacggggataatttccgggtgttccacatcattcagggtgaaaagcgacgtcaggtggagactcctaaaccaatcctggagcggctccatcggcgactctttgtgcttttcgagcggattgagaagcctgcctacctacagagtggtgtcaaaggacgctcatatatcaccaatgcccaggagcacgttggcgctgtacccctcgtcaagctggatataaaaaaattttacccctccgtggacgccgcccgggtttataggttcttccatgaagtgatgcgctgctcacctgacgtttcagggcttctcacaaaactgtgcatttatgacagccatgtaccaacgggctcttgtgtttctcagctgctggcatactttgcgactcgccccatgtttgatgaattaagcgctctggctgagagccgaggcgtcaaatttaccctgtatgtagatgacatgaccttcagcgggaggtctgcaacccccgcttttttgtgggacgtgaagaaggttgtccactcccatggtttgcagtaccataaggataggatttatgctgcagattcccaaaaagtggtcacaggcgtgcttgtgagtgcccagggcatcgccgtgctgccatcaaaggaattcggaatctggctgcaatcgagaaacctcgggagtggagacttagctgagagacgcgccgcaatagagtccctgcttggaagcgtgatagcggccggccaaattgaaaaacgcttgctatccagagtgcggggactgagaatcctgcacgccgatgcgctccgttctgcagggtga

SEQ ID NO: 10262 - RNA, 1008 nt, synthetic construct
  source 1..1008: mol_type = other RNA
atgaaacggccctatctctcaaatcaaagcccactctattgcctggaaagcagaaaaagattggcaggggagattttagggctgtcgctccctaagctcgaaggtctggctgcccgtgcgaacaactaccgcgagtgtacccgagttactggcggaaaacagcggaccgtgcacgtgccaatgccactgctcctcgcggtacataggagactggccgtcctgctgaacaggattgctgtcccccattatcttcagagcggacagacccatcgcagccacctcaccaatgccagagcccacgagacagcccggaatatcgccaagctggacatcagacacttttacccctccatcactaaggacagagtctggcacctgttcgtggatggcatgttgtgtagtcgtgatgtggcttcactcctggctagactgttcacacaccaggggtctgcccccataggctccccagtttcccaggttttggccttccacgtggtgcggccgatgcttgacgagctgcaagagcttgcaagccgacacaggctgaggttcacatgctacgtcgacgatctcactttctctggggatggggccgaccatggctttcttgctctggccggagatgtggcgcgcaggcatggttttctacctcatgcagaagcctgctacggccctggagaggacaagttagtgaccggagtaatgctgacacgcgacggtctgagggtacctgcaccccagttgcgacgcattgacgctgcccgccaggagctactcttagccgaaggcaacgaatctcggagggtcctattaagccgacttatcggccacctggctgccgctgcgagtgttgatgactcatttcgtccggagttgtctagtcggtgttttgctgctaggaagctggccgcagcattgcctgcacgcccatctccatcagattccaaagtggcaagtgtggtgccccggcttcggcctatgagactgtcctatggtgtcggaacgtga

SEQ ID NO: 10263 - RNA, 924 nt, synthetic construct
  source 1..924: mol_type = other RNA
atgtcctatgcatttcaccagtctcccctgtacgtgatgcgttccaggcgtaggctggccgacgaaattttcggtataagcctgacagctttagagggcctggtggagaatggaaacaattacattgagtcacgccgcgtcacgggcggtaaagagcgacttgtgcgagcgcccaagcccctgttgaggcacatccaggagcgcctcgcgcagcttttgaatcgcatcgaggccccggattacttacatagcggacggaagcaaagaagccacatatctaacgctcttgcccatcaaggagcaactcgggtgctcaaactcgacattaggaaattctatccatctatcactagagcccgtgtgtggaactacttcgccggccagatgcgctgttcgccagatgtcgccgcattgctagccaagatttgctgctttgaaggtagtgcccctatcggctcccctgtgagtcaggtcctggctctccaggtcgtacggcccatgctggacgaagttgatgttttagcaagggcccatggcctgacctttacttgttatgttgatgacctgagcttttcaggggaaaaggcaacacccgcatttctctggcaaatcaagcagctgattcggaggcatgggtatcgctaccacggcggaaccgcttacgggccagatgctgagcgaagagtcacaggagtgctcctaaccgcgcaaggacctcgagtgccacctgctcacctgcagggcatacgagccgccagacacgcctttgaggctgcgaaggaggcttcagaccgggaagctaccctgtccgtactgatcgggagattggccgccgcagccgctatcgaaaaaagattcctcgcacagattggcgaccttcggcggaggcgcaggagattcagaccgcctagtttcggggggtga

SEQ ID NO: 10264 - RNA, 954 nt, synthetic construct
  source 1..954: mol_type = other RNA
atgaccgaccacccgatccatcatagtccattacacggactgagatcctctgagaggttggccagaagggacgtcctcggcctttccctcgaaagactgagcgcgctggctggggatgcctctagttaccgggcgttcatccgagtaactagcggaaagaagagggcagtgacagagcccttaggcgacctcttagccgtccacgatcggctgtacgatctcctcgatcggatagagaagcctgactacctacacagtggcgtgcgtggtcggtcacacgtgaccaatgccggcgctcacctaggggataaggcaacagttaagctggacattcgccagttttattcctctattgatgtgcctagggtatcgagattcttcgggcgccagatggcatgttctgcgccagttacggatctcctcacccggctttgcacctttcgaggtcatgtgcctatcgggagccgtatgtcccaacacctggcctattttgctgctcggcccatgttggaggatctgaggagattgagcgagcgccagggcgtggtattcacttgttacgtggatgacctgagcttctcaggaactgccgccacacccagtttcctgtggcaggtgaagaggcttgtgcatcatcaccgttttggctatcataacggatgctgctatcgcgctggcgaatcacgaatcataacgggggtcgtggtgaccggagagaaactggctgttttgcgggaacaagctgagcgaattcgccaggacgtgcgggacatggacaaattgacagtcgacgaccaaagaagggccctgcagaggatgatcggtaggactgcagccgcagcaagcattgatctggaataccgaaaagtcatgaaacagctggttgccagaagagctcgccttaaatccgccccaccttcaccctgtatggtccgcccatttgacgaagtttga

SEQ ID NO: 10265 - RNA, 1014 nt, synthetic construct
  source 1..1014: mol_type = other RNA
atggcccaaagcggtaatcagaccgagcttgaacagtcaccattgtttggaatctccgacccacgcgaactggcagagctcgtggcaacacctctgccttcactgtggaggatagcgagggcccgagacaactacacggccctgcagatggaaactgggggaaagctgagaactgtaaaccgtccctgtagagccttgggcgctgtccagcgcagaattcagcatctcctgagttttattcctctacccgattatctccacagtggagtgcctgggcggtccaacctgacaaatgcaaccgttcaccgtgacggcgcatggctgtgtcaaattgatttgaaggcgttcttcgtgcaggtgactgacgccaaagtctttcatttcttctggcagcgaatgcagtgcgagccagaaattgccacccttctgaccaggctaaataccacaaatggccatgttccgctgggcggccactgcagtctccagctagctttcttagtggcacagcctctgctggatgaccttgacagaaccgcccgagaggaggacatcagattttctacctacgttgatgacctctccttctctggtgccaaagcaactccatcctttctctgggccgtgaagcagataatccaccggcacggctttcgttatcatcacgatcgctgtcatcggccaggaggtagacggttagtcacaggggtgctgctgcacaagagctgcatggaggtccgcccccaacttgtacaacgaatctggacggactggagcgctatgttcaccgctcccagcgatgacgcgtcattgcggccgcttcaaggaaggttggctgtggcctcccagatcgagccaagataccgcgaggcccacgatagcatgaaagtcatgcggaagacactccgcgattcgcccgaacctgctctggctcccgcttctgtttcagcactcgccaacaggaaattagtgagggctaggctgagcacaagtgggtctgcccatttcgatacttga

SEQ ID NO: 10266 - RNA, 1059 nt, synthetic construct
  source 1..1059: mol_type = other RNA
atggcccagaaaaattacgacatcaagtatgacatcacccaatcccctctgtacaaattacggtctaagaagaagctcatctcacttctgaatctcgggtccctctcggacctcaaaagtatcatgcggaccgattccccttaccgaaaattccccatcatgtctaagggaaaattgcggccagtggaagtgcctagcagagttttgttgcccatccataaccggctgttcaggctcctgaagaaaatccatctgccgtcttatctgcattctggagtgaaaggatgttcttacctatccaatgctcgagcacaccgcgaccgcaaggaagcatatactctcgacattaagaagttttacccctcagtgaccagagcgaaagtcgttaccttttttagagagacaatgaaatgcgagccagatatttccgcaattctggccaacattactacttgtgacgatcacattccaacgggcagcagcctgagccaggtgctggcttacctaagttgcaaggagatgtttgacgccctccatgatctgagtcaggaggccggtgtcaccttcacttgctatgtcgatgatctgacgttttccggggatcgaatctcaaagaagtggatttatgatcgggtgaagcccatgattaataaattcggcatgaggagccacaaggataagcacttcagggcgggccaagtaaaagagattacaggggtgattgtagacggctgtatagttaaggtgtgtaacagaatgcaccagtcaatccacaagctgacacttcaaatcgctgagacagaagaacctctactcattgacagcttgtacgacaagcttatcgggaaactgtgcgccgctggccagatagaggaaaggtttaaacttcagcgcgtcatggccactaaaacccgtcgtaaactgttaggtccgaagttcggaagcagtagaatcaagctgaacaatggtaaccaggagatcaggaagaaattaacaccaatacttccctctatatggcgcccagtcgatcatttggacgaatcgataccttgggactga

SEQ ID NO: 10267 - RNA, 903 nt, synthetic construct
  source 1..903: mol_type = other RNA
atggtgctgaagagtaggtacgccctaaaccaatcacctcttttcaagttgcattcgaaaaagaagttggccagtcttttgcgtctggattccaaagagctcctggctctggctgcgaatcccaacaactttcataagttcaacgtggagaaaaacggtaagctgcgatccgtgcaggtgcccaagaaggatctggaggcggttcacctacggttattcaatctcttgcgccggctcgaaacccctccctacctacattctggaatcaaggggtgtagccatgtgaccaatgccctcgctcatgacggcgcagtgagcacagccaagctggacatcaaaaagtactacccgtctacaggcagagagtatgtctacaacttctttaagatttccctctgctgctctgctgatgtagctaaggtcctcagcgacctgagctgcgttgatggacacattccaactggaagcgctttaagccagctcctggcattttttgcaacccagcaaatgtttgacgaaatcgccgtccttgcgagtgactctgatatttgttttacactctatgtagacgacctgaccttctccggcacccgcgtgaatccaaacttcatatggcaggtgaagcaaatcatctcaaaatacggttacacatatcacaaagtggaatctgcccctccaaataaaacgaaaattgttactgggctggctctgactgcaaacggggccaaagttagaaattcacaccacgagaaaatccacgaactgtatgtccagtatctggatgacacgattgcaactaaagatcttgcacggcttataggcatgctgagttccgccagccaggtcaatcagagaatggccaataagctgaggaacttattggagtcaagggcctccaaatga

SEQ ID NO: 10268 - RNA, 972 nt, synthetic construct
  source 1..972: mol_type = other RNA
atgatgaagcgcgtctctaaacataaatcctatcctctaaaccagagtgcccttttcaagatcaatagcccaacaaagttggcaaagatccttcttgttagtgacatgtcagtcctctttaagctgcagaacaaaggtgaagaaaactactatttcggcaccacagggagcgggcgggatatcgaggtgccactgagccagcttcggcgcatccataataggataaacaagctcttatctcacatcagcgttcccgactacctgaacagcggcgtaaaagagcggtctaacattaaaaatgcggccgctcacgtgaacgctaaaaaactgctgaagatcgacatcacgaagtattaccaatctataacagaggagcaagtacggaagtgctttaggaaaacttttcagtgttcccctgacgtttccagcctgttggccagtttgtgctgcgtgaggggacacctgccaactggatcaacaatttcccaatcactcagtttcgccgtaaatcgccccgtcttcgactcgattaacatttactcgaacagtaagggggtgaaattcacttgttacgtggatgatctcaccttttccggcgacgacattcctcccagcgagttttgcgattatattgtgggctatatcaagaagtctagaggttacaagtgtcataagatcaggcgttataattccgaaaccgataaaccggtgactggagttatcatttcaaatggccacctgaaagtgatgaacagacatgtgaaagtcatcaattccctgtacaagtccatgaataagatgacggcaagattctcttcaaccgacaaggaattgattcactactttcaggtcctgcagggtcacctgttcagcgcaggacagataaacccccgatataagagactagggtggcatgtggtcgatatacgaaaagagttatctgtgcctgctctcaatcagaataccatgtga

SEQ ID NO: 10269 - RNA, 966 nt, synthetic construct
  source 1..966: mol_type = other RNA
atgatgtcacgtgtgaacaacaaatcctatccgctaaaccagagccctctcttcaaaatcaattcaccagccaggctcgctaaaattcttctcgtcagtgacgcttctgtgctgattaagctgaaagagaaaggggagaagaattattacttcggctctaccgataagggccgagagattgaagttcccttgtcccagctttctcgcattcatagccggatcaacaagctgttgagcaatattacccctcccgactacttgtattccggagtgaagaaaaggtccaacgtcaaaaatgccgccgttcacgcgggtaataagaaactgctgaagatagatatcgcaaagtattaccaatccataagcgaggagcaggtcttcagatgtttcaggaaggtgtttcagtgcgcccccgaagtggccagcctaatcgcctcactgtgttgtgttaaggggcatctgcctactgggtctaccatcagccagtctttatccttcgcagtgaatcggccagtgttcgataacatcaatatctactcacattccaagggcattaaatttacgtgctatgtcgacgacttaacattttcgggagatgaaattccaagtggtttttgcgactacattgtaggatacatcaaaaagaatcgcggctacaaatgccacaaaatacggcgatataacgcagagacagataaaagagtcacaggggtaatcatcagtgatggaaagttgaaggtgatgaacagacacgtgcgggaaataaactacctgtacaagaacgtgaacagtatgctgaagaagcacgcggctaccgacaaggaacttatccatttctttcagcgcctgcagggccacctttttagcgctggtcaagtaaacctccgctatagacgtctcggcgcatctgttgtccaaattaggaaatcaagtgccgtgcccgctctgaatcagaatactatgtga

SEQ ID NO: 10270 - RNA, 987 nt, synthetic construct
  source 1..987: mol_type = other RNA
atgagatatgggtggagtctgcttgccaacaacaacaaaggcgtgaagcagtatccagtgcaccagtctcctctctttaagttacgtagccacagcaaacttgcagctgtgcttggaactaaacccaagactctgaaaacagttgtacgcagagcggacaaaaattacaagttcggcaccactgagagtggccgagccatcgagataccgaagtcacaaatcctacggtatcataaccgaataaacaagctgctatgccgtattagtcctcctgactatctgatgtccggcgtgaaagggaggtcttatgtcgataatgcagctaaacacagaggagagagggctgtcgcaaaacaagatatccagaaattctaccagagcacgaccagagatattgtgtatagagggctccgtaagagattgcactgcagttccgacatcgcccagacactggccgacctctgtacagtgaagggacatatacccaccggatcccccatctctcagagcctggcgttctttgtcaacttcggcgtttttgagcacattaatcagtacgccagctcacggggactgcgcttcactttgtatgtggacgacctgacgttttccggccagaaaattccaaagaatttcctcaggtacattagcggttatttggagaagaataggggctacaaagtgcataaaaatcggacctaccacgctaccactgaaaaggaagtcaccggggtaatcctgaagcagggggggatagatgtgaagaaccggcataggcagaagattgattctatgctgcggcgcctgtcctacttttctgacgagtcacaagaatccgatgcaaagacacgggactactttcagcgactcatcggccatttatactcagccggtcaagtctcgccaggttaccgcacaaggggtaaggaaatggttgagattcgcaaagccatcggcatcgaaggacaaaaccagaataataagtga

SEQ ID NO: 10271 - RNA, 960 nt, synthetic construct
  source 1..960: mol_type = other RNA
atgaagaagaacaagagttataagatcaaccagtccccactgtacaagttatcaagccataagaagctggccgcatgtctgggccttgacaatgagaaaacactgagtaacattctgcagcacggggataataattactatgtgtccaccttgccgagtggccgggttattgaggtccccaagccccaattgaatagaattcaccggcgacttaacaaactgctaactcgcattgaggtccctgactatttaaattcaggagtgaaaggaaggagtaatgtgaagaatgcccaggatcacattggcgaactggccgtgcttaaactcgacatacagaacttctatcagtctgttacgcagcagcagatcgcgcgatgtttcgtgaaatccttcgcctgcccaaaagatgtcgccgaaaccctctctaaactgtgcgtgatccacggtcatattcctacaggatcttccatttctcaaagcctcgcttttatagtaaacaggcccgtttttgatcacatcaacatatacagcatctccaagggtattcggtttacctgttatgtagacgacctaacattctcggggcaaactatcccaaaaggcttttcatcctacatcacgtcttacctgaaaagaaatagaagctacaagtgccacaagatgcgcgtgtataaaacacttaccccaaaactcatcaccggcgcagtagttgtcggaaagctgctcaaggtcaagaacagacataggaaccagattcagaaactgttgcatagctacgattcaatggtgaaaagctacaagcctgacgataacaagctgatcaattacttccagactttgcaaggtcacctctacagcgcagctcaaatcaatcccaggtatcgccagatgggggacatcatagtgcagcgtcggtgccatcttggggtgcctgctctgaaccagaacactaagaaatga

SEQ ID NO: 10272 - RNA, 960 nt, synthetic construct
  source 1..960: mol_type = other RNA
atgaagaaaaataagtcttacaagatccaccagtcccccctgtacaagctgcggagtcataaaaaactggcatcttgccttggacttgaaaaggaacagactttgaggcgactcattaaacaaggagacaagaactattacgtttccaaactgcctgatggccgcgtaatcgaggtccctaaaccgcagttgaaccgtgtgcacagaaggattaataagctactgactcggattgaagtcccagaatatctcaattcaggcgtcaaaggtcgtagcaatgttaagaacgcaagggagcacacgggagagctgagcgtgctgaagctggacatcaaaaagttttaccctagcgtcaccgaacaacagattgctagatgttttgtcaagagcttcggttgtactaaggacgtggctgagacattaagtaaactctgcgtggtcgatggccacttacccaccggctcctcaatctctcagagtctttcgtttaccgtgaaccgaccagttttcgatcacctgaatacatatgccaaagcccgaaagatcaaatttacctgttatgtggacgatctgacttttagcgggcaggcaattcccaaggagttctgcaaatatgtgacagcgtatctcaaaagatctagggggttcaagtgccacaagatacgggtgtacaaagctatcacgccaaaatcaattaccggtgccgtcgtggtgggcaacgttctcaaggtgaagaactgccatagaaaacgcatccagaagttgctgcatttatacaactacatggtgaaaaggtacaagcctgacgatgagaatttgatcaactacttccagagacttcaggggcatctatattccgctgcccaagttaatccacgctaccggcagatgggggacataatagtacagcggcgctgtaacctcggagtacccgccctgaatcaaaacacaaagaagtga

SEQ ID NO: 10273 - RNA, 984 nt, synthetic construct
  source 1..984: mol_type = other RNA
atggaaaaacagtatcacctgaatcagagccctctctacaagctcagaagctttaaacggttagctaaaattctggactgcccccagaaatctctggagaagctcctcttacaaccgaacaataactattacacctctcacatcaaccaggaaaaaatcattaaaggctcaaagcagatcgtccagcgcaagattcaggtcccaaaaccacagcttaataggatccataagaaggtgcagaagttcctaagtaagattgagaagcccgggtatctgtttagcggagtcaaacgccgaagcaatgtgtcaaatgcactctaccatgtcgaaaccgattacatgcgtaagatggacattcaaaaatactacgagaaaacatcagccaagtatgtgtataaatgcttcgtaaataccttcagaatggctcccgatctcgccaaggtcatgacgaaattgtgcacatttaatagccacatacctactggctcctccctttcccaaaatctggcgtttttctgtaatcttcacctgttcaatcagattgagtctttctgcaaaaaaaggaagatctcattttccctgtacgtggacgatctgaccttctctgccaaacataagctgacaaaggatcttactaaccggatcgtgcacatctttaacaagaacagtgactatgttatccataaattccaggtgtacaacaaggagacgccaaagctggtgaccggcgttatcttgaagaataacataatgctggttcccaacaaattgcgagtaaagatgctgaaccacgacaaggagaaatccattataatcgataacttgagcaacgacagagatggagcaataaatttctatcagaggtttatcggtctagtgagttgtgctaaccaaatttcgcctaactacaagctgtggacaaaagaattatgtgaagagcggaagaagtacgggattcaagccgtgactggtaagaaggactga

SEQ ID NO: 10274 - RNA, 972 nt, synthetic construct
  source 1..972: mol_type = other RNA
atggagctcaaaaagtatgacatcaatcagtcaccgttgtacaagctcaataactacaagcgcctgttgaagattctggacattaaagacaaatctctgaccaagctgctcgttgctggagataataatttctacacgtcagaaattggcggacgcaaggtgcaggtgcccaagccacagttatctcggttgcataagcgactgcagaaactgttcagtagaattcagacaagacccttcctgtattcaggtgtgaaaggcaggtctaacgttgataatgcccgcgtgcacgagaagagctcgcacctcctgaaggtggacatcgcaaaatattacgagagtacgaactttaagagagtgcttaagtgctacatcaacatattcaaggtttccccagatctggccgagatcctcgcacggctgtctacctattccggccatgtccctactggaagctccatcagccaatccctgacatacttctgtaacataaaggtctttgatcaagtgatgctatattgcaaaaagagaggggtgaccttcacattatacgttgacgacctgacattcagtagccgtgtgccattaggcaacgggtttttgggaggtatcaacctcattttttccaaaaacaccgactataagctccacaagattagggcttacaaccccactaccccaaaaaaagtaacaggggtcatattgaaagggacttctctggatgtacctaacgatatccggaaacggctgaatgaatttaaaatgaagcacaggcgagtcgtccttaactacgtgaataatagcactccgtccagttacgaaaacgctattgcgcatttccagaaatttattggccttgtatcgtgtgcctcacagatcagcccctattataagctatggaccgacagcctttgcaatgagcgtagggtgaataacatccctgccgtcaatcaaaacaatcctatgccctga

SEQ ID NO: 10275 - RNA, 942 nt, synthetic construct
  source 1..942: mol_type = other RNA
atgataaagtcttacaatcttaaccagtccccgttgtatagaatcaactcccataaaaagctgtcctcagtgcttggagtgaagtcaagcagcgtgttgacaaaaatcgtgagcaagtccgataataactactacctctcaaaggtggatgacagagacattcaggtcccactgaatcagttgcgtcgcattcacaaacgaattgatagtctcctccgacggatcgaacagcccgattatctgtattctggcgtaaaagggcgctctaacgttctgaacgcccgtgtacacgacaataattacaacgtcctgaaactggacatcaaaagctactaccaaagtgtgtccaaggatcaggtcgcccggtgctttattagcgtctttaaatgctctcaagacgtggcgaagacgttatcagagatttgtacctataacaatcacatacccaccggatcaccagtgagtctctccctcagtatggctgtgaatcggcctgtcttcgaccatatccataagcattcgcattccaggaacattagattcagttgttatgtggatgatcttagcttttctggtaaagtaatcccattgagcttccgcgactacatcgtttactatctgaaaaagtcgcggggctacgaatgccacaagattagaagctacaatccttcaacacctaaaaagataactggcgttgtcttaactaaaaacggcctgaaggttatgaataggcacaggtccaccatcagttctttactcaatgaccggaaacgcatcctgaagaataacaagaaggatgacgagcttaccattaacttctatcaaaagctgatcggacacctgtttagcgcagggcagataaatggtagatataaacagctggggaggatcctagtgaacgagaggaaactatactctattcccgcttgtaacaagaagtga

SEQ ID NO: 10276 - RNA, 939 nt, synthetic construct
  source 1..939: mol_type = other RNA
atgccctatgagatcgagaattctcctctcttcaaaatcacctctattcaccggcttagcgaggtgctgcagcttcgggtgggccgattgaggcgcctggagtatctgacaggccaatttaaagagggcacaactgagagaaatggtaagcagagaaagactgaaactcctattagaacgatgtgcagggtccataacagagtgcagaagctactcagccgtatccaaatgccgaactacctccattccgggaagaggaagagatcttatctgtccaatgctgtcgcccatagtggacttatacagtccttccaggttgatattgcaaaattttacccatcctgtacatggcaccacgtctatctgtgcttcatacgccagtttcagtgttcaagcgatatcgccggaataatggccaccatcctgacctaccgcggtcatattccaactggatctcctacctctagcctcttggcttttctgtcacacaaggagatgtttgacgccttatacgagttagctcagagtcacaacctgacgatgacagtttaccaagatgacatttcgtttagtgggtctagcatttccgaatccttcaggagcgaagtaagatgtatcatcaaaaggtgcaatctggtgcctaagcgcagcaagcagcgctattgccatggtgggaggagtcccaacattaccggggtagtgctcaccagtagaggacccaaagcaccacggagcaggcacttggcgctacggcagtctatagacgaattcgatgctgcagaatcagagatcgacctccgcatctcataccaccgaatgatgggccgtctgtcagagatcgaacgagttcaaggccggctgttcgaccttaaacccaagttgaagtcccggttccgttcgcgactgaaagccatgtcccagtgtccacaggtggaatga

SEQ ID NO: 10277 - RNA, 1056 nt, synthetic construct
  source 1..1056: mol_type = other RNA
atgaagcagaaacgaaagaaatcagtgaagcgcgagcgtaaatcctacgacatctgccaatctgccctgtataataccagtacaaagagcaagctggcctccttatttagtatcggcttgcatgaactgagagaatgcataggggactaccggcagtttcagctgatacctgaacccgaccccttcaaagctgggaaactccctaaggcccgacaggttcaaaaaccttcagctagacttctggtcatccacgaacagatccttaaactactgcgctgtgtgagggtgcctgagtatatgcagttcgctttgaaagggaccagctacaagatcaacgccgagagccacctctctaagaatactgtcgctacgttggatattcggaactttttcggaagcacctccaaatccaaggtgtttaacttctttaaggaggatctgaaagcccctggagatgtagccaatttatacgctgatcttatcaccttcgagaactgcctgcccactggttcgccactttccccgttaatctctttctatgccaacaagaatctctatgaggacattaataacctggcaaaagctcataatctgaagttcacatgttacgtagacgatctcacttttagcggcgataagatctcaagcggattcatgtggcaaattgaagaggcaattgcaaaatatgggcacgtcgtggcgcgggacaagacaaagatatacaagaacggtagaccagcgcatataactggtgttattgtgcacgatggcgtcattagggtcccgaacgcccgccatcgtaaaatgcggctcatcaaggcggcaattgccagaggaaaaggaacacacgggttttctaagaaggagcttgagtacaagctcggcggcctgttgggcgaagcagcttatctggacccctcacacctacccgccgccatcgagttcaacaaaagcgttcagaggtacagtctggtggcaaccgagtataagtccaataggccagaaacgggctctgaacagccactcgacagtcccgtgaatctgccatgggactga

SEQ ID NO: 10278 - RNA, 1056 nt, synthetic construct
  source 1..1056: mol_type = other RNA
atgaggcagaagagggagaaggtggttaaaagagagcgtaagtcttacgagatctgccaatccgccctgtacaatactagcaccaagagtaagctggcgagtctgttcagcatcggaatacaagaactgaaggagtgcataggagattacagacagtttcagcttaaatctgagccagacccgtttaaagcggggaaacctcccaaagtgcggcaggtccagaagcctagtcctaggctcttagtgatccatgaacgcattctgaaattactgcggtgtgtgagggtccctgagtacatgcagttcgccctgaaggggacttcctacaaaattaacgccgaggcacacctaggtaaaaactctgtcgctacacttgacattcgcaacttcttcggatcgacgtcaaagagcaaggtctttaattttttcaaggaggccctgaaagctcccggcgatgtggctaacctctacgccgacttgatcacatttgataattgtttgccaacaggctcccccttgtcccctctgatctctttctatgccaataaatcactcttcgacgatattgacaatatcgccaaggcacacaatctggtatttacatgctatgttgatgacctgaccttttctggagacaagataagcgatggcttcatgtggcaaatcgagcagaccatcgctgcacatggccacgtcgtggcctcagacaagaccaaggtgttcaaaaacgggcgacccgcacacataactggtgtgattgtgcacgatggcctgatcagagtacccaatgcacggcatcgaaaaatgcgcctcattaaggctgcaatcacatccgggaagggcacccatggcctcagcaagaaggaacttgagtataaattgggaggtcttctgggggaagcggcttatctagacccgtcattactcccagctgccatcgaattcaacaagtcctttcagaagagcaacaccaaaactattgaacataaggccgaccacacgaacaaaaatgacaaacagagtccagatagccccattgatgttccatgggaatga

SEQ ID NO: 10279 - RNA, 1053 nt, synthetic construct
  source 1..1053: mol_type = other RNA
atgaggcagaaacgagaaaaagccgtgcgacgcgaacgtaagagctatgacattagtcagagcgcactgtataatacctcaaccaagctgaagctcgcttccctgttttctgtggagatcggagcactgaaggactgcattggcgactatagacagttcgaattgattccagaaccggatccctttaaagctggtaagccccctaaaagtcggttggtgcagaaacctgcacctcgcctgcttgctatacatgagcggatcctaaaactgctgagatgcgtgagggtcccagaatacatgcaattcgccctcaaaggaacgagctacaaaagaaacgccgaggagcatcttcacaaaaagtgtgtggctactctagacatcagaaactttttcggcagtacaagcaagtccaaggtatttaacctgttcaacaatgatctgaaggcgccaggagatgtcgcgaatatgtacgccgacctcgtcacagtggacaactgcctacccaccggaagtcccctttcgcccctgatgtctttttacgcgaacaagaacttgttcgatgatttgtctaagctggctcacgctcataaccttaccttcacctgttatgtagatgatctcacattctctggcgaaaagatctccgagtcatttctttggcaagttgagcgcgccatcgccgcgtatgggcacatcgttgcttccaataagaccaagttattccagaacggtaaaccagcccatataactggtgttgtcgtccacagcggcgctataagggtgcctaacgcccggtatcgtaaaattaggctgatcaaggccgctattgccactggcaaaaataattacgggttaactcggaaggagttggaatacaaactcgggggcctcctcggggaagcagcatacctggacccaagcaatctgcctgccgccattgagtttaataagtcatttaagcgctcctcttcacctctgccggagcacgtgcccgataatcccgcagcaacggagaaaacattcgacgacgcctccgacttaccatggaactga

SEQ ID NO: 10280 - RNA, 1116 nt, synthetic construct
  source 1..1116: mol_type = other RNA
atgaaactgagaagggagaagaaacccaaaaaagagcgaaaatcctacgacattagccagagcgcactgtacaacacttctagcaaggcgaagctggctgcaatctttagtaccgacatccaggaggtaatccgctgtataggagactatcgccgttttgaactcatcccagaactggatccattcaagctaggtaaaccaccaaaagtgagacaagtccagaagcctgctccgaaacttctggcaattcacgagagaattttgcggcttctgcggtgcgttcaggtccccaagtatatgcagttcgctctcaaggggacatcttacaagaataatgccgagatgcacctcctcggtcgatgcgtggccactttggatattaggaatttcttcgggtccacatccaagtcaaaggtttttaacttcttcaacggaccgctcaaggcccctggagatgtggcgagtctgtacgccgaccttaccacttttgatgactgtctgcctaccggtagccccttatcaccactgttgagcttttacgccaacaaagccttatttgacgacctgaacataatcgccaccgagcacggcttaacatttacatgctacgtggatgatctaactttcagcggcgagtcaatttcccggagatacctctggcaaatcgagaataccatacgtcagtatggccatgtggtcgctagtaggaagacgcggctattcaaagacgggattcccaagcacattacaggcgtagttgtccacgagggctctattagggtgcccaatgtgagatatcgcaagatgaggttgatcaaagaagccatccatggatctggcaagaaccacggactcacccgcaaggaactggaatataagcttggcggtctgctgggagaagcggcctatttggacccttcaaatctgccggctgcaatcgagtttgggaagacctcgcacaagaacttcctcaaaaccataacgtccgtgcaggaatacctggaaccccccaaacctaatgctactgacgagaaattccatcctccttggcatgaacaagagcttatcacaatgctgctgccagaacatgcaaacgatgggaatgaggccgattga

SEQ ID NO: 10281 - RNA, 1056 nt, synthetic construct
  source 1..1056: mol_type = other RNA
atgaccctgaagcgggagcgaaagacgaaaaaagagaggaagagctatgatctgtcacagtcggccctgtacctcacccgcaataaatctcgaatggccgccatccttgcaacaaccactcaaaacttaacagactgcattggcgattatcgcagatttgaaacagtgccagagaatgatcccttcaagttgggaaaccaaccaaaacctaggcaggtccagaagcctgccgccaaactcatggcaatccacgagcgcattcttaaactgctgaggtgcgtgaaggtgcctgaatacatgcagtttgcactgaaaggcacatcatacaaaaagaacgctgaagctcacatcagtggcaagtacgtggccactctcgacattcggaatttttttggctctacctcacagtccaaagtattcaactttttcaacggaccacttcgctctcccggagatatcgctaacatatatgcgcagctcacgaccattgataattgtctgcctactgggtccccactaagcccgctgctgagcttttacgcaaataaaaagctcttcgacgatttaaacgacatcgctaaagaacatgagctgactttcacctgttacgtcgatgacctcaccttcagcggcgagtgcataagtaacagattcctgtggagagtggaagaaagaatccggaagtccggccacattatcgcggctaacaagacaaggattttcagtgagacaatgccgaagcatataactggggtagttatccaggacggggggatccgtctgccatatgtgcgtcagcggaagattaggttaataaaagacgcaatctctggaaaagccaaaaatcatggttttaccaagaaggagctagagtataagttgggtgggctgctgggtgaggccgcctatttggaccctagaaatttgcccgctgccatcgagttttccaaaagcgttcggatgaattccttcaagttcttcaagctctttgactacgtcgaacttccaaagcccgcagcgcccgatgagaactttattcccccttggcaagaatga

SEQ ID NO: 10282 - RNA, 1062 nt, synthetic construct
  source 1..1062: mol_type = other RNA
atgcggcttaagcgcgtaaagaagacgaagcaggaaaagaaatcatacgaattatcccaaagcgctctctataaaaccagttcgaaatgtaagctgtccgccatcttttctctgtctgctccagacatcctcaacagtatcggagattacaaacgcttcgagatgtcccccgtgcttgaccccttcaagatcgggaccccccctaagacacgatgggtgcagaaaccaaaggggaaactgttagcaattcatgaacgcatcctaaagctcctgagatgcgtggaagtgcctgagtatatgcagtttgcgcttaagggcactagctataaaaagaatgccgaggcgcacttggctggctccatggtagcgaccttggacatttcgaattttttcggctcaactactaagtctcaggtgttcaacttctttcgggacagactgaaatgtgccggagatattgccaagatatacgctgaattagtcacctgtgacgattgcatccctaccggctctcctctgtcacctcttctgagctactacagtaataaaccactgttcgacgagctgtcctgcctggccaaaaacgccaacctgcactttacctgctacgttgacgatctaacatttagcggggcttacattggtcgaggtttcctttggcaagtcgagaagacaattaagaagtacggtcacatcactgccagcaagaaaactagactgttcggactcggggttccgaagcatatcaccggaacagttatagcagatggggctctcaaagtccccaatgtgagattcaggaaaatacgtctgatcaaactggcaatcgagggcaggattagcaaatttggcttttccgatgtgcagttgaaatataagctgggagggttgctgggcgaggcagcctatcttgacaatgactttaagtcactcgccgacgaatataatcggaagattagggaactaaacctcgcctctctggaaggcggagagacatataggagcagtacgaaaccgttggagctcgcagatgataacttcatacccccatgggagatttga

SEQ ID NO: 10283 - RNA, 1080 nt, synthetic construct
  source 1..1080: mol_type = other RNA
atgaaacccaagagagtgaagaaggcgaagcaggagaagaaatcttacgaaatctcacagagtgctctttataagactacttcacggagtaaactggccgctattctctccctctctatacatgacctcctatgttcgattggtgactataagagatttgagatgaccccaaagcccgacccgtttaaaatcggaaaaccaagcaaaaccaggtgggttcagaagccaaaaggtaagctactggcaatacacgaacgcatcctgaaactcctacggtgcgtgaaagtgccagaatatatgcagtctgctctcaaaggcacaagctacaaacgcaatgcagaacaacacctgtccgggtgcatggtggcaacccttgacatttctaacttcttccgtagcacaaagaagagccacgttttcaatttctttcgggataggttagaatgccccggggacattgccaatttttacgccgagctggtcacctgtgatgactgcatccctacaggctcacctctgtcaccattgttgtcattttatagcaacaaacccttattcgacgagctcagcgtccttgcgaaaaactccaatttgcagttcacatgttacgtggatgatctcactttttccggcagccatatcacgcatgacttcctctgggaagtacagaagattgtgaagaagcatggccacgtgacagccactaagaagacccgactgtttggggcagaagtacctaaacacattaccggaaccgtcgtcgctgaaggcgtgctgagggttccgaatgcccgttttcgaaagatccgcctgataaaactggccttggagggaaagcgggacagtttcggtctgacgaagacccaaatggagtacaaactttctggacttctgggcgaggccgcatatttggacaacgatttcaagtccctggccgatagatacaacacgactatcagggagatcaacttagctagtctgggggatggaaagtacagacccagcctgaaggctacagacctgattgatgataaattcatccctccttgggagactgagcagagttcctccaaatcttga

SEQ ID NO: 10284 - RNA, 1080 nt, synthetic construct
  source 1..1080: mol_type = other RNA
atgaaacagaagcctgtagagtcccacataaagaattacaaatcttacgccctcaaccagtgtgctatgttcaacacctctagccgaaccaggctggccgcaatccttctaaagcccctgcatcttatcatggagtccatagggagttacagcaagttcaaaaaagatccaaagcctgacccgttctcgcataaaaagccaagacgccctcggagcgtgcagaaaccaaagggggagctcttacacattcacaataggatgttacgcctgctgaagagggtggtcgtccccgactacatgcaagcggccctggctggtacaagctatcgtaagaatgccgctatgcatgttggtgggccatgcgttgcaacgttggacattagaaattttttcgtggctactaacaagtcaaaggtcttcaactttttcgagactgatctgaggtgcacaggagatatcgcctcaatttacagcgagttggtgacttgtaatgactctcttcccaccggcagcccactgtctcccctcatgtccttctatgccaataagagactgttcgacgaattggatgtgttggcccgtaataacggatttatctttacctgctacatcgatgatctaacattcagcggcaataacatcagtggttcctttctgtgggatgtagaacgcatcgtccactgttatggccatgaagtgaccgcagggaagactagactgtttaaggctggacggcccaaacacgtgaccggcgtcgtgctgtttgacaacgaggtgagtgttcctaactcaaggtataagaaactgcgcaacattaatgccgctctcgaaggccgggcaagtatgcacgatttttccgaagtagagctgttaaacatgaaagcgggagttttgggcgagattgcctacctcgatcccaaaaaggggttccttgcgagacgggcaattgacgagcttaaactccgagacttgaagatcctgggcgacggtaaactgaaaatatctacgtcacctccagcctatctctcccctggagaagtgcccccgtggcaacctctcccactggctacacccgactga

SEQ ID NO: 10285 - RNA, 1002 nt, synthetic construct
  source 1..1002: mol_type = other RNA
atgcccggcaatgctagcgccaaattgttggcccggaggtcccggagtaagagatacgatatcgatcagagccatctttttagagttggaagtcctgctcgcttatcaatggtgctgggtgtgagcctggacaaactgttggccctttcacgacgcactgataactataaattgttccagaaggaagacgtggatccctttgccagacatcataggcgccggcgcgatatacaggaaccaaaggcagccctgaagaagatacatgagcgggtggcaaagctgctgaaattcgttagagtcccaacctacctgcactccgctatcaaaggggtgtcctatcgtaccaacgcactggagcacgctgagaggggtgtgtcaattcttacgatggatatcgccgatttctatccatcaacgggggcgtcccgcgtatttaatttcttccgcgatgtcctcgaatgcgctcctgacgtgtctaaattaatggccaagctcctgacatggcgtggcgtgttagctacaggaagccctgcatctcctctcctgtcgtttcactgcaatagacccatgtttgacgagatggcggccgtggctgtcaagagcgagttcacttttacctgttatgtcgacgacgttactttctccggcgtcaacgtacgacgggggctagtttctgaaattgcttgtattgcccgccgtcacggtcaccggatcaaggaacacaaaacacgattttactctgccggccaagcagggattgttaccggggtcgtggtcgaggacggaagtgtgagtgtaccccatgagagacgactgaagggcaggaggattgagacagcaatcgatggagcgaccgacccggtagaaagactcgcgctgactgagaaacttatgggcctcgctggcgaagccgcatacctagacaaagccttcaggccatgggtggactccatcaggggaaagctcaaggtgctgagaaggagctacgcctctcggcggtga

SEQ ID NO: 10286 - RNA, 993 nt, synthetic construct
  source 1..993: mol_type = other RNA
atgcccgagtcgacccccaaaaaagtggtgcggcgtagggacgggtccgacagatacgagattgaccaatgtgccctctataaaacaggatcattgcgccgcttggccaaaatcctgctcatcgagaaatcagatctcatcgccctttctaatagacgcgatctgtacagcgtctacgatctggaagatgacgacgagttttcagataaacggggtaaggtgcggaagatacaggatcctgttgaagagctcaagaagatccagagacgggtggctaagttattacactatgtcagggtccccagatacctgcatagcgcagtgaagggagtgagctatcgcagtaacgtgaaggcacacgcccacgcagggtccaatatactaactatggacgtagccagcttttatagtagtactcgggaaagtcaagtttttaggttcttccgtgaaaccctgctctgcgccccggatgtcgcacgtatgcttaccaggctgttgacgtggcatggagtccttccaaccgggggtccagcgtccccactgctaagcttccactgcaatcgcgagatgttcgatgagatagccagggaagccgagcgagctggggtagtgttcacatgttacgttgacgacattacgttttctggcacaaacgtcaagcgaggcttcgcttccctgattgatagaatcgtgcggcgctctggctatcgaattgcagcccagaaaacacgattttaccgccctaaccaggccgctctggttactggcgctgtgatccaggacggaaaggtgtccgtacctcatgctaggcggagaaaggcgaggagaattgagattgccgcgaggagcactaaggaccctgcaaggagactcgcactgaccgaaaaattgatgggactggctggcgaagcagcctacatcgaccccgcctatcgcggttgggcttacgcggttagaggccgacttgtggctctgcggaaatctgccgcctga

SEQ ID NO: 10287 - RNA, 1014 nt, synthetic construct
  source 1..1014: mol_type = other RNA
atggccaaacgcggactctatgatataaatcagtgtgccctttacaaactggggtctaaagctcgcctggcccaaatcttgggcgtgcctaaggccagactgctcatactggttcgtcgatccgagaactacagggttttcacactaccccaggaaatttgcgaatttaccggaaaggtgcgcaaggaacggctcgtgcaagagcctaagcccgagctaaggcgggtccatgagcggattcagaggctgctgtcgcgcatccgacctcccgaatacggtcacgctgctgtgaagggacgctcctatagaactaatgcggaggcccatctcaacgggcccagaatcgccactttcgacgtgagacgtttttatccgagtacttctcggtccgcagtacggaacttcttcagcgagcaactgtgctgcgctcctgacgtcgcagatcttctggcccaattgtgttgctggcagaacgtgaaggaatccaatagttctagcgggctcccaacggggagtccgctttcaccaatcctctcactgtatgcgaataggccaatgtttgacgtgttaaacgactacgcaggccgccaccagctggtgttcacatgttacgtagatgatttgacctttagcggcgagatgctcccagcaggaatctctaagttcgtcgagaagatcgttacagccggtggccacaccctggctaccgaaaaaacaagattattccggagaaatcaggtgaaacacgtgactggggtcgtactaagcaactcccaggttaaggtcccccacgcaaggtttctgaaagctcgtgcgattgccagcgccattaccgcccatgaaacggccgatgcaaggtacagattgctgctgcagcgaaaactcgccggtcttttgggcgaggccgctttcctggacagcaggtttgctggctgggcgaatcgggcatatgctgacttacgagcagtgcaggccgaggtgcatatggctgagtcacttcacgtcgaatcatga

SEQ ID NO: 10288 - RNA, 1011 nt, synthetic construct
  source 1..1011: mol_type = other RNA
atggctaaacgggagctgtatgacataaatcagtgcgctctgtataggttgggatccaagacacgcctgagtatcctcataggggtgcccaagagcaagctcctggcactggtgaactcactggaaaactatcgcgttttcccgttaccccaggaggtgtgccaatttactgggaaggtccgcaaagagcggttggtacaagagccaaagccggagcttcgaagggtgcacgagcgtattcataaactgctcagcagagttagaccccctgagtatggccatgcggcggttaggggcaggtcctaccgatccaacgccgaggcacatatcaatggccggcgggttgctacgtttgacgtaaggcgtttttacccctctacatcactgagcgccgtccgcaatttttttgccgatcagctctgttgtgcacctgacgtggcagacatcctggcacgtctgtgttgttaccgcaatgtgaaagaagcctcatccctcctcggtcttccaaccggctctcctctcagcccactgctttcgttgtatgccaataagcctctattcgatgccctctaccactacgctggacgccacaaactggtgttcacctgctacgtcgatgacctgactttctctggagcactgcttccacgaggattaagtcagttcgtgaccaagatggtggagtcttgcggccacacactggctcaggaaaaaactagatttttcaggtcaaaccaagtgaaacatgtgaccggtattgtcatcagcgacaacgagatcaaggtaccccacgcccggttcttgaaagcccgagccatcgccagtgccattgcgaagcacgccccagctgatgtccagcagcggttactgttgcagagaaagctagcggggcttctcggggaagcagctttcctggatggcagatatgctggttgggccaacaggtcctacgtcgatctaagagcaattcaggaagaagctagagctgccgaacttcatagccctgaatga

SEQ ID NO: 10289 - RNA, 1044 nt, synthetic construct
  source 1..1044: mol_type = other RNA
atggcgaccagagggttttactcgattgaccagtgtgcactcttcaagcttggctccaagactagactcgccgaactgttacacgtccccaaatctcatttgacgaaacttgcggccggctccgacaactaccgcctgttcgagctaccacgagaggtgtgcgaatttacgggtaaagtcaccaaagccaggtgggtgcaggagcctaagaatgacctgcgccaagtgcacgaacgattacagaaattgctggccaggattaggcctccagagtacgggcatgctgctgtcaagggacggagttatcgtacaaatgccgctgcacatgtacacgccgctgtggctgcgacttttgacatacggcggttctacccatcaacacctcgtctggccgttagggatttctttctccatacactcagatgcgcctcagacgtagccgaactgttgacgaccctgtgttgctaccaggacagaactgaagaaggtgcacagtgcgggctccctacaggctcacccctttccccgatactcagcctgtatgctaaccgagccatgttcgataggctccaccggttcgctctgcaacacgagttgacctttacatgttatgtggacgatctaaccttcagcggtcccctgttaccgcgctctctgggacgctttgtacggaagactgtggacgcttatggccacagtctagcagttgagaaaaccaaagtgttcaggagggggcaagccaagcatgtgaccggagtcgtgatcgttaataacaagatcaaggtcccaaacgcccgctttaaaaaggcacgcgccatcgcagcggttattcagagaactgccagcgatgactatatgcgactgcttgccttgcagagaaagctgtctggcctccttggcgaggctgcattcctggatcccgcatttagtgattgggccagacgtagctaccgggatctgaagaaaatcaatgaagaggctgccacctctacatccggggtgggagcagcaaaggagggcactggagctgtggcgttcctgtga

SEQ ID NO: 10290 - RNA, 1023 nt, synthetic construct
  source 1..1023: mol_type = other RNA
atgctgttcatgaaaaagcagaagagctatagtatcgaccagtgcgtgctctataaggttggaagtaaaaagcggctcgctgacatcttgaatatccctctgtcgtccttgttgaaactggctaagtccaagaacaactaccgagtcttcgagctcccttttgagcagtgtgaattcacaggaaagaccaaaaacgccagggttgtccaggagccgaagaagctgctaaaggccgtacatgctaggttacaaaaactgatctctcggattgaagctccaaagtacggccacgccgccataaagggacggagctatagatctaacgcctctgaacatatctcttcagtgtacctggcgactttagacgtgcgaaagttttatccctccacgaggcaaagcctggtgcgtaattttttcgccgatcagctccggtgcgcaccagatgtggcggacatcctgaccaagctctgttgtttttttggggcaagtaagacaggaggatccgttggcctccctacagggagccccctttcaccaatattaagcctttacgcaaacaagcctatgttcgataagctgcaggggtatagtaacgacaactcactcatcttcacgtgctatgtggacgacattactttttctggcgaggcccttcccaaggacattgtgagaaaggttggcgagattgtgtactcctacgggcacactattgccgtagaaaaaaccaagatctttcgcgagaaggatacaaaacacgtcaccggtgtcgcaattaaaaataataggatctctgtcccacattccagattcaaaaaagctcgtgcgattgagaggataataagcaatactccccaggaggaactagccaaaaaaagaaccctgcagcgcaagctggctggtctgcttggcgaagcaggctttttggattcaagatacaaaccgtgggccagccgctcctacgtggatctgaaaaaactggagtatgacttcaatcaacagtcgcgccaagtggatttcaaatga

SEQ ID NO: 10291 - RNA, 1005 nt, synthetic construct
  source 1..1005: mol_type = other RNA
atgacaaaccctcctctccgtctggtcacaaagacccccaaaaagttttatccgattaatcagagtgcactatataagattggaagcaaaaagcggctcgccaagatcctggccacctcactggagaggatcttacttttatctacggccactgataactacaaaattttttgtctcccagaggaagtctgcgagttcaccaaaaaaaccaagaaatctagatgggtgcaggaacccaagcgtcccctgcggtcaattcacgaacgcatccaaaagcttttgaagtccattatctaccccgattatagccacgctgccgtgaaaggcaggtcttacagaaccaatgctgaaacacataaagatgccacccgagtggcaactttcgacctgcgaaagttctacccctccacctcaagctccagagttagggatttctgggcggagcagatgctttgcgcgcctgatgtggccgacttgcttgcgaaattgacatgtcacgaggggtgtctcccaactggttcgcctctctctcctctgctgtccctttatgctaaccgcccgatgttcgatgacctgaatgagctggccaacagccataacctcaagttcacatgctacatcgacgatctgaccttttcaggtccaataatcccaattgggctgccccggcttgtcagtaatatagtccatcgcagtggccacacactcagcgttgagaagactaaaatttttcggagcgaccagaggaagcacgtgacgggcgtggttgtgtacgggaattccttgcatgtaccttacagcagattttttaaggctagagccatccaaaatgcattcgacctggagaaaaactccatcgctaagctggctctagcacggaagctgagtggattgctaggagaagccgcctatctggacactaggtacgcagacttagctaaaaagtcttatgtagagctcaaacgaatcaacgaagaaataatgcgcgacaagctgccattctga

SEQ ID NO: 10292 - RNA, 960 nt, synthetic construct
  source 1..960: mol_type = other RNA
tacactatcgaccaatgcgctctgtacaggctcggtagcaaagcccgcttatcggccgtacttggaatcacactggattggcttctacagctcgccgagtctgaaaagaattactgtttgttcaaccttcctgaagaggtgtgcccctttaccaggcgcgtgaagaaggctagagcggtacaggcacctaaaaatggcctccgtaccgtgcatgagaggattctgcacctattacggcccatcattctgcccacgtacgcccacgctgggatcaagggaaagtcctaccggtccaacgctgctgctcacaaagattcaccccgcctggctgcatttgacatcaggaaattctatccctccacgaccgccagccgagtttattacttcttcgccgacaagatgctttgctctcctgacgtcgccaggttactgaccgcactcacttgctataagaatggcctccctactggctcaccgctgtctccgctgctgtctctgcatgctaacatgccaatgtttgatagcttggaggccctggccttgagtaacgacctggtgtttacatgttacgtcgacgatctaacattcagcggggaaaaattgccaatcggcctgccaagactcgttaaagggatagtggaaaagtacggtcacaaagtctcagaggaaaagacccgcctctatagaagacgacaggggaagcacgtgaccggcactgttctgctggatggtcggattctggtgcctaatacacggttccataaggcacgcgcaattagtgcggcgcttgcatccgagagagatccagcactgcggctcgaactcggaaggaagcttagcggcttattgggagaggccgcctttattgacgaccgttatgccaaatgggcgagtgacagctatatatccctgcgaaaattgcaggctgattttgcctgtgaggaggcatcactggattga

SEQ ID NO: 10293 - RNA, 1005 nt, synthetic construct
  source 1..1005: mol_type = other RNA
atgcagaagtctctgcccaacccacccccgactaaaaaaatcaagcggacatactccatcgaccagtccgctctctacaaaatcgcctcgatgaagcgtctggcctccctaataggcttgccccgcgggaaattactgaggattgccgggggtgcccataaatacaaaactttcgttcttcctgaggagaaatgtccctttaccggcaaggtccgcaagagccgaaaggtggaagagccaattaatgaactgcgctatatccacgagcggatccacgcacttctgtgtaaagtggatcatcctgagtacgcgcacggtgctgtcaagggacggagttatcgatctaatgcactagcccacgtggagtctcaaagtcttgccacctttgacatgcgtgaattttacccttctacgagcgagtcaagagtatatacattctgggtagagcagatgtgctgtgcaccagacctggcgaacgtgctcgctaagctgatctgctataaaggcagattggccacaggatctcctgtttcccctcttgtcagcctctatgccaataagcccatgtttgacgaactgtcaaggatagctttgagccggaacctgaagttcacctgctatatcgatgacattaccttcagtggtcagaatttgccgcgcaactttgaacagtggatagcttcaatcgtggggagatacggccatgcactgagtgagaaaaagacgaggttcttcaggagcgagcaggccaagcatattactggagccatcattaaagatgggctcgtcaccgcaccacacagcaggttccagaaaatgagactgattggaagcgctctccggcaggtgaaggattttaacctgagaaagtcgttactgagacgccaagccggcctcatcgcggaaatagcatacttagacaagtcattctccgctatggcagaatccgcgaatcaacagtttcgagatttgagggttaaggctgccacagacattgtggattga

SEQ ID NO: 10294 - RNA, 1047 nt, synthetic construct
  source 1..1047: mol_type = other RNA
atgcccagagggctgtatgaggtgacccagtgcgcgctctataagatcaattccaaggcacgcctcgcaggactgctgcatgtcagcgtgcctgtgatgttaggtatggcgtcctcacgcaagtaccaggagttcacactgaaagagaaagtttgtccattcggaggcaaatcccgtaaggcacggatggtgcagactccaaccgaagcgctgcggcctctccacgaccgtattcatgacctacttagacgctgcgcccctccaaattacgctcacgccgccgtcaaaggcaggtcttacaggactaacgctgaggcccacaagggaagttgcgtggctgccacattcgatctggaaagcttttactcctcaacctcagagacgactgtattccgattcttcgttgatcaaatgaagtgtgcacccgatattgctagtttgctggcaagactcatctgcgtagaaagggacgatagttatccatgtctccccactgggagccccctttcgccattaatctccgtgtacgccaataaacctatgttcgacaagtttgcccatctggctgagacacacgccctgagctttacgtgttacgtcgacgatctaactttctctggcttggctatgccgaagggcttggagcggatggtcaccagcgtggccaaacgctatggccacacattagctacacacaagaccatgacctttggtccttctagcgccaaacatatcaccggggtggttatctttaacggtaagatcactgtgcctaatgccagatttcggaaagctcgaaaaatacaggcagcaattaacgctgaaaatgacccgattaaaaaaattagcctcatgcaaaagctgtcgggcctgcttggagaagccgcctatctggacaacaggtactctaatctggccaagaaggctcagcatagtatgtccgaattcaggttgaactctccagcaatcaccatgtctgcgatacccgtgacgcaggaggacgcctcaaaggcagggtttgttcttacaaacgatgtccccttttga

SEQ ID NO: 10295 - RNA, 1023 nt, synthetic construct
  source 1..1023: mol_type = other RNA
atggccggctacgctcttaatcaatgtgccctgttcaaggtaggctccaaagccaaactcgcttccgtgcttttgctaaaacaaagagatctggtcgacctgagtgaagatggccagtatagacaattcaggctggaggcctcggtttgcgagtttacaggcaagcgcacgaaggcacgtgacgttgctgagccaaagaaggccctcaaacgggtccaccagcgtattggggatctgctcagccgcgtgctgctggtggaatatgcccacgccgcagtcaaaggtcggtcatacagaacgaatgctgctgctcaccagcatggcgatgagatcgccacatttgacatagaaaacttctacccctccaccacccacgcccatgtgtaccatttctttttccgagaaatgaaatgcgcagctgatgtggctcacctattggcccgacttctctgctttagagcaacccccgaagcattaggatgtctgccgaccggtagtccggcctcacctattatgtctgtgtatgctaacaagcctctgttcgacgctctccacaggctggcccaggagttgggacttgtgtttacttgctatgtggatgacctcacttttagcggaccccagatcccaccatcattaggcaggcgggttgactctatcgtcgccgcccatgcacagaggctgcatgcatccaagtctcgcgtgttccggaaagggaagccaaagcacgtaaccggagtggtcatcgcggacgggaagcttgctgtccccgatgcgagattcttcaaagcccgcagagttgagcagcggttggtggccgagacagatcctggggaacgcgcgaggttgagccgaattctgtgtggtctgctgggggaggctgcctacctggacaacaaatatgccaattgggcaaaggacagctaccggaagttagcagcggagactcgtctcgcggtagtgaccgctgcaggcacaatagcctttgctgcaacaagggccgaccctcccactggagcatga

SEQ ID NO: 10296 - RNA, 1113 nt, synthetic construct
  source 1..1113: mol_type = other RNA
atgtcagagaaccagaaacctcccgccccagccaaaccacgaaagacttacgctttaaatcagtgtgctctgtacaaagtgggctccaagaagcggttagagaaaattctcggcgtcaacgttgccgaccttatccgcctcagtgcagacgaaggcaattttcaggtgtttgaattggaggcggaagtgtgtgagtttaccggtaagacacggaaggccaggtgggtacaaaatccggtcccagagctcaaggccatcctggctcgcattaccaagttgctgagccgggtacgggtgcccgattactgccatggtgctactccgggacgctcttataggtccaacgcacaggcccacgtgggagcacagtccgtggcaacattcgacctcaaagatttttttcccacaacgacgtctaaacaagtcttccagttcttctctaaggacctggaatgcgcgccagacgttgcgggactccttacagatctctgtacacatggccacgtgctacctaccggcgcaccgacttcacccattcttgcctattgggccaataggcggctgttcgaaaccattgaccgtaggggaaaagttttgaggctgaaactgagtgtgtatgtggatgacatcaccctatcaggggatgctatcccccgatccctggccgatcaaatagaggggattgtcaagtcccacgggcacaagctgagcggccataagactaagatctttggtcctagccggccaaagcacgtcaccggcgtcgtcataaccgggcagtcgctgagagtgcctcatgccagattccacaaggcccgcgctatcagaatcgccctgtatgctgagaaagacagccgtaaaagagttctgctggctgcgaaattatgcggacttctcggggaagctgccttcttggatcccgcatacaaaagaatggcaagtgacagcgtaaagctcctagcagcagccaaggctcaggtggcccccagactgtcaaggagtataggaggcccacgtcgcaagaggggtcgatctaaccctcgcaccgttgctacaatggggggcgtgcagcttagagagcaattggatctgagcgacgcccctactaactga

SEQ ID NO: 10297 - RNA, 984 nt, synthetic construct
  source 1..984: mol_type = other RNA
atggccgctaaaaggctcaaatcataccctctcgaccagtgtgcactgtataaagttggtagcaagaaaagacttgcgaagattctggacgtagatctccccaagttggtgaggctgtctgcagaccagggtaattttcaggtctttgaaatcccagaagaggtgtgcgagttcacaggcgccaagaaaaaggcacgatgggttcagaaccctgtgccagacctgaaagcaatcctaaagcggatcgctgggctacttagccgcgtacaggtccctgattattgtcatggcgcgatgaaaggccggagctaccggtctaatgctgccgtgcacgtggaggaggaatcagccgccactttcgacctgaaagatttctttccttccaccacgagcgcacaggtgtttgctttcttccggcacaccctgcaatgtgcgccggacgtggcagggttgttaactgatctttgcacatacggcaaaatcttgcccaccggagctccgtccagtcccatcctggcttactgggccaaccggaagctgttcgacgttttggaggggcgtgggagggatctgtctctgaaactcagtgtgtatgtcgacgatgtgactttttccggagacgccattcccaggtcactccctgaacaggtggacggcatagtcagtaagcatggccagaagctgagcgcccataagacaaggatattcggaccagggaagccaaagcacatcaccggagttgtcgtggccggcggaaggttaggtgtaccccacgcacgtttccgaaaagccagagctattcgcgcggccttagccgcagccaaagatgacgagcaaagagagcttctggcctcgaagctttgcggactgctgggtgaagccgcctttctcgatccacgatatcgccgctgggctgaggattccgcacgccaactcgcggcaattaaggccgctagattgtctgctaagagagctgtcaagtga

SEQ ID NO: 10298 - RNA, 1002 nt, synthetic construct
  source 1..1002: mol_type = other RNA
atgaaaaataaacgacccccgaagagcaaagataaaaaatacgagatcaaccagtgtgctctgtttaaagtcacgacgaaaaaacgcctcgcttccattttgggggttgacaccggcacactgtctaggctgagcatagacgaaagaaattataacgtgttcgagatcgccgaggagaagtgcgaattcaccggaaaaatcgtaaaggcacgattagtgcagaatccagttcccgagttaaaggatatacaccgtcggatccatgacttgctctcccgggtggtggcacccgattactgcttcggcggggcaaagggtcggagttacagatcaaatgccgcagcgcataccgactctgtggcagcggccacctttgacctgaagagcttctttcccagtacaaagtcagcccaaatttttggattcttcaaagacaagctgctgtgtgctccggacgtcgctgggattctcaccgatctgtgcacctacaagggtgcacttgccactggctcgcctgccagcccacagcttgctttctgggctaatctccctctgtttgaagtcctggagacaattgctcaccggtataacctaatcctatccgtttacgtggatgacatcacaatgtctggtcctagggtgccagctcagctgcagcaccaggtgaacgaggtggtacaaaagtatgggcacaagctgtcacctggaaaaactaagatttttcgcaggggcaatcccaagcacataacaggggttgtcgtccataacggcttcttgcgagtaccaaactccaggatgaaaaaggcaagagccatcagcgaagcccttactcgcaccagcgctactgatctgactcagcgggagcatctcgccagtaagctctccggcctgcttggagaagccgcccacatcgattctcgctatcgcccctgggcccaacgttcatacagagacttgaggttcttacagagactcgcgaacgtgcctccaattgccttttga

SEQ ID NO: 10299 - RNA, 1107 nt, synthetic construct
  source 1..1107: mol_type = other RNA
atgaaggaagaattcaaatccaagaagaagcggaagctttactcgctggaccaatgtgcacttttcaaaattgggtccaagaaaagattggcggccattctgcgagtttcccaggatcggcttgaaccgctgggggtggacaagggtaactatttcgtgttcacactaaaagagcagatttgcccttttacaggtaaggtgaagggagcccggagggttcagaacccccttccagaactgaagctggtacagcggaggatcctgtccctcctcgcccgtgtggaaatgccagaattttgccatggagccaaacaagggagtagttacaggtcgaacgcaaaagctcatgtggatgcaaagaatgtcgcgacttttgacttaaaatcatttttccccagcacaagcgcttctcgcgttttcagtttctttagaaatacgctgcagtgcgcaccggacgtcgcaaggatcctgacaaagctctgcgtttgtcacggagctttagctaccggctcccctgtgagcccaatcctggcctactgggcgaattgtgagctctttagagtcctgaaccgcctggctgaggagaatcacctcttaatgaccgtatacatagacgatttcactatctctggcgacgtgttgcctcgcaatattgtgtggcaagtgaagtctatcgttgagaaatatggccactccctcagtctgtctaagactaaaatatttcgggagaacgaggctaaacatgtcaccggtctggtcatctacgaggggaatcttaccgtcccacacattagattcaagaaggcccgcgcaattgaaaaggcgatagctgtggctagcaacgacgaggaaaggttggatttgatgcgaaagatgggcggcctactcggagaagcagcttatgtggataaacgttataagagctgggccttcaaaatttacagcaaaatctcacaggcccagtcagtgctgcgaagaaaagaggcctctgccagtgagaaacgcaaatttgaggaggcctgtgtccctgatgtaatgcccgacaaggcctcatggtccgacatcagccccaaggcccaggataactccagctctatgaagtcatga

SEQ ID NO: 10300 - RNA, 990 nt, synthetic construct
  source 1..990: mol_type = other RNA
atgcagcctaaaaaaaacacccgtaagaagaggaagccggataatcagctgcccatccaccagtgtttcctttacaaaattggctctccaaagcggctcgctgaccttctgaacgtttcagccgccgagctggaagacactctcagatctgagaacaactacaagctgttcaataagctcttaagccccaacccttttacaggaaaacttaggaagaaaagagcagtgcaagaaccaaaaagccggctgagaaagatgcatgagcgaattttggcgcttctgagaagggtgcaatacccatcctatgttcagggcggagtgaagcataggtcctaccagacaaatgcagcaactcacttgggagcccgtcagacagccaccttcgatctgaaaaatttttatggctcaactcgctactgcctcgtccacgatttttttcacaagtccctgtgctgtccgaccgatatagctggccgcctagcatccctcacaacctggaatggggtgatgccaaccgggagtcctttatctcctctcctaagtttctgggcagccaaagggttttttgacaagtgtgaaactctggccgccaagtatcggctgaactttacatgctacattgacgacctcacgttcagtggtgataaaatcagcggtaagttccaatcagaactggagatcatcgcgagccgctttggctatgaattagctaaagagaaaaccaaggtcttcaggttcggaatacccgcacacatcaccggcgtgatcagccataaggctaaactgtcggtcccccactctcgcttgaaaggtgctagaaagatccaggatgccatagagggccgaggggaggcctatgggttcactactgcccagttgaaacagaagctggctggaacaattaatgaggcagctacgattgacgccgtaaagtacgaaaagtgggcgacccatacgcggaaggccgctgaagacaacgagaaagagtga

SEQ ID NO: 10301 - RNA, 990 nt, synthetic construct
  source 1..990: mol_type = other RNA
atgcagcccaagaagaacatacggaagaagaggaagccagacaacgaattgcctatccatcaatgtgcactgtacaaagtgggaagtcccaagcgcctggcagacctcctgaatatttccacaatcgagttagaagtcattcttcagtccgagagcaattacaagctgtttaataaggttctggcgccaaatccattcacgggaaagtcccgtaaaaatagagcagtgcaggagcccaaatctaggcttagaaagctccacgaacgaattttaagcatattgaggcgagtccagtatccgggctacgtgcaaggcggggttaagcaccgcagctaccagacaaacgccgctatacacttaggggcccggcagacagccacctttgacctgaagaatttttacggaagcactcgctattgcctggtgcatgatttcttccataacacaatgtgctgcccaactgatatcgccggacggttggcctctttgactacctggaacggtgttatgcccacgggctcacctctatccccgctgctgagtctatgggctgccaaaggacttttcgacaaatgtgaagtacttgctattaagtatggcctgaacttcacctgttatattgacgacctgactttctccggtgatcaaatctctggaaaattccagtcagagctcaaaatcatcgcatcgagatttgggtacgaactggccaaggagaaaacaaagatttttagatttggggtacctgcgcacatcaccggcgtgattagccacaaggcgaagctctcagtgcctcatgccaggctcaaaggggctcgtaaaatccaggatgctatagatgggaaaggcaaggcctatggtttcaccgaggcacagctcaaacagaagctggcaggcactattaacgaggctgccaccatcgacgctgtcaaatacgagaaatgggccatctatagtcggaaagatgctggcgacgaactctctcaatga

SEQ ID NO: 10302 - RNA, 987 nt, synthetic construct
  source 1..987: mol_type = other RNA
atgcagctgaagaagtcaacccggaagaagagaaaacctgacaatgagctgccaattcaccaatgtgggttgtacaaagtaggaagtccccgcaggctagccgagctcttaaaaatcagcgagatagagcttaagaaattcctcgagtctcagaataactataagatcttcacgaaggtacttgctcctaacccgtttacaggcaaatttaggaaaaagcgagccgtgcaggaacccaaataccgcttaaggaagctgcacgagcgaattctctgtatgctgcggagagtccagtacccagactacgtgcaaggcggagtgaagcatagatcctaccagaccaacgccgctattcatttgggcgcgaggcagacagccacttttgatctgaaagacttttacgggtccaccaggtactgcctcgtccacgattttttcctggacgtcatgtgctgtcctacagacatcgcaggtcgtttagttagtctgacgacatggaacggagttatgcccaccggaagcccactttcccccctgctctctttctgggccgctaaggggctctttgacaagtgcgaagaactggcagtgaaatatggtctgaatttcacttgctatatcgacgaccttacatttagcggcgatcagatttctggagggttccaggcggagctaaagattttggcaagccgtttcggatacgaaatcgcaaaggagaaaactaagatctttcggttcggtgtgcctgctcatatcactggcgtcatctcacacaaagccaccctcagtgtgccacactcaagactgaaaggtgttcggaaaatacaagatgccattgatggccgcggcgctgcttatgggttcaccgcagtgcagctgaaacaaaagttggctggcgccatcagcgaagccgcgtcgattgacgccgtgaagtatgagaagtgggcattctattcccgcaaggatatagaaggggatctggtgtga

SEQ ID NO: 10303 - RNA, 996 nt, synthetic construct
  source 1..996: mol_type = other RNA
atgcagcctaaaaagagtgaaaaacctaaacggaaacccgataacgaaattgccatcaatcagtgcaggttatataaggtcggcagcttccgcaagctgagtgacatcctgaaaacttcccctgccgaaattatggacctactcgtgtctgataaaaactacaagaaattcacggtttcgcagagcgctaatccgttcaccggtaagccacggaagcagagagaagtgcaagagcccaaaagtaagcttcgccgtgtgcacaacagagtgctggccctgctacgaagggtggggtacccggactacgtacagggcgcggtgcgatatcgttcgtaccagaccaatgctgctctgcacatcggttccagacaaaccgcgacttttgatatttccgacttttacggatcaaccaagcggcacttagttcatagttttttccatgacgtcatgaagtgtcccaccgacatcgcaggaaaactggccaggttgacaacttgcgatggcgtcatcccaactggctcacctctcagccccctcttgtccttttgggtagctaaggggctctttgatgagtgcgcagctgtggccaaggagtacgggatgaagtttagctgttatattgacgatctgacgttctcaggggatcggatccccagggagttgaagagccgcctgaagattatatgtcggcgctaccgctatagactgaagagcgaaaaaacaaaggtgttcaggttcggagagcctgcacacatcaccggcgtcattaaaatggacgctgttctgagcgtgccattcgcccggctgatggcagtccgaaagcttatggatgcaatagagggaagaggggactcatatggttatacagtggaggagcttaagagaaagctcgctggaacagtttctgaagccgcctctatagatggccaatttaaaaaatgggcacttcatgccaaacaggacgccaaatcctcttctaggccatccgcgtcttga

SEQ ID NO: 10304 - RNA, 978 nt, synthetic construct
  source 1..978: mol_type = other RNA
atgcagcccggcaaatcaaaacgggtggagagaaagcctgataattcacttgagttagaccagtgccgactttacaaaattgggtccgaaaagagattagctgaaatattgggattgtctctgcaggaccttaggctcctgctgcggagcgaatcaaactacaagaagtttaccataagtcagagcgagaacccctttactaagaagccacgcaagaagagggctgtccaagtgccaatgaatagactaagacgggtgcatgctaagatcttttcatttctccgtcgtgtgaaataccctgattatgttcaaggtgctgtgaagggacgcagctatcagactaatgcagccttccatgctcggagcaggcagactgcaacgttcgacatttccaagttctatgagtcgaccaagtatcacctggtgcacgaattctttctgggtgcactgaagtgcccaactgatatagcgggcaaactcgccaggctagtaacctgtgacggggtcatgccaaccggaagtctgctgagccctttactctccttctgggtggccaaaggcatgttcgatgagtgtgcggcccttgcagaaacatacgacttgaaattcacatgctacattgatgacttgacattctctggcgaccggatcccccgagagctgaagtccaagctcaaaattatcgtttctcgctacggctataaactggccatcgagaaaacaaaagtcttccgctttggtgccccggctcacatcaccggggttgtcaaactcaatggagagctggtggtacccttcgcccgcctgatggctgccaggagaatctccgatgcactggatggcaagagtcctgactacgggtatacgaagaacgagctgaagcgaaagctcgcggggaccattgcagaagccgcaaccatcgacggaaacagattttctaaatgggctgcctttgcccagaaagaagccagggattga

SEQ ID NO: 10305 - RNA, 1005 nt, synthetic construct
  source 1..1005: mol_type = other RNA
atgcgaatagagatgcaaccaaagaagaatgagaaaacgaaaagaaagcctgacaaccagatccccattaaccagtgcagattgtacaaagtcaccagcccaaagagacttgccgaaatactgaatctcgacatgacagggctcctggaactcctgaattgtagcaccaattatcgcttttttgacattcctctcagcattaaccccttcaccggcaagtcccgcaagaagcgatctgttcaagagcccaaacagaaactccgtagagtccacaaaaggatcctacttcttttacgtcgcatgtcctacccgaactacgtgcagggggccgtgaaacacaggagctaccagacaaatgcagaggtgcacaaggagagtagagaaaccgcaacgtttgatatccgggatttctatggttccactaagtatcacctggtgcatgactttttcctgcgggtaatgggatgtcctaccgacattgctggcaaattggctaacctgaccacatgtaatggagccatgcctacaggatcacccctatcacctctgctgtcattttggattgctaagaagatgtttgacgaatgccatgccttggccgagtcccacaaactgaagttcacttgctacgttgatgaccttactttcagtggaaaccacatcccacggatcctgaagtctaagatcaaaataattgcgtcacggtatgggtattccatagccaatcataaatcgaggcacttcaggttcggtcagccagcacatatcactggcgtgatctctttagataaaaagctccatgtgccctttagccgcttgatggcagtcaggaaggttactgatgccatcgatggtaacagtgacaccttcggctttactaaaacagagctgaagaagaagctggctggcatggtatccgaggctgcgaccattgataatcggttcgggaaatgggccatctacacgcagaacgaagtgagtgacagctctacaccgtctgattga

SEQ ID NO: 10306 - RNA, 972 nt, synthetic construct
  source 1..972: mol_type = other RNA
atgcaacaaaagaaaaaggagaaaaacgagtgtaagactgcaaaaagctatcccatcgaccagtgtagcctctataaggtgggaagtgccaagcgattggcggctgtattggggatagagctggacaaactaaagaagctgttactgtccgattttaactacaaggtcttcgacatcgcgggcagcgttgatccattctcaggcaagatattcaagaccagacacgtgcaggaacccaaagatgacctacgcgctgtgcattcgcgaatccttcggctgttacagaacgtgtctattcccccttacgtgcatggggccattaaaggtcgttcataccagacaaatgccgccgcccacgttaaaggcaaacaggctgctacttttgacatccataatttctacgggagcaccaagtctaatctggttcacgatctgtttcatgacgtgctggcttgtccgtcagatgtggcgggaaagctcgccaggcttgtaacgtacaaggggatgatgcctactggctctcctctcagccctctgttgtcctattgggtggccaagccaatgttcgacgagtatgcttgcctggcaaggcagtatggtctggaatttacatgctacatcgacgatcttaccttcagtggggaccgcattccaagagatctcaggtaccgggtcggtattattgctaggcgctacggatatcgtatctccaagaagaagacacggttattcgtccaaggcaaagtgaaacacattaccggggttgcagtcgcagaaagcggactcatggtcccctttagtcgcctgaaagccgcaaggaaaatcatgggagcaatcgagggttctggcgagtcccacggcctgtccagtgaaaagttgagacagaaactcgccggccttataggcgaggctgccacaattgaacagagatttggaaaatgggcccggaaggcaagaaccgcctgctcatga

SEQ ID NO: 10307 - RNA, 1002 nt, synthetic construct
  source 1..1002: mol_type = other RNA
atgcagcggaaacctacaaagaggaaacggaaactatttaagcgttacccagtcaatcagtgcgccctgtataaagtgggatccatcaagaagatctgccagctcataggaataaagaagtccaacttgaactcgatcttgaagaatccgcttcagtatagagagtttgtaaataaggagtcattcgatcacttttctcttaaaaccagcaaaacccggcagatccaggaacctactggcaacttgaaaaaaatccacgagagaatcctgtacctgctggagccagttgagcttcctaattattcacacgccgccgtgaaaaagcgatcttacaggagtaatgctgcatctcacgtgctgtctaagaagatagccacatttgacctggagaacttctacggaagtacgaagaaccatcttgtgtataacttcttcctcgataagctgaaactcccacatgacattgcaaagaagctgaccaagatcacgaccttcaataatagtatgcccactggtagccctctttcaccgttgctgagcctgcatgctgcaaaacccatgtttgatgaactcgaatccctggcgcaaaagtacaatctgatcttcacctgttatattgacgacctgaccttcagcgggtccactattcccaaatcattaaaccggcaaatcgttcatatcattaaccgctacggctataatctatccaaccataagacacgtatttttaacgagtctgaagtgaaacacgtcactgggataattattaataaggagaggctccgcgctccctatagccgatttatgaccgctagaaggattaaaaaagccatcgatgggaaggccccaatgcacaacttctccaagatcaaactgctggagaagcgcgctggtttgctcggcgaaacagcctacctcgaccccacatacaaaagagcagcgaaaaatgcccagattgaattaaagaacgcacgcaaccaaataaagaagagcactttatga

SEQ ID NO: 10308 - RNA, 981 nt, synthetic construct
  source 1..981: mol_type = other RNA
atgctgcggaaacctacaaagagaaagttgaaatacctgaaacactatcccataaatcagtgcgcattgtacaagattgggagtataaagaagatctgcgacatcataggcatcgagaagaacgaacttaatctgatcttgaagagcccacccaagtaccgacagttcgttaataaagagtctttcaaccactttagccttaagaagtccaaggagcgacaggtgcaagagcccgtgggtgacctccgcaagattcacgaaaggatcctcgaccttctaaaaccagtagaacctccagactatagtcatgcagctgtcaagaaacgcagctatcggacgaatgctgcagcccatgtgttaagcaaaagaattgccacctttgacctaaagaatttttacggatccaccaaaaaccacctcgtgtataatttcttcctggatcagctgaaactcccccacgacatcgccacgaaactgacaaaactgaccaccttccataatagcatgcccaccggctctcctctgagtccactgctgtcacttcacgcggctaaaccgatgtttgatgagttagaatctcttgcccaaggatacaacctgatcttcacctgttatattgatgatctgacttttagcggctcaactattcctaagtcgctgtctaagcagatcgtccatatcataaagcgttacggctacaacctatccaaccataaaacaaggattttcaatgagtcagaggtgaaacacgttacagggatcattattaacgaagagcggttgagggccccttacagtaggtttatgactgcgagacggatcaagttggccatcgatggaaaggcatccactcacaactattccaaaattaagctcttagagaagcgcgccggtctgctcggcgaaactgcatatctggatccgacatacaaagggctcgcccagaaagctcagctggacctcaagaccgctagagggtga

SEQ ID NO: 10309 - RNA, 1041 nt, synthetic construct
  source 1..1041: mol_type = other RNA
atgttaaagaagcctaccaaacggaagaggaagtgcctgaaacgctactccatagaccagtgttccctgtataaagtcagatcagctaagaggctctccgaaatcctgggtgtagagaaacagcggcttgatagtatcctgaagtcatcagccaagtatcgggaatttactatcgaagaaaccaccaatcctttctcttctaagtttatcaagtctcgccaagtacaggctccatccgacgaactgcgacggattcatgagcgaatactgtacctcttggagcccatcgaacttccaaactacgcccacgccgccgtgaaaggacgctcttacagaagcaatgcagccacacatgtgaactccgcaaggatggctacgttcgatctcaagaacttttatggctcaacccagaggtacctggtctatagcttcttccttgacaatctcaaatgctcacccgacatcgccgggaaattgacagaactgactacattccgtaacgctttgcccacaggctctccgctgagcccactgctgtccttgcacgcagcgaaaccgatgttagatgagctgagtaagctggctcaattacacgacctcattttcacttgttacatcgacgatctaactttcagtgggaaaaaaattcctagatcgctagaaagacgagtttctcggattgtcggaaagtacaatcatcaactcagcattcacaaaacgaagatctttgacgaggataagcctaagcacgtgaccggcgttgtgattaataagggtaagctggctgtgccccacagtcgtttccttacagcaagaaaattggagcttgcgatagccggcaagtttcctatgcatggaaacagcatgctaaaactgtgcgagaaactggccgggctcctgggagagacagcatgcattgacccaacctataaaaagtgggccgagaaggcgcaggaggatctccgcaaggccaggaccaaagacagcagcatagtggggcccgatagtactgattttggctcctgtcagcagatcgactga

SEQ ID NO: 10310 - RNA, 1083 nt, synthetic construct
  source 1..1083: mol_type = other RNA
atgtggcccaaagggttaagtcaatacttaaacggcatcaaaactgaaatgaggccccagcagtcttcggccaagaagcgcaggagctttaagttatacaccatcaaccagtcagcgctatacaagataacaagcccgaagaaactgagcaacgcccttaatcgaagcgaactcgagattgatgtgctgctgggctccgacgaaaactacagggagttcaccctacttgaggaactgaaccctttctcccacaaaagaaaaaaggcccgcttggtgcagactccgaataaggatttgcgatctgtgcacgaaagaattctcaaactgctccagagaatcgagtaccctgagtatgcccatgctggtgtgaagaagcgatcctatcggtccaacgctcaggctcaccaaaagagtaaggaagtggcaacttttgacctgtccaattactacggctcggtcaaggcacaccatgtctatgacttttatctcaaacagctgcagtgtgtgcgtgacgtgtcaggaatactgacccggctgtctactcacagaaattgcattccaaccggatcacccctcagccctctgcttgcccttcacagcagccggacaatgttcgactctctggactgcctggccaaaaggtatggactagttttcacatgttatgtagacgatcttacttttagtggcgatgcaatcccaccatctttggagagggaggtcgttagtatcgtgcgccgtaatgggcattccattaacaaaaagaagacgcggatattcagagcacaccaggccaagcatgtcacggggaccgtgatcattaatggcaatattaccgttcctcatgctcgcctggtgacagttaggcggctggaggatgccatcaacggaaagatggacagttttgggttttccgaaacaaaattgatggagaaactcgctggtgtcctcaacgaggcaagctacctcgattccaaattccgctcaaaggcgttggctgctagatccaatctgtctagcccctctccttcaccctctcccagcccatcacctgcaccacaagtagccgatgccagtatctga

SEQ ID NO: 10311 - RNA, 1002 nt, synthetic construct
  source 1..1002: mol_type = other RNA
atgaatggcattaaagccgagatgcgccaacccaagacttcagctgggtcccgtagaacttccaaactgtaccccatcaaccaatgcgccctttataagttgacctcgcccaaaaaattgtgtgaggctctcaagattgaaaagtccctgctgtctgacgtcttggagtctgatgaaaactacagagagtttacgctgctggaagaagtggatccttttagtcgaaagataaaaaagaagcggctcgtacagactccgaacaaaaaactacgaaatatccacgagcggattctacagctgctacagcgtatcgaatatcccgactatagccacgcaggtgtgaaaaaaaggtcttacagatcaaatgccttagtgcatgtcaattctaagaccattgcaacatttgacctgaaaggcttctacggggctgtgaagagttaccacgtcaatacattcttcagcgagcagctcaactgcgtgggagatgttgccggaattctgaccaaacttacaactttccggaactgtgtcccaacaggcagcccactgagcgctctcctcgcactgttcaccagcaagccaatgtttgatgacctggacgccttagccaagaagcacaaactgaagtttacttgctacgtggacgaccttacattttcgggtgacagcattcctagttcactggagagagatgtttccagcatcgtgaggaagcatgggcactctctgagtatcaacaaaaccaagatctacagggaaaatcagcctaaacatgtcacagggaccgtaatattaaataatcgcatccacgttcctcatacccgccttctggctgcccggaggttgcagtctgcgatcaacggcgagatagagtccttcggattcacggaagagaagctcattcagaagcttgccggcatgctcaacgaagcgtcatatctcgatgtgcgcttcaagtataaggctttgaccgcaaaagcaatgctgaagtccgccaagtga

SEQ ID NO: 10312 - RNA, 1008 nt, synthetic construct
  source 1..1008: mol_type = other RNA
atgtgcgcacagaaaaccaaggtaggagcggttcgggcttctcaccagcggtaccccatctctcaatgttgcctttacaagatcggaagcagatcaaggctcgccgacttactctatatagagaaggtcgaccttgtgaccctgcccggtgagcggtcgtataaggttttcacgctcccggaaaaacgagatgaatttagcggcaagatcaagaagaaaaggatagtgcaggaccctaaacgcccactgcgtcgcgtgcacgatcggattttgtacctcctgaacaagattgaactgcccgagtatgtccatgcagctgttaaagggcgcagctatcggtccaatgccgcggctcacacaactgcggcccatgaagtgctcacgttagatatcaagtccttttaccccagtgtgagttacctgctcgtgagggaattcttcagatacaagatgaaatgtgcctctgatgtcgcgacaacattggccgatttgtgcacatacaagggcgctctgcctactgggagccctctgtcaccacttctatcctattttgcatgtggtgatatgttcgacgagctgaatagactcgccgtggagtgcggactgaaatttacatgctacgtcgacgatcttaccttctcaggggagaaaattcctggcgatctagagagtagagtcaagtcagttctaaggcgctatggccatcggttagcagtggacaagactatcagatacaggccgcactctccaaaatccgtaactggttgtatcttgcacaacggagctattcacgtgccacattcccgatttaggaaagcccgcatgttggccgccgccattgctaccacagacgaccccgctctgactcataagctttacgaaagacttgctgggctcctgggagaggcagcctatctggacggccgtttcaccagctggaaagaggacaccgcacgactgctgaagctggctacccagaagctgggcgcagccaaagaagccacctga

SEQ ID NO: 10313 - RNA, 939 nt, synthetic construct
  source 1..939: mol_type = other RNA
atgaaaaagcggaaaaatctgcaactgaagaaggacatcccactggatcagtgtgccctgtataagatcaggagtaagcggcgactatgccagatactgaacatacccatctcctctctcaagggcttcatgaacgatgatcgaaattaccatacagtagacatcgaggaattcttcaacgaattaaccggtaaacgtaagaaagcgaggactgcctctgttcccaactactggctgaagaaactccattcgcgcgtgcataggcttcttagcagtatagctgccccattatatgcgcacggaagcattaagtcccggagttatatcactaacgccctggtacacgtcggctctaaggaagtccttactatggatcttagagacttttttcgctctgttaagcgccaccatgtgtacttcttctttaaagacaagctctgttgtagtcctgatgtggccggggtcctgagcaacctcttgacctatcagggtgcattgcctgtcggctcaccagcttctgcgattattgctatgtgggcctgccacaccatgttcgagaggttaaaccaactggcttcagagtaccgcctcaaattttcagtttttgtcgatgacctcacatttagcggcgaggtggtacccagcggatatcagtccttggtggagcgtatctgcgcacagagcggtctgtcggtgcgggaagacaaaaccgtgctgtataaacatggcacagccgcctcagttacaggggtgattatctacgccggagcaattaagccccctcactccaggtaccagaatctgagaaaactctctgctattctatcccaacagggggcacacgcaatcgtgaatggaaagcacgctaaatactccttccagggcgggagaaatgagacgatgctgttgagaaatattagcatcccgcacgtggactga

SEQ ID NO: 10314 - RNA, 948 nt, synthetic construct
  source 1..948: mol_type = other RNA
atgaaaaagcgaaagtccagtccccccgacaagtcaataccactggatcaatgcgcattatttaaggttagatcaaagcggcgtttgtgcgaaattctgcgcgtccctttatctagccttaaagggttgatggatgacgaccagaattaccatgctgtggaaattgaggagttcgtgaatgagctgaccggaaagagaaagaaagctcgaatcgcgtcagtcccaaacttctggctcaaaaaactgcacctgagggtgcacgatcttctgtctgccatcaccacgcctatctatgcacatggcagtattaaaaagaggagctatatcacaaacgccctggtccacgtggaggcaaaagagtttctgactatggatctcagggatttcttcaggagcgtcaagcgtcaccatgtatacttcttctttaaggacaagatggcgtgctccagtgatgttgccggcgttttaagctatctgctcacctaccaaggcgcactcccggtgggaagtccagtaagcgccacactagcaatgtgggtgtgtcacgccatgtttgaacagcttaataaactcgcctcctcttatgccctgaaattttccacattcgtcgatgacctgacttttagcggggacgtggttcctagtaagttccagctgctagtggagcggatatgtcaacagtccggactttcaatccgggaagacaaaacattcctgtataagaacggaatggctgcttcggtcaccggtgtgattatacataatggttctatcaaacccccccatagccgctaccagaacctccgcaagctctcaactgtgttgtctcagcagggcagacacgctgtgattaatggcaagtacgcccgctactcctttcagggggggagaaacgaaaccagactgttgcggaggattaacaacgtacagtccaatgactctatctga

SEQ ID NO: 10315 - RNA, 948 nt, synthetic construct
  source 1..948: mol_type = other RNA
atgaagaaacgcaaaaatcttcttcctaagaaaagcattcccctggaccagtgcgccctgtacaagattcggtccaaacgacgactctgtcaaatactcaatatcccgagtagttctttaaagacactgatggacgaggactctaactaccatctggtggagatcgaggaatttgtaaacgagttgaccggaaagagaaagaaagctagaactgcgagcgtacccaacttttggctgaaaagaattcattctcgtgtacattgtctcctgagtgcaattgtggtgcccgtctacgcccacggctctatcaagaaaaggtcctatatcactaacgcactggtacacgtgaatggcaaagaagttctgaccatggatctgcgggacttcttccgctcggtcaaaaagcaccacgtgtatttcttcttcaaggataaactatgctgctcccctgatgtcgccggcatcctgtccaaactgctaacataccagggagctctccctgttgggtcccctgtgagtgcgcttttagccatgtggacctgccactcaatgttcgatgggctcaataagctggcctcagaatacaagttgaaattctccactttcgtggatgatctcacattttctggggaactagtgccctccggctttccactgttggtggacagggtctgtatcaagtttggattgagcatcagggaggacaaaacggtgctttataaaaatggcgtcgctgcttcagttaccggtgttattgtgcatgagggtaacataaagccaccatatagccgctatcagaaccttcggaagctcagcgtggtgttgagccagcatggagcccacgccgttgtcaatggcaagtacgcaaagtactctttttgcggtgggctgaacgaagcaagactgttaaggaagtttaatgaggagaagtgtagcctcgtctcatga

SEQ ID NO: 10316 - RNA, 954 nt, synthetic construct
  source 1..954: mol_type = other RNA
atgtcccagaagagaagaaaactgcttcacaaaaagcgctacccactgaaccagtgtgccctctacaagttgacatctaagaagaaactgtcagccattctcggtgtgtccctggcaaatattaagtctctgtgcgacaacgatagaaattaccacctggtcgagatcgaagaggaattcaacgagctgactggcaaacgcaaaaaggcacgccaggccaatgttcctaacttcttcttgaagaaagttcattcccgggtgcacaatctactatctaggatccagacacccggttatgcccacgggtccatcgttgcccgaagctatgtcaccaacgctcttgctcatgtcgagtcatgggagttccttacgatggacgtgcaagattttttccgaagcgtgaagagggagtttgtgtactacttcttcaaggatgctatgttttgctcgccagacgtcgctggaatactctcaaatctgctgacttataagggagcacttgcggtggggagccccgtatccagcctgttatctatgtggacctgcaaggaaatgtttgacaggttagactctctcgctattaagaataatctcaccttcagcacttttgtagacgatctgacgttttcagggctcaaaataccggcctccttccatgaagagatcgagagtacatgtagacggtatggcttgtcaatccggaaagataaaaccaagttttacaaaaacggcatgcctgcattgatcacaggggtgattgtggttagtggcggcatagaagccacttattcgcggtttcgttctattaggaaactcagtaccatcctgtccgaagaaggcgctcacgcggtcgtgaacggaaaatacgcaaagcgtagtctgaggggcggacttttagaggcccgcagaatcggacatattagcgatagccggctgcaaagtagcggtgggtga

SEQ ID NO: 10317 - RNA, 1053 nt, synthetic construct
  source 1..1053: mol_type = other RNA
atgagacggaaactggtgcggtcctcaatcgaacgatacgacctggagcgaagtcctttcgcccagaggccaactcagcgcgacatcggcgatctactgggcacaactagaaatcacctacgctacttagtaacccacaaggagcatttcatcgtgaggagacaagaggagattgggaagaaaaagaagttgagagaactgaagttccccgtcgctgacttgaggggggtacacgaacggctgaagtatcatctgaataagattcgccagcccagctatttgtttagcccccgccgtcatcgaggccaacgggataacgcagcacttcatctggggcaaaaccagtaccttacgcttgacctgaagcagttctacccctcaaccaccgctaccatggtgagacgttggttccaagacgagatgggcatatatcctgacgttgctggcttactcacgcacttggcgaccattgatgatcacgtttcttttgggagccccctaacaccagtcctttgcaccctgattcaccgccctatgtttgataagattgcggacctctgcggtagccacggactgcgatactccctgtgggtggacgacctgacaatctccggccggtttgtgcatggagatattgtgtgtgagatcaggaagataatagcggacgctggtctgagaagtcacaaaatccggtttagaacaggttcgaggccggtgtatatcactggcatcggggtggtcggaagggagctcgttgctccgaactctttaaatctccggattaaagaattgtgggaggcactccacctggcagaaacactggatgagcgggatgattgcatccaggccctccttgcccagctgggtactcagcgccatatttgtggggcatcttccgccatcggaagaaaagctgccgatcagatgaacgccctcaggcagaaaaggcgtaaaatgcatctcgaggccgccgaaaaagctgctgccgacaggttgccacgcagtgcaactatagtccaggcccctgaagacgccccattcgatctgggatga

SEQ ID NO: 10318 - RNA, 1053 nt, synthetic construct
  source 1..1053: mol_type = other RNA
atgaggagaaagctgttccgaccccccgtggaacggtatgacctggtgcgttccccgttcgcacaaaggcctacccagagggacttaggggatttgctgggaactacaagagatcatctaagatacctcgccacccataaagaacatttcgtggttaggaggcaggaggtgattggtaaaaagatgaagctgcgcgatctcaaataccccgtcgcggatcttcgaggagtgcatgagcggttgaagtttcacctcaataagatcaagcaaccaagttacctatttagtcctaggaggaaccgcggacagcgagataacgctgccctccacgtgggtcagcaccagtatttgaccctggacttaaagcagttctaccccagcactacagccgacatggtgcgtcgctggtttcgggatgagatggggatgtacagcgacgtcgctggcctgttgacacacctgtgtaccattgacgatcaagtctcttttgggagtccgctcaccccagtgctgtgcacgctcattcaccgccctatgttcgacaagattgcagacctatgcgagcgtcacggcctccgctgttccctgtgggttgatgacctgactatctctggtcagtttgtccacggaaatgtgataagagaggtgcggcagatcatcgctagcgccgggctgagatcccacaaaatccgcattagaacgggatcgcgacctgtttatattaccggcatcggcgttgtaggccgggaactggtcgctccaaatacattgaaccttcggatctccgatctttgggaaaattaccaccttgccgagactaccgaggaaagggatgcctcaatacaggcgttactggcacaactgggcactcagcggcatatatgcggcccttcatctgaccttgggcgcaaagctgccgaccagatgaacagcctgaggcagaaacgaagcaagatgtatagagagacagcggccagagctacagcagcacggctgtctagatcactggccctcccccatgccccagaagatgctccattcgacgtagtatga

SEQ ID NO: 10319 - RNA, 1053 nt, synthetic construct
  source 1..1053: mol_type = other RNA
atgcggagaaagaccgcaaggccccctattgaaaagtacgaacttccccggtcgccattcgcacaacgccctacccagcgagacattggaaaactgttgggagcctcacgggatcatctcagattcctggccacacataaagaacattttattgttcgccgccaagaaaagatcggtaaaaagcaaaagctcagggacctgaaatatccagtcagtgacctgagaggtgttcacgagcgcctcaagttccatctgaataagatccggcagcccagctatcttttctctccaagaaggaaccgtggccagcgagacaacgcagctctccacttaggacagcatcagtacctgacgcttgatctgaagcagttttatccctcaacaaccgcagatatggtgaggagatggtttcgagacgaaatgggaatgtatccagatgtcgctgggctgctcacacacttatgtactatcgacgatcaagtgagtttcggctcccctctgacccccgtgctatgtaccctgatccatcgtcctatgttcgatcgaatagctgatctgtgcgaacgacacgggctgcgttacactctctgggtcgacgatctgactatctccggcgagtttgtgcacggcgatgtggtgcgggagatccgccagataattgccggggcaggcctgcgctcacacaaagtaaggttcagaacaggtaatagaccagtctttattaccggcatcggggtagtggggagagagcttgtggccccgaacgctatgaatttgcgcatcaaagaattgtgggaggtgtaccacctagcagagactgtcgacgagagggacgcttgcattcaggccctccttgcgcatttgggcacacagcggtacattagcggaccgtcttccgatctaggtaggaaggcctccgaccagatgaacagcttacggcagaagaggaataaaatgcacatagaggcgtctgccaaagctttggccgacagcctgatgcggagtctgacggagcaacactctgaccaggacgccccttttgatctcgtttga

SEQ ID NO: 10320 - RNA, 1050 nt, synthetic construct
  source 1..1050: mol_type = other RNA
atgcccagaaaaagaaggccacctatcgagatatatgaactgccctcctctccattctctcaacggccaactcagagggatattgggtcactcgtcggttgtacccgagatcacctgagattcctagctacgcacaaagagtcctttatcgttcgacggcaagagataatcggcaagaagcagaagctgcgggacctgaagtatcctgtagcggaccttaggcgcgtgcatgaacgtctgaagtttcacctcaataagattgtccagccgtcctacttgttttccccccggcaaaaacggagtcagagagacaatgccgagatccacctaaatcagcagcaatacctgacccttgacctgaaacagttttatcccagcacctccgccgggatggtccatagatggctgcaggaaaaaatgggaatgtacgaggacgtggccggcttgctcactcacctgtgtactgtggacgggtttgttagttttggcagtcctctcaccccggtcctatgcacattggttcaccggaagatgttcgatgaaatcgctgatctgtgcgctaataacggcctgaactatagcgtttgggtggatgacctcacaatcagcggcaagttcgtgcatggagatatcgtatcggaaattcgcgacataatctcaagagcaggactcaagagccacaaaatcgcctacaggacaggaaaccgcccagtgttcctgaccgggatcggggtggtcggcagaaatctcatagcacctaatattctgcatttgcgtattaaggagctttgggcatcataccatacggccgagagctacgaggaaaagaacgcgtgcatccagtctcttttagctcagcttggtactcagcgctatatttgtggagcaaaatccgtgttgggtcgaaaggcctctgatcagatgaactctttacgccagaaacgcagtaaaatgaggcgtgaggccattgaacaatcaattagcaacagggcattaaggattacaaaggaggtgggcctgaaagaagacgcccccttcgatctggcttga

SEQ ID NO: 10321 - RNA, 909 nt, synthetic construct
  source 1..909: mol_type = other RNA
atgcctcgtaaggctagagccaccttctctgaacggtatcctattgagaggtccccttttgctcagaggccgacccaaagggaggtggctgcccttctgggagagactagggacgacttgcgcttcctcgccactcataaagagcactttatagtaagaaggcaggccatccttggcaagcagaagaaagcgagggacctgcggtatccagtcagtcgattgagagccattcatgaaaggctgaaattccacctgaataagatcaaacaaccttcctacttgttcagtcccagaaaaaacagggggcagcgagataacgcggctctccacctgggacaacgccagtatctgacactggatatcaagcagttctaccccagcaccaccgcacaaatggtgagacgctggtttcgggatgaacttggcatgtacgacgacgtggcaggcttgctaacgcacctgtcgacaattgacgatgtcgtctcctttggcagcccccttacaccagttctatgtacgctcgtgcaccggcggatgttcgatgagatcgcagatctgtgcgagcagcgaaacctcagatactccgtctgggttgacgacctcaccatttctggagattttgtggtccgggactttgtgagagagctgcgggatatcatacgccgctatggtctgaagagccacaagattcagttccgcacagggaataaaccagtttacatcacaggcataggagttgatggggaccaggtgattgcccccaattctctcaacctccgaatcaagactttatggcatgaattaagccaggcaaagaccatcccggaacgtgacggtcttattcaaccattactggcccagctgggcactcagctgcatgtggtggggaattcatcaaaagtaggttga

SEQ ID NO: 10322 - RNA, 1053 nt, synthetic construct
  source 1..1053: mol_type = other RNA
atgccaagacggccacgcagacccgtcttcgagaaatacgacataagtaaatccccatttgcccagaggcccacccagcgagatctcggagaactgctgggcgagaacagaaacaacctgaggctgttggtggactacaaggaacagttcgttgtgcgacggcaggaggtgattggcaagcatcagaaggtccgggatctgaaataccccgtcagccgtcttcgcgccgtacatgagcgtctgaagtttcacctcaacaagattaagcaaccctcttacctgttctcacctcgcaagaataggggccagagggacaatgcactcaggcacgtaaaccaagatcagtatttgacactagatctcaagcagttctatcctagcacaactgccactatggtccggagatggtttcaagatgaactcgggatgtatcctgatgtggccggtctgctgacccacttgagtaccatagacgacagagtctccttcgggtccccactgacgccggtcttatgcactcttattcaccgcgctatgttcgacgaaatcgccggggtgtgtgaacggaggggacttaggtgtacactatgggtggatgacctgactataagcggcaagtttattcccggcgaactggttaacgagatccgtgaaatcatccgcgcagcgggtctacggagtcacaaggtgaggtatagaaccgggaatagacccgtgtttatcaccggaattggcgtggttgggaccaaacttactgcgcctaatgcggtgcatttgaagatcaaatcactgtgggacgactaccatcaagcagagacattggaggagaaagaatcatgctctcagttactcctctcccagctcggttctctgaaacatattgtgggagccgctagcttagccggacggaaagcctctgaccagatgaataccatccgccagcaacgccgacgaatgcacgtagccgcaacggctgctgctgctgcaacacggctgagcagagcccttatgccgaaagagtcgccagaggatgttccttttgagatctcctga

SEQ ID NO: 10323 - RNA, 1032 nt, synthetic construct
  source 1..1032: mol_type = other RNA
atgagacactcccgtaaaccgcacccctacgagatctatgggttagagcggtcccccttcgcccaacgcccaacacagagggaggtcgccgatctgctaggcgagacaaaggccgatctcataaggctagcgaattacaaggatcagttcatagtgaggagaagggagaatatcggcggaaaagatagagacttagcatatcctgtgtccagactgaggggcgtgcacgagaggctgaagtttcatctgaataaagtccagcagcccagctacttgtttagcccccgtaagaagcgcagccagagagataacgccgccttgcacctcgatcaggaccaatatctgaccatggacgtaaagcaattctacccttccaccacagaagaaatggtgtatcgctggttcgtggatgagctcggtctgtttgaagacgtcgctggcctcctgacaaggttatctaccatcgacggtaaggctagcttcgggagtccgcttactcctgttctgtgcacgctggtgcaccgaccacttttcgaccgcattagtgacatctgtgggcatcgcggcttgcggcactctctgtgggttgacgatctcacgatctcgggtaaatttgtcccaggacaggttgtgacttctattcgggaagttatccggcaacgaggcctgcgtagtcataaaattcgataccggacaggaaataggcctgtgatgatcaccggtattggagtggtaggccgagatcttcttgcacccaactcactgaacctgagaatcaagcaatactggcaggacctccatgacgcaatgaccgcagaagagcgcgcttcatgcgcccagcggctcttgtcccagttggggactgtgagacacattgtaggaactaaaagcaacgtcgggcagcgggcgagtgaccagatgaacatgctgaaacagaaaagagataagtggatatctgaagccagccaggaggcctcaaagaagtcagctgatgaagctgcacctatggaacatgaggacattccattttga

SEQ ID NO: 10324 - RNA, 1032 nt, synthetic construct
  source 1..1032: mol_type = other RNA
atgcgccggaactctaagcccccacagtacgagaggtacgatcttgaaaggtcgccctttgcccagcagcctactcagcgagatgtggcagccctgcttggcgaaaccaaagccgatctgcagcggcttatcaactataaagacgagtttatcgtgcggaggcaggagaaaatcggtggcaaggtacgtgacttagcttatcccgtcagcagactaaggggtgcccacgagcgcctgaagtttcatcttaataaggtgcgccaaccgaattacctattctctccaagaaagaaacgctcacaaagggataatgctgaactgcatttggaccaggaccagtatttgactttagacctgaagcagttctatcctagcaccacagagactatggtctacagatggttcgttgatgaattggggatgtatgaggatgttgcgggcctgctcaccagactcagtacagtggacgggattgtgagctttggaagtcctctgaccccagtgctctgcacgctggtgcacaggccgatgttcgacaatatctccgatatctgcgatgcgcgagggctgcggcacagtttatgggtggacgacctgacagtgtctggaaagttcattcctggaaaggtcgtaacaagtattcgcgaggccgtccgggagagaggtttgcgttcccataaaataaactaccgatccggcaatcgaccagttattctaacaggaatcggcgtggtgggacgcaatctcctgtcccccaacagcctcaatctgcgtattaagcggtactggaaagacctgcacgaggctgaaaccaacgaagaaaaggtggcttgtgcccagctgttgatgtcccaactcgggaccgtcagacacatagtagggcaaaaatcagacgttggcatgagagcagctgatcagatgaacatgcttaggcaaaaacggaacaagtggctgcaggaaaccagcgtctctctccctgcaccagaagagactgagacggcatcagccgatactgagaacatccccttttga

SEQ ID NO: 10325 - RNA, 1023 nt, synthetic construct
  source 1..1023: mol_type = other RNA
atgaggcgcaacaaaaagccagcctatgaaagatacgacctcgatagatctccatttgcacagaggcccacacaacgcgacgtggctgacctcttgggtgaaacaaaagctgatctagaacgccttatcaactacaaggaccagtttgttgtgcgtcgccaggagaggatcgccgggaaggatcgtgatctcgcctatcccaccgcgaggctgaggggaattcatgagcggctgaagtttcacctgaataaagtaagacagcctagctatctcttctctccccgtaagaagcgatcacagagggacaatgcagagctgcacttagaccaagaccagtatctgactctggatattaagcaattctacccatctacgaccgacgccatggtgttccgatggttcaaggacgaactgggcatgtacgacgatgtcgccggaatgctgacgcatttgtgcactattgacggcaaggccagttttggaagcccgctgacccctgtgctctgtacacttgttcaccgccctatgttcgattccatctccgatatctgtagcgcccgcgggcttagacattccctctgggtggatgacttgaccattagtggaagatttgttcccggcaaagtggtcacttcaatcaggacagtgatccaggattgcgggctgaggagccataagattagataccggtccgggaatagacctgtggtgataaccggtataggcgtggtcggacgggatctggttgccccaaatagtctgaacttacgcatacgacggtactgggatgatcttcacgaggctgtcaccgcggacgagaaagcggcctgcgcacagttgctgatgtcacagctaggcacagtgcggcacatcgtcggtgctaaatcggacgtaggccagcgagctgctgatcaaatgaacatgctcaaacagaaacgggcaaagtggttacgggaggctaacgcagtcactcccgccagacagcacgacgcatctgtagacgccgaagacatgccgttctga

SEQ ID NO: 10326 - RNA, 1032 nt, synthetic construct
  source 1..1032: mol_type = other RNA
atgccccgtaataggcgtagtccagtctatgagcgctacgatctctccaggagcccttttgcacaaagaccgacccagcgcgacgtcgcccaattactcggcgaagctaaggccgacctgcaccgcctagttaattacaaagaacagttcatcgtgcgccggagagagatcattggtggaaaggtgcgggacctggcataccctgtgagccgcctgagaggagtgcatgagcggcttaaattccacttgaacaagattcgacaacctagctacctgttttcaccgcgaaagaaacgctcgcagagggacaacgccgctctgcatttggaccaggaacagtatctgacattagacctcaagcagttctacccatcaaccactgaggcgatggtcttcaggtggttcaaagatgagctgggcatgtacgaggatgttgccggtctgctgactcacctctgcaccatcgacgggaaagcctctttcggctcacccttgacacccgtcctgtgttccctcatccacagacctatgtttgacgagatttctgaaatatgtactaagcggtggctacgacattccgtctgggtggatgatttaacgatcagcggacggttcgtacccggacaggtggtggaggaaattaggagtgtaattaggtccgcaggactgcgttcccacaagattagatatcgatctgggaacagaccagtatttatcaccgggataggcgtggttggcggatgcctactcgccccaaacagccttaatctcaggatccagaaatattggcaagatttgcgggaagcgggcactgtggacgagaagatctcatgtgctgagcttttgctgagtcagctgggtaccgtgagacacattgttggggctaggtctgacgtcggccaacgggtggcagatcagatgaatatgcttaagcagaaacgcggtaagtggctgcatgaagcccttcatctgacgcagctcaaagagagaacagaacctacctttacaggggtttgcgatatacccttttga

SEQ ID NO: 10327 - RNA, 1041 nt, synthetic construct
  source 1..1041: mol_type = other RNA
atgcgtcccaggaaagctcgggtgcgctttgagcggtatgagattgaacgttctccattctctcaaaagcctacccaaagagagatcgccaaactgctgggtgaatcaagggacggactcaggcgcctgatcgaggacaaggagaactacattatccggcgggaggcttttgtgggcaaaaagcagaaaaagcgcgacttgcgctacccaatccgacgtctgagggccgtccacgagagactgaaatttcacctcaacaaggtgaagctcccctcctatctgttcagtccacggaagaatagaagccagcgcgacaatgcggccctccatctagatcaggacgagtatctgacccttgaccttaagcagttctaccctagtaccactgctcagatggtaagggggtggtttcgcgatgagctgggcatgtacgacgacgttgctggaatgcttacacatttaagcacaatagatggtgctgtagccttcggctctccggttacacctgtgttgtgcgccctaattcataggcccatgtttgatagaatttcggagatttgcgatgaccacggattgcgatattcactgtgggtcgatgacctgaccatctctggtaagcaaattactggggaggtggtggaaaagattaggaaggtcataagagacgctggcttaaaatcccacaagatccggatcttccgcggaaaaaaacctgtgttcatcacaggagtcggggtggtgggggccaatctcgtagcacactccagcttacacctcaggcttggcgccgcatgggcggaatacgatagtgcagaaaccttggaagagcgagatcattgtactcaaacactgctttcactcctggggacgatccgacatatagttggcgcacagtccgaagctggccagaaagcagcgaaccagatgaacactctgagacagaagctggccaagagcagagccgaagctgcagttgccaatgtcaaacggcggatgttggcagtgcagaccacggaacacgccagagatgccccctggtga

SEQ ID NO: 10328 - RNA, 1044 nt, synthetic construct
  source 1..1044: mol_type = other RNA
atgaggagaaagaaggtgcgtgatcgctttgagcggtatgaattggcccgctctccattttcacagaaaccgactcagcgagacatcgccaagctgttgggcgagagcagggacgatcttcgaaagttgattaactacaaggagcaattcgtggtcagacggaaagccataattggaaaaaaacagaaggagcgggatctgcggtatcctgtgtccaggttgcgcgccgtacatgagcgcctcaaattccacctgaataaggtgaagctaccctcatacttattctcccccaggagaaatcgcggacagagggataacgcggtgctccacctggatcaagacaggtacttaacgctggacctcaaacagttttatcccagtaccacagctcagatggtgtggaagtggtttagagacgacttaggtatgtacgacgacgtggctggcatgcttacacatcttagcaccatcgatgagaaggtcagtttcggctcccctctaaccccagtactgtgcgcgctgattcatcgacccatgttcgaccgcattgctgaaatctgtgacgaacacgagctccgttacagtctgtgggttgatgaccttactatctcggggcggcatattagcgtcgaaatccttaagaaaatccgggctgtcgtgcaggaggctggtctaaaaacccacaaaatacgttttcattctgggagaaagccaatctttatcacgggaatcggtgttgttggcgcccatttggtggccgccaacagcctgaacctgcgactgaagactgcatgggctgaatatcacggcgcgcagacaataaacgaaagagatcactgcacccaggttctcctggcccaactgggaaccctcaggcacattgtgggggccaagactgatgcagggcagaaagcagcaaatgaaatgaattccctgaggcagaagctcaagaagcacagagtccaggacgctaaactgcaggcagcaaaacggcaaatagccgcctctcaaacaattaccgaggctgcagatgcccctttctga

SEQ ID NO: 10329 - RNA, 1056 nt, synthetic construct
  source 1..1056: mol_type = other RNA
atgagcggcaaaatagctcgaaaaaacttcgaaagatacgggatcgagaggtcgcctttttccctccggccaactaagcgcgacctggcagcgttgctgggggaatctgtaaaggatctgaagaccttggccattcctagctttaaggagcagtttgtggtgcgcaggcaggcagagacaggcaccaagaagaagaaaatccgggacctggtatatcctgagtcccgccttagagggatccacgaacgtctcaaattccacctcaataaagttaggcaaccaagctacctcttcagcccacggaaggaccgcagtcagagggacaacgcggctatgcatctggatcaggaaatgtacctgacattagatctcaagcagttttatccctctactacttcagcaatggtgagaaagtggttccagaatgagctcggcatgtttcccgacgtcgccagattgcttaccgatctgagtacaatcgacgaaaaagtctcctttggttcacccctgactccggtcctttgcacactggtgcacagagagatgttcaacgaaattgctgacgtgtgtgagctgcatgagcttaggtatacactatgggtcgatgacctaaccatatccggtcgaagcatccctgccatcgtgttagagcggatacgcgaaattatcaggaagcacggtctaaagagtcataagatacgattccacaaaggaagagatccggttttcatcaccggcattggcgttgtgggccggaagctgattgccccattctctctgaatctcaaaatcaagaaatgttgggcggagtaccacgccgccaccacgacatcagagagggatcaatgcattcagaccttgcttgctaatttaggaacggcaagattcatcgtcggggctaatactttggccggacaaaagctctccgacgaaatgaacgctctgcggcagaaaaaagccaaaatgtggcgtcaagacgtgaagcagtcactggcccgcaacatgcatctgtctggaattagcgatctggcacccgcaggagatgcccccttttga

SEQ ID NO: 10330 - RNA, 1056 nt, synthetic construct
  source 1..1056: mol_type = other RNA
atgtccggcaaagtggcacgtaagaacatcgaacgatatgatatcaagagatcgccattctccctccaccccaccaagagagatctcgccgttcttttgggagagactgtcaacgatctgaagaccctgagcattccctcttttaaggaacagttcgtggttaggcgtcaggccgagacaggcaaaaagaaaaaaaagctcagggacctggtttatcccgaatctcggcttcggggtattcacgagcgcctgaaattccatctgaataaggtgaagcagccaagctacctgttttctccgcggaaaaatcggagccaaagggacaacgccgagacacatctagaccaagatgtatacctcacactggatctgaagcagttctatccttcaaccacagccgcaatggtcagaaaatggttccaggacgagctgggcatctacccagacgtggcgagactcttaacggacctgtcaactattgatgaaaaggtgtcctttggatcacccttgaccccagtcctttgtaccttagtacaccgcaagatgttcgacgaaatcgcagacgtctgcgatgcttacgagttgcggtatactctctgggtcgacgacctgaccattagtggccgctctattccggcagagatactggacaagatcaggcaaattattcggaaccacggactgaagagccataagatcagatttagtacagggcgacgccctgtgtttataactgggatcggtgtggtgggtagaaaactgatagccccttacaccttaaatctgaagatccaggaatgttgggccgattatcacgccgccaatacggtggccgaaagggaccagtgcatacagaccctattggctaatcttgggactgctaggtttatcgttggccccaaaacagctgcgggacaaaaactatccagtgaaatgaactcattgagacagaaaaaagctaaaatgtaccgcgaggatgcggctgagagtctcaagcgccgaactgaggcaaggtcccttatcgggagcagccagattgccgatgtgcctttctga

SEQ ID NO: 10331 - RNA, 1038 nt, synthetic construct
  source 1..1038: mol_type = other RNA
atgctgcctcggagccagcagcgagagcggtacgaattagagcggtcacccctcgcacaaaaacctacccaacgcgacgtggcccagctcttgggagaaaccagggatgacctgagacgactaaggaactacaaagagcactttattgtgagaaggacagccatcattggcaaaaaggggaagatacgtgagttggcctatccagaaggaagactgagggccttgcacgagagactcaagtaccagctaaacaaggtgaaacagccgaactatcttttcagccctcgccttcgcaggtcccagcgtgacaacgcggcattacacctggagcaaaatcagtacctgacgctggacctgaagcagttttatccatctacgaacgagagtatggtacgctcctggatgcgggaccagctcggcatgtacgaagatgtgtcaggtctgctgacagatctctgtaccgttgacggcaaagtgagctttggcagccccttgactcccgtgctgtgttcgctgatccataagagtatgttcgatcagatcgctcgtatctgcgataatcgcggactcacttatagtgtttgggttgatgacctgacaatctcggggagatttatcccaggcgaagtcctcaacgagattaggtgggtcgtgcgggatgccggtttgaagtctcatgcggtgaagtaccgcaacgggaatagaccagtcttcatcaccggcatcggggtagtcggaaggaagcttatagccccctcatccctaaatcttaaaattcgagtcgcttggagtgagtaccacactgctctgtccgatgacgaaagagatgaaatatgccaacgcctgctgtcctatctgggcacactgaggcatatttctggttctacttcagaaaccgggcggaaaatttccgaccagatgaatagccttagacagaagaggtctgctcggcgattcgcaagcgaggcaactcggaatgaggtgaccaagagccctcccgctccgaaaatggccgacccattaggactcccttggtga

SEQ ID NO: 10332 - RNA, 1050 nt, synthetic construct
  source 1..1050: mol_type = other RNA
atgaagagtcagaccctcaggaatcgtactcccactcatgagcggtacgacctgagcaggtccccctttttccagaaacccacacaacgcgaagtggctgaactgttgggggagactagggacgacctcaggagacttattaactacaaagaggagtttgttgtccgccggaccattgtgacggggaagaacgacaaagtccgggatctagcctacccagtgagtagatatcgggcgtgccacgagcgactgaagtttcatctcaacaaagtgcgccagccatcctatctgttttctccgcggaaacacaggtcccaaagagacaatgcagcgctgcatctcggcggcctgcagtacctgacactggacctcaagcaattttaccctagcacaaccgatacaatggtaagacgatggttcagggacgaacttggtctgtatgaagatgtagcagggctgctaacccacctgtgcactatagacggtaaggttagcttcggtagccctgtgacccccgtcctgtgttctttgattcatcgcgaaatgttcgatgaagttgctaggctttgtgaggttcgcggccttcacttttcggtgtgggtggatgaccttacaatcagcggcctgttcgtcccaggagaactcgtggaccagatacgggccatcgtgagggctgcaggattgaagtcccacgccatccggtacagaactggaaacagaccggtgttcatcaccggcatcggcatcgtcggttctaaattggtggcgtccaacgccctcaatctcaagctaaagcagggctgggcagactatcatgatgctgagacggatgatgagaaggatttcctgacacagcgcatgttaagtttattagggaccgtccggcagatttcaggagcaggaagcgacagagggcgaaaggccgccgatgaaatgaatagtctgcgccagaaaagaaatgagcgtcaacgaagggcccgtgcttcaaaatctgccctgcgacacgtgtcagacccagctgagttggtacctgccgatgcccctttctga

SEQ ID NO: 10333 - RNA, 1059 nt, synthetic construct
  source 1..1059: mol_type = other RNA
atgccacggtcttcacagaaagacaaaaaatttgagaggtatgagctgtccagatctcctttcgcccaaaaacctactcaacgcgatgttgcgaaactgctcggagaaaaacgagatgacctccgacggctcgtaaattataaggagcagtttatcgtgagacggcaggccaaaaccggtaagaaagagaagttgcgcgatctggcttatcccgaaaaccgactcagggcagttcatgaaaggcttaagtttcacttaaacaagatcaagcagccaaattaccttttttccccaagacggaagcgagggcaacgcgataacgctgcccaccacttagatcaggaccagttcctcaccttggatctgaagcagttctacccaagtactacagacaaaatggtacgcaggtggtttagagatgagctggggatgatggacgacgtggccggactgcttatgcatttatgtaccatcgatgggagggtcagcttcggatccccgctgacacccgtgctttgcagccttatccaccggccgatgttcgataggattgccgaggtttgcgatacttatggcctgcagtactcagtgtgggtcgacgacctaacgataagtggcagatttgtgcccggtgacgtcctgaataagatacggcagattgtgcatgcggctggcctcaagatgcatgacatcaagtttaggagtggcaaccgtcccgtgttcatcaccgggattggagtggtcggtgctaatctggtcgctcctaattccctccatataaagatccgcgactgctggactgagtaccactcggcaattaccgccgatgaaaaggatgcagttagccaacagctgttgtcccacttgggaacactgagacacattacgggcagcagttcagaggccggccgcaaagcagcagaccagatgaactctctacggcaggagagagacgccaggcgcaaagccgaacaaaagtgtcgtcaggcggaacgtaacgcaagagctagcgtggagattttcgacctgtctgacgcccctttcgaaatgacactgtga

SEQ ID NO: 10334 - RNA, 1047 nt, synthetic construct
  source 1..1047: mol_type = other RNA
atgccacggaaatcaacagcggccagccactacgaacgctatggcgttgaccgctctccatttgcccaaagacctactcagcgggacctggcgtcacttgtaggagaaacgcgagacgatctgcggcgattagccagctacaaagagcagttcattgtccggcgacaagtcgagacaggaaagaaggccaaactgcgcgacctcgcctatcccgagggtcgtcttcggggagtgcatgagcgcctgaagttccacctcaacaaggtgaaacagccctcatacctattttctccgcgtaaagggagaggccagcgtgataatgcgctccaccatctcgatcaggatcagtatctgactctggacctcagacagttctacccctccactagctcccaaatggtgagggagtggtttagggaccatctgggtatgtatgatgatgtggcaggactattgacgcacttatccaccattgatgacaaggtcagcttcggcagccctctcaccccagtactgtgcagcctcattcacaggccaatgtttgataggatagcagatatatgtgaggcacgggggttgcgatattcggtctgggtggatgacctgactatctccgggagattcgtgcctggagaagttttaaggcagatcagggaggtggtacagcaatttgggctgcagtcccataagattagttacaagaccggcaaccgcccggtgtttatcaccgggatcggagtggttggcagtcgcctggtggcacccaacagtctgaatctgaaagttaaggaagcctggacaggttatcacaatgccgtcacagacgacgaaaaagacgccatgtgccagcggctgctttcttaccttggcaccttgcgccagatcgtgggcggcaaaaccgaggctgggaggaaggccgctgatcaaatgaactcattgagacagaagagggacgcaagacggaaggccgctgcagaagcctacagaatcgaacgagagcagagacaggctgtgccctctgctgtcgctgctgacgctcctttctga

SEQ ID NO: 10335 - RNA, 1065 nt, synthetic construct
  source 1..1065: mol_type = other RNA
atgcagaagcgtgccgataagcggaatggagaaagatatccattgaatcggtcccccctcgctcagaacccatcccagtcagacctggcaatgctggtgagggagacaaaggcggacctaaatacattagctacaccagagtttaaggaacagttcctggttagacgtaccattgagacgaacggaaagactcgcaacctcgtttaccccgagggtcgtctaagagcagtccacgagcgcctgaagtttcacctgtcaaaaattgtacagcccagctacctcatgagccctaggaaaaggcgctcccagcgggacaatgcagttgcacacctcgaggcaacccaatatttaacgctcgacctgaaacagttctatccttccactactagacaaatgatccggaacagtctggtagctcagttcggaatgcaggctgatgtcgccggcctgatcgcccatttagcgacagctgatgatcgggcatgctttggcagtcccttgactcctgtgcttgcctctattgtgcaccgaccaatgttcgatttgatcgccgggcgatgtaacgtcgatgggctgtcttacaccgtgtgggtggacgaccttaccattagcggccctcagattaccggtcagttcagaagcgacgtgcgcggcatcatcgctcagaacggcctgaggagccacaaactgcggagccaaaccgggaatcatccggtctttatcaccggcattggaatcgtgggtgccaatcttattgtgcccaagcgaatagaactgcgatccaaagagctgtgggctgaattcaaggcatctcaaacttttgaagagcttgattcttccgctaccagactgctctcgcatctcggcggggtaaaagccgttgtggggccgtcaacaatcagaggacagaaattgagctctgagatgaatagtgtccgccaaaagagggaaaaggccaggcgcttccatcaagcctttgtggccgagcagcggacaaggtcgagtcaggcctgctgtatacagaacggggacggagtgggcgaacaggcggaaatatcattctga

SEQ ID NO: 10336 - RNA, 1056 nt, synthetic construct
  source 1..1056: mol_type = other RNA
atgcgaaaacggtatagattgaaatccggggaaaaatatcctttagaaagatctccgttcgcccagaagccatctcagcgcgatattgccgaattggtgagggaatcaaaggatgatcttaatcgtctcgctaccccacgctataaagaacagttccttgtgcgaagaaccattgagacgaacggcaagacccgggacttagtgtaccctgagggaaggctgcgatcggtgcacgaaagactgaaataccatctcagtaagattgcccaacctagctatcttatgtcaccccgtaagggacgagcacagcgggacaacgctgttgctcacctggaggcagcccagtttctcactctggatctgaagcagttctacccgagcactactcggcaaatgatcagaaactccctgatggagcagtttaagatggaggcggacgtggcaggtctgatcgcacatgtagcaactgccgatgacagggcatgctttgggtcaccactgaccccagtattggctagtcttgtgcaccggcctatgtttgatcggatcgcggaccgctgcgtggaagacgacctgtcttacacagtttgggtggatgaccttacaatatctggactgaggataacgggcaacttcagggccgatgttaggaagctcgtggcccagagcggcttgaaaagtcataaactgagaacccagaccgggaatagacccgtcttcgtcacagggattggtatcgtcggcgcaaacttgatcgtccccaagcgcctggaactccggagcaaagagctgtggacagaactaaaggccgctcagacacaggaggaaatggaggcctgttctgtccgcctcctgtcccacctgggtggaatccgcgccgttgtaggcgcctcatcccacaggggccaaaagttagctagcgagatgaacagtattcgccagaaactatccaaggctcgtcgggaaaataaggccagactcgctgaggagaaagcggccgctcaagagataagcagggtggaccccgacaatgagaaggagaatatccccttttga

SEQ ID NO: 10337 - RNA, 1068 nt, synthetic construct
  source 1..1068: mol_type = other RNA
atggcagtgagaaaaaggcgggtccgtaaggcctatgaacgttatgaaattgaccgatcaccacttgcccagaggcccagtcagagagacattgcatcactgatcagcgagaataaaagcgacttaaacaggctggccactcctcagttcaaagaacagttcctcgttaggagaagtatcgagtctggaggaaagacacgggacctggtgtaccccgaaggaagactgcgagctgcccacgagcgactcaagttccacctgaataagatagtccagcccagctacctgatgtcgcctcgtaagaacaggagtcagagggacaacgccgctgcacatttggatgctgcgcagtacctgactctagatattaagcaattttacccaagtacgaccaggggaatgattcggaactctctggtggatttgtttggtatggaggccgatgtggccgggctgattgcccacgttgccactgcagacgaccgcgcatgttttggttccccactgacccctgtactggcatccctcgttcacagaccaatgttcgatgcaattgcggatctttgcgctagctacgacttagggcacacagtatgggtggacgatctcactataagtggtaatcaaatcccgggccgctttgtgtctcaagtgcgcgccatcgtcgcttctcatgggctgcgctcccataaattaaaatatagaaccgggaacaaggctgtgttcataacgggcattggcgtggtaggatccaatctggttgtcccccgctccgttgagcgacggagcaaagacctttggcgggatttccagaaggctgacaccgtggatgaaatcgacaccgcgggcagcagattgctctcccatttggggggcatccgacacgtcgtgggcaaatcaagcaaacggggccagaagatctcaagcgagatgaattcggtccggcaaaaaaggacaaaggcgcttcggataggttctgagaagtccgcctcaacctctaacctacgctatctcacagccgaagagcaggaggaacgcagagatgagatcgatgctatccctttttga

SEQ ID NO: 10338 - RNA, 1041 nt, synthetic construct
  source 1..1041: mol_type = other RNA
atgtacgaaagatacgaacttgaacggagtccctttgcccagaaaccaacacagcgcgacatcgctgccctggtgcgagagaataaggaggacctgaacaagttaggcaccgacagatttaaagagcaattcctggtgcggcgaacaatcgaaacaagcggaaaagaaaggcggttagtgtatccagaggcaagactccgggccgtacatgagaggctgaaataccacttgaataaaatcatccagccgtcctatcttttcagtccaaggaagaataggtcccagcgcgataacgccgaggttcacctttctgcctttcagtatttgaccctggatataaagcagttctatcccagtacgacccgcaggatgataagaaactccctggctgtgcagtttggaatggcgggtgacgtcgccggcctgattgctcatgttgcgactgccgacgatcgtgcctgttttggctctccccttactcctgtcttggccagcctggtccacagacctatgtttgatgagatcagcgatctgtgcgtgtcatacggactcagccattccatttgggtagatgacctcactatttccgggcccaagatacctggcgcattcattgcagaaattcgtcggattatcgcttcatatggcttacgcagccacaagctgaaatactacactggtaataaagccgtgttcgtcaccggggtggggattgttgggtctaatctagtggctaagaagaaagtggagctgcgatctaaggaactctggcgtgcgctcaagaacgcagagacattggacgaaattgacacagcaaccacgcggctgctggctcaccttgggggaatcaagcagatcgtcggaaaatcgtcaaagcgcggtcaaaaactcagcaacgaaatgcattcaatcaggcaaaaaagagagaaggctttcaggaagaataccgagaggctgataaacgaagcctctggcttgcggcgactaagtccagaagagcaggaggctagacgcgaggagatcgatgcactccctttctga

SEQ ID NO: 10339 - RNA, 1002 nt, synthetic construct
  source 1..1002: mol_type = other RNA
atgcctcgcattcagagacgtctcaaccaggtcgagcgttatgaactggctcgctctcccttatcgcagcggccaacccaacgtgatttagcagcgcttgtgggcgaaacgagggacgacctacgaaggctagtaaattacaaagagcaattcattgtgcggcggcagactgaaacaggtaagaagaagaagctgagaaacctggcttatcccagcggtcgactgagggctgtgcatgagcgcctcaaatttcacctgaacaaggttaagcagcccgactatttactgtcccccaggaagggtaaatcccaacgcgataacgccgcagcacatgtggggcaggatcagtatttgacgctcgacctgaaacaattttacccaagcaccacaggagggatggtgaaaaggtggctgcacgctcagctaaggatggaggaagatgtcgccggcctgctcgctcatctcgttaccgtcgatggcaaagtctctttcggctcaccgctcacacctgtgctgtgttccttggtgcacagacctatgttcgataaaatagcaagcttgtgccgacaccggggactgaattacaccgtctgggtagatgacctgactattagtggaagattcgttccatccgcccttcttgtccaggtgaggagaatcatccaggaccatggactcagaagccatgacatccgcttccgcagtgggaatcggccagtatttatcacaggaataggcgtgctggggcgaaacttggttgcccctcaggcgttgcacctgtccattcggtcatcatttgaagagtaccacgccgccatcaccgacgtcgagagggacagtgttgagcaaaagcttctgagccagctgggcactcttcgccacgtggtgggggtgtcaagcaaggcgggccagaatgccgccgaccagatgcactctatcagacagaagcgggataaactcagaaccgctgagcaatactctactacactggcagccggttga

SEQ ID NO: 10340 - RNA, 1047 nt, synthetic construct
  source 1..1047: mol_type = other RNA
atgcccaggagagcacctgctaaaagcgagagatatcagctccaccgctcacctctagcacagcgacccacacaacgagatattgccaagctgcttggagagactcgggacgaccttcggcgcctcgtcaactacaaggaggaattcgtccagcgccgcaagatcgagtctgtgaaatcgggaaaaatccgcgaactggcttacccagttggtcgccttaggggggtgcatgagaggcttaagtttcacctcaacaaaatcaagcagccgagttatctgttctctccccgacggggctttggtcaaagagataatgcggcgtaccacatccggcaagaccaattcctcacgctggatctgaagcagttttatccaagcaccagcggggccattattaaacgttggctatgggaagacttgggcatgcctgaggacgtagctggcctgttaatgcacctggtcacagtggatgagaaggctagtctgggttcccctgtgactccggtgttgtgctcattaatccataggaaaatgttcgaccgaattgcggaaatttgtgacgcacgggggctcagatactccgtttgggtggatgacctcacaatcagtgggcggttcgtccccggagatgtattgatgcaggtcagagacataattcgcacctccggactgcggtcacacaagatcaagttcagaaccgggtcccgtcctgtgtttataactggcatcggcgtagtgggaccacatttggtggccccaaatacactgcatctgagaatccaagccggatgggccgattaccatgacgccgtgaccgacgatgagaaggacgccgcctgtcagactttgcttagctttctcggcacgttacgtcacatttctggtaggaagtctaaggccggccagaaagtggcagatcagatgaatgctctaaggatggaaagggaggttagacagaaatttgctatacagctggataaagagaaggcagaactgagggtccagaccaactattgcgccgttgaagacctgcccttcgatctgtga

SEQ ID NO: 10341 - RNA, 1029 nt, synthetic construct
  source 1..1029: mol_type = other RNA
atgcccgtgaccaagaaagtgcaaagggccgagcgttatccaatcgcccggagcccattcagcatgcgacccacacagcgcgaagtagctcggctgctcggggaatcaagggacaatctccgccgcttggtgaattacaaggagcaattcgtgcaacggagggatcttgaaatcaacggaaaactgcgacacctggcttatcctgaatctcggctccggtccgcacatgaacggctgaagtttcaccttaacaaaattcagcaaccggcatacttgttttctcctcgccgcggaaagtcccagagagacaatgctgcactccacttagagcaggtccagtatctaactctggacctgaaacaattctacccttccacgactagtgccatggtgagaaggtggtttattaatgacctgggcatgtaccaggatgttgctggccttatgacccaccttgtgacgattgacgacaaagtgtctttcggttccccgctgacccctgtcctatgcactatggtgcatcgacgcatgttcgatcagatcgccgatatttgtagggccagaggacttaacatgagcctgtgggtcgacgatctcaccatctcgggacagtttgtaacaagagaggttctcagggaggtcaggacggtcgtgagggctttcggcctgaagacccacaaaattaagtaccgcactgggaaccgacccgtttttatcaccgggatcggcgtcgtgggcagtaatctggtggcgccagccaaaatgaatttaaagatcaaggccgcctgggaggcctatcatgcggctcagaccgatgcggagcgtgatgcttgcgctcagcacttactgacactcttgggtacagtgcggcatatagcaagacgagggtcacccttggccagaagagtagccgaccagatgaactcactgcggcagaagcgtgcagttctgactgttacaacaactaccagaagcgcacaggcgggtgccgctttgatagccaacgacgcagtcggcgatccattttga

SEQ ID NO: 10342 - RNA, 960 nt, synthetic construct
  source 1..960: mol_type = other RNA
atgaccaagcgaacccacgagaggtacgccctgacacgttccccattggcgcagcgtctgacgcagaagaaactcgcaaaccttcttcggcggccgcttccccagttgaaaggcctgataaaatacaaaaagagcttcgttgtcgccgaagtgagagagatcgatggaaaagccaggcccctgtgctatcccagaggacctttaagaagtgtgaatgaggcactgaaatatcagctctcgaaaatcagactgcctgattacgtcgcatcaccaagacgcggaaggggtcaacgcgagaacgctgccgtccatgtggacgccaaacagattttgaccctggacctcaggaagttctacccaagcgtcagtagacggtacatcgctaggtttttcagggaagagttctccatgcaccctgacgttgccggcctgatcactgaactattaacctttgaagggcgtgtcctatacggggctccggctacgcctgtgctggtaatgcttgctcacaggaagatgtttgatcagattgacaacgcctgcctcgcttttgggacaaagatgtcattatgggtagataatctcacaatttctggcgctgaggtaccaggagctttgctcgttcaggtgcgggaaattatcgcgagtcatggctataagacccatgacatagcattcgtgactaccaaccgagatagcactgtgacaggtgtcgtggtgcgatgtggggaactgcaccccgccaattcttctaatctggcaattcgcgatctggaggccgcgctgagaaactccgttgaccccagcgagtatgaggccaaggcaaataggttgctgtcacggctcggcgggcaactgcacatccttggcactcagcgcgaatggggtcagaagatcgcccgccgaatgaacgtgataagacaaaagcgcgacaaacgggtgcggtccaattctaagtga

SEQ ID NO: 10343 - RNA, 987 nt, synthetic construct
  source 1..987: mol_type = other RNA
atgacaataaagcggaaagagccatcccacagaagcgaccggtatgaactggaagccagtccactgtatcagaagcctactcaaaaacagtttgctgagttggttggactgtcaaagtctaaattacgaggccttatagatcacaaaaagcagtacattatccgtcgagacgcagaaatcaacggcaaaaaaagaaggctggtctaccctttcggtaaatttcggagtgtccacgagaagctcaagtttcacctgaacaaaattatccagcccgcatacctctacagcccccgaaagggaagaaaccaaagatccaatgccgtcttccatctgggacagacccagtatcttaagctcgacatcaagcagttctacccctctaccagttcggaacatgtttttaggtgggcaaaatacgacatgcgcatgtctgacgatgtggcagggctcctggtgcatattgcgaccattgatgatgtagtatccttcggcagccctcttacgccggtcctagctacccttgtgcataggcgcatgttcaatgccatagccgaagaatgttcagcccgtgggttacgaatcagcttgtgggtggatgatatagttatctctgggaagtttattcccggcccactggtatcccgcattagagacttgacgaggagcaatggtctaaagagccataaactggagtatttcacaggctataggcgcgtgactatcactggagttgtggtgaaaggggacgagattcactcccctcggaagctgcacacagagatctcaaacgcttatggactcgccatccaatctaactccaggattgaggctgaggccgccgtcgatcggttgctcagtactctgggccggtacagggtgatggtgggcaaggggtcaccaatgggtcgtagggcgtccagccggatgaatgctatccgccagaagagagtgcgctttgtgtcggagagatgctctaccacagactga

SEQ ID NO: 10344 - RNA, 1041 nt, synthetic construct
  source 1..1041: mol_type = other RNA
atgacagtgaaacgccacaaacagaataagtatgaacgatacccattcgagaactctccatggactcaggacctgacccagcgggacttggccgagttgttagggtggaagaagcagcagttagaggcgttggttcgggacaaagaccgctatattaagagggggcccaagcttatcggaactaaaaccagggagctggccgtgcctacaggaaaactccgtaccatccacgagcggatcaagatacacttgaacaaaatcaagcagccggaataccttttctcaccacgcaagggccgcgctcagcgtgataatgccgaacatcacgttgggcagaatcaaatcctgtctctggacataaaacagttttatccctctacgacggacgaacatatttttagatgggcataccatgtggctggactgagggctgatgtggccggtctgttcaccaagctagtagctgttgacggcaagatgccttttggcagccctgtgagtcctgtcctgactactcttgtccatagacaaatgttcgatgccatcagtgatatttgcaaagagcaagatctcaagatgagtctatgggtggatgacctcgtgatttccggctccttcgtgagaggcaaggtcatggaggatgtcagggcggcaattcggcggtttggctttcaaacccacaaaattcaattccgctcaaccgcccgacctgtcccgatcacaggagtgcccgttaccaagacatcaattggcgcacccctgtcgctccataggcgaatacagagcgggtatgccgagctgagacagcgcttaacagacgcccagagaacccaggcgacagataaactgctcgctgccctgggtacctaccgttaccaccttggtgcttccagcgaacagggaagactggcagccaaccggatgaacgcactcaggatgaggcgagctcggctgaagcccagatatgtgacttacccagtagggagcactcctgacgagacgtccacagaaatcgatgacggaactcccccatgggaatga

SEQ ID NO: 10345 - RNA, 1041 nt, synthetic construct
  source 1..1041: mol_type = other RNA
atgacgcggcgtaaacaacccccctacgagagataccactttgaccagtccccttgggtgcaggatctcactcagagagacttggccgccctgttaggctggaagaaacagcagctggaggctcttattagagacaaggaaaggttcatcaaacgggaagccaagctagtgggtacgaagatgcggaatctggctgtacctaccggcaaactgcgcaccatccacgagaggctcaagttccacctgaacaaaataaaacagcctggatacctcttcagtccccgaaagggtagagcccaaagggataacgcagagcatcatgctggccagactcaattcctgagcctagatatcaagcagttctatcccagcacaacagatgagcacatttttaggtgggctcatcacatggccggtttgagggccgatgttgccggcctgttcaccaagcttgtggcaatcgacgggcggatgccgtttggcagtcctgtctctccagtgcttactacccaagtgcatcgtacaatgtttgacgaaatccacgccatctgcgaggccaaccgacttcacatgtccctctgggtggacgatttaaccatctccggagtgtttgtccgcggggccattgccgaagaaattagggcagtaataagacgccatggattccagactcacaaggtcgcttttagaaatgcacatcggccggtggtggtcaccggagtgccaataaagaataagcgggtcgtagctccacgcagcctccataaacgcgtccaggcagggtatcaagcgttacgagagtcacgtacagacattgagcgggggattgcgatcgacagactgctgtcagcgctcggaacttatcgataccacctgggtgcctctaccgcagagggcaggacaacctctaacaggatgcagatgttgagagttcggcgcgctcgcctgaaaatgagcgcaattactgttccaacggtgggacctgcccaggcgacatcggttctggctggggctgaaggcttggacctgccctgggattga

SEQ ID NO: 10346 - RNA, 1032 nt, synthetic construct
  source 1..1032: mol_type = other RNA
atgaagcagcataaacagagatacgagaggtatttgtttaaggattcgccctgggtccaggacttgactcaaagagacttagcggagctgctgggatggaaaaagcaccagctcgaggccctgattcgggacaaagagcggtgggtgaaaagagaaccaaaacagatcgggcttaaactgaggaatcttgccgtgcccactggaaaattacgtaccatacatgagcggctcaaatttcacctgaacaaaattaggcagcctgaatatttgtttagtcccaggaagggccgatcccaacgcgacaacgcggagcaccatgctcagcagacacagttcctgtctttggacatccagcagttctacccaagtaccaccgacgaacacattttccggtgggcatttcacgtagccggcctccgatccgatgtcgcagggctattcaccaagctggtggcaatcgataggaagatgcctttcgggtcaccagtgtccccggtgcttatcacacacatacatcgtgccatgtttgatgagatcttcgcgatctgccaggccaatgggctgcgcatgagcctgtgggtggatgacctgacgattagcggaaccttcgtccggggcgagcttgtcgaacagataaggggtataatccgccagagggggtttcaaacacataagatcgagttcaggagcgccgctagacgggttattgttacaggtgttccaattgaacgacgccgcgtgatggctcccagagcccttcaccaacgcattcaaaatggctacgccgctctccggggcgacttaacagacgtagaacgtggcaaggctatcgataagttgctgtctgcactgggaacttatagataccacctcggaccgtcagaacctggcggtcgaaaggccgccgatagaatggaggctctgcgcgtgcggagagcaaagctcgatatgactatggtgacgctacctgcagttgagaacgtcatcaccgcttcttccactctccccggtagcgagctgccttgggaatga

SEQ ID NO: 10347 - RNA, 1047 nt, synthetic construct
  source 1..1047: mol_type = other RNA
atgaagcgcagaaaacaacaggaatacgagagataccccttcagtgattctccttggactcaagacctcacccagcgtgacctggccgagcttataggatggaagaaacaccagctagaggcacttgtgcgtgataaggaacgctatacgcggagaaaaacagagttaatcggcagcaagttgcgagatctcgctgtcccgacaggtaaactccggactgttcatgaaaggctgaagttccatctcaacaaaataaagcagcctacatatcttttctcacccagaaagggaagatcccaacgggacaatgcggaacaccatgtggaacaggtgcagttcctgagtttagatatcaagcagttttacccaagcacaagcgatgaacatatttttaggtgggcctattacgtcgccggtcttcggagtgacgtggcagggctgctggtcaagttgattgctatcgatgggaaaatgccctttggctccccagtctctcccgtgctgaccactcacgtgcacagaagcatgtttgacgagatctacgagctctgccggtcgcagggtctaaagatgtcactctgggttgatgacttgaccgtgtctggccagttcgttaggggggagttagtggaggccatccgcgtaattattcggcggcagggctttaagacacacaaaataaaattccggtccgttggacgcgcacagggaggaaggcctgtcgtggtgaccggggtcccagtacgcgctagacgagtagacgcgcctttttctctgcagaagcgagtgcaggatggttatgccaagctgcgtccggacctgactgacgtagagagagcccaggcaattgactccctgctcagcgctctgggcacctataggtaccacctggggcgcagctccccagaaggaaggaaaaccgccgaccgcatgcaggccttgcgacaacgaagggctaagctggatctgaccgttatcacccaaccctcaggccctatcaaaccctggggcactacaacgagggactcagatgtgccatgggagtga

SEQ ID NO: 10348 - RNA, 1047 nt, synthetic construct
  source 1..1047: mol_type = other RNA
atgaagcgcagacggcaacagaaatacgagaggtatagtttccgggatagcccttggactcaggatctgactcagagagacttagcagaactcattgggtggaagaaacagcagctggaagctcttgtaagagataaagagcggtacacaaaacggaagcgcgagaaaatcgggagcaagatgagagacttggccgtccccgtcggaaagttgcggacagtgcacgaacgactgaagtttcacttcaacaagatcaagcagcccccatatctgttcagcccacgcaaaggccgatctcagagagacaatgccgaacaccacgccaagcaaatacagttcttatccctagacattaagcaattctaccccagtacaaccgacgagcatatatttcgatgggcttactacgtcgccggactacgatctgacgttgccgggctcctggtgaaactgatcgctatcgacggcaggatgccttttggttcaccggtgtcacccgtgctcaccactcatgtgcataggcatatgttcgatgagatttacgatctgtgttgccgaagggggcttaagatgtctttgtgggtggatgatctgacgatctccggacagttcgtgaggggcgagttggtggacgccgtaagagctgtgattcgccgtcagggtttcaagacccacaaaattaaatttcgctcggttggacgcgcccaagggggcaaacctgttgtcgtgacgggcgtgccacttagggcaggacgggttgacgcgccgtttagccttcagaaacgtgtccgggacggatatgctctgttgcgcacagatctgacagacgtcgagagggcaaaagccatcgattccctgctctctgccctgggtacctatagatatcacctgggccgtggctccccagaaggcagaaaggcggcagatcgcatgcaagcgctccggcagaggagagctaagctcgacgcaaagggctacgtaaccgggcctaaggcagaaggttcatttgaggacagggttaccactagtgatgtgccctgggattga

SEQ ID NO: 10349 - RNA, 954 nt, synthetic construct
  source 1..954: mol_type = other RNA
atgaagaccacaaagggacgtctggagtggctcatcgagaataaagaacggtttaccaagcgggaagaccgacagattggcaggaagaccagaaacctgtgctaccctgttggtaagctcaggggcgtgcacgagttgttgaagttccatttcaacaaaattcgacagcccccttacctcttttcccctagaaagggccgttctcaacgagacaacgccgagcaccacgcagataaagtgcagtttctgagtttggacatcaagcagttttatccgtcaactaccatcgaacacgtttttagatgggcttatcatgaggccggtctgaaagccgatgtggccggcatgcttgcgcacctgatctgcattgacgggaagcttccatttggctctccagtcagccccatagccgctacacacatacatcgctctatgttcgatgcagtttacgatatctgtctagagaatgatctccagatgagcctctgggtagacgatctgacaatttcgggggccttcgtacgcggggaactgatcgaacagattcgcagtgtgcttcgtcggcacggattccaaacgcacaaaataaaattcagacaaagcgacaaaccagtgatcgttaccggcgtcccagtcaagaataggcgggtgatagcacctcggtctttacatcagagggtcgaagacgggtatgctgagctaaggggagcagagtcagataatgctactgtctccgcgattaaccagctgttgtccgccctgggcacaatgagataccactatggagctcagagtgtggaaggacgcaaagccgcggaccggatgcatgcactgagaaggcgcagagacgctatccagcaagccagcagcaggcagattccctcagacctgtccatccgcaagcaggatgaggccgtgactggggatggtcatttaccctgggtggctgactga

SEQ ID NO: 10350 - RNA, 1038 nt, synthetic construct
  source 1..1038: mol_type = other RNA
atgcggcagaggaagccaaaaaggtacgagcgatatgcccttgaggattcaccatgggttcagaacctcactcagcgagacttagctgagctgctcggctacactaaaacccaactagaagccttaatcagggacaaggacaactggattggcaggagaactgagatgataggcagtaagctcaggaacttagctgttccccgaggaaagctgcgcgcggtccatgaaaggctcaaattccacctcaataagatcaagcaacccgattacttgttttccccacgcaaaggacgggcacagcgggacaatgccgagcaccacgtttcccaggggcagttcctgagtcttgatatcagacagttctatcctagcacaacatctgaacacatcttcagatgggctcatcacgagctggggctgagaacagatgtggccggtatgctggtccatctggtgtccgtggatggcagaatgccattcggatcaccaatcagccctgttctcacaactttggtgcaccggtcaatgtttgacgccatcaaactgatctgcgacgcccatgatctgaggatgtccctatgggtggacgaccttaccattagtgggcgggccattcctggtacgctgattgaggacgtgcgggctgaaatgcgacagcgctcgtttcagacccataagatacagtttaggagcggtaaccgtcccgtaatagtgactggcgtcccgattgatggggaccgtgtagctgctcctcggtccgtccacgagagagtgagaacaggctacgcagcccttcgagtccctctagcggatccggaccgcgctcaacaaattgataagctgctgtcagcccttgggaccctccggtatcacgtaggacgctccagccccgaaggaagacgtgccgcaaatcgcatggatgcattgaggcgccgccggagctctttgagtaaatctgtgacgaccctgcctacactgaccgacagagaagcatctgcggagctgcccgtgtctaccagcagcttgccctgggaatga

SEQ ID NO: 10351 - RNA, 1038 nt, synthetic construct
  source 1..1038: mol_type = other RNA
atgaaacgtagaaaagtcagtaggtatgagcgctacgcatttgaagattccccttgggtgcagaagctcacacagaaggagctggcaacacttctggggtataccaaagatcagctcgaggctctcatcagggacaaagataagtggatcggacgccgggctgaagtgatcgctggcaagaaacgcaacctggcggttccttatggacggttgaggggcctgcacgagagacttaagtttcatctcaacaaaatccggcagccagattacctcttctcgccgagaaaggggaaggctcagagagacaacgctgcccaccacgtgggccagacacaattcctgacgctggacattaggcaattctatccaagtaccaccggggagcacatttttcggtgggcgcatcatgaagccggcttacgccccgatgtagcagggatgttggtgcaccttgttgcggtggatggcaagatgccttttggtagccccatttccccagttctgactgctttagttcatcggcctatgttcgatgccatctccgggctgtgcgccgagagagacttacacatgtctctgtgggtcgacgacctcaccataagcggacgagaggtgggcggtgacctaattgaccaggtaagggccatcatgaggaaggccggcttccagacgcacaaaatcagatttaagatgggtaacagacccgtggtcgtgacaggtgtacctattgatggctctcgagtgactgcaccccggtccgtcaatgaacgtgtccggatagggtacgcaaatctgcgtgtggctgccaatgataatgaacggcgacaagccatagacgccctgctgtcagcccttggaacctataggtaccatatgggccgcggaactgctgagggacgaaaagcagcgaacagaatggacgccttgaggaggcgccgctcagccttgagtaattcataccgaagcccggccgaagtggagctagactctgctagcgaggcagcagcttacgatggggaagccccaccctgggaatga

SEQ ID NO: 10352 - RNA, 981 nt, synthetic construct
  source 1..981: mol_type = other RNA
atgtgggcgcagaatccaggtcaacgcgatattgcttcgctgattggcatgacaaagggccagcttggagctattgtgcgcgacaaagagaggtatattagaagggacaccatcgacattaatgggaagctgagaaatctgaccgtgccaaccggcaagcttaggatggtacacgagcgcctcaaatttcagctgaacaaaataaagcaaccaccctacctttgttcccctaggaagggggtaggacagcgggacaacgctgagatgcatgtggccggccaccagctgctgaagctggatattcggcagttctaccccaaaacgatgcaggaggatatttggcggtgggcccattactctttgggcataatggacgatgtggcaggcctatttgcaaaattagccgctatcgacgggagaatgccctttggtagtcccatcagccctgtgctcacctccctggttcacaggggaatgttcgacaaggtctacgcaatctgcggaagccatggcctgaagatgagtttgtgggttgacgatttaacgatcagcggagcagaagttcctggaggggccgtgactgatatccgtcaggccatccgagcaggcggcttccaaacacacaagattgaatatctgatgactgcacgccccaccgaaataactggagtgccgatcgccaaagggagagtcctggccccgcatgctatccaccgccgaattaaggagggctatgaagccctcaaggtcgccgcgagcgatacagaacggtctaacatcatcgataaactcttgtcagcactagggagttacagatatcacttgggttcctcaactccagagggtcggcttgccgctgatcgaatgcaatcactccgtcagaggagagctaaaatgaccatcgtcgcggagactcctcagacactctcctctatacaggccgtgaccttcggggctcctgacacactgccatgggactga

SEQ ID NO: 10353 - RNA, 1026 nt, synthetic construct
  source 1..1026: mol_type = other RNA
atgaagcggccgagggatagaagatatgagcgctttgggttggacgcgtccctttgggcacaggaccccacacagcaggacgtggcacggctcctcggcatgactaaagaccagctcgaagccatcgtgcgggacaaggaacgttacacgtcccgccgaaccctggaaataaacggcaaactaagaaatttagccatccctacaggcagactgaggcggatccacgagaggttgaagttccagctgaacaaaatcaagcagccaccttatttatgcagccctaggaaaggcatagggcaacgcgataatgcggagcgccacgttgatggtgcccagctccttaaaatagacattagacaattctaccccagaactatgcaagaagatatttggagatgggcccaccatacaatgggcattcgtgacgacgtagccggactgatggcgaagctggtggccattgacggtcggatgccattcggatctcccgtgagccctgtactgacgacacttgtccaccgacccatgttcgatagaatctacgaggtgtgtggggtgcgcgctttagccatgagcctgtgggtggatgatctcactctgtctggaactgagatcaccgctaacaccattgtcgctgtcaggcagatcatcagggatggcggttttcagacccataaaatcgaacatttggccactgcacggccagttgacatcaccggagtgcccattgcagccggaagggttttggcccctctggcacttcaccgtcgaattcaggagggttttacagctctcagagctgccacaaccgatgcggaccgagcatcaataattgacaagctgctgagtgccctcggcacctaccggtatcatctggggacttccactctggaagggcgcagggccgctgataggatgcacgctctaaagcaacggcgagctcgcatggcaatcaccgctgtgaccgtcccggcaacaacgaccgtccatgaggctaagtcaagtgccgccctgccatgggagtga

SEQ ID NO: 10354 - RNA, 1152 nt, synthetic construct
  source 1..1152: mol_type = other RNA
gataggaagagagctgatctcagaccgaggcgcccctctagatctagaagcaggcgcgcagcagatcatcacgtgtgtggcgccggactgtccgcagtacctaagaatcgactgcgacagcgggctgcaaaaaggccccgctatgaacgctacgaactggccgactccccttggacaaagaaactgactcagcgggatcttgccgtcctactcgggaccaccaaggaccggcttgaagccttggtgagggatcacgaaaactacgtccatcgacgcgatgaaaatatcaagggcaaactcagaaagctggctatcccaaggggcaaattacgagcagtgcacgagcggctgaagggtcaccttaacaaaattaagcaacctccctacctgtattcgccccgtaaaggacgcggacagcgggacaacgcctttttacatgcgagtagcgcacaggttctgaaagtggacattagccaattctacccgcagaccacagtcgaggacatctggcgttgggctcactatacggtagggatgcgcgaggacgttgccgggttgttcgctaagctcgtcgccatcgatcggaagatgcccttcgggtcaccaattagcccagtgttaacctccctgatccaccggccaatgtttgacagagtgtaccagctggtccgtgaggcgggatttgagatgtctctctatgtggacgatctaaccatatccggacagggaattactggtgagtttcttgctgccgtacgcagcgagatcagaagcggggggttcaacacgcacaaaattgaattcctggaagccgcccgccccgtcgttattactggtgtgcctatagccggcaaacgggtgttggcccctacagctctccatcaaaggctgagacgaagttacgcggacttgaagtcagctaggtccgataaggaaagagcagaggtgattgaccagatcctgatcgccctgggcacttatcgtcattttgtcggcgcaagtagtgacgagggccggaaggcggccaatagaatgcacgctctcaaacagaggaggcgaaatctgtctatagagcttgtgaccatgccgacagttgatttcgtgccaacagctactttgtcacccgctgcaccaggcgttccttgggcctga

SEQ ID NO: 10355 - RNA, 1065 nt, synthetic construct
  source 1..1065: mol_type = other RNA
atggcaaagccaaccgataagaccataagcgaacgctatgccttcagtgaatcaccgctcgttgggctctccacccagagaaaactggcacaactgctgggctccagtaaatcgaggctgcacaaattggtggctgctgtggaatccgatccctctaactgctacaaaatcgaggatagacaggtgggagagaaactacgcaccttttctgtacccgtggggcagatgcgtaagattcatgagcgcatgaagattctgctgggaaggatctctctgccagagtatgtcatgagcccccgtcgaggtaaaaccatcgccactaatgccacagctcaccggcacgccgcggagttactgaaggtggatgtgaagtcctactatccgtccacgacagacgagctggtgttccgcctgttccatcatagatttgggatacctggcgatattgcaggcctgttaaccaagttattgactgtcaacggcagagtgcctattggaagccctgcatctccaattcttgctttctgggcttcaaaacccgcctttgacaaaatcgccagtgccgtccaatcacggggcctcaagcctactctgtgggtagacgaccttagcatttcaggccgccacgttccacgtgagatcgccgacgtcgtctcgtacgaactaggaaagctcgggtacatgggacacaaggtgaaatttcagtcccgacggcgaggcttttctatcacaggagttaggatcgacagcaggggacccggccccacaaatgctatcaacctcaagataagagatggcctgcggcggcttgagcgcaagagtaatacggacgaagaaacttcaaaattgctagctcagcttattggtttgaacgggcaccggctcggtacaatggctaaagatcacccagccgcacctagggcgaggaagctgcagcaacatttgcaccagagacggaggcgacatctcatgaccatgcaggagactctgtctagctccggtcaggcagacagcaaggggcttagcgcctctgccgcaagcagagccttcaggagtgcgtcctga

SEQ ID NO: 10356 - RNA, 918 nt, synthetic construct
  source 1..918: mol_type = other RNA
atggccgagacaaacaccctgcctcttagccagtccgcactctacaaagtgcagagccgggcccgcctcgccaaaactttgcttatttccccccggcatttaaaatttctcgctcgcggcacccagtataagctgacatcgattctggacaagaatgtaaagccgagaatgctgcaagtgcctcagggcgatctgcggaaagtgcacgatagagtaaggtatctcttcgcccagctgaaggcgccagagtaccttcacagcggagtgaaaggtagaagtcccgtcacgaacgccaaaaagcaccgtagcggggccgctggaatgagggtggacgttcgaaagttttttccatcttgcagcaggctgagcctcgctaagttcttccatcatgacatgggtatggcaggagatgttgcgcatcagctatcactgttgtgtacatgcgatggcgcacttccaaccggcagtcccttgtccatgtcactcgctttttggatgcaccgacgagtgttcgaccggatagagcgtatggccagagagcgcggctacgtgttcactttattcgtcgacgatgcaaatttttccgccgatctaagtatccccagagaatttgaactggccgtcagatcagagctcaggcgagtccggttacgggctcaccctcgcaaaacgtctcgggttgcgcccggtacagctaggcaaattactggcgtgatcttgcctaattcagacgagatcagggtgccgaacgcacagagactgaagttcctgcgcgggctggaaaccataaagcagaattctgcacttaaagccgaaagggttaactccctgagaggactgctagcctggatgcgccaaatcgaaccaaccatcttccctcgtgctgggggggagttgactaggctgaactctaagtga

SEQ ID NO: 10357 - RNA, 1029 nt, synthetic construct
  source 1..1029: mol_type = other RNA
atgccaatgaaaaatccttcacaccggcgtgaaaaggccttcgggcgtgccaggctgcgcaagaacaagtcggcccgatatcccattgaacgctcacccttctggcggctgtcctccatccatcagttggcagcattgctggacgtccctgtggaagacctggaggccacatgcatggccccgagctacaatcgctttgacgaccagccaaaacctggcaaggaggctcggcacatccaggagcccactgaggcaaccctaaaaatccattatcgcatcgcacggcacctagatagtatccagaggcccgattttctgcacagcgccaccaagtgcaggagccatgttactaacgccagagcccatttggcgtcaggaggcgcagtcgtggccatggacattcggaaattcttcgaatccacaacataccaccacgtcaaggcttttttttacaaggacctgggctgttcccatgatgtggcgaggctgttagccacggtgtgtaccgctgatggacacctgccaaccggcagctgcatatctcccctgctgagttatttcacccatcgacagttatttgcagaaattgagaaactttgtgtggtcacgaatgtgattatgaccctctatgtggacgacctgactctgagcggtatccacgccacaaaatccatgctttaccggataaaagcactcattgtacgccatgggctgcagactaaaagtacaaaggatgccgttttaagaccgggtaagtctgctatcatcaccggcgctatccgggcgggagatcaactccgactcagaaacaagcaccacggggcaatagttgaaattcaagaccagatgtcacttggccgcactccacctcttgaccagctccgaggcagaatagcttctgccagggcggtcgatcctcaagctgctgctaggctggaggccagactcgagaggattgtgagacgtggtcagctcgctaacggagagggagatttgtctgggattgtaagaaaaaagccagggatctga

SEQ ID NO: 10358 - RNA, 1002 nt, synthetic construct
  source 1..1002: mol_type = other RNA
atgaaaaaccctctccataagagagagaaggccctaggccgggcacgacttaggcggaatcaatcagcccgctacccaatagagcgtagtcccttttggaggctctcgagcatccaccagctggccatgttactggacgttccagtccaggagataaaggctacgtgtatggagccgtcctacaacagattcgatgatcatcctaaacccggcaaggaggctcgccatattcaggaacccactgataggactttgaagattcactatcgcatcgcccgatatctggacagcattgaaagaccggaatttctgcactctgccaccaagaagcggtcccacgtgacaaatgctcgcgcacatcttccttccggtggggccgtcgtggcaatggacatcaggaaattctttgagagcaccacttaccaccatgtcaaggcattttttcaccgcgacttgggatgctcacacgatgtcgcgagattgctcgccaacgtgtgtaccgccgacgggcatctaccaaccggaagttgcatctctccattactgtcctatttcactcaccggctgatgttcgctcaaattgaacggctgtgcgttggtaaaggggttgtgatgaccttgtacgtagacgaccttacactgagtggcatgcatgccacgaaaagcatgctgtatcagattaagaacctcattgtgagacacggactgcagacaaaggccacaaaagacgctgtagtgaggcccggcaagagcgctattatcacaggggtgatgagggctggagagcagcttaggctccgtaataaacaccacggagccatcgtcgcgatccaggatcagatagccgctggcgaaaccgaatcattccatcagctgagaggtcggatcgcagccgccagagcagtggatcctcaagcagcgacacgcctggaggcgcgaatgaaacgtctcgcacacgccacttctggggatgtggctaccggcgaggacgctcgatcttga

SEQ ID NO: 10359 - RNA, 990 nt, synthetic construct
  source 1..990: mol_type = other RNA
atgaaaaatcccagtgaccggcgtgacaaagcagctggacgggctaggctacgaaagaacgagactggacgctaccctgtcgaacgctctcctctgtggcgactctcatctatccacagattggccgttcttctcggggtgcctgtgcaggaacttgaggcggcctgtatggcgcctagctaccatcggttcgttgatccaccaaagaaaacgggcaaagaggcaaggcacatacaggagccaaccggcgccacactcggaattcactatcggatcctgcgccacctggattcgatccagaggccagactttctccatagtgcgaccaaaaatagaagccacgttacaaatgcgcggtcccatttagccagcggtggagctgtccttgggatggacatccgcagattctttgaatcaaccacatatcaccatgttaagaccttcttccacaaggacctggggtgctcacatgatgtggcccgactgttagccacagtgtgcactgccgatggccacttgcccaccggttcctgtatctcccctctgctgtcctattttactcataggcgtctgtttgcagagattgagggcctgtgcgtcgagaaacgggtgataatgaccctgtacgtggacgaccttactttgagtggcgtgcacgcaaccaagagcatgctccatcagataaaagcattgatcgccagacagggactgagaacaaagccctctaaggatgctgtagtgcgcccgggtaagccggccattattacgggtgtcgtccgggatggggaccagctgaggctgagaaacagccatcacgatgccattgtacaaatccaggacttaattgctcacgggaacgccccaagcctccacgagcaactaagaggccgagtggcatctgcacgtgctgtggaacccactgctgctgctcgccttgaagccaggctcatcaggctgatgtccggcgaaaggcccgccgatagtaagtga

SEQ ID NO: 10360 - RNA, 987 nt, synthetic construct
  source 1..987: mol_type = other RNA
atgaccagagacgcacataaacgcgataagtctgcggggagggcaaggctgagaaaaaacaagtctgccaggtatcctatagaatcctcccccttgtggtccctgtctagtatccaccagctggccgtcctcattggtatcccggtcgatgaactggaggtgacctgcacctctcccacctatcataggtttgatgaggccgcgaaggagggtaaggaaccccgccatatccaagagcctaccggcgcgacactccgagctcactaccgactggtgaggcacttggattccatccagcgtccagactttttacactcagccaccaagaaacggagtcatgtcactaacgcacgtgcacatgctgaaagcggcggcgctgtggttgccatggacatccggaagtttttcgaatcaacaacttaccagcacgtcaaacgtttcttccataaagatcttgggtgttcacatgacatcgctcggcttctggccaatatctgtaccgtggatggccacttgccaacaggttcctgcgtgagccctcttctgagctattttacacacagacatctcttcgcagacattgaacgccgctgtgtggagagaggggtcactatgacgctgtacgtagatgacctgacattgagcggccctcacgccactaaaagcctgctattcgccatcaaggctatgatcaaacgatgcggactcaggactaaagatgccaaggacgctgtggttagacccggaaaagctgccattattacgggagtggttcgctcggatggcggggtacggttacggaataagcaccacggagccattgtggctatacaagacagtatagctactaccggagacaataacgacgacgtgcttagaggccgactcgccgctgccagagcagttgagccaaatgcagcgacacggctagaggagcggctgaagcgcattattgggaaccagcagaggaacgcatcagccaagtga

SEQ ID NO: 10361 - RNA, 987 nt, synthetic construct
  source 1..987: mol_type = other RNA
atgaaatctctgcaacatagagtagacaaggcagcgggacgtaagcgactgcggaaaaataagagtgctaggtatccaatcgagcagagtcccttttggggcctggctagcattcacacgctcgcttcccttctcggggttccggtcaaggacttggaagccgtgtgcctgagccccgcatacaacaggtttgatgaacccccaaaacccggcgccaaacctggcaaagaacctcggcatatccaggagccggttgacgctactctaaggatccactatcgcatcgtgaaacatctggattcaattcagaggcctgactttctccattccgcgacaaagcagagatcacacgtgacgaatgctcgcgctcatgtagatgccgggggagcggttgtggccatggacatcagaaagttctacgaatccaccacataccatcacgtcaaggcgttctttcatagagacttaggatgcgccctagacgtggcacgcctcttggccactgtgtgtactgccgatggccacttaccaacaggtagctgtatttctcctcttttgagctatttcgcacaccgcaagatgttcgccgctgtggaggccctgtgcgtcgagaagcaggtcaccatgacattgtacgtggatgaccttacactctctggcgcccacgccaccaagactatgctgtatcaggtcaaggcacttatcaagcagcagggtcttagaacccaacctaccaaggatgccgtggtgcgaccagggaaagctgctatcataaccggcgccgtgcgtgatgggcaacagattcggctgcgcaataaacaccacaactcgattgtcactctgcaggataggatagcttccggagacgacgtttcattcaaccaactgaggggtcgagtcgcagccgctcagagtgttgagcccgtggcagccgcaagactcgtagcacggctggatcggatactgtctaacgacaaagcggcctga

SEQ ID NO: 10362 - RNA, 996 nt, synthetic construct
  source 1..996: mol_type = other RNA
atgtcaaacgctacaaacaataagcaccgtcgccagcgcctggcactgaagagggagaaccgacggtccccaagtgaaaagtacccgcttgagagatccccggtcttcgagctaggaggtcccagggagcttgctacattgatgcagctgtccatcgagcagataagggcgatcgctgccaacccagagtatcacttttttgacgaagagcctaaacgcgaaggcaaggcagcgcgtcatatccaagaccctcggggcgacacgcagacgctgcattacagatttgccaaattcctcaataggattgaacgccccgcatttttacacagcgccacacgagggcggagccatatttctaatgccgcagtccatagaggcacttatcctgtggtgtgcgccgatatcgaaaaattctacgaaaacaccacccgggcccacgttaaaggattcctgttccgcgagctgcactggccaatggacctggcagctctcatggcggatgctttgaccgttaacggacacctccccactggctctgctgtttcccctatactctcatatttcactcaccggaggatgttcgcggagatcgaagccatgtgcattgcaaccgggtgtaccctgaccctctttgtggatgatataactgtctcgggtgcccgggctagtatgtcacttttgagacagatcaagcaaatcctgctggggcgaggcctacgagctaaggcaaataaagacaagagtgccccaacagggagcgccgtggtcattaccggagccgtacggcaaggggataggctgcgcattaggaatgagcataggaagggtatcgtggaattgcttgccagatacgaggccggcgagggtgctgttgaggaacagctcgtgagcaaaattgctgcagcaagatgtgtggacagcgccggagccgtgcccttagaaagaagatttacacagctgcgttctgtagctcgctcatccgcctctggcgtgtga

SEQ ID NO: 10363 - RNA, 978 nt, synthetic construct
  source 1..978: mol_type = other RNA
atgaataaaaagcgatcagcgttaaagaggagactgcgagcaaatcagtcatgccgttacgagctgtctagatgtgccctgtacggcgttaggcagttgagcgtgcttacagaccttctgcagaccactaacaaggccttaaggcagtccgcacaagcccccgaatttgccacctgggtggatcgatcccgcccagagaaacccagagacatacaagatcctcgggggacaaccgaacggctacactaccggatttgcgagctgctggatcgcgtgattcgtcctgagttcttacacagtgccacccgcaagagatcatccatcactaatgctagccaacacgttagccacggaccgtgtgttacaacagacatgaaatcgttttatgaagctacttctaccaaacaggttgaggagttcttctcagatagtctgaacatggcccctaacctcgcacgcaagctcgcaaatctctgcacaacggatggacatctccctaccggatctcccctctcccccctgttgagctattgggctcatcaccagacctttgataagatccacgagcttgtagtcgagcgcggggtggtgatgaccgtctacgtcgacgacatggccttttctggcgcccatgctagtctggctcttttgaggcaggtgaaacataagctgcgcctccggggcctggaaacgcacaaagataaaagcttcggcagaggacagtttaaacacatcactggggcagctgtgaatgggagaggaatccatgtaccaaacaggaggctgaaacaaattgtcgacgaccagggcgtcctagccaagggtgaattcgacgcagaaactgtggcttccctccggattaagttgtccgggcgtatcgccagtgccagcgcaatatctcggaagactgcggcgtggctgaagaggcgggacgtgtataacccaaagggtagacgaggcgccatcacagctggttga

SEQ ID NO: 10364 - RNA, 963 nt, synthetic construct
  source 1..963: mol_type = other RNA
atgaataagcgcagactggcactgaagaagagactgcgagcaaacaagcaggctaggtactcgctggagggctgcgcccttttcggcgtcaccgaaatgagcgttctcagcagactcctgcaggcagataataaaagtctccggctcacctgtaaagctccagagttcgccgtgtgggtcgataccactaaacctttaaagcctcgtaatatacaagacccgagaggtattacagagaggcttcactatcgcttatgcgaactgctagacagagtggtgaaaccagatttcttgcactctgcaacgaggaaacgcagcgctatcactaacgccgcacggcacatctcaaaggctccttgcgtgaccactgacatgaaatctttttatgaggtgacaaccacgcagcaggtcgcggcgtttttccgggaggacctccacatggcacccgatctggcactgaagctggcacagctgtgtaccgttaacgggcacctccccacaggcagtcccctatcacccttgctggcttactgggcccatcggcggacattcgggcagctgtatgagatgtcttggtcagcgggcattgtcatgactgtgtacgtcgacgatctggcctttagcggtgaacacgcttccctggcctttctccatattgtgaagcagatccttcggcgcagaggacttcatactcataaagacaaaagttttggggctggacaattcaaacatatcacaggggccgctgtgagctcaaagggattgcacgtgcctaatggtcgcctgaagaggatagttgacggcattgatgaattaaccgtagtatccgacccagcccagcaggccgatttgcgaaggcgtcttgtgggacgcattgcctccgcttccgcgatctctaggcaaatcggcaacgccttgaagcgacgtcacatccaaagcgccgaatccgccgttacagactga

SEQ ID NO: 10365 - RNA, 939 nt, synthetic construct
  source 1..939: mol_type = other RNA
atgaatactccccgtgatccttacgccctcgaaagctctcctttctttcgattgacttccatccacgagttagcgaagctcctccgccttactgtaggccagctgcggcaagagtgtctgcaccctgccttcgcgcccatgagagtggtgagaaaaccgggtccacggagtaaaacaaggaatgtcagcccacctctgaaaaccacgctgctgctgcaccagaggttgctgcggttctttgatcgagtcaggcgccctccctaccttcattcagcaacacggagaaggtcacacgtaactaacgcagccgctcacagcgggcagaggcatctcgtcaaagcggatatccggaagttttacgagagcaccacatattcacatgtcgtggccttcttccaccatgagttgcagatggccggtgatctggcacgattattagcacggctttgcacccgcgaggggagattggcgatgggatccccactatccccgctgctcagcttttgggtgcacaagaagatgttcgaccgcctggacgccctgagtagacagcacaggcttcgctttaccgcttatttcgacgacttgactatttcaggcaaccgcataaccgagagctttttccagacaatccggaggagtgttgctattcaagggctggaactcaaagaacagcgtgcctccgttgtgagggtgagagccggagttgaagtcaccggggcttggttgtctagaggcgcactctttgtgccacagcccgcctatctgctcgcacgccaagcaatcgctgccgtgagttctgctgaggccgacgagctagctacggccatccggacagcagaaggccatgtgtctgcttcctcggctatacgaagaggagccggcaaggccctgaaccgtcttatggctagggccattcatgcaaagaagcccctgtga

SEQ ID NO: 10366 - RNA, 1026 nt, synthetic construct
  source 1..1026: mol_type = other RNA
atgataggccactcccagataatgattctgagtaaaacccgcgccgatgaggatatcaagatatcgaagctatactttgttggcacgaagaagcgtcttgccaccgtgctgaaatctaacccttctgtcctgcgtcgccttgcaaagacaggcgacgccaattatcagcatatttttgtgaccagcaggggcaaaaaacgagccgttcagaatccaaatcctgagctgaaagagatccaagtacggattaatcagcttctgcagcgaatcaattacccggaatacatgatggctgggctgaaaggtctgtcttacgagaaaaatgctagtgcgcatcttgggttagagtccacaagggtgtgcactgtggatatcgaaaagttttatcccaactgccaacggggagcagtcattcggtctttggaaaagtggtttaaccagaagcacgacgttgccgtgcagctcgctgatctggtctgtttgaacggtcaccttccaaccggtgggccagcctccttactgttctcattctggtcaaatagggatgtattcgacgaaatcaagctggcggccgacgcgcacggactgaaaatgacagtgtacgtggacgacatgacattctcaggggaaaacgctggcctcaagttcctgcatgattgtgtcctccccgtcctcaagcgcgcaggactcagaggtcataagatcaagagctatcacaaaagttgccctcaagagatcactggcattattctgaacaagggaaagctgtgtctgccatataggaggtttaaagacatcgacaagaatattctagctttgaacgccgcaagaaagcccgttgcaagactcaagttgatcaacagcctggtgagcagattatactcagtgtccgccttctttcccaaatgcaaaaccaaggccaaagctatgggcaaaaagcagaaagcattgctaagcaagttcccttatctcaaacttagacaccggttcgggaaacaggctgcctccctcaagactggacgctga

SEQ ID NO: 10367 - RNA, 942 nt, synthetic construct
  source 1..942: mol_type = other RNA
atgcctaagacacagcccgaggaaggttatcagctgaaagattccccctttttcaggctgcggagtcgcaagcagcttgcaaagctgctgagggtgtcagctgacacactggatgaaatttcccacaggcacgatttgtatgtgagacgatggaaacataaaaaacttaaggacgatgagaagggagcttggctcaaacaccccccaactccagagcaggctgagaattacagacctattgacattcctgacccacaactcaaggccatgcaggggagaatcggagatctgttaggcagagtgaaggcgcccgaattccttttctccccggtcaagggcaggagctacgttgagaatgccgcacaccacaaggaggccaaggcgttttggctgctggacgtggctgattattttccaagctgcagcgccaataacgttgcccggttcttccaccgggaactagaatgctctcgcgatgtaacggccgtgctggtccatgtggctactttgggcggatgtttaccgcaagggtcgccctgttcccctatacttgcctactatagtaatagccatatctggttggccgtcgaaaaactcgtgcgcgccaaaggttgcaaactcagcctgtacgcagacgacataacaatatcaggggatgttgtccctaaggccttgatctgggagatcaaaaagttaatctttggcaacgggctacggctcaagacctcaaaagaagtatctcttattaacgctccagctgacatcaccggagtgattgtcaaggacggtgcaactcatctgcccaatcgccagctcaagaggctggcagagctcaagcaggagagagcaaacaccacaaacccaaagctgcagcagcgtatcgacaatcaaattgccggccgactgtctcaacgtaaacaggtggagaaccctaaaacctga

SEQ ID NO: 10368 - RNA, 942 nt, synthetic construct
  source 1..942: mol_type = other RNA
atgcctaagaaacagtccgatggcgggtatcacctgaaggacagccccttctttcgcctgagatccaggaaacagctggctgaactgcttcgcgtatctgcaaacacacttgacgaaataagtcacaggtcagacctctatgtgcgtcggtggaaacacaaaaagttgaaggaccacgagcgaggagcgtggctgaagcaaccgccacccccagaaaaagcagagtcctacagaccgattgatatccccgatgtgcagctgaaagccatgcagaaacgcattggagacttactgggcagggttaaggccccagaattcttgttttcacctgtgaaggggcgttcgtacgtggagaacgctgcccatcacaaggaatctaaggccttctggctgctagacgtggctgattatttcccttcctgctctgccaacaatgtggctcatttttttcatagagtcttggaatgctcaagagatgttaccgcagtactcgtccacctcgtcacactaaatgagtgtttgccccaggggagcccctgtagccctatactggcctattactctaacagtcatgtctggctggccgtggaagagctcgttaaagcgcgggactgcaagctgagcttatacgcagatgacataacaatctccggcgatgttgtgcctaaagctctgatctgggatattaagaagctcattttcggcaatgggcttcgattgaaagatagcaaggaggtaagccttatcaatgcaccagccgacatcactggtgtgattgtcaaagagggcggtacccatctgcccaacaggcaactcaagatgatcgccgagttaaagcagcttcgggctcggactacgaacccaaaactgaggggacggctcgacgagcaaatctcaggacgcctgagtcagagaaagcaggtggagaatcctaagacctga

SEQ ID NO: 10369 - RNA, 930 nt, synthetic construct
  source 1..930: mol_type = other RNA
atgagaaaaacgcagttgaaggacgggtaccagttgagggactcccccttttttaggctggcaaatcggaagaaattatccacactgcttagggtgagcgaggaaacactgaaggcgctctcaaccagccaggatctctacacaaggcgatggaaacacaagacgaaaaaggacaaagaggtggacgcctggaaaaattatatccctgagaacgcagacgaatacaggccaatagacattccgattcctaaactgaaagccacccaaaatcgaatctctgatcttctgtcccgggtccaggctcccgacttcctattctcaccggtgaaaggaagatcgtacgtagagaatgcgagccatcatgttgagggaactgctttttggtctttagatgtggccgactactttccaaactgtaaggctaacaacgtagcccgcttcttccgccgtgatctggaatgcagccgggacgtcaccgccattctcgtggctctaaccactttgaacaaatgtttaccacaggggagtccttcaagccccattctcgcatattatggcaattcccatatgtggctgaaggtcgcagatctggttgcaagttactcctgcaagttcagtctctatgccgatgacattaccatctctggacctatcatcaagaaggagcttatatggaagattaagaagataatccacgccaacggttttcttctgaagccctctaaggaaatcagtctgatccacgcccccgctgatatcacaggggttatagtcaagcagggtaaaactcacctccctaatagacagctgaaaagattggccgagctgaagaaagaaagagcccacactaagaatccagctagccaggcggtgctggataaccagatttcaggccggctaggccaacgtcgccaagtggagcgcgtgtga

SEQ ID NO: 10370 - RNA, 927 nt, synthetic construct
  source 1..927: mol_type = other RNA
atgccactgaagctcggctatcggctcgtggacagtccgttctataagttgaagtctaggtccaagttagctagactgcttagggtatcaaccgagacacttgatcaattgtcttccggacgcatgctgtacgcgcgaagatggaaacataaaaaactagagaagtggctgtgccagcctccttcagaagacgcagcagacatctaccggcccatcgatatcccggatccatgtttaaaggctgtccagtctagaatcgcttcgctgctctccaggatccaccccccagactttctcttcagccccgtaaaaggtagatcctatgtggagaatgcagcccgtcacgttggttcagaggcattttggttgctcgacattgccgactacttcccaagttgcgccgccaataaagttgctaggttcttccgcagcgatctggactgtagccccgatgttagcgccgtgctggtccggttgaccacccataatgagtgtcttcctcagggcagtccttgctctcccatactcgcctactattgtaatcggccaatgtggctggccattgaaaagattgtgactgatgctgggtgcaagctgtcgctgtacgccgacgacattacaatctccggcgatgtggtgagaaagagcatgatatgggaggtcaaaaagatcgtgcacggaaacgggttaaggctgaaagcgtccaaagaagtgagtttgatcaagtcagcagctgatattaccggagtgatcgtcaaacctgacgggactcatctgccaaaccgccaatttaagaagctagccgagcttaaggccctgcactctacaacggtcaaccctaaagataaagcgcgcattgaaaaccagataagcggccgtattgctcagtggcgacaggttgaaagctttcggatagcacccgactga

SEQ ID NO: 10371 - RNA, 936 nt, synthetic construct
  source 1..936: mol_type = other RNA
atgcagaagacccctccccggcaagcctatcagatcaaagattccccattttacaagctctctagcagacgcaaattggcctcactgttgcgcacttctagcgatacgctagccgagctggctagtggaaaacctatgtatgtgagacgctggaagcataaaaagttggaccagtggttacgggaagcccccagtaccacggacgcagacgtatacaggcccattgatatcccggacccccgccttaaggcagtgcagtcccgtatagccgcacttctcgctcgaatcgagcccccagacttcctttttagtccagtgaaggggcgtagctacgtggaaaatgccgcaagacacgtgggttcaaaagctttttggctcctcgacgtggcagactattttcctagctgcacagcgaacaatgtggcccggttcttccaccgagatctgctctgttccgaggatgtcacagccgtcctcgtgaaactggttactctgagagaatgtctgcctcaaggatcgccctgctcacctattctggcttactattgcaacaggccaatgtggctggcgatcgagagctgcgtcaaagctagtgggtgtaagttgagcctgtacgcagacgatatcactatatccggcgacgtggttcggaaagagatgatctgggagattaaaaagatcgtccatggatctgggatgaggctgaaagcgtccaaggaagtctcactgatctctgccccggctgatattaccggtgttatagtgaagccaacaggcactcacctgccaaaccggcagctgaagaagctagccgaacttaggaagttacataccttaacaaccaatgctaaagataaggcccgaattgagaaccagatttccggccgcgtagctcaaaggagacaggttgaatctttccagcctagcaatgagtga

SEQ ID NO: 10372 - RNA, 936 nt, synthetic construct
  source 1..936: mol_type = other RNA
atgcccttacgtcacagcgcaaccccatacacacttagagactcccccttcttcaggctccgcacccggaaaaaactggccaccttactgcgagtgagcgaagcagcactggctgatatatcagccagaaatgacctatacgtgaggtgttggaaacacaaaaaagacaaggacatatggctccgagagcagccagctcccgatatagccgctcattataggcctatcgacattccggatagtgggctgaaagccgtgcagagtcggatcgctggtttgctgagccgcattacaccgccagattggttgtttagccccgttaagggacggtcttacgtcgacaatgcggcatcccataagggggctcgggcctactggctcctggatattgcggattactttccttcatgctccgccaataacgtggcccatttctttaaccgcaaactggagtgctcccctgacgtgactgcaatccttgttcacctgacgacttggcaacagtgcctcccacaggggtcgccatgttcacctatcctcgcatatttttctaatctggatctgtggcaggaaattgagcagtcagtgatgcaagccggccttaagcatagtgtctatgctgacgatatcacaatctctggccaaatgattcgtaaagagctcatttgggaagtcaagcagagcgtacacaaacacggcatgaaaatcaaggcggacaaggagctttccttgattgatagccctgccgacataaccggagtaatcgtggttggtgatcgaactaagttgcccaaccggcagttaaagagactgttcgaactaagagccgagaggcaccgcgctagagacgcaatcaagaagcgcctgctggacaaccagatctctggaagggtggcccagaagaggcaggtcgaacaagcctataacgctaagtga

SEQ ID NO: 10373 - RNA, 924 nt, synthetic construct
  source 1..924: mol_type = other RNA
atgccgacaagacatcgggctgttccatataccctgcgagatagtccctttttccggctgcgccggagaaaagatttggccaaactattacatgtgagcgagacaaccttggctactatcgcctccaggaatgacctttacgaaagatgctggaaacacaaaaagctgaagaataattggctggatgacgagccatctgccgatattgcacatctctaccgcccaatagacatccccgatggcgggctgaaggcaatccaatctaggatcgctaacctgctgggtcggattacccctcccgactggctgttctctccagtgaaaggaaggagctacgttggaaacgcggcgtgtcaccgcggctcaaaggcattttggctgctggacatcgccgactatttcccttcatgtactgcaaacaatgtggctcacttttttcaaagaaagttggaatgttcccctgatgtgaccgctattctggtgcatctcacaacgttgcagcaatgcctaccgcaggggagtccttgcagccctgtgcttgcctacttctccaaccttgacatgtggcgcgaaatcgagcagagtgttagcaaggcggctctcaaacactctatctatgccgacgacattaccatcagcgggccaattgtgcccaaaaaggtcatctgggagattaagcaggcaattcataagcacggcatgaagataaaagccgataaagagctgtcattaatagactcccccgccgaggtcactggagtaatagtggtcggagatcgtacaaagcttcccaaccgacagtttaagcgcctgttcgagttacgtggcgaaaggcaccgagagagatcgaagacgctcatgcggctcctcgatggccagatcgccggtagagtcgcccagaggaggcaggtagaacagttctga

SEQ ID NO: 10374 - RNA, 903 nt, synthetic construct
  source 1..903: mol_type = other RNA
atgagctatgaattgagagactcccccttctttaggctaaagactagaaaaaagctggccgctacgctgaagattagcgaaatggccctgaacaccttaactgttaggactgatctctacgtccgaaaatggaagcacaagaaggaaaaggacaagtggctcgagacacctccaccacccggtgagtcacacctgtatagatccattgatataccagactctgacctgaaagccgttcagagccggatagctaaactgcttagtcgagtgacccctcccgactggctattttccccagttaaagggcgctcttacgtggataacgcagcacgccaccgtggatcaattgctttctggctcttggatattgcggactattttcccagttgcaccgctaacaatgtcgcccacttcttccggacacgcatggagtgttctcctgatgtgactgccatcctggtgcatgtcgccacatggcatcagtgtttacctcaggggagcccgtgctccccgatccttgcatacttttctaatctcggtctgtgggaagagatcgaatcggccgtcatcgaggcgggccttaagcatagcatttacgctgatgacattacgattagtggggccatcgtaaggaaaaaagtgatatgggaaattaagcgcagcatccataagcacggcttcaagatcaaggccgagaaagagctgtcacttatccataggcctgcagacataaccggagtgatcgtggctggagacgacacaaaactgcccaatcggcagctgaagagactctttgatctgcgggcagagcgtcacaaggcgaaaggcaaattgttgatctcacagatcgataacaagatttccggccacctcgcccaaaaaaggcaagtagagagaacctga

SEQ ID NO: 10375 - RNA, 942 nt, synthetic construct
  source 1..942: mol_type = other RNA
atgctgccactccccaacgggagccagtatgccttaagagatactccttttttccggcttcggtcaagaaagaaactcgccgagattctcttggtcagtgacgcagccctgcagcgggtgctgaacgaggagaatttatatgagcgcagatggaagcacaagaaagaaaaggattcctggctcaacttcgaacctaaaccggaagtttctcatttctaccgtccaattgacatacccgataagggactcaagagcatccagagtcgcattgcgaagctgtttgctaaagtgacaccaccggattggttgttttccccagtgaaagggcgttcctacgtgaataatgcagcccgacatgtgggagcgagggctttctggctgcttgacatagctgactactttccttcgtgtactgataataatgtagcgcacctcttccatactcgccttgaatgctctcctgacgtcaccgctatcatagtcaagcttatcaccctgtgtggctgcttaccccaaggttctccatgcagccctatcatggcctattactccaaccacacaatgtggctgaagatctcagagattgtgacagactctggcctgacacatagcgtatacgcagacgacatcaccatcagtggcaacctgatcaaaaaggaagtgatctggaatattaaggccacggttcacaaacatggtctacggattaaagctgagaaagagctgtcaattattgattcacccgctgacataaccggcgttatcgtgaagggcggacgaaccatgttgcctaacagacagctaaagaggctgtttgagctcaggggagaacgccagagggcaaaggggagcctggccaaagcagccctggatagccagatcgccgggagattggcccaacagaggcaagtcgagcaccagtatcggcaccccccctcctga

SEQ ID NO: 10376 - RNA, 939 nt, synthetic construct
  source 1..939: mol_type = other RNA
atgctgaaagaaacgactattaatacttactccttgcgggactcccccttctttaggcttaggtctaggaagaagctagcccagctcctgagagtcagccccaaaacactgtccgagatcagccaacgggaggacctctactccagatattggaaaagtaaaaaaggggacgtttggctgaagtctccccctgatgaggtagacgctgataaataccgacctatcgatattccggtccatcgcctcaagtcactgcaggctcgaatagccaagctgctgtcccgtattaccccaccagaatggctcttttccccggtgaagggaaggtcatacgttgataacgctgcttatcataagggagcaaaggcctattggcttttggacatcgagaacttcttccctagttgctcgggcaacaacgtggtgcatttttttagcagcaaactggagtgcagtcccgacgtcaccgccattttagtccacatcaccacaatcttggataccgacacagatcgcgtgggacttccacagggagccccctgtagtccaatcttggcgtatttctctaatctcgatatgtgggcagagattgaatcaattgtgaagcgcgcgagcctgaagcatggggtgtacgcagacgacataacaatctctggtggcatggtgcctaaagctgctatctgggaaatcaagaaggcaatacacaaacacggccacaagattaaagcagccaaagaagtgtctctgatccacgccccagccgatataactggcgttattgtggcagagggtaaaaccaagttacctaatcggcagtggaagaagctcaacgagcttagagccgcgcgttcagtcgctaagggcagcaaactaaaacagagactggacaatcagatcagcgggcggattgcccaaaagaatcaagtagaacagtcgtga

SEQ ID NO: 10377 - RNA, 933 nt, synthetic construct
  source 1..933: mol_type = other RNA
atgcctcggaaagcctttccctttcacaagctcgaggctagcgcattgttcaatgtgaggacaaggaagaagctggcggacattctaatgtgcagccctgcccatctgaagtccgtggatgcaattgaaatccgatacaaaaagcgatggaaaccgaaagactctgacaccgccccttggttgaagcaaccccctccagctgagaaggctggcaactacagaccaatagacattcccgtggatccccttaaaaagttgcagaccagaatcgctaatctcctgtcacgcatagagcccccaagctacctgtgttcaccggtcaagggggtttcctatgtggacaatgccagaaggcacgtaaattcgaacgccttttggttattggatatcgccgattatttcccctcttgtacagctgaccgcgtggcatggttcttctctaccgttatgaagtgcgccccagatgttactgcggtgctcgtgtccctggtgaccgactctggaagactccctcagggtagtccttgcagcccgatcttagcctacttttcaaacaaaaagatgtgggacgacgtcgccgaagctgtggctagtgcggggtgtattctgtccgtctatgcagatgacattacactgtccggcactaccgtgccaggagcactcgtgtgggaggtaaaacaaatcatcgtgaaaaacggcttcaaactaaaacgggagaaggaagtcagtctggttgggagccccgccgatatcacgggcgttatcgtccgcaatggaacgcttaagctgccaaacaggcagctgaagaaacttgcagagactaagaaacttcacaaactggccactgataaggtcacattaataaagctcgaacatcaggtaaaaggtcggctggcacagcggcgtcagattgaagaggctctgaagccttga

SEQ ID NO: 10378 - RNA, 924 nt, synthetic construct
  source 1..924: mol_type = other RNA
atgagacggaaggccttcgagttccacaatctcgaagccagcgcactgtttaatgtaagaactagaaagaggctggccgaggtgctgctatgtagccctgcccacctgaaggcagtgtgcgaaatagctattaggtacaaaaaacgctggaagccaaaagactccgatacagccccttggttaaaacagcccccccccgctgaacagacagcgaattatcgccccatcgacattccaattgacccactgaagaagcttcaggctaggatcgccaacctgctgagccgtattgagccgcctgaatttttgtgctcacccgttaagggtgtgagttacgtggacaacgctaagcggcatatcaacaacaacgctttctggctgctggatattgccgattattttccgtcttgttcctcgaatcgcgttgcatggttttttaatacggtcatgaaatgcgcgcctgatgtgaccgccgtacttgtctccctggtttccgagaatgactctcttcctcaaggctcaccttctagcccaatactcgcatacttcagtaataagaagatgtgggatgacgtggccctagccgtggcgaactcagggtgtactctgagtgtttatgccgacgatgtgaccttaagcggtaccacagtgcccggggctttggtctggcgagtcaagcagatcatcgtgaaaaacggcttcaaactaaaacgcgagaaagaagtgtcccttatcggctctccagcagacattaccggagtcatcgtaagagatggaaccctcaagctgccaaaccggcaactcaagaaaatcgctgagataaagaagctccatactaacgccacaaactcacggttggcaattaaactggagaatcagttgaaagggcgtctcgcacagcgaaggcagatcgaggaagcttga

SEQ ID NO: 10379 - RNA, 930 nt, synthetic construct
  source 1..930: mol_type = other RNA
atgtcacaccgagccgttaaatctcatgacctgagagatagcgcattatttaatatcggcactcgtaagaagctcgctagcgtcctcctgtgcagcccagaccatctgaatctggtgcagaagctggaggtgaaatataagaaacggtggaagcccaaggattccgacactgctccctggcttacacagccacctgccccacacgaagctgactgtttccgccccattgatatccctgtggatcccctcaaaaaattgcagggcaggattgcagacctgctgtcgcgcgtaaaggcacctccgtatctgtgcagtcccgtgaggggtgtgagctatgttgacaacgcccgggctcacatcgaaggcagcgctttctggttattggatatcgccgattactttccctcctgtaccgcaaacagagtggcctggttttttaggaccgtaatgaagtgtgcccctgacgtgacggcaatcctcgtggccattgtaaccgacagtggacgactgcctcaaggctcaccatcctctccgatccttgcgtacttctccaacctgaaaatgtggggggaagtggctgcactcgtgcatcgcgccggctgtatactgtctgtctacgctgacgatattactatatctggaaaaaccgtccctggtgcccttgtctggaacgttaagcagactattgtgaaaaacggattcagactaaagagggagaaggaggtcagtttggtgtgctgtccagcggacattacaggggttatcgttcgcaatgggtccctgaagctaccaaatcgtcagttaaaaaaaatcgtcgagacgaagaagctgttgagggcatcaacagataaaatgacagccgataagctcaaaacccaaattgcggggcggcttgcccagcggagacagatagagtgcgctagttgctga

SEQ ID NO: 10380 - RNA, 927 nt, synthetic construct
  source 1..927: mol_type = other RNA
atgcccaggaaaagttttcggttccataagatcgaggactccgccttgttcaacgtctccacccgcaaaaagctcgctaacgtcctcatgtgctctcttcctctgttaaaggcagtagaaggcctcgatgtgcggtacaagaagcgctggaagagaaaggactcagatacagccccttggttgactcaaccccctccaccagatcaggccactcaataccgacccatcgacattccagttgatcaactgaaaaagttacaggcacgcattgctgacctgctctcacgcatcgagacgccccctttcctctgcagtccggtcaaaggcgttagctatgttgataacgcgggtcggcatgtgaacaatcgtgccttttggctgctggacatagctgactatttcccttcttgctctgccgacagagtggcgtggttttttggcactataatgaaatgtgctccagatgttaccgctgtgctggtcagtctcacaactgatatgaatagactaccacagggaagcccttgtagccccatcctagcatactattccaatatgaaaatgtggcacgacgtggccaccttggtggcaggtgcagggtgtattctgagcgtatacgctgatgacattacaatcagcggaaaaacagtgccgggctctttaatttggcaggtcaagcaggtgatctttaggaacggcttcaagcttaaacacgagaaagagctgtcccttatggcttcacccgccgatatcaccggagtgatcgtgcgagacgggaagttgaaactgccaaataggcagcacaaaaagatcgtagacctgtccaagcagcaaaagatcgccacggataccaagcttctggccaaaattgaatcgcagattcgtgggcggctggcccagaggagacagatagaagaggcaatatga

SEQ ID NO: 10381 - RNA, 927 nt, synthetic construct
  source 1..927: mol_type = other RNA
atgcctccaaagccgaggcaatttcataaactgaatgattcagccctgtaccaggtgtctaccaggaagaaactagccgaggtcctgatgtgttcaccccaagacttaaaagatgtccttgctctgtctgtgcggtacaagaatcgctggaaaagaaaagattccgacaccgctccatggctcacccacccacctgcacctgacgaggcctccaattaccggcccatcgatatccctgttcctccactgaagaagctgcagggacgcattgcggacctgcttagtagagtggaaccccccgaattcttgtgttcaccggttaagggtgtctcctacgtggacaacgcccgacgccacattaactctcatgctttttggctgctcgacattgccgattattttccaaattgtcgtgccgatagggtcgcatggttcttcaggacgaagatgaagtgcgccccagatgtgaccactattttagttgcgctaactacagataaggacaggctgccccaaggtagcccttgcagccccattctcgcttatttctccaacatgcgcatgtggcgggatattagcactctggtaacaaatgctggctgcgtactgagcgtttatgcagacgatatcaccatcagcggctcgaaagtgccgggggggttggtgtggcagattaaacagacgatacacaagaacgggtttaaactcaagagagacaaggagcttagtctgatcgcctctcccgcagatataacaggagtgatcgtgcagaatggccagctcaaactgcctaacagacagcggaaaaagcttgtggagttggtcagtcagcaaaaagcaacatcagacaagaagttgttagccaaactcgacaaccagatccagggaagaatcgctcagcgacgtcagatagaatccgtagactga

SEQ ID NO: 10382 - RNA, 930 nt, synthetic construct
  source 1..930: mol_type = other RNA
atgccgccaaaacagcagcgtcacttctataaactccaggattcagccctatacaatgtgaccactaagaaaagactcgcggaagttctgctctgcagtcccgacgatcttaagaatgtcctggcaaccaaggtcaggtacaaaaatcgctggaagcccaaggattccgacactgctccctggcttacccagccaccaccccctgaagaggccgcaaattatcggcccattgatataccgatcccttccttaaaacgcctgcaggcccgaatcgcatatctgttaagtcgcatagagcccccttccttcctgttttctccagtgaaggggttaagctacgtggataatgcacggagacacgtggggtcgagagcgttctggctgctcgacgtagccgattactttccaagctgtagggcggacagggtcgcctggttcttccgcacagagatgaagtgcgctcctgacgttgccgctattctggtagcattgacaacagacaaagaacggctgccgcaagggagcccttgttctcccatcctggcttatttttgtaatatggtgatgtggaacgacatcgcaaccactgtcgagaacgccggctgcgtgctgtccgtctacgctgacgacatcacgatttcaggtgccaacgtacctggccagctaatatggcaggtgaagaaaacaatccataaaaacggatttcgattgaaaagggagaaggagctctctcttctggataggccagctgatattaccggtgtgattgttagaaacggccaactcaagttgcctaatagacagcttaagaaactggtggagctcgttgaaaagcataaaagcgaaacgaagaagaaggaattggccaagctgtttaaccagatccaaggacgtcttgctcagcggaaacaagtggagaacgccaactga

SEQ ID NO: 10383 - RNA, 927 nt, synthetic construct
  source 1..927: mol_type = other RNA
atgcgccctggccaccgcatagttgactccgcgctttacaaggtgcgaaccagacggaggctggcggaactgctctttacagaagtgggtttcctggagagcctagaaaaaaatcagcccaagtacgttgtgaaatataagcctaagtacgatgacaaggctccctggttagctatgccacctccgccggagctggccgataactacaggccaataagcctgccacctactgccctgaaaaggctgcaggcccgtttagccaagttgctggggatgatcacggtaccaccttatgtctttagctcagtgaagggcgtgtcatacgtggacaacgcagccgtgcatgttggcgcacgcgccttctggctattggatatcgaggcctttctgccctcctgcaccgccgagagacttacttggttcttccgagacaaactccagtgtagtcccgacgtcgcggccatcctcgtggagattgttacattcgatggctgccttccccagggatctccttgttcgcctatattatcctatttttgcaatgctcgcatgtggagcgatatctaccagctcgctggggagtatggatgtaccctgagtatctatgcagatgatattactctgtctggagccgtagtgcccaagaaacttgtgtggcgtatcaaagaagtcctgaagaataatggtttcaggacaagtagatcaaaagaggtcagcctggtgaacgcaccagctgacattacaggggtcattgtccgggacaacaagttgtttctcccaaaccggcagtttaagaaactcagggtagagttggcaaagagaagagacgcaaaaacctccatcgaaaaacgaaaaattgacaatcggattgctggccggaaggctcaagcccgccaaatcgaaaagcactctaagtctgggaggtga

SEQ ID NO: 10384 - RNA, 918 nt, synthetic construct
  source 1..918: mol_type = other RNA
atgaaggtggcttcccttcgcggtaatgccctctttaggatctcaaaccgtagattgctggccgagcggcttctcctgaagccagaggccctggccgcagctctcaacctggacctgccctatgtgcgaaggtggaaatctaaaaaaggagacgaatggcgatccgaagaaccagacgcagacgaagcaagggctttccgtcctatcgatattccccatccccacttaaagcaggtgcagcgccgaatcgggcggctgttatcttccgctcgccctccggattggttgttttcacctgtcaagggacgaagctacgttgataacgccgcccgtcatcttggcagcacggcgttttgcatgttggatattgcagattacttcccaagttgtactacctctgcggtcgcagggatgttcctgaatgagctccattgccctcccgacgtggccagtatactaaccagtctggtaacaaaagacggctctctaccacaagggagcccgtgtagcccagtcgtggccttttattccaaagtgggaatgtggaatgagatcgcgcgcttggtggatgaacgggggttaatccactcagtgtacgctgacgatctgactatttccggccccgtgattcctggagaagctgtatggggtgtcaagaagattgtgcacaaacacggcatgagacttaggcgggacaaggaggtcggactgttctgccggcccgcagacattacaggcgttatagttaccaacggtggactcaggctgcctaatcgccagttcaaaagactggccgagctcagagcccagagacaggcttcgcgcgaaaaggagagggagatgatcgatcggaagatcgccggcaggatagctcagagaagacaggttgaggggcacgacggccaaagcgcaccatga

SEQ ID NO: 10385 - RNA, 951 nt, synthetic construct
  source 1..951: mol_type = other RNA
atggctagctcaagcaacgctactgaaaatgcctcgtctctctttggctgccagagaaagagggacttcgctaagattctaggaattactaggggccggcttcgctggttggcgaaccaaaagaatgagtaccccgagggcaagaccgccaattccctgtacacaagactgtggaaacccaaacgtggggaaggcaagtggctgagggtcgaaccactccccgaggtggcaagcaactaccggcctatcgatgagctaaaggtcctgcagcgacaccttcacgacgacctgtctaatatcgaggttccggcatggcttttcgctcctgccctgggaaagagctacgtggacaacgccgccgcacattcaggctccagtcattttcatctgttggatctggaggcttatttcccgtcctgtcggagccaccgcgtgtatgatttctttaggagaaagctccactgttcttccgacgtagcggagttactgacacatgtgtccacgttaggtggatctcttccccagggtagccccagctctccaatcttagcctacctgagcaatgtggatgtgtggaacaacatagccgatttgtgccggtcggaaggagtcaccctcagcgtttatgccgacgatattaccctgtcatcccacaaaagtatatctggggagctggtgtggaacatcaaatccgctttgtattccaaggggctgggcacaaaaaagagtaaggaagcgagtatggtacacaaagccgctgacattaccggggtcatcgttggaaagcagggtgtgaggcctccaaatcgacaggtcaaacgcctcaaagaactggaagaggtggcctcacagcgccctaacaatgaggttctcgtgagaaaaatccgggggagacgtgcacaactcaaccagattgcatcagcctctagtaatccagcagctaaaaagtga

SEQ ID NO: 10386 - RNA, 975 nt, synthetic construct
  source 1..975: mol_type = other RNA
atgaacccaaatatgggctacacggagcgagagagtccgttcttcaggttaaactctaaaaacaagctcgccaaactgctgttcattggcctgccaaagctaaaggagcttgccgcaggcgcggatctgtattatagctttcagaaggtcaagaagtcaggaggtatgcggatgatttctgcacctcgcgatgacctcaaaaaagtccagaagcgcatctcggatctgctgcaacggattgccccccccgatttccttttcgctcccgtgaagggacggtcctacgtggataatgcagctgtgcatatcggggccactgcagtgcaccttctggatatcgaagattttttcccctcctgcactgctaacaaggtcatttggttttttaagaccagattcgagtgtagtccggacattgccgttatcctgaagaacattgcgacaaggaatggctccctccctcaggggagtccatgtagcccagctctggcctacttttgctacgtggacatgtggaaagaaatagaggcccacgtgaaacaaagagggtgcaaactatcagtgtatgctgacgacttaaccatatctggcgacgtagtgcctggcgagttggtctttgacatcaaagccacaatgttgcgccatggacaccaatatagcgcaaaaaaggaaaggagcaagatcatgaagcccgttgagatcaccggtgtaatcgtcgccaacaaccagctgcttattcctaatcggcagcatagatccatcgttattgctcaacgtaaactcgggaaagaaaagaaattgagggagaggctcaagatcacaaatgaactgaaggggcgtaatgcccagaaaaatcagataaagaaccaccctggtcagcccaccacagacgcgatacctactccaacgggatactaccagagcaccacacgctctacctctagctcagtgactagttcagacagacgatcctga

SEQ ID NO: 10387 - RNA, 927 nt, synthetic construct
  source 1..927: mol_type = other RNA
atgagaaatccaaggcggcggaagaccacagatatggccgtgaaggggggctatcaggagagagactccccattcttcaggctaaaatcaaagactaagcttgccaccttcctgttcatcgggagccagaaactgaaagatctatcagacggacgagacttgtacagaagtttccaaaagctgaagggaaacggaaagacccgggaaatcaatgcaccgcgggacgatctcaagaaggtacagagacgcatagcagatctgttgcagcgcattcaaccccctgactacctgtttgctcccgtgaatggcaggtcgtatgtcgacaatgccgctgtacacgtcggcgccaacgccgttcatctgctcgatatcgaggacttttttccatcctgcacagccaacaaagtgatttggtttttcaaaacacggatggagtgctcagccgacgtgtctgtgatcttaaagaacattgtgactcgtaaaggttgccttccccaaggctctccctgttcccctattttagcctatctctgttacgcagatatgtggaacgagatagaagaggcagtgagaaggcatcactgtcagatatctgtgtatgcggacgatctgacgatctccgggaaggttgttccgcagcagctcgtgtgggaaattaaagctaccctcagaaagcatggacatgtcattagcgctcacaaggaacgaagccggtttaaacgtcctgttgaaattactggcgtcgtggtgacaaatgggaggatgagcgtacccaaccgccagttgaaacgaatcgtggagacgagggataagctggcgaatgaaaaaaaaccaaaggctgtcgagaaacttcaaaatgagctgaagggtcgcatcagtcaggtcacccagatcaagaaccaccctcgccagcctgcacactactga

SEQ ID NO: 10388 - RNA, 915 nt, synthetic construct
  source 1..915: mol_type = other RNA
atgttgaggaaaaaacctgtcctgaagagtaaatcaaagaagtatcacaatgagcgcgatagcgctttctttcggcttcgctccaaaaacaatctggcccgactgcttttttcttcggaaaaaaagctctctgacattgcacgggaggatggactctacaaggacttcgagaagctaaaaaagaacggaaaggatactcgcacggtttccgctcccagagcggatctgaaggcggtgcagtcccggatcagtgacctgcttatgcgcatccgtccaccggactggctgttttctcccgtcaagggcagatcatatgtggacaatgcccgtccacacgctaacgcagcctccgtccgactcctggacattgaggacttctttccttcttgtaccggaaataaagtagtgtggttctttaaggaaagaatggagtgcagcccagacgttgtggctatattaaaggggatcgtgacaaaagacgatgctctccctcaggggagcccatgttcccccatattggcctatttgtgctacattgatatgtgggaagagattgagagcctggtgaataaggccgaatgcgatttgagcgtatacgcagatgacctgacaatcagtggtgagaaggtgcccgaaaagatgatttggggcattaaacagatcctaaaaagacatggccattcataccacgccggtaaggaaagaaagaaatggcataagcctgccgaagttaccggcgtgatagtcaggggagatgggctgctgttcgtcccgaacaggcagcaccaagccacagcaaaaatcaggaaaaaactcgcgagcaaatgtagtatcaaggagcgggccgctctgcaggcacaattactcggcagggagtcacagatgaagcagatcaccactcttaacgacttctga

SEQ ID NO: 10389 - RNA, 909 nt, synthetic construct
  source 1..909: mol_type = other RNA
atgacagatagacgcaagtactccctgagggacagtccattttttcggctgcggagcaaggctaaactagctagcctcctctacgtcagtcgggagaaattgcaaactttgtccgagggtgaacagaggtatttcgagtttacaaaacccaaaaagtcaggcggagtgcgcaagatttcagcccctaatgcacccctgaaagccgtccagagtagaatagccgaccttctgcggagagtgaccccgcctgactatcttttcgccccagtgccagggcgatcttacgcggataacgcagccttccacgttggagccagatccgtgcgactgctggacattgaggacttcttccccagctgtaccgttaagaaagccatttggttttttcgtacaagaatggagtgctctgaggacgtggccgcgatactggccaacattgtaactttcaagggcgcactaccacagggaagtccctgctcgcctattctggcttatctttgttaccttgacatgtggggtgaaatcgctaaattagtggaagacggcggttgcaagctctcagtgtacgccgatgacttaactatcagcggagtatcagtccctgaggcccaaatctgggaaatcaagaaaaccctgtataggcatggccacaggtacgctcgctctaaggaacgatccgttagggataagagcgtggaggtaacgggggtggtgttgttgagggggtctgtggtcgcgcccaatagacagcacgccaagatcgccaaggttcgcgatgagctcacaaggaccgctagcgccgatcatcgcaaagcactggaatctcagctgagaggccgtctcgctcaagtcgggcagatcaaagctgcagatcagcggcggcgcgcttccgaagcagcaaagatctga

SEQ ID NO: 10390 - RNA, 912 nt, synthetic construct
  source 1..912: mol_type = other RNA
atgaaaaaggtcgagtcacaaggatatgccctgagggactgtggattgtacaatatccagaccaaggctgtccttgctaaacgcttactggtgtccccttccaggctgaccagactcacgaataaacaagatagatatagatgctggacagaacccaaaaaatccggaggcaccagagagatcgaggcacccctcgacgatctgaaggacgtccagaaacgcatttcggagctgctcggcagggtgagagctccatcttatctaatggccccagtaaagggccgctcttacgtcgataacgccgccattcatgttggctcacaatgcttcaggctgctcgatattgaagacttttttcctagctgcacagagaagagggtgttctggttcttccgaaccgtgatgcgttgttctgtggacgtggctgccgttttggcacgcttgagcactcggaacggaaggctgccacaggggagtccttgtagcccgatcctcgctttctatgcgtactttgatatgtgggaaaccatcaacgccacagtggaatcccgaaagtgctacctgactgtatacgctgatgacatcacaatcagcggtgaaagtattcgcgaattcgacgtttggcgaataaaacagaccctatttaagtttggtcatcggtacaatcggagcaaagagcgggccataattaacagacccgccgacataactggggtgatcgtccggggggacatcctgttacttcccaaccgtcagcacaaggcactgacagaggtgatcaggaagcgttcttcagcaggcactagtctggagagaaatgccatcgatcggcagattcggggtcgaattgctcaggcaggccagatcacgcgccaccttgagaagataggggccaagattgcatccgcgtga

SEQ ID NO: 10391 - RNA, 903 nt, synthetic construct
  source 1..903: mol_type = other RNA
atgtctaaaacaaagaagccttggcgcagaaaggcgaaaaaattttaccctctggaggcctctccattttacaaactgcagagcaagaagagactcgcaagtctactgttcacctcattaacagcccttagagggatggctgataaatcagtcccccactatgaatactgggaggaacagaaggctgatgggagcatgaggccgttatgccggccccatgaaggcctagacaagacgcagagccgcatcgcctacctgctcgcctgtgtgcaaactcccgactatgtgcatgccccggtacccgctaagacatatgtcactaacgctgcatcccaccaaggcgctcgcgccttttccttgctggatattgagtcgttctatcctagctgcaaagaggagaaagtactggcattcttccgccaccgaatgaagtgttccattgacgtttccactcttcttgccagactctgctgtgacaacggtagcttgccacagggcagttcttctagcccaatcctgtcctactgggcatacgcggaaatgtgggatgctatctatactataacaagcaacgcaggaaataatttcaccctgtacctcgatgacctcacgatctcaggagacagggttcttggaaataccctctggaggatccggcagcagatacataaacacggtctgcagatcaaggagagtaagagtcgaaggattatcgacaagcctgccgatgtcaccggggtgattgtgaccaaccaaggtctgcgtctgccaaatcggcagcatcagaaattggcgcacgccaagtcagacttttctaagcccggcgggaatcgtaaacggaaaggaaacgtgctgagaggcaggaatgcccaagctgtgcagattttgaaccacaactcctga

SEQ ID NO: 10392 - RNA, 939 nt, synthetic construct
  source 1..939: mol_type = other RNA
atgacaaaaaagatcaagtcttaccctctcgatcagagtcccttttataagctcacaacaaagcgcaaacttgcggagctgctaaggctcccactcggacggctgaagaggatcgctttgctgagtccaaatatgtataatgagtggatacaggagaacgcaaagggcaagaaacgtcagattgaagatccggctcgcccacttaagctggcccaagggaggatagccaacatcttgtcttcaatctcggcacccaattatctgcactgcccggtcaagggcagaagctatatttctaacgccgctgagcacattggtgcaaaacatatccgcaatattgacatctccaactacttcccttccactaaaagcacccgtgtgtactggtttttcaacacgatcctgaaatgtacccccgacgtgtctggcattttgaccgcccttacgacttataaaggtcacctgccttgtggcagtcctgcatcctcaatcctagcctactttgcccattacgacatgtggcagagcatcgatcagatcgtgtcagagaacggctgtaagttgtcagtttacatggacgacataaccgtctcaggtgaaatggtgactgagcgggtaatcttccaagtgcggaggtgcatttttcgcgccggactgcagcccaagaaagaaaaggagcgatggtacagacatggaattgggatcgtgacaggaatagtagtccggccctctgggcttagtgcgcctaatagcgctcacctgaaacgattcaccctccggcgccagatagctagctcttgcaatgaatccgaaaagtccagtctgagacgatccctgaaagggattgagggccagcagagccaaattgataggtggaatagaagattacacaacagcaaatccaatgccaaggaacatgttaacttaaagccaaactga

SEQ ID NO: 10393 - RNA, 930 nt, synthetic construct
  source 1..930: mol_type = other RNA
atgaagaccaagaagattaaaaactaccctctcgaccagagtccactctacaagcttactacgaagcgaaaattggctgaactcctatgtttacccctggccagactgaaaagaatcgccaccctgagtccgaatatgtataatgagtggactcaggagaaaaaaaacggagatctacggacaatcgaggatccggctcgaccccttaaaatggttcaatccagaattgccaagatcctctcgagcatcagcgcacccgagtatcttcattgcccagtgaagggcaaatcttatatatcaaacgcggctcagcacatcggctcaaaacacattcgtaacgtcgacatttccaattatttccccagcaccaaaagtagacgcgtctactggtttttccataacatcctgaagtgttcgccagatgtcgccggcctgctgacaacactgactacatacaagggtcatctgccttgcggctcaccttcctcctctatcttggcatactatgcccactacgacatgtggcaaaatatctatcagatagttagcgaaagtggttgtaaattgtccgtgtacatggacgacgtaactgtatctgggggcgtggtgacagaaagagttatgttccaggtgaggcggtgcatttataggtctggcctgcaaccaaagaaggaaaaggaacgttggtaccgccgggggattgggatcgtgactggtattgtggtccgatccggagggctctctgcacctaatgctgcccacctgaagaggtttaagctgcggaacaagctggcgaccagcagcaacgatgaggagcgcatcaccttacaaaaatctctcaggggaatagatggacagcagtcccagatagataaatggaatcgccggcttaatacgagcaccaagtcagtgagggcagacttgcagtga

SEQ ID NO: 10394 - RNA, 912 nt, synthetic construct
  source 1..912: mol_type = other RNA
atgactacaaagaccaagtcctatccactcaaccaaagtcccttttacaagctgaccacgaagcggaaactggctgaacttcttcggctgactcctgccaaactcagaaaattgagtgccctgtctcaggacctctatcgcgaatggccccagacaaatctgaagggcaaaacaagactgatagaggaccctgcccctgctctgaaagaggtgcagcgcaggatttacaggttgctatcctgtatcactccaccatatttcttgcattgcccagtgagggggagactttacatttctaatgcagcgtaccacgtaggaagcaggcattttcgtaacattgatatctcggactactttcccagcactaaatctcgaagagtgaattggttcttccgtcggatcttgaaatgcgccccggatgtctccgggatcttaaccgaacttaccacttacaagggccacctgccttgtggatcaccggcgtcatcaatcctggcttactttgctcactgcgatatgtgggaacagatcgcacgcatagcctcagagaacgggtgcaaactctctgtgtatatggacgacctcacagtgagtggtgatgtggtgcccgaccgggtaatgttccaaattcgtcagcgaatttatcgcgccggactacagcctaagaaggagaaggaaaaatggtatagacggggcgtgggtgttgtcacaggagtcgtcgttcgaccctccggcttaagcgcaccaaatagcgctcacctgaagagatttaagttacgctgtcagctggccacggcaagctccgctgatgagagggccaccctccaaaactccctgaggggggttgagggccaacagtctcagatcgatcggtggaatagccatttcaccagttacaacgcagaggagtga

SEQ ID NO: 10395 - RNA, 942 nt, synthetic construct
  source 1..942: mol_type = other RNA
atgctatccctggggaggaagttaatggccactctgcctcggacacaccccattaagcagtctccgcttcacaaactaggacatcacaagaggctggcctcactgttgaagatcgaggtggctcaactgcgagggcttgcaaaggccggcagtgcagcctactccgaatgggacgaggataaacctaatggcggcacaagacgcatcgaaaatccaaaaccaagactcaagaggctgcaaagcagactcgccactatattatcacttatagatcctccggcttttctttcttgtcccgtgaagggccgatcatatatttccaacgcccgggcacatctcggtagcaaagagttcgtcactctagatgtgaaatcctacttccctagtacgacctggaatcgcgtgtattggtactttaacaaaaggttgctgatgccaagggataccgcgtggaccctggcaagtgtggccaccattgacggtcgtctgccaacaggttctcccctctcgcccatcatggcataccttgctcacgaggatatgtggttgaaggtcgccaagttagcggaggacgtgggatgccggctgaccgtttatatggacgacatcacaatttctggagcccgtgtccccgaggctaccgtttggaagatcaaacaggaggttcataaagtgggcctgcgcctcaacgataagaaggaaagaagattcagcgacgtaggagtgatcacaggcgtagtcgttacgcctgatggggtgcgcctgcccaaaaggagccatctcaatctcagtattgcgcgaaaggccgctctggtagttgacggcgaagcaaaactgcgggctatgcgccgtgtgagaggactggaagcccagcaccggcaggtcttggctccaactgactttactgacaacttgagcgggagccaccgggggtcctcatga

SEQ ID NO: 10396 - RNA, 909 nt, synthetic construct
  source 1..909: mol_type = other RNA
atgcagaagtcaaagtacgccagatatgagctcgatcagtcaccgttctattgcctcaaatcaaaggctaaactggccgagttgttacacatctcccaatcgaagctgaagtgcctcacatgcaccgaggacctctatgttgaacgcgatacgttcaatcctggacgccgcaagtctagacgaatagagcaacccaagttaccgctcaagctggttcagaaaaggatcgaagagctgctgaaacggatcaaattgcctaactacattcattcccccggtaaggggaggagttatatatctaacgcaaaagcccatgtaaatgcgaaggaactgagaatcttggacatagagaagtactttacttctactccagctaggcggatttactggttttttcacaagcagatgaaatgtagccctgatattgctggcattctgacaaaattgtccacattcaaagaccacctgcctacaggctcaccatctagcccaattctgagctactttagccacatcgatatgtgggaggagatcaaccgaatcgtggaacccaacaactgtatcctgaccgtctatatggacgacgtcactattagtggtgagcatgtgcccggggaacttatatggcaagtgaagaagcagttcaagaggtacgggcttcgttccaataaaaaaaaggagaagcactacatcggcaaaaagagttatgaggtgaccggagtcattactacgcagtccggagaactgcgagtgcccaatcggcaacatctacagatgagaaatatcaggcggcttattagtttagaaagcgaaccagagaaactcgccaaacttagacgctccctgaagggcctggaagcacagagcgagcagatccgtcgggcaaactctctcctaaccgaaacctga

SEQ ID NO: 10397 - RNA, 909 nt, synthetic construct
  source 1..909: mol_type = other RNA
atgcggaagtccaaatacgccagatacgaactggatcaaagtcctttctactgtctaaaatccaaggcgaaattggcaaaactgctgagggtgagccagataaagctgaagttgctgaccaacactgagcacctctacgtggaatcagatatcttcgaccctgagcgaggtaaatcacgccggtttgagaagcctagacaggacctcaaatgtgtgcagacacggattgaggaactgctgaagcgtatcaaagtcccaaactacatccatgcgcccgccaaaggaagatcttatatctccaacgccaaggctcacgttaattcaaccgaggttcgaagtttggacattgaaaagtattttccgagcaccccagcaaggagaatagattggtttttcaggaagcagatgaagtgctcttcggatgtagctaatatcttggccaaactctctacgttcaaagaccacctcccaactgggagccctagctcccccattctttcctattttgctcacatcgacatgtggaaggcaattaatgaaattgtcgatctggccaattgcacactgactgtctatatcgatgacgtgaccatatctggcgaccgcgtgcccggagaattaatctggcaggtaaagaagcagttcaatcggtacgggcttcgaagtaacaagaagaaggagaagcattacattggcaaaaagagctatgaggttaccggcatcatagctacaaaggagggtgagcttaaaatccccaaccgccagcatctcaaaatgtataggtgccgtaaactactcaaactgggaattcggtacgagaagggcaaggacatgctgaaaaggttaagagggcttaaggcccagatgcaacaaatccgcaaagtgaacaatagctcaattgaaacatga

SEQ ID NO: 10398 - RNA, 906 nt, synthetic construct
  source 1..906: mol_type = other RNA
atgccgagaattaagcaagccggctacgaattgaaccagagccctttttactgtctcaaaagcaagaaaaaccttgcaagcctgcttcagatcagtcagtctaagctgaacaatcttacaaggtcagaagaactctatatcgaggagaatcggtttgataaaaagcgaggtaaaattcggcacatcgaggagccaaaacctgacttgaaacgagtgcagaagagaatcaagaatctgctgacccggattcagttgccaaattacgtgcatgcacctgctcaaggacactcccatatcgggaacgccaaggctcacgtcggagctgttgtggtgagaagcttggatatagaaaagtatttcccatcaacccccgccaagagcatattttggttcttctataagcagatgaagtgctcctctgacgtggccggaatcctgaccaaactatccacattcaaggggtatctcccgacgggctcacccctgagtcccatcctttcttatttttcgcacatagatatgtgggagactatcggtgagatcgtcagaaatgcaagttgcactctgacattatacatggacgacgtgaccatttccggcaattctgtcagcggagaactaatttgggaagtaaaaaagcagttccaccactgcgggctcaggtccaacaaaaagaaggagaaatactactttaggaagaactcatacgagatcaccgggattattgtgacaaaggaaggcgaactcaaagttcccaatcgccaacatctgaaaactcatcagatacgtcaggagctccattgtgagacggagcctaagaaatgtaaaaaactgcgccagcgcttacaaggcctggaagcgcagattcagcaagttaagagggtaaactatcccctgccagagtga

SEQ ID NO: 10399 - RNA, 921 nt, synthetic construct
  source 1..921: mol_type = other RNA
atgccggtgcttcgcattaaaaagattggatataaactcgaccagagtccattttattgcctgcaatccaaggccaagctagctactctgctcggggtgtcacgctcccgattgatccaacttgccagaagcgagtccctgtacatcgagaaagagattatccatcctagacggaagaaatcaagattggttgagaaaccaaagtatgagttaaagctgattcagaagcgaatcgaagggctattgaaacggatcgagataccaaagtatattcacgctcccaccaagggcaggagctatgtctccaatgcaaaagcccacctcaacagctacgtcatctctagccttgatatcgtgaaatacttcccttctacgaaaagtaagagagtttactggttcttccatacacgtatgaagtgcagtcctgatgtggcagcgatactgaccaagttatctacatacaaggaacatctgcccactgggtcacctctcagccccatcctctcatactttgcccatatcgacatgtgggaggaaattaacaatatcgtggaggatgcaggctgtatactgacagtgtatatggatgacgtaacaatttcgggagactacgtgagtaggaatctgatctggcagatcaagaagaagtttcacaggtacggcctgtctagcaataccaagaaggaaaagtactacataggtaaaaactcgcgcaaaataaccggtgttatcctcgacttcgagaagggcgtccttaagattcccaacaggcagcacaaaaaaatgtattccatccggaaacagatttctaaagaaactcacccagatacctatgcccatttgatgagcaaactgaagggactgaagtcccaggtacagcagattcacaaagctaacaatacccaaactaacgaaaattga

SEQ ID NO: 10400 - RNA, 921 nt, synthetic construct
  source 1..921: mol_type = other RNA
atgcagcgctcacggtgcaaacagtatacactggaccaaagccccttctactgtttaaagagtaaggagaagcttgctaagctgttatatattactcagaggaagcttgaggtcctcgcacatacggaagagctgtacatcgaacgagataaattcaaccctaaaaaaggcaagactttccgagtggaagagccaaccccccctctaaaacgtgtacagaagcggattgacgagatcctgaaacgggtgaaaatgccaaactacatacatgccccgggcaagggtagaagttatattagcaacgctagagcccacatcaacgttgccgtggtacgctccctcgacatcaaacaatacttcccttcctcccagtcttggagagtgtatagtttctttgacaagcgcatgcggtgctcttcggatgtggcgggaattctgaccaagctctctacatttaagaagcacttgccgaccggatctccctcctcaccagtcctgtcatattttgcccacatagatatgtgggaggcaattaatgagttggttgaaggggcgggttgtaccctaaccgtctacatggacgatgtgacaatctcaggctccagcgttagcgacgaactcatcaggaaaattaagagagaatttgacaggtgtgggttgagggatagcagggacaaggagaaacattacgtcgggaataagcctcgtgagatcactggcgtgatcgtcaaagacggcgagcttaaactgcccaatagccagcataagaaaatgcacgactgccggcaagctatccagcttgagacagatccagccaagctcgctcacctgatgcagtctctgaaggggctggaaagtcaagcccagcagatacgcaaagcaaacgaaattagagtggataatggatgcaatgatctgtga

SEQ ID NO: 10401 - RNA, 912 nt, synthetic construct
  source 1..912: mol_type = other RNA
atgaaaaaagacaaatgcaagcaatatccccttcaccagtctcctttttactatctaaagagtaaggacaagctcgcgaagctgcttcatatatcccaaaagaccctggagatactgacgagcaccgaacagctgtacattgagcaggatcgttttaatctcaagaagaagaagttcttcagggtggaagagcctaaaccattgctgaagcaggtgcagaaaaggatcggggagctgcttaagcggattgaagtgcctaattatatccatgccccggcaaaaggccggtcatacattagcaacgctaaagctcatatcaacggatttgttgtcagatccttggatatcgagaagtacttcccctcaactcagagccaaagagtctactggttcttccacaagcagatggagtgctcctctgacgtggccggcatcctcactaaactgagcacgtttaagaatcaccttccaacaggatcacctagttcgcccatgctcagctattttgcacacttggatatgtggaaagctattaacgaattagtggagtccgccggctgtgtgctgacagtatatatggatgacgttaccatcagcgggagtttcgtatctgggaaactgatctggctgattaagaaggagttttaccggtgcggtctacatgactctcgcaagaaggaaaaacactatgtcggtaataagccacgagagacaacaggaatcattattgacaatggccagctcatgctccccaactcccagtataagaaaatgcacgaatgtcgacaagcaatacgccaagagactgatgctgacaaaaggtacatattaatgcgcaccctgaaaggcttggagtcacaggcccagcagatcagaaaagccaacgaaacctacatcgatactgaatgttga

SEQ ID NO: 10402 - RNA, 924 nt, synthetic construct
  source 1..924: mol_type = other RNA
atgcccactaagcgtctctaccagctgaatcagtcccccctgttcaagctgggaagtcggtctaagctcgctaaactactcggtatgacacctggggctctcagggctctggcagcaggagacggcctgtataaagagtttgaagtggagaaaaagtcaggtggcaagcgcggggtcgagaacccctgtagaccgctgaaactggcccaggcaaccttggcaaggctgctggggcggatacaacctccagatttcttgttttgtcctgtcaagcgaaggtgctacgtgactaacgcggcagctcatcgccacagccggatggtccagtgcttagacatcaaaaagttctttccatccgtgtctcagagacgcgtattttggtttttcgctaccgttatgaagtgtccacgtgatgttgccggtctgctggctcagctcgcctgctacaagggccatctcccaaccggctctcctctctcccctatcatggcctatttcgcctactacgatttatgggcggccatcgacgccctgtgcaaagcaagagggtacactttcaccgtgtatattgatgacgtgacgattagcgggactcatgtgcccaagagcgccatttgggaagtccaacagatgattcacggcgctgggctacggtatcacaaacagaaaacgttcgtggataagccagccgagatcacaggcataattcttaaggacggccagttattggccccctttaggcagcaccgaaagctgaaagataccagagctgctcttcgagcagccgaccccgtagacaggaaggcccttaaaagtcgcttgacaggtgtgacagcgcagatcggacaaatcgaacggcaaaatctgtgtgccccgcagcgcaaaggaggatcgaccaagatctatagactttcagaggtttga

SEQ ID NO: 10403 - RNA, 903 nt, synthetic construct
  source 1..903: mol_type = other RNA
atgcgcactaacgccaagctgtataaacttgaccagagccccttgtacaagctacgcagtcgtgctaagctggcccggctccttggtgtttccgtagccgatttgcgacggctgaccaagaacgcagactcactctacaaggaattcgaaatacgcaagaagaacggcgagatgaggccagtgcaaaaccctgaaaggtatcttaaagtagttcagggacgccttgcaaaggtgctcgcgaggatcgctccaccggactatctctactgtcctgtcaaaggtaggtgctacgtgagtaatgccggccaacatcggggcaatcgcgatgtgagatgtctggatattcgacgatattttccttccaccccgtccaggagagtctattggttctttagatccgttatgggctgcgagaaagacatcgccgccacgctggctagattagccacatacaaagggtgtctgcccaccggttctagactcagccctatcatggcctattacagtcacatcgacacatgggacgctatcgcgtgcatctgcaaggaaaagggctacagactgactgtctacatcgatgacgtgacgatctctggacagtctgtcgatcctgacgatatttggcggatcaaacaggtcattcaccggtcggggctgagatatcataaggaaaaggcatacacagacaggccccccgagataactggggtgattgtggatggagagcgtttaattgtgccaaatcgccagattgctaaactggcaaagaccaggaaatctctctcatcaactaccgatccagaggagctgaaaaagctgcacgacaaaataagcgggctacggggacagatggcacaagtggctattaaagccttggagttgccccagctgagcaccacatga

SEQ ID NO: 10404 - RNA, 1005 nt, synthetic construct
  source 1..1005: mol_type = other RNA
atgactctgccacggaaaagcgccaaccgttacgacgttagtagctctgcactgtacaggttacccacccttaaggccctggccagattcctagagtggaagggatcacctagcgcgctccgcgctttatgcaagcgccctgacaatttttccgagttctatcaggcccacccccggaccgggaaaatgcgactgattcaagctcctagcaaggtgatcaaacccctgcagaaaaggctgaatgttcttttaaaacaggtgcgcgtccctgattaccttcatagtggcattccgaagcggtcccacctgtctaacagcgagcagcacatgctagccgccggagcaactgtcactgtggacgtatccgatttttatccgtcaattactaggcagcgcgtgttccggctcttcaaaaacgtcttccagtgtcgaggtgacgtggccgacgctatggctgatctcgtttgttatcaaggcaagctggccacagggtcaccagcgtccgtgctcgtgtccttttgggcatgcagagacatgttcgactctatggcccagcgagtcgctactcaaggaggcacatttacattgtacgtggatgacgtagccataaccggcgatacgatcggacacggcgatatccaatggttggacagacttctcagaagatttggtttctcttctaaggttgaaaaagccaagctctttcgcaaaacccgagcaaaagtagtgaccggcagagccttccgtcatggcataagcagggctcccaatcgaaaacacaaggagatgcatgaggcacgcgctgaaatcgaatcaggacgggccacaatcaaggctaagcgggggttggtggggcagctggaaaacatcgggaatctggatcaggaacgcggtaccagtctgaaggcagaggcaaagaagttgaggagtacactgccccggccaagaaggaggcgtagagctacagcgaggccagtcaaaacccggtcggagattgcgacgtga

SEQ ID NO: 10405 - RNA, 1005 nt, synthetic construct
  source 1..1005: mol_type = other RNA
atgtccttgcccaggaaatcagccaatcgatacgaggtaactagtagcgcctttttccggctgcctaccttgaaggcgcttgcacgactcctgcaatgggaagggagcccttctgctcttcgcgctctgtgcaaacgaccagataactttacggagttccccagaatccatccccgtaccaaaaaggagcgagtgattcaagcaccgtccgacgtggtgaaacctctgcagaagagattaaatgtgctgctgaagcaggtgagggtgcccgattaccttcattccggcatacctaagcggtcacacctgagcaactctgagagtcacatgtgggcagagggggctacagttacagtcgatgtgtcagatttttatccgtctatcactcgtcagagagtctttcgcctgttccggaacgtcttcgagtgtccaggggacgtagccgatgcgatggccgacttggtgtgttataaaggcaagctcgccactggatcccctgcaagcgtattaatctctttctgggcatgccgtgatatgtttgacatgattgctgatagggttgccaccctgggcgggacctttactttgtacgtggacgacgtcgccattaccggaaatacagtggggcatggagacattcagtggcttgacaggctcctacggaagttcggattctcaagcaaactggagaaggctaaactcttccgcaaggacagtgccaaagtcgttacgggccgggcatttcgccacggtatttcgagggctccaaacaagaagcacaaagaaatgcacgaagcgagaacagaagcaaaatccatcggtgctagtgtcaaggttaggcggggcctggtgggacagctcgagaatataggcaatctggatcatgaaaggggtacctctctaaaggccgaagccaagaaactcaggtccacattaccaccacccagacgccggagaagagccatcactcgccccaaccacatcagccctgaggccgctacctga

SEQ ID NO: 10406 - RNA, 1005 nt, synthetic construct
  source 1..1005: mol_type = other RNA
atgacccttcctaggaagagtgccaatcggtatgacattacctccagcgctttctttcggcttcccaccctgaaagctctggctcgcgtattgcagtgggatggaaccccatctgcgctcagggctttatgtaagcgcccagacaacttctcagaattttaccaaacccataggagaacaggtaagaaacggctcatccaggcccccaatgcagtggtgaagcctctgcagaagcgattaaatgtcctactcaagcagatatgtgtaccagactatctgcactccggcatcccgaagaggagtcatttgacaaattccgaatgccacatgctggccgaaggggcaacggtcactgtcgacgtctccgatttctacccctctatcactcggcaacgagtgttcaaactgtttaggaacgtgttccagtgccctggggacattgcagatgccatggccgatctcgtttgttataacgggaaacttgccaccggaagccctgctagcgtgctgttgagtttctgggcctgcagagatatgtttgacctcattgccaagagagtggcggatcagggcggcacattttccctctacgtggacgacgtggcaatcactggcaatacaattggacacggggatgtaagatggctggaccgcgtgctgcgtaggtttggcttcgcctctaaggtggagaaagccaaggtgtttcgaaaagcaagcgcaaaggttgtcactggaagagcgttcagagacggcattagccgagcccccaaccggaaacacaaggagatgcatgagagtcgcaatctagtcaagggtacaagcgcgtcaacgaaagttaagcgcggtctggttgggcagctggaaaacatcggaaacttggatcaaaagcgcggcaaagcactgaaagctgaggctcagaaattacggtcaacccttccaccggctaggcggaggcgtagatcggctgctctgcccactgccatatctgccgccgaggaggcatga

SEQ ID NO: 10407 - RNA, 1011 nt, synthetic construct
  source 1..1011: mol_type = other RNA
atgacgctgccacggagctctgcaaaccggtacgacgtgccttcctcagccctatttcgtcttccttccctcaaagctctggcaaaggttctgcagtggggcgggaacccctcagcactgagagccttatgtaagcgccccgataattttgaggagttctaccgcactcacccaaggaccaagaaaaaaagactgattcaagcccctagtgaccaggtcaagcctctgcaaaggagattaaatgtactcctgaagcagctgcgagtgcccgattatctgcagtcggggatacctaagaggtcacatctgtctaacagcgagcttcatatgagggctgaaggcgctaccgtaacagtggatgtcagtgacttctacccaagcatcaaaagaaagcggctgttccggctttttcgcaacgttttcgagtgccgccccgatgttgcggatgcccttgctgacctcgtgtgcttcaatggcaatctggcaacaggttccccagctagcgtcctgctttcattctgggcctgtcgggacatgtttgacatggtggccgaaagggcgctatctcaaggagggacattcacgttgtatgtcgacgacatcgccattaccggtaatgccatcggacacggtgatatccgttctctcgacagactgctcaataagttcggctttaatagtaaaaaggagaaggccaagttgtttaggaaggctgatgctaaactggtgaccgggagagcctttcgggatggagtgagtcgcgccccgaacaagaagcatcaggagttacacgagactcgaaaacagttgagagacactaccgcctctattcgcctcaaacggggcgcagttgggcagctcgaaaacataggaaacctggatgcacggaggggaagcagcttgaaggctgaagctaaaaaactgcgcacaactcttcccccaccccgtaggagacgacgatcctcctccgcgttgccgctcgaagcaggcatcctagaccctaaagcctga

SEQ ID NO: 10408 - RNA, 969 nt, synthetic construct
  source 1..969: mol_type = other RNA
atgacattaacacggaaatctgcgaaccgctacgacgtgtctagttcagccctgtttaggctgcccagcctgaaagctctggcctcagcattgttgtggcctggcacgccgagtgctcttagggcactaagcaagaggcctaataacttccaggagtttaatcgagtccaccggagaactggtaaagccagaaagatccaggcaccatgtgaggaggtcaaaccacttcagaaaagactgaacctgctgctcaagcagctgagagtgcccgattatttgcaatcagggatcccggggcgctcccacctgtcaaatagcggcaaacatatgactgccgaaggcgctacagtgaccgttgacgtgagcgacttctatccatccatcacccgtaaacgggtcttccgcctctttaggaatgttttccagtgcgaacctgatgtggccgacgccctggcagatctagtgtgcttcaacggacatttggcaactgggtcgcccgcaagcgtgcttttaagcttctgggcctgtagagacatgtttgatgtcattgctgaacggacctccctgtctggtgctacttttacactctacgtcgacgacattgccattaccggggataaaatcgggcacagtgagatattgtttctaggacgcctgctgaaggattttggcttcagttccaaggaacaaaaagcaaagctgttccgaaagagggaggcgaaggtagtgacgggtcgcgctttccgggatggagtttctagggctcctaacaagaagcacaaagagcttcacgaatccatgagacagctccgcgaacataaggctaccgttaaggaacgacgggccgccgtaggccagcttgagaatgtgggactcctggacgagaagagaggcgcgctcctcaaggccgaggccaaaaaactgcgttctaccttacccccttcccgaaggcccaagcgtctcccatga

SEQ ID NO: 10409 - RNA, 936 nt, synthetic construct
  source 1..936: mol_type = other RNA
atggcgaaaaaagagaggctgccacgttccctagagaattcagggctgtaccgacttaggaccatgggagccctggcccgacttttgcattggaagaagagcccctctgctctgagagcactctgctcaaggcaagacaattgggacgaatttgatcaagccaggccgggaaagaagccgagacgcattcaggctccaaaacccgccataaaggctctgcagcgcagattaaatgacctgctccagcgcattgatgcacccgagtatcttcactcagggacagtcgggagatcttacttgaccaacagtgccctccatagggatgcagagggagccaccgtgactgtggatatctccgatttttatccttctgtcacgcgaaaaaggctcttcgtgttatttcggaccgttttccagtgcagttccgatgttgcagacgcattagcgggtctactgagctgtggaggtagcttggccacaggcagccctgccagtgctctcgtggcgttttgggccgctaaggacatgttcgacggtattgccgaaagagctaaacgcctcgggggccggttctctctgtacgtggacgatataactctgactgcacgaaccgccggacgtggggatgtatcttttattgaaagacacgtcggccgctatggcttcagactcgcccgtaagaaatcacgcgtgtatcgggcgggccaacctcgagagatcacaggccgcgttcttaggaacgggcagagccgggctccaaacaagcagcatcggtacatgcacgaggccctgtccgctatgggccctgaaacacccccagctgaagtcaggtccgccatcggacggatccagcacgtgggcatcctggacgacgtacggtcgcaggagctgatggcaagcgctagacggctgagggagaagttggcaagttcctga

SEQ ID NO: 10410 - RNA, 957 nt, synthetic construct
  source 1..957: mol_type = other RNA
atgattgccctggaccagagctcacgctatgagctggagttgtctcccctctaccggctaggcaggaccaaggacttggccgccctgcttagatggcgtggtaatccatcccaactgaaagccttctccaagagggatgatcacttcgacgagtatgaccaggtcgatcctaaaaccctgaagaagcggcacattgaggctcccaaagccggtttgaaacgcttacaaagacgactgaatgcactcttgcaacgaatccatgccccgccttacctccacagtgggatcagaggcagatcctaccttactcacgccgggacgcatactcaagcggaaggggcgacgttaaccgccgatatttcggactactatcctagcgtcagtacagagcgtctccagcagctgttccgcaaggactttcgctgtagtatcgatgtggcttggatactcgctcgcctgttgagctgccgcggccatcttgccacaggatcacccgcttccgctattgtggctttcatggcaaataggtctatctttgatgaattggccaaaagggcaaccaagcggggaatcgccttttctctgtacatggacgacctagcatttactggccgaggcgttaaccgctcagatgccgccgccgcaggagaactcctcatcagacacgggcttcgaatcaaagctaaaaaaacacgtctgttccacgctgaccagccaaagttagtgacaggagtggcatggaggaacggcataaagcgggcgccaaacgcccagcacaaactgatgcgggaagcactgcttgtactgcagagggcacccagagagccaggtcattatcggaccgctattggaagagtccagcatatagctatgctcgacgatgtgagggggcctcagcttcggaagaaggcgagagaactgagggttggcctgaaggcactggagagcccgcggtga

SEQ ID NO: 10411 - RNA, 957 nt, synthetic construct
  source 1..957: mol_type = other RNA
atgaaccagcagacaacgaagcctgtctctaccaagcgacgcaccgaacgatacaggattgcgagctctcatctctatggcatcaggcggcacaccaaactggctgagatactttggtgggctgggactgctggccagctgcaaacttttacaagacagcctgacaactacacccgttatattgataccagcaagcccgggaaagaccgcttaattgaggcccctgccagacgcctgaaggggtttcagaggcggctgctagacctccttatccgaatagagctcccagattatctgcatagtgccaggccgggctactcctatctctctaatagcgccgcccactgcaaggcggatggaagtacagtcacaatggacattgattcattctaccagtccgtgaccctgcatcgtgttgcccagttctttgaacagaagttaaattgcgcacccgatgtgtcagaaacgctcgctcacttgttgtgctgtgatgggcaccttgctaccggatctccagctagcccactgctgtccttctgggcctaccataacttgttcgattcaattaacgaccgggtgaggtcccgaggtggtgtcttcactctctacatcgacgatatggccatcactggcaatggctttggacacactgacgcccggtgggtaggaagactgatccgccgcagcggacttcgcctgaaagactccaagacaagggtgtttagagcggatgctgcaaagctaatcaccggcagagcctgtagaaacggtgtgagtagagcccccaataaacagcacaggaaaatgagagaggcacaggcacaactggagcaaaatccccatgacctgacactccgcgcatcggtggctgggctgaaacgtcacttagccctgttggatgacgttaaaagggaccaacaccgggcagacgcaagccggatctcaaagcggcattga

SEQ ID NO: 10412 - RNA, 957 nt, synthetic construct
  source 1..957: mol_type = other RNA
atgagccaacagacaactaagccagcctcaactaaaaagcgcacagagcgctacgggatcaccctcagccacctgtatggcatacgatcccatacccggctggccgaagttatttggtgggcaggaaccgctgggcagctgaggactttttctagacgggcgggtaattatagccggtacattgacaaatcaaagccaggcaaggaccgactcatagaggctcctgccgcttcgctgaaaggatttcaggcaaggctgctttgtctgctgtccagaatcgagctgcctgactatctgcattctgcccgccccggatactcatacttgtctaatagcgctgcccactgtaacgctcacgggagcactgtaacgatggatattgatagtttttaccagtccgtcaagctccacagggtcgcaaagtttttcgaaagcaaattgaattgtgcttccgatgtgtcagagacgctcgcacatctcctgtgctgcgatggccatctcgccactggctccccagcttctccgttagtgtccttctgggcctaccgcgacctattcgacagtgtggatgaaagggtacggagccgggggggcatcttcaccttatatattgacgatatgggaatgacaggcaacggtttcgggcacacagacgcccgttgggttggtcggctaatgcatagatccggacttcgcctgaaggacagtaaaaccagggtctttcgtgcagatgcacccaagctgatcaccggaagggcatgccgaaatggcgtgagtcgggcccctaacaaacaacacagaaaaatgagggaagcgaaagccaggctggagcagaaccccaacgaccccacacttagagcgtctgtggccgggcttaaacgtcacttagccttgttggacgtgaagaagagagatcagcacagagcggatgcttcacgaatctctaagggccgctga

SEQ ID NO: 10413 - RNA, 963 nt, synthetic construct
  source 1..963: mol_type = other RNA
atgacactccagaccaaaaaaaaggccatacctctcaaaaggcgcactgaacgttacggcatttcctcttctcacctgcacgggattcggtcacactcacgattggccgaaatcctaagatggggagggactgccggccagctgagaacttacgccaggagagaggagaactataaccgctatatcgagaaggggaaacccggaaagaaggacaggcagatagaagctccagaacctaggctgaaggagtttcaaaagagactcctggacctcctcaatcggattgagcttcccgaatatctgcattcggctaggccagggtactcatatctttctaatagcgcagcgcattgcaatgccacaggctgtacactgacgatggatatcgacagcttctaccagtccgtgaaagtgcagcatgtagcacgcttttttgagaaggctttgggctgctctggcgatgttagcgagacaatggcccagctttgctgttgtgatgggcacctagccaccggaagccccttgtccccacttctgagtttctgggcgttcaaagaggttttcgacgcaattaatcatcgggtgaaaagcagaggcggtgtgtttaccctgtacatcgatgacatcggaatcacagggaagggtttcggacacacggacatcatttggaccactcggctgctgcgaaaatccggcctgactgtcaaagagagtaaaacccgtgtctttcacgccgatgcgccgaagttaattaccggtcgagcatgccgtaacaatgtcagtagagctcccaacaagcagcatcgcaaaatgagagacgcccaactcaagttggaatccaaccctaacgacccttcactgcgcgcaagcgtggctggcttaaagcgccacctgggactgctcgacgataagaatcgggatcagcaccggagtgaagccaggcaaatattaaaggctaggtga

SEQ ID NO: 10414 - RNA, 960 nt, synthetic construct
  source 1..960: mol_type = other RNA
atgaatacacctagaaccaagaagaccacgcccacccaaaagcgtactgagcgatacgcgatagattcatcccctctgtatgggatgaccagccacactcggttagccgctatactccgctgggcagggactacaggccagttacgcgagttttgccggcggccaactaacttttccaggtacatcgacaggtccaaacctggcaaagaaaggcttatcgaggctccggcaaaatctgcgaagacatttcagacccgattcctggagctcctgagaagaattgaactccccgattatctgcacagtgctagatcaggccggtcttacctttcaaactctgccacacactgtgaagccgatgggtgcacaatcaccatggatatcgatagcttctatcagtctgccacacgggagagagtgatccacttcttcgaggtgcacctgaagcagccacgggacgtggctgaaaccctggcaagcttgttgtgttgcgacggccatttggctactggttcgcccgccagcccactggtttccttttgggcataccgcgaggtatttgacgctatcgatgaacgagtgaggtccagaggaggtgtgtttacgctctatattgacgacatgggcattactggtaaaggattcgggcatacagacgtcgggtggattagccgtcttctgaggaaggccggcctgacggttaaagaaaccaagacacgagtattccatgcagacgcaccaaaactcgtcactggcagagcctgtcgcaacggagtcagtagggctcccaacaagcagcaccgcaagatgagagccgcccagacccaattggagctcaatccgaatgaccctggtctgagggcaagtgtggcgggacagaagcggcatctggccctactagatgacgctaatcgcgatcgtcatcgggccgaagccgagaggcttaccaaaggacgctga

SEQ ID NO: 10415 - RNA, 969 nt, synthetic construct
  source 1..969: mol_type = other RNA
atgagtacccctaatcctaaaaaacacccccggcctaagcgcaggaccgaatgttatgacgtcgctgactcacatctacacggcctcgagagccacagtcgactggccagcatcctttattgggccggaaccccctcgcagttaaagactttcagccggcgggaggacaactactcacgatacacagacaagtctaaggcaggaaaggaaagactgattgaagctccggcagagaggctcaaggtgttccaagctcgaatactggatctgctgtctcgcatcaagcttccagactatgtccacagtgggagaatcgggcgctcctacctgtccaactctgccgcacactgcagcgctgatgggtgcacgatcacaatggatattgaaggcttttaccaatcagtgactctgcagagggtcgcccgctttttcgaggtctggcttaaatgcagcccagacgtgtctctgactctggcacatctgttgtgttgtgactggcacctagctactggctctcccgcgagccctctcatgtccttttgggcatacagggaggttttcgatgcgatagacagtcgggtacgtgctagaggaggcgtgtttaccctgtatattgatgacatggggatcacaggcaaaggattcggccacaccgatgttcagtgggtttcccgattactgcgccggtacggtcttaagattaaggaagcaaagaccagggtatttcatgccgaccgtcccaaattagtgacaggacggggtatgagacacggggtgtccagagcgccaaataaacagcacatgaaaatgagacaggcccaggccctgctagaggccaatccgaacgatccaacgttgcgcgcttcagtcgctggtcatcgtcggcatttggccctcttggatgatgagaagagggcccatcatagggccgaggctgccagagtgtccaggctcaaactcaaagtgtga

SEQ ID NO: 10416 - RNA, 939 nt, synthetic construct
  source 1..939: mol_type = other RNA
atggcaagcaagcaaacaaattccgctcagagatatggcgtgggcacttccccattgtacgggattcaaagcaagaggcgactggccgaagtgctcttctgggcaggccccacttctgctctggcttccttcgccagggatcccgataactatgcacggtacatcgatcggaggagaagtgaaaaaccgcgccttattgaggcccctcaggcaagactcaagggatttcagaaacgggtagaagatctgctcaagcgaaccgtcatgcctgactatctacactctggcatcccagggcgatcataccttacttgctcagcagcccaccgtgatgctgccggctgcacagtcacaatggacataagcgatttctacctgtccattagtcaggacagagttaccaggatgttcatcgtgctcttcgcctgtacccgagacgtagcagaggtgttggcccagctcttatgttgcgacggacacctggcgactggctctcctgcttcgcctctgctcagcttcctggcgaataaagagacgtttgatcagattgctgcacatgccggacgccggtctggtgcttttacactttacatcgacgatgtggcccttaccggaaagggcatcggtaccgctgaggtcaaatggattacaaggctgttgaaacgttcagactttacggtcaaaagaagcaagaccaagatctttcgtgccagtcgcgcgaggctgatcactggtcgcgttctgtatggagggcaatcaagggcccccagtcgccagcatcagaaaatgaaggcagctatagaggcttccaacgccttaccaaaggacaaggccctgaaagccagcgcaatagggcgggtgcggcatgttgcgctgctagacgacgtgagacgcgatgggatgcgggctaccgccaaaagattggccccacccaagtga

SEQ ID NO: 10417 - RNA, 981 nt, synthetic construct
  source 1..981: mol_type = other RNA
atgaacccgaaagttaggacgaagaaagagcgtttggagaaacctctgaaacagtatgctcctgatcagtgtgcactatatggcataaagggggtaggtcagttgatgcgggtcctaagatggcggggaaccagggccgaactggaagccttcgatagagcccccgggagctaccgcttttgggcgaacgaacagggtcgtgagatacaggccgcaggggcagagatgcgcaagttacacgctagggtagccgtactgctgcggcgcattatgccacccgaataccggcaatcaggcgtgagaaaacgatcattcctgacaaacgcccagttccacacactggatgaaccaagcgtgaagctggacatcaagtccttttacccatctacgaccttcgcacatgtgcggcgatttttccagaacgacatgaagtgcgccggggatgttgcttttctcctcgcaaagatgtgctgcgtgaatcagaggcatctgccaaccggcggagtccactccgaggtgcttgcattttattgtcacaggaacgcattcgagcagctttaccaaagagccaaggcccgtggaggcgtcatgaccgtgtatgtggacgacatcatgatgactatgcccagagctagcctcaccgatcttgaatgggccagacgcctgttcgcgaatcacggcatcaagattcaccccggcaaaagtaaggtgctcgctaaagctaaaaggaagactattactggggtcgatatccatcgcggcaaaatttccgcccctaaggctcagcaccaactgatcctgcagcgacacgttgagctgaatgccgctgtcaatccgactcttgcagttaccgccgcgcggtctttgctcggacatctcgaccatgtggcccaaatcgagcctcgctttaggagtagagctgaaggaacacgagcctggttggccgcagtgttagcggagacagacgctcccggtgagtga

SEQ ID NO: 10418 - RNA, 963 nt, synthetic construct
  source 1..963: mol_type = other RNA
atgaagatgcccgttcgaaaaaagaaacagcgtctcgaaaagcctcggaagcagtacagaatcgaccagtgcgccctctatggcctgaagggggtcggtcagctgatgagagctctgagatggacaggtacacgtgcagcactcgagggattcgaccaggccaagggttcttataaggcctgggctaatgagacagggcgagaaatccaagccgcaggcgccgacatgaggaagctgcaggccaggatcgcagtcttactgcgccgcgtgatgccaccagattatcggcaatccggtgtgagggaccggagtttcctgaccaacgccaagctacaccgagcggatgagccgagcatcaagctggatataaagtcattttacccatccaccacttttgcccatgtgcgcaggttcttccaccaggagatgaaatgtgccggcgacgtagcctttctgctggcaaaactatgttgctaccacaggaggcatctcccgaccggcggagtgcactcagaggtgctcgctttctactgccatcggagagctttcgagcagctgtacagacgagccaaagggcgcgggggggaaatgaccgtgtatgtcgacgatattatgatgacgatgcctggcgcctctttaacagacctggaatgggcccggcgtctttttgcaaaacagggcgttaagatccaccctggcaagagtactgtgcttacaaaggacaggccaaaaactattacgggagtaactatacacaggggaaaactccaggcccccaaagcgcagcaccatttgattcggcaaaaatttgaggatcttgctaaagctgaggatcccgcggcagctaccgctgctgcaagaagcttgatcggacatctggatcatgttgcgcaaattgaacctcaccttagagacagagcaaacggaactcgcgccttgttgcggcgcaccttagctccctga

SEQ ID NO: 10419 - RNA, 987 nt, synthetic construct
  source 1..987: mol_type = other RNA
atgaccaccgtgcaaaagcgaaaaaaacctcctcgcctagagacaccaaagaaacagtatgctctgaccgactgcgccctctcaggcattagaggaatcggccaactgctccatgtgcttcggtgggagggctcccggcaggaattggaggacttacccgccgcccagggatcatataaggtctggcgcacggaccagggtcgagcaatccaggctgtgaatcttaaagaagcgaacggtagcaaactgagacagatacaggccaggatcgctgttttgctgaggagggtcctgcccccggaataccgacattcgggtgtcagggggcgttcttttataaccaatgctcaacagcacctccaggatgatccaagtatcaagcttgatattaagtccttctaccctagcactacattccaacatgtccggcgtttttttgtagaggcaatgagatgcagtggtgacgtagccttccttttagctaagctatgctgttaccagcagcgccacctgccaacaggcggagtccacagcgaagtggtggccttttactgtcacaagagatccttcgaccagttgtgggaacgcgtgaaagccagaagcgggaagatgtcagtttatgtggacgacattatgttgactatgcctaacgcctccttaactgacctggagtgggcccggcgtctgtttgcaaagcagcgggtaaaaattcatccaggcaagtctaaggtgctgagtaagaggagcattaaagtcatcacaggagtggagattcggggagggaaaaccggggctcccaaggagcagcacagactgatcaaacaaaggttcgacgaaatccgcgcagctgcatctgcagatgagctggccggggcagtgaagtctctcctcggccacctcgatcatgtggcccagatagatccccgcttcgttaatcgggcgagaggcacgagggcgcgactgaaagctgttatcgatcacaactga

SEQ ID NO: 10420 - RNA, 972 nt, synthetic construct
  source 1..972: mol_type = other RNA
atgacaaaaacgatcaggaagagtaaacgccggagacagcctcgcttagaaaagcccaagaagcagtacgccctccatgactgtggattgtatggccttaaaggcctgggacagctggcaaaagctctgcagataactcaggatgagttggacgaactggcgaatctccgtggcggatatacagtctggaatcagaatgggagggccgttcaacaagcaaggccagcgctaagaaagatacacgccaggattgccacccttctgcgaagggtggcaagcccagactacagacactccggcgtccgtgacagaagctttatcagtaacgcagcgcagcatatcgctcctcacgccagcctcaagctcgacatctctaagttttacccttcgacctcagtccaccacgtgtggaaattcttcttcaggaaaatgcactgcgctcgagatatcgcagcaatcctggccgggctctgttgcttcgaacggcggcacctgccaaccggtggagttcattctgaggtgctggccttttactgtcacaaagacatgctggattcccttaacgagcgcgtggtgagtcgtggtggcgtaatgactgtgtatgtggacgacatagtggtcacaatgccaggggcctgcgagtcagacctacattgggctcagcggctgattgccagagccagattggctatgaatttacgcaagtcccgggtaataaacgccgataaggagaagcttattacaggagttctcattcgcaggggcaagatctctgcacccgcaggtcagcataagaaggtcaagctcttacatgaagccattggctccgcgaccgctggggatgatgtgactccgcaaatccggtcattgcagggtcacctggatcatatcgcccaaattgatcccaaatttctgagcagagctaaagggcaccgcgctaaaaaccgacttgctctgctgcctcccatttga

SEQ ID NO: 10421 - RNA, 960 nt, synthetic construct
  source 1..960: mol_type = other RNA
atggcacggttggaacagctggatcgtcctaaatacgcaatgaccacaagccccctatacggaattcgctccaggaagcggctcgtcgaagtacttgattggcagggatccgtgaaagccctggacggcttcgtggaacaaccagataactacaactgtttcctgcatgaggaggatggcaaaaagcccagaccagtccaacagcccacacccaagcttgaggccctgcatcgccgagtagcccggctactcttaagaatcttgcccccagactatttacactcaggcctccgcaagaggtcgtttgtgaccaatgccgcccagcatgtgaatgggcaccctgcggtgaagctggacgtacacaagttttatccttcaaccctccatagccatgtctgtgggttcttcaagaaccagatggcttgcgcaccagacgttgccggtcttctggcctctctctgttgcgtgactgtgaatggagtccgccacttgccgactggatccccactcagccagattttggcgttttatagtcaccggcagatgtttgacgagttaagtgcctatgttgccgcccgaggcggcgtcatcaccgtttacgtggacgacattacagcctctatggagttcgcctccgtgggagatatcagggcgatggggaggatcatcacgcgccacgggctgatgtggcacaaggaaagatttttccctaggggtcattcaaaagctataacaggggcaattgctaaagtcgaccaccttgaggccccgaagaaacagcatctgaagtacgctaccgctcgtgaccgagtggatcaccctagcctgctggtggctgatcaaaaacaggcggcacggtctgctatcggcctgctgcaatgcattgcacagatcgatgaaaggcagataagagtggcaagaggtatggctcagaaactcactgctgttgcaggcctgtga

SEQ ID NO: 10422 - RNA, 933 nt, synthetic construct
  source 1..933: mol_type = other RNA
atgaaaaagatcaagtccccatacgcaatcaaccagtctcctctgtataagatttattctctgaagaagctgtgcgaggttctcaagtttgatcgcaaggtcatcgccaaacttctcaaatcacaggataactataagaagttccatcagcatgatggtgctaaatcgagactgatcgaataccccaagccgaggttggaggccgtgcacaaaagagtcttcagcctgctgagcagaataacaactcctgaatacctacacagtggcgtgagcgggcgaagctacatcacgaatgcacaacagcattcctccgctctggccgggtttaagttggacattaaaagtttcttcctgagtaccaccaccgatcacatttacaagttgtttcggttctcctttggatgtagttttaaagttagccagacgcttgcatctcttctgtgcgtatccggccatctacccactggatcttgtgcctcccaggtcctcgcattcttcgctcataaaaaaatgttcgacaaactggccaagacagtgaatcagtttggcggtaaaatgaccttatacgtcgatgacttgtatgtgtcaatacagtacgtgaaacggtggcacatccggagactcgaccgaattattaggggaaacgggctgtttgcgcacaaaggccgtgtctatcagcgggttaaacccaagttgatcacaggcgtaatcctcattgatggtaagatgaagctgcctcacgcgaagcacagaaagataagggacactaggaatgccgcccggatttgctcatccaggtcacagaaaagcctcctcatgcgcagtcttgtggggcaacttacaaccggatcattactggacccatctttaaagagccgcgtgaagccagctcgttcttatctgcagcgcctggagaagcaacaccaagtgtga

SEQ ID NO: 10423 - RNA, 951 nt, synthetic construct
  source 1..951: mol_type = other RNA
atgaagaagagaaaaaagcttaagatcagcacgaagaacaagtcttacggcgtgatggacagtccattctataagcttaagtcgaaaaagaagctggccggcctgctctgcatttcagtcaacgatctgtccattctcaaaaacgatgagggtaattacagcgttttcgaccaattatccaaaaaagggaaatcccggaagattcagaagccgctggacaaactggatatcgtgcatactcgtatcgctagcttactgtccaggatcgcattgcccgagtatctgcacagcggaaaaaagcggtgttcaaacgttactaacgccaaggcccaccttaatcacgaaaaaatgatgaccaccgacattaaggcattctttcctagtaccacgagaataatgatcttctcctttttcttctctgtgatgaagacttccagtgacgtcgctgacatcctgtcacacatttgcacctgtcatgatcgattgccaaccggatctaggatctcaatgcccctggcttattttgccaacagtcgcatgtttggtgagatgtacgaactatgccagaagctcaaagtgaaaatgacagtgtacgtagatgacctcacattctcgggcgccaacgtgaatcgactattttgtgcggtgataaggaaagtcattagcaagcacggacacataatgcatcccaccaagactaagctctacgccaaagataaacctaaattggtcaccgggatcatagtactgggcgatgcattaaaggtccgcaatgagcagcatagactgatggctcgcgacattgaatactggaaaatcattaaagacgctgaaaatgcaaaggagacaagcatcgccaagacactctttgggcggctgcattctatgggcgttatcgagcagaggtataagagcaaggtgttgactcttaaagtgaatacagcgtcttga

SEQ ID NO: 10424 - RNA, 951 nt, synthetic construct
  source 1..951: mol_type = other RNA
atgaaaaaacggaaaaagctcaaagtaaacacgaagaacaagagttatgacatcatggacagccccttctacaagttaaaatctaaacggaagctagctaatctgctgtgcgtgtctttagaggagctatactcccttcggaaagatgaaggcaattattccgttttcgaacagctctcgaagaagggaaaagcgagaaagatccagaaacccttggaaaaactggaactggtccacacccgaattgcaagcctcttaagccgcatcgccctgcccgagtatctgcactcaggcaagaaaaaatgctccaatgtgaccaatgctaaagcccatctgaacaacgagaagatgatgaccaccgacatcaaggccttctttccttccaccactaggggcatgattttctcatttttcttcagtgtgatgaagatgagtagcgatgtcgcagatgtactctctcacatctgtacttgtcacgatcgtttgccaactgggagcagaatttcaatgccgctggcttactttgccaactcacgcatgtttggtgagatctaccaactttgccaaaagttgagggtgaacatgacagtttatgtcgacgacctcacgttttccgggggaaatgtgaacaggctgttttgtgctgtgatccgcaagattgtgaacaagcacggtcacgtgatacatccaaccaagacaaaactgtacgcccgtgataaacctaagctggttacaggagtgatcgtctttggcaatgctctcaaggtgcgaaacgagcagcatttcttgatggcgagggagatagattactggaagataattaaagacgcagaaaacgcccgggagacaattattgcaaagaagcttttcgggagactgcatagcatgggcgtcatcgaacagagatataagtctaaggttctgacacttaaagccaatactgccaattga

SEQ ID NO: 10425 - RNA, 951 nt, synthetic construct
  source 1..951: mol_type = other RNA
atgaaaaagcggaagaagctaaagatctttacgaacaacaagagttacggggtgatggactccccgttttacaagttgaagtccaagaagaagctggcctgcttactgtgtgtagacaccaatgatctctatgcactcaagaaggacgagggcaattattctgtctttgagcagttgtctaaaaagggcaaaccccggaagatccaaaaacctgttgacaaattggatgttgttcatacaaggattgcgtcacttctatctcgaatcgctcttcctgaatatctccactcgggcaagaaaaaatgtagtaacgtcacgaacgccaaagcccacctcaaccatgaaaagatgatgacatccgatatcaaagcattttttccatcaaccacccgcagtatgatcttctccttcttttttagcgtgatgaagatgagcagtgacgtggcagatatactgtctcatatctgcacctgccacgagagattaccaactggatcacggatcagcatgcctctcgcgtacttcgctaattccaggatgttctgcgaaatagacgagctgtgcaggaaactgagaatcaagatgaccgtgtacgtcgacgacctgacattcagcggggccaatgtgaatcgcttgttctgtgctgtagtgagaaaggtgattagcaaacatggtcacaatatgcacccaactaagacaaagctctatgccaaagacaaacccaaacttgtcaccggggtcattgttttcggagattgtcttaaggtgaggaacgagcagcaccggctgatggctagagatatcgagtactggaagattattaaagatgccgaaaatgcccgtgatactcccattgcaaagactctgttcggacgcctgcattcaatgggtgtgattgaacagcgatacaaaagcaaagtgctgacactgaaagtaaacactgctatatga

SEQ ID NO: 10426 - RNA, 951 nt, synthetic construct
  source 1..951: mol_type = other RNA
atgaagaaaagaatcaagctaaaggtgagtaccaaaaacaagtcataccccattacagatagccctttgtacaaactgaaatcgaagaaaaagcttgctaacctcttatgtgtgtcaattaatgatctcagtgctcttaaacgcgacgagggcaattacagcatctttgaacagctgagcaagaagaataagattcgcaagatccagaagcccctggaaaagctggatgttgtccataccagaattgcctctttactgctgagaatcgccatgcctgagtacttgcactctggaaagaagtcctgttccaacatcaccaacgcaaaagcacacctgaaccaccaaaaactgatgacgactgacatcaaatcattcttcccaagtacaactcgcgagatgatcttctctttcttcttcagcatcatgaagatgtccccagacgtggcggacattctgtcccacatctgcacatgtcatgaacgtctgcctaccggcagccggatatctatgcccctggcttattttgccaatagcaggatgtttgacgagatgaaccagctttgcgagaagttcagggtgaagatgaccgtctacgtcgatgatctgacattcagtggggacaatgtgaacaggttattttgctctgtgattcggaagataatcaataagcatggccacgtgatgcatccaactaaaactaagctttacgctggggataagccgaaactcgtcaccggggttatagtgtttggtgactcactcaaggtacgaaatgagcaacactatctaatggcacgggaaattgagttgtggaaaatcattaaagacgtcgagcaggccaaagatactaggacggccaaaaagctctttggtagactgtattccatgggagtaatagaaaaacggtatcgaagcaaagttctcacattgaaagccaacacctccgtgtga

SEQ ID NO: 10427 - RNA, 951 nt, synthetic construct
  source 1..951: mol_type = other RNA
atgcagaaaccaaagaagttgaagatttcgacgaagaataaaagctacggaatgatggacagtccattttacaaactcaagtctaaacgcaagcttgccgaacttctgtgtgtgagcctgagtgacctgtccgcactgaagaaagacgaggggaattattgcatattcgagcaactctcaaagaagggaaagctgcggaaaatccagaaacccctggacaaactggatattgtccacaccaggatagcctccctcctgagccggattgccctgcctagctacctgcacagcggaaagaagggctgctctaatgtgaccaacgctaaagcgcacttaaacaacgataagatgatgacaacagacattaagtcgtttttcccttccacaactagggtcatggttttctcattcttttacagcgttatgaagacatcttctgacgtggctgatttcctctcacatatctgtacttgccatgggcagctaccgaccggatcaagaatctccatgcccttagcttatttcgcaaatagtcgaatgttcgacgaaatatatcagctatgtcaaaaactcaccgtgaagatgaccgtttatgtggacgatctgacctttagtggtgcaaacgtcaacaggcttttctgtgctgtcattgggaaaatcatcaataagcacggtcacgccgtgcatcccactaagaccaaaatgtacggcaaagagaagcctaaattggtaactggcgtgattgtactgggcgattcccttaaggtgcgcaacgaacagcatagattaatggccagagacatcgagtgctggaagatgatcaaggatatggaaaaagcgaaagagacatcctttgccaagactctctttggccggttgcactctatgggggttatcgatcagcgttacaaaagcaaagtcctgacgttgaaggtgaacacagcaaattga

SEQ ID NO: 10428 - RNA, 951 nt, synthetic construct
  source 1..951: mol_type = other RNA
atgaaacggaggatcaagttgaagatcagcaccaagaacaagagctatgacattatcgactcgccattttacaagatgcggtccaaacgcaaactcgcatcgctgttgggagttgacgtaggagatttaagtactctcaagaaagacgaggggaactactctatattcgaacagctgtccaagaacggcaagcccagaaaaattcaaaagccgctggaaaagcttgacgtcgtccacactcggatcgcctccctcctgagcaggatcacgttacccgactatctgcactcaggaaagaaaggttgctctaacgttacaaatgccaaaattcatctgaacaatgagcgtttaatgacaaccgatatcagggcgttttttccatctacaacccgcgagatgatattcagtttcttcttctccgtaatgaaaatgagctctgacgtggctgacgtgctttcctacatctgcacctgttacggccggctgcctacagggtcaaggatttccatgcctctcgcttattttgctaattcaagaatgtttggcgaaatccatcagctttgtaataaactccatgtgaacatgtctgtgtatgttgatgatctcactttttctggccagaatgttaatcgcctgttctgcagtgtcatcaggaaaataataaacaaacacggtcatgtgatgcatgccgataaaaccaaaatttactcaagagagaagcccaagctggtcacaggagtgattgtgttgggcggttcccttaaggtgagaaataaacaacacttgctgatgagtcaggagattgaatactggaagatgattaaggatgctgcatgtgcacgagagactcacactgccaagaagctgttcgggcgcctgcacagcatgggggtcatcgaacagcgatatcgtagcaaggtgctaaccctgaaagccagcacggccctatga

SEQ ID NO: 10429 - RNA, 951 nt, synthetic construct
  source 1..951: mol_type = other RNA
atgaagaagagaaagaaactcaaaatctcgacgaagaacaaaagctattccctcaatgattcccccttcttcatgttgaagtccaagaaaaaactggccaccctgttagggatcaccatttccgacctgtctctattgaagaaagacgacgagaattacagcatcttcgaacaactcagcaagaagggtaaacctcgtaagatccagaagcctctggatgcgctcgacattgtgcatacacgaatcgcctcactcctgtcgaggatcgcacttccggaatacctgcatagtggaaaaaaaggcaggagcaatataaccaacgcccatgcacacctcaacacctctaagactatgacgtctgacataaaggcttttttcccaagcaccactcggcacatgatttttagcttctacttctcagtaatgaagatgagttcagatgtggctgacgtgctgtcccatatctgcacttgttatgggcagttgcccacaggatctcggatctccatgccactggcatttttcgcgaatagtagaatgttcgacgaactcaacgccctttgcaatacgctgaaagtcaagatgactgtctatgtggacgatcttaccttttcaggggataatgtgaaccgactattttgttctgtagtgcgccgcattatttacaagcacggtcacattatgcaccccaccaaaacaaagttatatagcgagtatatgcctaagctggtgacaggcgtcatcgtcaccgccggatgcatgaaagtccggaacgagcagcacaggttaatggctcgggacatcgagtactggatgcttattaaagatgcagatcgcgccagagaaacttccgttgttaaaacactgtttggcagactgcatagtatgggcgtgatagagccaaggtacaaatctaaggttttgacactgaagatgaacactgctatatga

SEQ ID NO: 10430 - RNA, 951 nt, synthetic construct
  source 1..951: mol_type = other RNA
atgcgtatcaagccgaaactcaaaatcattactcgcagcaaagaatataacttaacagactcccccttgtataagattaacagcaagcgcaagttagctaagatcatcaacgtggatttcaacaccctgaagtctctgaaggacgataagatgaactacagtatatttgaccaggtgtcgaagaaaggaaaggtaagaaaaatccaaaagcctgtgcagagactggatatagttcatacgaggattgccagtctactgtgcagaattgctacgccaagttacttgcactcaggcaagaaacaccattctaatatcacgaatgctgacgtccacaagaacgagttcaatctcctcacaactgacatcaaatctttctttccctccacaaaacggtcaatggttttctcctttttcctcaccgtcatgaaaacatcccctgatgtggccgacatcctgagtcatctgtgtacctgtcacaaccacattccaaccgggtcccggattagcatgcctctggccttttgggcaaacgtgaggatgtttgaggagctgaaaaggctttgcagcaatcttgacatcaccatgaccgtatacgtcgatgatatcacattcagcggggagaatgtgaatagactgttcgtgtcatgtgtaaagaagatcattgtgaagcatggccaccaaatgcatcccaccaaaactaagttttataactctacagcacccaaattggttactggcgtgattgtcgtttcaaactgcctgaaggtccggaatgagcagcaccagctctttgcaaatgagttcgaacagtggcgaataatcaaagaagaaccacacgcgataaacgccaacattaccaataagctgatcggaaggctttactctatgggtgtgattgagaaacgattcaaggaaaaagtgcgcactgtcaagaatagcactgccctatga

SEQ ID NO: 10431 - RNA, 951 nt, synthetic construct
  source 1..951: mol_type = other RNA
atgaagtctaaaccaaaactaaagatcagcacgcgtgataaaagttataatttgatcgactcccccctgtacaaattgaagaacaagaagcggctggcccagttgctgaatatcaacctgtgcgattttcggaccctcacctcagatgacgaaaattattctgtgtttgaacagctgtcaaagaagggtaaagttaggaagatccagaagcccgtgcacaagcttgacgttgtccatacaagaatcgctagcctaatttgtagaatacaaactcccctctatctgcacagtggaaagaagacatgctcgaatatcagcaacgcatctgctcatatcaacgaattaaacttgctcaccacagacattaaatcattctttccttctaccacgcggaatatggttttcagcttcttctactcagtcatgaaaacttccagcgatattgcagacattctgagtcacatttgcacatgtcacggtcatattccgacagggtccaggatttcaatgccactggccttttggagcaacataaggatgtttaccgagctcgagaacctcagtctgtccctcaacgtcacaatgaccgtgtacgtagatgacatcactttctccggcgagaaagtcaatcgcctgtttatgtcctgtatgcgaaaaatagtggctaagcacggccatcaggtgcatccaaccaaaaccaaactgtacggcgcaaaattacctaagcttgtgactggggttatcgtgcactctaatgtgcttaagattcgcaatgagcaacacctgttactcagcagggagctggaacagtggcgcatcattaaggatgagccttacgccatcaacgccaatatcacttctaagcttgtgggacgactgtattccatgggggtaatagaacagagatacaaagagaaagtcagaactataaagagtaacacggcgttctga

SEQ ID NO: 10432 - RNA, 954 nt, synthetic construct
  source 1..954: mol_type = other RNA
atgaatagaaagagcaagctacggatcaacactaagtgtaaatcctatcagctgcaggacagcagcttttataaactcacttcaaagaagcgactggcctcaatcttaaatttgtccctgcagaacatcaatagtctccgttgcgatttgggtaactacacagagttcgaggagctgggaaagagtgggaagccaagaaagattcagaagccatgtcatcggctagatgtagcccacacgaggatcgctagccttttgtgcaggatccagacccccacatacctgcactctggaaaaaagagccactccaacgtaactaacgcggcatcccacgttaattttcatcaattactggccaccgatgtgaaatctttcttcccttcgacaagcagaaagatggtgttctccttctttctgaccgtgctcaagtgttctcctgacattgcagacatcctggccgacatatgcacctgtcacaatcatattcccaccgggagccgaatttcaatgcctctggcttattgggcaaattgccgcatgtttgaggaattagagcgcgtctccgacaaacaccacgtgacgatgacagtctacgttgacgatctcaccttttctggcgaaaaagttaaccgccagttcaggtctttggtcaagaagattatctcgaagcatggccacactatgcacccaaaaaaaacaaagctttaccaggggtcacaaccgaaactcgttaccggtgtgatagtgtcagatggcgtgctcaaagtccggaacgaacagcatcttatgtatagttccgagctggctcaatgggatagtattaagaatctgcccctcgccagtgaaactaacctggtggcgaaacttataggcaggctgcattctatgggagtgattgacaccaaatacaaagccaaggtcaagagcatcaaaaatgctacatgctccgactga

SEQ ID NO: 10433 - RNA, 954 nt, synthetic construct
  source 1..954: mol_type = other RNA
atgaatctgaagtcaaaactgaagatcaacacaaaacagaagtgctatcctctgaatgactcaccactgtacaagctgaagagcaagaaaaaactcgcaagtatcctgaaagtccaactgcccgaaattctggcgctgagatgcgatgacggcaactatgccgagttcactgagctcggaaagagtggtaagccacggtccattcagaagccgtgctacaagttggatgtgattcacacgaggattgcatcactattgtgccgaatcgagaacccacccttcctgcatagcggcaagaagtttcacagcaacgtgactaatgccgccacacacgccaattcgcatcaacttctagcaaccgatgttaagtcatttttccctagtacctctcggcccatggtgttctcctttttcctcactgtgttgaaatgtagtccggatgtagctgacattttggcagatatatgtacttgtcacaagcatctccctacaggaagcaggattagcatgcccttagcttactgggccaactgtaggatgtttgaggagctccagcgcatttcccttaaacacggggtcaccatgaccgtctatgtagacgatcttaccttttccggccaggctgtgaacagaagattcaagtctctcgttaagaaagtggtgtctaagcacggacacatcatccatcctacaaaaaccaaactgtataaagggacccagcccaaattaataactggggtcgttgtggtggacggcgtgcttaaagtccgtaatgaacaacacctgaagtacagcagcgaactcgcccagtgggactcgatcaaggacttaccagccgcttctgaaacgaaactggttgcgcagctgataggccgcttgcattctatgggtgtgatcgatatgaagtacaaagccaaagtaaagtccatcaagaatgctacatgctccgactga

SEQ ID NO: 10434 - RNA, 951 nt, synthetic construct
  source 1..951: mol_type = other RNA
atgacacgtaactctaagctcaagctggaaactaagaataaatcgtatcccctgcaggactcaccattccataaactcacctccaaaaagcaattgagaaagctgctcgacattgattccgaaaaactgaagaagctccggcaggataagggtaactacagcgaattcgaggacgtgagcgtgagtggcaaggcccgcaagatccagaaacccacgagggagcttgacgtcgtccacaccaggattgcctcattactttgtcgcataagcacacccgattacctgcactctggaaaaaaacagcactccaacgtgaccaatgctcgacagcataagaatgagtatgctctcctcgcaactgatgtcaagagttttttcccttccacaacgtggaatatggttttcagcttcttctatggagttatgaagtgctctagcgacgtgtctgaaattctgtccgatctgtgcacatgccataagcacattccaaccgggagcaggatatctatgccacttgctttttgggccaacatccggatgttttcagagctggactgtttgagtaataaacatggggtaactatgactgtgtatgtggacgacctgacattttcaggaagagaagtgaacaacttattcagatccagcgtaaaaaaaatcatcaacaagcacggccatatcatgcacccgactaaaaccaagttgtacaaacctaatcagcctaaacttgtgaccggggtcgtggtcaacggcggtcacctgaaggttcgaaatgagcagcactttaagatgcaccaagagctacagatctggtgtaaaattaaagatactccttacgcactgtctagttccataacgagtcaactgctaggccggctgcatgcaatgggcacaatcgacgatcgctttaagcagaaggcgaggaccattaagttgtcaaccgccccctga

SEQ ID NO: 10435 - RNA, 951 nt, synthetic construct
  source 1..951: mol_type = other RNA
atgacccgaaagagcaagttgaaacttgaaactaagaataagtcctacccactacaagacagcccatttcacaagttgacctctaagaaagtgctgcggaagctgctcgatgtagacgcagataaactcaaaaaactgcggcaagacaaaggcaattattccgagttcgatgatatcggggagtccggtaaagctagaaaaatacagaagcctgcgcgtgatctggatattgttcatactcgcattgccagcctgctgtgtaggattagcacgcctcagtatctgcattcaggcaagaagcagcatagtaacataacaaatgcccggcaacaccagaataaataccctttgttagcaacagatgtcaaatcattctttccaagcaccacctgggacatggtattttcgttcttttacggagtcatgaaatgtagctccgacgtcagcgaaatccttgccgacctgtgcacttgccataaacatatccccacaggctccaggattagtatgccccttgccttttgggccaacatccgcatgttctctgagctagaggctctttctacaaagcacaacgtgaccatgacggtgtatgtggacgacctgaccttttccggaatgcaggtgaataagctgttcagaagttctgccaagaagatcatcaccaagcacggtcacataatgcaccccactaaaactaagctctacaagtcaaaccaggcgaaactggttacaggggtggtggtcgaaggcgagagtattaaggtcaggaacgaacagcaccgaaaaatgcatgaggagttaggcgtgtggttcgaaatcaaggatatgccgtatgctatgagttcatctattacttctaagctcttggggagactccacgctatgggaacaatcgacgacaaattcaagcagaaagcaaaaaccgttaagaagtccacaacgtcatga

SEQ ID NO: 10436 - RNA, 951 nt, synthetic construct
  source 1..951: mol_type = other RNA
atgagccggaagtctaagctcaagatcgacacaaagaacaagtcgtacagcattatcgactccccgttctacaagctcttctctaagaagaagctggcgaccctgctcaagtgtgacctgagtgagcttaaaaaattgcgggatgacgaggggaattacagtgaatttgaggacattggaaaatctggcaaacccagaaagatacaaaaacctagccgcaatctggacatcgtacatacccgaatagccagcttgctatccaggatttcgacaccaacttatctgcactcagggaagaaagagcactccaacgtgacaaatgccaaggcccacctggaaacctccgctttgatgaccacagatatccgttcctttttcccctccacttcacatcggatgatctttagtttcttctacggtgtgatgcagtgttcatctgatgtggctgaactgctcgctgatctgtgcacatgccataagcacctgccaactggctcaagaatttcaatgcctctcgcctattgggccaactgccgaatgtttgaggagcttaattccctctcctctaaacatggagtaacgatgacggtttacgtggatgatttgacgttttcaggctctaaagtgaataaacttttcactagcaccgttaacaagatcataagtaaacacggccataccatgcacccagcaaaaacaaagctgtattcctctcatgagcccaaactggtcaccggggtcgttgtcgacaagggcgtcttaagggtgcgcaacgagcagcacctgaagttattcgaagatattagcctatggagtttcatcaaagacgaaaagtatgcacttggttctagtatcactagcaaactgattggaagattacacgctatggggaccattgaacctcgctttaaaagcaaggcaaagagcgtgaggaacagcactgccatgtga

SEQ ID NO: 10437 - RNA, 945 nt, synthetic construct
  source 1..945: mol_type = other RNA
atgtctcagaagttaactctcaacaataagaacaaggcctatcaactgacagattcccctttccataaactgagtagtaaaaagaagctggcaattttgctgcgaaccccattgtcccaaataagaagcctcagagccgatagtggaaactacagcgaatttgagtccattggcaaaagcggcaaaataagaaagatccagaaacccagccgtaatttggatgtggttcacaccaggattgcttctctgttaattcgcattatcactccagagtaccttcacagtggtaagaagggctactcaaatgtgactaatgccaacattcatctgaacacaaatgctctaatgaccagcgacatcaagtctttctatccttctacatcctggaatatgatattctccttcttttacagcgtgatgtcatgctctgcggacatcgcagaaattctggctgacctgtgcacttgtcacaagcaccttcccactggatcgcggatctcaatgccacttgcctactgggcaaatgtccgaatgttcaacgagcttgagaatatctgtcagaaacacgacgtgataatgaccgtatatgtggatgatttgacgttttccggaaagaatgttaacaggctgttcaagtcaaccgtcaagaagatcatcagccgctacgggcatgaaatgcatcccacaaaaactaagctgtatcctccgaacgggaccaagctggtaacaggggtcgtgattgacaggaacaatctcctggtgcggaacgaacagcattttaagctatttgaggaactctctatgtggaactcaatcaaaaataaccagtacgccatctcgatgtccatcacctccaaactcatcggccggctccacagtatgggtacgattgagcccaaatataagaccaaagccaaaagcgttcgcaaatctacagctatatga

SEQ ID NO: 10438 - RNA, 951 nt, synthetic construct
  source 1..951: mol_type = other RNA
atgcctaaaacgaaaactaagctcaaaatcgacaccagaggcaaattttacgctctcaaggatagtccactttataaactgagaacaaaacgcagactggcggaggtgctgaaccactcgcttcagaccttacgcgccctgcgcactgatcaggggaattataaggaattcgaggacaacagtggcggtaaggcccggaagatacaacagccggcccgatccctagacatggtccacacaaggattgccagcttgctgtgccggatcgacactccagattatctgcactcaggcaaaaagggggtgagcaacgtaacaaatgcagaagcccatattgattcccataatgtgctgaccaccgatattcggtcattctttcccagtacaacacggagaatggtgttctctttcttttacggggtgatgaagtgcgcacccgacgtagctgacctgttggcagatctctgtaccatacactcccatatccccacgggatcccgcttatctatgcccctcgctttttgggcaaatcatactatgttcaatgagcttaacgagttgtccatcaaacataacgttaagatgactgtatacgtcgacgacctgacatttagcggaaaggaggtcaacaggctgttcagcagttgcgcgcgacggattatcagcaagtacgaccactgtatgcacccaaataagactaaactctactcggccacctcacctaagttaatcaccggagttgttgtgcagggcagcctgcttaaggtgcgtaaccagcagcaccaatatctgctctcagaaatgacacagtggctatctatcaaagatagccctagagccctccacttgaacattacgaataggatgctgggtcgtctgtactctatgtccgtcatagataaacgctatagggctaaggctcgaatggtgaggaattctaccgccctttga

SEQ ID NO: 10439 - RNA, 954 nt, synthetic construct
  source 1..954: mol_type = other RNA
atgaagcagaggaagagtaagctaaagatacagacaaaaggaaagagctacagcctgcacgattcccctctttacaaacttaagactaaacgcaagctcgccagcattctccaacacagtctgccagacttgaaactgttatgctcggatgaagggaattatgctgtcttcgaagagacaaagaaaggtagcaagccgcgcgaaattcagaagcctaatcccaaactcgaggtagtccacaccaggatagcttcactgctgtgcagaatcgatacccctaattacctgcattcgggtaagaaaggccactctaatgtctcaaacgcctacgcgcatgtgaactccgacaacctcctgacgaccgatgtcaagagttttttccccgcaacctcaagacgacaggttttttcctacttttactccattatgcagtgtagcccagacgtggccgatatgttggcagacctgtgtacatacaatgcccatatcccaacaggatctagaatctccatgccccttgcctattgggccaacgtgtctatgttcaacgagctccaggccctgagcttgaagcactccgttaagatgactatttatgtcgacgatctcaccttcagtgggaaaaaagttaacaagttgtttaggctttgcgtgaagcgaattctagaaaattatgaccacgcaatgcaccccgcaaaaactatcctgtatcgcgctgcccaaccgaagctcgtgactggcgtaatcgtgaccgaggggcaaatgaaagtgcggaacgagcagcatcagcagctggccagcgagctggatatctggaaagctataaaagaccacccttacgcggcaggaatgaagccaacctctaaattattaggccggctgtattcaatggctgttatcgactctcggtataagtctaaagctgtgacggtgcgtaagtccactcatacatga

SEQ ID NO: 10440 - RNA, 951 nt, synthetic construct
  source 1..951: mol_type = other RNA
atgaccaaaaagtcaaagcttaagatcgagctaaaaggtaagtcatacgacatccgggacagcccattttttcgtctgcgaagcaagaaaaagctctcctcattgttcaatttaactctgcctcaactgcaagaactcaagagtgatatagggaactacgctgagttcgaggatgtcggcaagactggcaaagcgcggaaaattcagaaaccaaatctggaactcgacaaggttcacactaagatcgcatcttacctctctaggataaaaacccctgattttttgcatagtggcaaaaagtatcacagcaacataaccaatgctaaagcccacctggactcaacaaatctcatggtgacagacattaaatcctttttcccctccacaaagaagaacatgatcttctcctttttctacagtgtcatggaatgtagctctgatgtcgctgatctgctggcacagttgtgcagtattcatggattcctgcctacaggtagccgcatcagcatgccgctggcctattgggctaattgccgcatgtttaatgaactggataccctttccagatctcatggcataacaatgacggtatacgtggacgacttaactttcagtggggagaatatcaacaggttgttcaaggccgttgttaacaaggtaatttcgaaacatggacacactatgcacccatcgaaaaccaaaatctatagcgccaaacagcccaagctggtgaccggggtgattgtgaaggataatgagctgaaggtgagaaacgaacagcaccaaaagttgtacgccgacctcgagttttggaaactgatcaaagactcacccctgaccaaaaacgccaaaatctcttcccagctcctaggcaggctttattccatgggatttattgagcagaagttcaagcagaaggcattaacgattaagtctgcgcttaacagctga

SEQ ID NO: 10441 - RNA, 954 nt, synthetic construct
  source 1..954: mol_type = other RNA
atgacaaagaaatccaaactaaaaatcgtgacaagaaagaagtcgtatgagctctctgattcccccttttacaaattgaagtcaaagaagaagctcgcccatctactgaaagttaatgtgactaagctccagcagatgactaaagacagcaacaattacaacgagtttgagcacaacaaggacgacggaggaaaggtgcgcaagattcagcatcctatcggtgagctggatgtggtccacacccgaatcgcgagccttctttgtcggattaagactccagacttcctccactctggtaagaagcaccacagtaatgtgaccaacgcaaaagcccactgtaataagcaccctctgatgactaccgatgtctgcagtttcttcccctcaacttcccgggagatggtgttctcttttttctataccgtgatgaactgtgcccccgacgtcgctgacgttctgtcacgtatttgcacaatacatggccatctgccgaccgggtcacgcatcagcatgccacttgcatactgggctaactgcaggatgttcaaggaactggaagaattgacaaagaagcatcaggttaaaatgaccctgtatgtggatgaccttaccttttctggaaaaagtgttaacacactcttcaaatccatcacatgtcaaattatcgaaaggcacggccacaaaatgcatcctcgaaaaaccaaattatacgaagcgaaaagccccaaactggtcacaggcgtagtgattaaagacaaccaaattgaggtaaggaatgagcagcggaagaagctggtgtctgatatcgcttgctggaaaagtattaaggattttccaaatgccatctccatgcaggtcacgaatacgctgctggggcgcttacatgccttggggagcatagatagcaagtttaaggacagagctagaacgataaaggcagccactcagaaatga

SEQ ID NO: 10442 - RNA, 906 nt, synthetic construct
  source 1..906: mol_type = other RNA
atgctctacagaattctgctgtcaatcaacctgtcccagaagaaaaagcttgcatctctgttgaaagtagatatgcagaccctgtttagaatgatgaatgatacggagaactacaacgagtttgaaaagaaagggaagaaagggaaagtgaggaagatccaacatcctgtaggagaattggatgtcgttcatacacgtattgcttctctgatatgtcggattgctactccgaattttttgcatagtggtaagaagcaacattcgaacgtctcaaacgcccacgtccactgtaataacttccccctgatgaccaccgacgtgtgttcattctttccatcaaccaaaaaatccatggttttctccttcttctacactgtgatggaatgttcgtctgacgtggctgatatactgagttgcatctgcacaattcatagccacttacccaccggcagccgcatttctatgcctctggcatattgggccaattgccgcatgttctccgaactagagcaacttgccataaagcacgacgttacaatgaccctgtatgtggacgacctcacttttagcggggcacaggtgaatagtctgtttaagagcatcattaggcaggtgatcgagcgacacggccaccagatgcacagcacaaaaacgaagctttactccggaaacaagcccaagctcgtgacaggtattgtgatcaagggcgagatggttagcgtgcggaacgagcagaggatgaaactcgtcagtgacatcacttgctggaaatctatcaaggatatgccaaatgccataaatatgccagtcacccacactcttttaggacggctctatgctctaagctccatcgaccctatgttcaaggatagagccaaaaccatcaaggcgaatacacagaaatga

SEQ ID NO: 10443 - RNA, 951 nt, synthetic construct
  source 1..951: mol_type = other RNA
atgagaaagaagtcaaagctcaaactacaaaccaaggggaagtcttatcctctgtgcgattctccattttacaagctccggacaaagaagaagttggcggaattgattggattccccctcattgagctgcagaagcttcggtcccacattggacactacattgagttcgaagaggagggtaaaaagggcaagaagaggaaaatccagcagcccataaacgagatggacagggtacacactcggatagcatccctcatctgcaggattgacgtgcctaactatctgcacagcggtcgtaaaggcttttctaatgtgagcaacgctaaagcccatctggatagcagcaaactgatggctacagacgtcaaatcatttttcccctccaccactagaagaatgatattctccttcttctacagcgtcatgcaatgctctcctgacgtttcagatatcctggctgatatctgtaccatccacggacatttgcccactgggagtcgaatctctatgccaatcgcattttgggccagctgtcgactgttcgaggaattagacagtctatcaaagcaccacgacgtgaagatgacactgtacgtggacgacctcacattttcgggggcaaatgtgaaccgcctgttcaaaacgaccgttcgtaaaatcattgaacgccatgggcataccatgcatccgaccaagactaaactttatgatgagcaccagccaaagttgattaccggtgtcgtggtggataatggagttctccgggtaaggaatcagcaacgcaaacagctgatcacagactttgcctgttgggatcttgtgaaggacgtcgagaatgcttccctgttaccttgcactaacagtctgataggccgccttcagagtatgggcatgatcgatggcgcctttaaagaaagggccaaaacggtcagaggccagacacataaatga

SEQ ID NO: 10444 - RNA, 972 nt, synthetic construct
  source 1..972: mol_type = other RNA
atgaagaagtcaaaactcaagataaagactaagggtaaggaatatggcattaaggattccccactttataatctccgcaccaaacggcacctagcgaatctgctgaactgcagcaacagtgacctcaaaaaatacgctaaggatgatggcaactatcatgaatttgaggagaagggggccaaccagaaagcgaggaagattcagcagcctatgcgaggacttgacaaggtgcatactcgaattgccagcttattgtgccgcatcaccacacccgactacctgcactcaggaaagaagaaacacagtaatgtctcgaacgcactcgctcataccgctaaagaaaattctagaacaccgctaatgaccactgacgtgaagtcattcttcccctccacatctcgtaagatgatcttctctttcttctacagcgtcatgaaatgttccgccgacgtatctgatatcttagccgacatctgtacggtgcaccattttctgcccacaggcagtagaatctccatgcctctggccttttgggcaaattgtaggatgtttagcgagctggagcaattgagtaagaaacacgataacctgatgactgtgtatgtcgacgacctgaccttctccggtgttaatgtgaaccccttgtttaaaaccacggtcaagaaaatcctgaaccgctacgggcacattatgcatccagataagactaaagtttacgactgcgatgacgcaaagctggtcaccggggtgattattaaaggcggcaccattatggtgaggaacgaacagagaaaacagctcgtgaacgatcttagctgctggtcagtgataaagaaccagcctgacgctatcaataatacattcacccagcggcttatcggacggctgcactctatgggggtagttgatgagacgtttaaaaagagggccatgacaataagaaatcaaactaatcgcacaccaatcagctga

SEQ ID NO: 10445 - RNA, 960 nt, synthetic construct
  source 1..960: mol_type = other RNA
atgaaaaagagcaagcttaagattaagaccaacggaaaagagtactccctcaaagatagccctttctataacatcaagacaaagaaaaggctgagtatacttatagggtgcacattgtctgagctcaaggcattttccaaagatcaaggcaattaccacgagtttctggaaaaatcaaccggagggaagtcccgaaaaatccagcagcccgtgcggggtctagaccgaatccatacgcggatcgcaagcctcctgtgtagaatcgaaacccccgactatctgcactcagggaagaagaaccactcaaacgtgtccaatgcgaagactcacgccgagaaacacttcgataatgtgcctaccatgacgactgatattaagagcttctttccaagtactacacgtaagatgatcttttctttcttctattcggtgatgaagtgttctgctgacgtggcggacgtgctggccgatatctgcactattcataagtttctgccaacaggctccagaatttcaatgcccttagccttttgggccaatagtagaatgttcgaggagttagaagccttgagcatcaagcatgacattgtcatgaccgtgtatgttgatgacctaacatttagcggctgcaacgtcaataagctgttcaagactacggtcaaacgcgtaatagagcgccaccatcataccatgcatcctgataagacaaagatctaccgcaaagccgaaccaaagttggtcaccggagttgtcgtgcacaacggtgaaattagggttcggaatgagcagcacaaacagctggtaaccgaccttgcttgttggaactctataaaagcaattccggaagcaattcggatgccctacactaacaggctgatcggcagactccactctatgggcgttattgagagtgtgttcaaagacaaagctacagccatcaggaatcaaaccgctaaatga

SEQ ID NO: 10446 - RNA, 960 nt, synthetic construct
  source 1..960: mol_type = other RNA
atgaggaagcctaagtttaagattaaaacgaagggcaagagctactccatcaaggactcccccctgtataatctgcgtactaaaaagcacctcgctaatctgctaaattgcaacacacaggatttcagcaccctgagcaaggacgacggaaactacaatgtatttgaaactaccggcaagaatggcaagaagaggaaaatccataaaccacagcctcaactggataaaatccacacccgaatcgcttctctgctatgccgcatcgacgcaccagactatctgcacagtggcagaaaaaataggtctaacattaccaacgcacaggcccatattaccaaccattcttcagagactgccatcctcgcgacagatataagagattttttcacatcaacccatcgaaagaacgtgtttaatttcttctacaccatcatgaagtgcagcaccgacgtcgccgatatattggcaaaattgagtactatccacgagcacgtccccaccggttcgcgcattagcatgcccattgctttctgggccaattatcacatgtttgaggaactccacgcgcttagttcaaaatacaacgtctgtatgacagtgtacgttgacgacttgactttttctgggaacaacgtcaaccctctttttcggactgtcgtggagaaaattgtatcacgctacgggcacaagatccatccaactaagacaaaactctatgctaaagccgcccccaaactggtgacaggtgtgatcgttaagaatcagtccttacaggttaggaatgagcagttcaagcagctcgtgaccgatttcacatgttggaaagccataagaaacacgcctcaagcaatattcgatccacacacgtatcggctgcttggacggttacattccatggggtccattgaaccggtgttccgtgaaaaagctcggaccgtgaagggagccacaaacagatga

SEQ ID NO: 10447 - RNA, 954 nt, synthetic construct
  source 1..954: mol_type = other RNA
atgcagaagctcaaaatcaagacaaaagggaagagctacgctctgaaagattctcccttctacaatcttaggaccaagaagcgactgtccatcctgcttggatgcgatactaaagacttaccgctgctcgctaaagatgatgggaactacaatgtattctccatcattggcaaagcaggtaagcctagacagatccacaaaccaatcaacaagctggacaagattcatacaagaattgccagtctgatttgtaggataaatctccctagttacgtgcattctggacgaaagaagcattcaaacctgacaaacgccaaagcccacctatcagccgacggcttcgatactaaagtgctcaccacagacataaaggactttttcacttccacccggaaaaaacaggtgtttggattcttctactctgacctcaagtgcaccgcagatgtcgcaaacttgttagccgatatgtgcaccatccacggccacgtgccaaccggaagcaggttgagcatggtcttggcttactgggcaaactatcatctatttgaagagctgtcctcccttagcaagcaacactcggttactatgacggtctatgtcgacgatcttaccttttcagggactggcgtaaatgaattgtttaagactgtggtgcgcaaagtgctgagtcggtatggccacaccatgcaccccaccaagacaaagttatatgggaaggagagtcctaagctggttaccgggatcgtggtcaaagagggccagctccagatcagaaatcaacaatttaaggaactggtgacggactttgcctgttggcacgctattcgtcagactccccatgcgatattcgacccacatacatatcggctcctgggtcgcctgaatagcatgtctagcattgaccccgttttcaaagagaaagcgcagacggttaagggtaacacatgtcgctga

SEQ ID NO: 10448 - RNA, 957 nt, synthetic construct
  source 1..957: mol_type = other RNA
atgaaccgtaagcggagcaagaagcttaagatccagactaatggcaagtcatacacgatcaaggacagtcctctgtataggctgagatccaagaaaaaactggcgaacattctcaaaagcgatctgaacaatctcaaaaaactgcgactggacgctgataattaccacgagtttgaggataagggaaaaggtgggaagccccgaaaaatccagtgtccctgtaatggactggagaagatacactctcgcatcgcatctcttctgtgcagaattaagacaccggactacctccaaagtggaaagaagggccatagcaacgttagtaatgctaacgtccacctggggagtagctgcttattagccactgacatcaagagtttctttcctagcaccaaacgctatatgttgttctcctttttcttccactccatggaatgtagcgccgacgtggcggacatactttcagacctttgcacaattaacgggcatatccctacaggttctcaaatatcaatgccactggcattttgggcaaacagccacatgtttgacgagctgtatctactatctgtcaagcatgccgtaaaaatgaccgtgtacgtggacgatttgacgttctccggcgacgccgtcaataagttgttcatgtccgtgacccagaggatcatcacaaagcacaaccaggttatgcatcccgataaaaccaagctctacaggggatatgagtcaaaattaattactggcgtggtggttaagggcgacaatttgctggtgcggaacgaacagcacaaaatgctctttagcgatgtagaatgctggaaagctatcaaagatattccatcagccattaactccaatattgccaaaaaggtgatagggagaatgcattctatgtcggtcattgattctaagttcaaggataaagtccgcaccctccggatctccactgctacctga

SEQ ID NO: 10449 - RNA, 906 nt, synthetic construct
  source 1..906: mol_type = other RNA
atggattctcctctctacaaagtgaaaacaaaacggaaactggcttccctgctgaactctactatccccgatttaaatcgacttaagattgacgacggcaactacaatgagtttgacgacttgaagaagcccgagaagccgaggaaaatccagcagccagttaaaagcctggatgtagtccattcaaggttagccagcttgctgtgcagaatcagtgttccagaatatcttcacagcggaaggaaaggcaggagtcacgtcaccaacgcaaacgcccacgtagggaatcactcgatacttaccacagacatcaaggcattctttcagtccacaaagcgcgacatgatcttcacctttttctacaaaaagatgcaatgttcagccgacgttgctgacctactgagtgatctctgcacgtgtcatggacacatacccactggtagcagaatttccatgcctctggcctattgggcaaattctgatatgttcgatgaactgtatgccctcgctctgaagcatgataataacatgtcagtgtacgtcgatgacctgacgttttccggtgggaatatcaatgagttgttctgctccattgtgaaaaagattattatccgctacgggcagactcctcatcccaataaaacacgaatttacggcaagaacagtgtgaagatcgtgaccggcgtcgcagtccacggagacgaactgctagtgactaattaccagcactaccaacattatcagctctatagcgatgtggaggtgtggaaggctatcaaggacacagaaaacgcgatggagctcaacacctctaagcggctcataggccgccttaacagcttggctgtgattaaccgtaagtatagagataaagcccggactataaaggccgcgacctcaaaatga

SEQ ID NO: 10450 - RNA, 948 nt, synthetic construct
  source 1..948: mol_type = other RNA
atgaaaccaaagatcaacacccttgggaagtcccaccccatcgagaactccgctttttacaaactaacctcaaaaaacgtgctttataagttactgggagtgccaaaggaggaagttattcgcttgctgggcgatccggatcggtacaatgaattccaagacctgacaaacattgacaaacctagggctatacagaagccgaaaaaagcattggacgtagttcagagccgcatcgcatctctcatatgcaggatcgaggtacctgaatatctggagagcggacggaaaggccattcacacgtgaccaatgccatcgcccacgtctcccccaataacacatccgtagcgtttctgacaacagacattcgctctttctttccaagtacgacggtggtgatggtctacgatttctttcgatctacactgcggtgttcacatgccgtgagtgagatattgagcaatctctgcacatgcagaggatttgtgcccactgggagtcgaatttcgatgcctatcgccttctgggcaaattaccctatgttcttagaactagagaagctgtgtatcaagcacaatatccggatgtccgtgtacgttgacgacctgacttttagcggcaataacataaacactctcttcctggcttgtgtccgtaagattatcattagacacggtcatgaaccccatcccgataaaaccaaactttatgccaggaatgatgttaagattgtcactggtgtggcagtggtcgacaacagcatcactgccaccaataagcagcacctgaaattgtaccaggagatcgaagcgtggaaggccattaaggatatcccagacgctcttgagactaacaccgtgaagagactcattgggagactcaactcactcaccctgatcgactataggttcaaggataaagcccgtagcattaagtctgctaccagttga

SEQ ID NO: 10451 - RNA, 930 nt, synthetic construct
  source 1..930: mol_type = other RNA
atgaaagtcaaaaagcaaaagattaagaccaagggtaagtcataccccctgcaaggatgcattttctacaaactcagttcgaaaaagcgtctggagaagatattatttacaagcatcaaggagctgcagttcctgtccaatgacatcaattacgtgctcttctatgagaaatcagacattaacaagaagaggttgattgagaaacctaacgaaaagctcgacataattcatactcgcatcgcttctttgatctctcggatcacacagcctcagtatatgcactcaggccttattgataagagctatatctcaaacgcgaaacagcacttagggaaaaagccaactctgacgacagacataaaaagctttttcccgtctacgactcgccagaaggtttttaacttcttctacaagaagctgtgctgctccagcgacatagcagaccttctgagtctgctatgtacaattaacaaccacattcccaccggatctaggatcagtatgcccttggcatattgggctaatgccaacatgtttaataatctttacgccatctcctgtgccaacaatatcatcatgaccgtgtatgtggacgatattacattctccggggaaaaagtgaataaacagtttctctccagagttaaaaagatcattacctctgagagtcatataatgcaccctactaaaaccatcctttacagcggtaccgaaatcaagaagatcaccggcgtgataattagcaacgataagctgaaagtaccaaatagcctccataataaaatctacctggacattgaggaatggaaatccctggataataatgaaaacactgcagtgaagaaccggctattgggccgagtctacgccgctgccaacattgataacaggtttaaagataaggctagaaccatcaaaaagtatgtctga

SEQ ID NO: 10452 - RNA, 927 nt, synthetic construct
  source 1..927: mol_type = other RNA
atgaaagctaaaaagcggaagataaagacaaaaggaaagagttactccctccaggagtgcgtgttttataaactcacctcaaaaaagaagctggaaaaaatcttgttctcctccattcaggaactcaaactactgagtgatgataggaattacatcctgttttacgagaagtcagacattaataagaagagactgatcgagaaacccaatgagaaactggatatcattcacacacgcattgcaagcctcatatcgcgaattattcagccacagtatatgcattctgggctgaaggacaaatcttatatctctaacgccagagctcaccttgggaagaagccagtcctaacgaccgacattaagagcttctttcccagcaccacccgccttaaggtgttcaacttcttctataagaaactgaggtgcagttctgacattgcagacttgcttagtcacctctgtactgttaacaatcacatccctaccggctcaaggatatctatgccgcttgcctactgggccaacgcggatatgtttaacaatctgtatgcaatctcccgggctaatggcaacaaaatgactgtttatgtcgacgacgtcacatttagcggagagaaggtgaactcaaagttcttaagcagtgctaaacgcatcatagcgtccgaatcccatattatgcatcctactaagactatcctgtacggtagcatccaaattaaaaagataaccggggtgatcattagctcagacgagttaaaggtacccaactctctgcacaataaaatctacatagatatggaagcctggaaacgttccaataacaaaaactacacaggtatcatcgatcgattgctgggcagggtgcatgcagccgccaatattgataacagatttaaggacaaggcccggacgatcaagaataaatga

SEQ ID NO: 10453 - RNA, 936 nt, synthetic construct
  source 1..936: mol_type = other RNA
atgcgccggaaaaaaccgaagatcaacaccaaaaacaaatcttattccctgcaggattgcgccctctataagtgtattacgaagaagcgattagtcaagattctgaaaagtgacctcgggaaactgaagaatcttagcagggacattgacaactacactacattttacgagaagactgacatccagaaaaagcgcttgatcgagcgacccaatgaagagttggatgtgattcacaccaggatcgccagcctgctgtgcagagttacccaacccgattttatgcattctggactcaagctgcactcgcacgtttccaatgcaaaaaaacatattggtgttcaccctctgctgaccactgacttgaagtcatttttcagcagcacctcgaaagcgatagtgttcgacttcttctttaagaagctgctctgtagccccgatgtctccgaactattgtctaatttgtgtacctacaacaatcatatcccaaccggttccagaatcagcatgccacttgcatactgggctaattcaaagatgtttctggaactgaatgccctgagtaaagctctagggatttgcatgacggtgtatgtggatgacatcaccttcagcggacgctcagtgaacaaacttttcaagagtaaagtgaacaagatcatcgagtcacactctcatataatgcaccctgtgaagactatactttataaaccttaccagaacaagctcgtaactggcgtgattgtatctggcgataacttacgggtccgtaataagcagctgaaggacatccatgtgcaaatgaaagagtgggagaactccaacctgatcataagtagaaacattgtcaaggaaaggctcttaggccggcttaattctgcctccacaattgatatcagatttaaagacaaggctaggacactcaaaaagacaacatga

SEQ ID NO: 10454 - RNA, 933 nt, synthetic construct
  source 1..933: mol_type = other RNA
atggcgaaaaaaaagggtagaattaacaccaaggggaaatcatactctatcaacgacagcgccctgttcaatatccagtccaaaaacaagctggccgaggttctcttgaccaatctggataatatcaagtccctgctgtcaaacgataactacatagtcttcgataatacgaacgaagacggtaagaagcgtactattcagactccgtcagacaaactaaatgtggtgcacaccaggatcgctagcctgctttgtcggatcactcaaccagagtacgtccactctgggattaaaaacaagagtaacgtttcaaacgccaggaaacacgttggcacacaccccgtattgacaagcgacataagaagttttttccctagtacctctaagcaccaggtatttaacttcttcaatcgcaagctgaaatgcgcagccgatgtgtctgatctcatggctgaactttgtacttacgctaatcatattccaaccggctcccgaatcagtatgcccttggccttttgggcgaattatgatatgttcaacgagatgaacacgatttcgaacaaactcaatataaccatgacagtctatgtggacgatatcacttttagcggaaatgcagtgaataggctgtttttacacaaatgcaagcgcatcgtcgagaagaatggacatgtgctgcatcccaaaaagacagccttatattctgcaaaggagcctaagaccatcaccggcgtgatcgtccatgaaaacgagattaaagtgcggaacctccactacaagaaaatttatttcgaccttgacgcctggaaaaaaacagatgacgctatcgaaaaggagaatctcaagaacaaggtgctagggcgaatgcattccctgtccacaataaatgaaaagtttaaggacaaggcaagaagcttccggagcattgactga

SEQ ID NO: 10455 - RNA, 951 nt, synthetic construct
  source 1..951: mol_type = other RNA
atgtcccagaaaaagcggaggctcaagatcgatgttaggaataagaagtacccgatcgtagactcatgtctgtttagattacagtccaagcggaaactcagtgaattccttaataccgaattgtttgcgcttaagaaccttacagacgatcgaaattacaattgctatatcgacacctccggacacaaaccccgggagattgagcacccttgttttgagctggacaaaattcagacacgcattgcatctctgatttgcaggatcgctcaacccgattatatccattctggcgtgaaaggtcgaagtcacattacaaacgcgaagcaacacgtcggcagacataacgtcctaacttcggacattcagagcttctttcctagtaccacgcagaggatggtgttcaatttcttttacaaacgcttgcagtgctctagcgacgtagccgacttgctcgcaaacctgtgtacatgcaaaggccatattcccactggaagccgtatatcaatgccactggccttctgggccaacgaaccaatgtttaacctgttacacaaagtgtctctgtcacaggggataactttcactgtgttcgtggacgatatcgtcttttctggatccagcattgatgagcggtttgtctacaacatcaagaagttgatctcaaaccacgggcacacggcccatcctcgtaagaccaaactctacaaagctggcaacacaaaactggtgaccggggttgctgtggataccaatggtctgcacgttgccaaccgccatagaaagaatatctatcaggacatgagccagtggaaggtgagcaagcaagctggactgcaattcgatgatctgaataagagaatcataggcaggatgaacgcccagtccctagtcgactatcgcttcaaggataaggcaagaactctccggctttccataaagaaaaaaaattga

SEQ ID NO: 10456 - RNA, 948 nt, synthetic construct
  source 1..948: mol_type = other RNA
atgaagattaaacactccaagcttaagatcataaggaaaggcaagagctatgcgctgaaggatagctcactttataagattacctccaagaagaaactgctgtctattctctcgcaggccagcgtgactatatctgatttgactaaggcaattggggattacagcatctttatcgacaacaaaaacccgttgaaacctagaacaattgagaaacccaacaaaaacctggacatctatcagagccgaatcgcctcactgctgtgtcggattgaaagtcctgatttcattcatagcggtaccaagcggagatcacacgtcaccaatgccaaaatccacttagctaacgagaatacatttaccacggatatcaagagtttttttcccagtacacctattgagaaagtgttctctttcttctacggggttatgaaatgcgagcccgacgtcgctgacctgttggccaagctatgcacctgtaatggacatatcccaactgggtcccgcatatctatgccaatgagcttctgggcaaatgagaaaatgttccgcgaactccaaaacctctcaatccaacataatgttacaatgaccctctacgtagatgacatcacgtttacaggcagtaatgtgaataagatcttcgtaaacactgttaagaagataatcactagacacggacacattatgcatcccaaaaagtccatactgtatccaaagggctccgtcaaagtgatcaccggtgtggtgattcggaacggaacagccctggcaaaaaacgaacagcacaagaacttataccaggacattgaacttctcaagggctttagcgggaagctttcccctccagaaaagctaatagacaggaccctgggcaggatcaattccttgtctgtgattgagtctcgttacaaagacaaggctcgatcactctggagtctgatcaaatga

SEQ ID NO: 10457 - RNA, 951 nt, synthetic construct
  source 1..951: mol_type = other RNA
atgaacaatcccctcaaaataaacaccaaatccaagtcttactcacttcaggattcagctctctacaaaatcaagagcaaaagacgcctgctgtctctgctgaacttatcacatcaggaattgaagagcctcctgagcgatggcaactacaacatctatcaagacaatacccaagagaagccccggctcatcgaacacccacaaagacagctggagcggatccacacaaggatagcctcgcttctgtgcaggattaagcagcccgaatatattcattctgggatcaaaggaaagtcccacctaaccaacgctcgcactcatatcggacctgcaccgactctcacgacagacattaagtctttctaccaggccacacacatacacagtgtgttcgactttttcaaaaattccctggattgtagccctgacgtcgctaagttgctgagtgagttgtgcacttgtaatggccatatcccaacaggatctcgtataagcatgcctcttgcatactgggccaatgcccatatgtttaacgaactgtataggtattccagtgaacgggatattatcatgaccgtatttgttgacgatattacattcagcgggaataaggtgactcgaaccttcaaacagaacgttaagaagatcatagagaagcataaccacgtcatgcacccaactaaaaccgtgttacacaaagaaaatagccttaaagtgatcacgggcgcggtggtgggtagtaagaaactgcagatccgaaatctgcaccatgagtccatctatagtgagctctcacagtggatgttaattagagacgagaactctaaaaactcctccatttttaccgagcagattaaaaatcgcctattgggtaagatcaactcacaagggcagattgataatcggtttaaggacaaggcaagatccattaagaattacaggaaggtctga

SEQ ID NO: 10458 - RNA, 939 nt, synthetic construct
  source 1..939: mol_type = other RNA
atgaaaaggaaaaagaacaacaagatcaacacaaatggcaagtcttatcctctccacgatagccctttttacaagctgcgctccaaaaaagttctcttttccctactgaaaaccgataaagagaagatagctcacctgaagagtgaccaagggtacaatactttcacccagaagtctaataagaaaacacgcgaaatcgagcatcccgtggacgcattagatatcgcacatacgaaaatcgcttcactgctgtgccgcgttactacacccacttacgttcatagcggggtgaagggccggacccacgtaaccaatgcaaaagaacacctcggaaaaaagagagtcctgaccactgacattaaatcattctacccctcgacgactaggcagcatgtgtttaagctgttcttcaacacattcaaatgttccccagatgtcgctgacatcctcgccgatatttgcacatttcaaggacatgtaccgaccggcagcaggctaagcatgccaattgccctgtgggccaatatcaacatgtttgacgaattgaacgtcgtctctcgaaagcacgatatcaccatgacggtgtacgttgatgacataaccttctctggtaatcttctgaacggcaggtttaagtcccttgtgaagaagattataagtcgttatgaccacgtgatgcaccccaagaaaacagtgctctataaggacgatgagattaaagtgatcactggtgtggtgttggaccaggacggaattaagataaagaacagtcagcacaagttgatttatcaggatatcgagcagtggaaattgttcaaaggcctggctgcgttaccacctgagagtctgaacagcagacttatggggcggctccatgccctgtccgtcatcaatcctagacttaaagacaaggcccggtcaattaagaattgtatgtga

SEQ ID NO: 10459 - RNA, 942 nt, synthetic construct
  source 1..942: mol_type = other RNA
atgccgagaaaaaagtacaagataaacaccaacgacaaggcctatagctttgagtccagctctttctataagttgtccagtcccaatattttagccaatctgctgcacatcccactggccgacttaaaaaagctcaagaactcgaaagattcatataagcctttcgtcatcaaaaaagagggcaaaaaggaccggaccattgagtgcccaaaacgactcctagaaaaagtgcatacaaggatcgctagcttgttgtgtaggatcatcacaccagattttctgcactctgggataaagggtcggacttacattactaacgccaagtctcatttgggtaagcacaaggtgctcactagtgacctacgcagcttttatccctcaaccagcaagaagatgatcttcaagctgttccgatacaactttcactgctcagtggaggtcgcggaccttatcgcgagcgtggctacctacgaagagcatctgcctacaggatctagactgtccatgcccctggcactgtgggccaatattgagatgttcctggagatagaatcgctggccaaaaaacactccattaacatgacgatttacgttgatgatcttgttttctcagggaaaaatctgaacgagctctttagctccacagtcaataagatcgtgctgaaacacgggcatgaaatccattccggcaaaactgttctctacaaaagtgacgaaatcaagcttattaccggcgtaatcgtgcataacgacgagatcttcatacgcaactgtcaccaccagaatatgcacaacgacctcgaagagtggaaaacctataagaatggatttatggtacctgacgatcttaagtctaggcttctgggacggattaatgctttcgctcaaattgatcccagattaaaggataaggcacgtagtatcctcgcaattgaacattga

SEQ ID NO: 10460 - RNA, 993 nt, synthetic construct
  source 1..993: mol_type = other RNA
atgtcccaacagcggagaaagtacaagatcaatactaacgggaaatcttatcagatccacgattccccgttttataagcttagttcgaaaaagaagctgttgtcagttctttgcattactaaagagcagctccaatccgtgctgtctaatgagttgaactataacgtctttagtcaagttggaaagacgggtaagcctcgaaaaattgagcatccaattaactcagtagataagatccatacaaggatcgcgagcctgctttgccgcatctcccagccagagtttatgcactctggcgtcaaagggtttagtcacgtgacgaatgctaaagcccatctcggctcccacaagacactcactaccgatattaaatcatttttccccagcaccaagaaaagcatggtatttcacttcttttacaagcggatgaaatgtagccccgatgtggcagacatcatggctcgtatcaccaccttcgaatcgcacatacccactggcagcagaattagtatgcctctagccttttgggctaatatggatatgttcttcgaactagagaagctcgctaaacttcacaatgccattatgacagtctacgtggacgatttgaccttctctggtaaagcggtgaacaatctcttcaaatcaatagtcaagaagatcatctccaaacatggacatattatgcaccccaaaaagacaatcctgtatcagcatgacgacgtgaaggtgattaccggcgtggtgctgaagaacgacagcattgccatcaaaaaccagcagcatgccaatatacacgcagacatgatattctggaagatcgttcgcgacgatttattcgtccctcagggattaaagaatagactgctggggcggctgaacagtctgtccgtaattgcaccaagcctgaaagacaaggcccgaagcatcaataactacaagaggaagtctaaaaagtcaagggtggaaaacaagaaacagatggtttcttga

SEQ ID NO: 10461 - RNA, 957 nt, synthetic construct
  source 1..957: mol_type = other RNA
atgactagaaaaaagctccggctcaaaataaatacagctggaaagagctaccgactgcacgactcaccattctacaagctgattaaacagagcagactgctgtccattctttgcataacctcggaagaactatcgtaccttaggtactctcctgaacgctataacgtattcatccaaaagggaaacaacgagaaagagcgcgtgatcgaacatccccgtgaaaagttggagaaagtgcatactaggatcgccagtctcatgtgtcgtatcgagccgccaccgttcctccactctggcatgaagggactcagtcacatcaccaatgcccagtctcatagtaccaatagtaaggtacttactaccgatatcaagtccttttttcccagcactacacgcgagatgatttttcggttcttctataaaacgctgaaatgttcttccaatgtggcagacatcctggctgatatttgctctgtcaacggtcacctgccaaccgggagccgaattagcatgcctttggccttttgggtgaatgctgaaatgttctttgagttggagaaactgtccaacatgcatgatgtgtgcatgacagtgtatgttgatgacgtaacattttccggggtgaccataaacaagttattcaccaagacagtgaagtctattatctcccggcacggtcatctgatgcacccacggaaaacagtcctgtataagggggatgacacgaaagttatcactggcgtcgtgctatcaggctcaaagatcgcaattaagaaccaacagcacaaaaagatacacgaggacatcttgctgtggaaggtcgtcagagacaagtacgtgcctgcgagcttaaaaaatcgccttctcggcaggttaaactcactgagcgtggttgagcccaggctgaaagataaagccagatccattaagaattacaagcccaatcctcaggtttga

SEQ ID NO: 10462 - RNA, 963 nt, synthetic construct
  source 1..963: mol_type = other RNA
atgaaaaagcagaaacgccctaaattcaagatcaagaccctcaacaaggcctacgagatttcagactctccactgtacaagttaaccaccaagaggaaactggctgcactgctgctgctggagccagtgacgctcaacgccctgattaagaataccgacaactataacgtgttcgaacaggtaaattcgaacgggaaaaaacggatcattgaacatccgaatttggagctggataaagtccatactagaatcgccagcctgctgtgtcgcatcaagatccctgactttgtccacagtggtcgagccaaacacagtcacatcactaatgctcggatccacatcggccaccacaaagttctaacgacagacatcagaagcttttttcctagtacttccagaactcacctcttcaactttttcaaccggaagatgaaatgctccagcgatgtctctgatattctttccaagatctgcacatataacgagcatctgcccacagggtctaggatttcaatgcccctggccctatgggcaaatatcggaatgtttttggagcttgagaagatagcagtgaagcatgatattaaaatgtccgtgtacgtagacgacataaccttcagcggtgataagctcaataagttgttcatatccacaatcaagaggatcgtggaacgccacggacatattattcatcctgtgaagaccgtcttatacgcgaaggatgacgccaaagtgataaccggcgtgattttgaaggacgggaagcaattcgttaaaaacgagcagcatcgtaatgtttaccaagacattgaacagtggaaaatactcaaagatactccatatatgcccgagacacttaaaaatcggctcctgggcagattaaactcactttctgctattgaacccaagtttaaagataaggctcgaagcatcaggaatcacaagaccccgacaccatattga

SEQ ID NO: 10463 - RNA, 984 nt, synthetic construct
  source 1..984: mol_type = other RNA
atggccgagaaaaaactgcccaataataagcaacggcgccttaggctacagacccgcggcaagcagtattccgtgtgcgacagcccattttacaaactctgcagcaaaaccaaactcgccgagatgctgggatgcaccctacccgaactgaaaaacttatcttctgacgaagactacatcgtgtttaacgaagaaaagtctggaaaaaggcgagaggtacagcagcctaagcccaagctggataagatccacacaagaataggtagcttactcgctagaattaagactccagactacctgcattcaggagttaagggaaggactcatattacaaacgcaaaatgccacaattctaatagccgtatcttggtgactgatgtcaagtccttttaccaatccacaaccttcaaaatgatctatggcttcttcaaccatcgaatgcgctgtagtcccgacgtttcttggcttctcacgaaggtcagcacatataacaactctattcctaccggcagtcggctgagcatgcctttggcgttttggagttcaatagggatgtttgaaaagcttaaccagcttagtatttccgaatcagtagttatgactttgtacgtcgatgatttaacattctcgggggagaaaatcaataagctgttttgtcacaaggtgaagaaaatcgtgtcctcctatggtcatctctgtcacccaaaaaagacgaagatctataaccagaatcaggccaaggtcgtcaccggcgtggctttgctggaaaatgggccggcaatttccaacaagcagcacaagagcatttacgaggatatgctgcagtgggagataatcaagaatgaggctctcttcgagtcactgaataacagactgctcggcaaactgaatagccaagggcagattgacttccggtacaaggataaagccaggtcactgatgaacgagatcagacgtcggaaaccttatagtcaagtggtgtga

SEQ ID NO: 10464 - RNA, 960 nt, synthetic construct
  source 1..960: mol_type = other RNA
atgcgcaactcaaggtccaagcttaagataaacagcaattccaagaaacactctatcaatcagagccccttttttaaactgaagaccaagaagaagcttatcgaactactggggttggcttcttcagaactctccatcgcaaaaaaggatatcggcaactatgtggttttcgaacagatgggcaataacggcaagtcacgcacgatccagcatcctaaagacaaacaaaatgaaatccacaaccggatcgcaaacctcttaaccagaatcgagcttcccgcctatctccatagtggaaggaaaaaacacagccatataacaaatgctactcagcacctgggtagcaaaaaagtgctcactactgacatcaagagttttttccaaagcacaacaaagaaaatggtgttcaacttcttcaaccgaaagctcctgtgtagtcccgacgtcagccatattctgtcatgcatttgcacattcaatggacacattccaaccggatctcaattgtccatgccactcgccttttgggccaatatagacatgtttgagcgtttagagaatttatcttcgagtcttaacgtggatatgaccgtttacgtcgatgatttgaccttttccggggagcaggtgaacagacggtttctgagcctgattaagaagattatcataagtagcggccaggtacctcacccactcaaaacaaagttgttcaagaaaaacgatctgaagattatcaccggggtcgccctaaaggaggacaagactctgatcacgaataaacagcatatgctgatttaccagtccttcgaatcctggaaaggctgtagagacgagccggtaatagctaattatgtgatgcctaaactgcttggaaggctgaatgcgttgtcaggtattgaccccaagctgaaggataaggcaaaatctctgattaactacaaacctacttctctactgtga

SEQ ID NO: 10465 - RNA, 963 nt, synthetic construct
  source 1..963: mol_type = other RNA
atgcggaaccgatccaaactgaagataaatagcaactctaagaagtacagcttaaatcagagtccattctataagctgaagaccaaacgtaagctcatcgagctgttgtctctgtccatgcccgaattatcaatcgccaagaaagatatcgacaattaccaagtcttcgaccagatgggaaacaatggtaagccaaggaccattcaacacccgaaaaataagcaaaacgagatccacaacagaatagctaacctgctgacccggattgagctacccgactatctccattctggcaggaagaaacatagccatatcacaaatgccactcaacatctggggtcaaaaaaagttctcacaacggacattaagaaattttttcagagcacaacccgcgaaatggtgttcagattctttaataagactctgcactgctcctctgatgtctccgacatcctttcctacatctgtaccttcaatagtcatatcccaaccgggtcacagttgtctatgcccctggccttttggagcaacatagatatgttcgaacagttagacaacctctccgcatcacttgacgtgaaaatgactgtttacgtggatgatctgacgttcagtggagagcaggtgaataagcactttcagagcattgtaaagaagatcattatctcgaatggtcagacacctcaccctctgaaaacaaaactgttcaacaagaacgacctcaaaataattacgggagtcgtgattaaagacgataagactctgattaccaataagcagcacaagcttatctatcagagttttgaaagctggaaaggctgccgcgacgagccccttctcgagtcatatatcaagattaagcctaaactgctcgggaggttgaacgcactatctggcatcgatcctaagttgaaagataaagcgaagagtcttatgaactacaaatccgccgctgaaatttga

SEQ ID NO: 10466 - RNA, 969 nt, synthetic construct
  source 1..969: mol_type = other RNA
atgcgcaacaagtctaagcataaactgaaaacctatgagatctgcgattcacccttatacaagctgagatctaagaagaaactcttgtctttactgtacatgtccaaagaggaaatcgggatcgccgtgcaagacacggacaattatgttgtcttcgaaactattaggaagaaaggcaagtctagaacaatccagcaccccaaagatcgacacaaggagattcactgccggttggccaatttactgatcaaaataaaagtcccgaactatcttcactccggacgcaaggagcactcctacgtgacaaatgccaatcaacaccttggggagaaaagggtcctcacaacagatatatcagcattcttccagtccacggcaagggataatgtgttctgctttttcctcaacataatgaaatgtagttcggatgtggccgacacgctgagccatatctgtacatacaacggccatattcctacaggtagtaagctgtctatgccactggcgttttggagcaatttgagaatgttcgaccagcttgaaaaactcagcatcaaacacaacgtgtgtatgagtgtttacgtggatgacattaccttttcaggcaactccattaatcggctgtttctaagcaccgttcgtaagatcattactagcaacggacatactcctcatccagaaaaaacaaagatcttcggaaaaaaggacatcaaggtaatcactggtgttgtcattaacggcgacgacaccctgatcactaacaagcagaacaagcttatattccagagttttgtggagtggaaggctagccgagatgaacctctcaccgagaggctcattacccagaagctgttggggcggctaaatgctctgtcaatgattgatcccaagctgaaggacaaagctaaaagcgtgacctcctacaagaagatcgtcattaaatatgtgactacccagcgcgtattttga

SEQ ID NO: 10467 - RNA, 975 nt, synthetic construct
  source 1..975: mol_type = other RNA
atgcccaagaagtcaaaattaaagatcgaccatagccggaggaaacacaagctgtttgaaagttccctgtacaagttgaaaacgaaaagaaaactggccgagcttctgcaagtgacaataccagagctgaagctcgctagtgccgatgtggggaattatgtggtatttgaacaggagggcaagagtggcaaggctcgtactatacagcaccctaaagatagccagaagaaaatacattgcaggatcgcaaatctgctatgccgaatcgagtttccagagtatctgcactccggtagaaaggaacactcgcatattactaacgccaaggcccataccgggaataagaaggtcttgactacagacattaaaagctttttcccttctacaacgcggaagatggtgttcaacttcttctacaatacaatgaagtgttcctcggacgttgcagacttattggcatctatttgtacctataatggacatatccctaccggcagtcagctgagcatgcccctcgccttctgggctaacatccgcatgtttgaacaactgaataacctcgctaacaagcacgacgtgaaaatgaccgtctatgttgatgacctgaccttcagcggagattctatcaataggcagtttctttccgtcatcaagaagatcatcgtctctaatgggcacatctcacacccagataaaaccaagctcttcgagaagtctgacgtcaaggtgattactggcgttgccatcaaatgcaacgatgtaggcattaccaacaaacagcacaaactgatatacgagtccctcgagcagtggaaaggatgtcgcgacgaaccgcttattagctccttcgtgattccaaaactattgggtagacttcacgcgcatagcaatattgaacctaaactgaagcacaaagtgaactcaattctcaactacaagcccgtgaagaacccccattcaaaatctacagattga

SEQ ID NO: 10468 - RNA, 933 nt, synthetic construct
  source 1..933: mol_type = other RNA
atgaaaaagacgaaaaagctcaagcttataagcaatcaaaagtgctaccatttggatcagagccctttctataagctgcagtccaaaaagaagctgttagcgctactctgtatcaacgaagccgaattgaaagattgtattacaagtccactgaactacaatgtgttcttaaacggcaccagagtaatagagacacccatcggcgtcctgaagaaagtgcattggcgtatcgcctccctcctgataagggtcaatgtgccagagtaccttcagtccggcaagaagaagcattctaacatctcaaatgctaaggtgcacattggtgacaccaatctgctgagcaccgacattaaatccttctatccctctactcttcgctacaaagtgttcaacttcttcctgaacatcatgaagtgctcagtctatgtggccgatatccttagtaagctcagcacctacaatgatcacatccccaccggttctcagctttcgatgccattggttttttggagcaactttcgaatgttttctcagttgaatggactcgctgagaagcataatgcaaaaatgactgtgtatgtggacgacattacattttcaggaaatagcgttaacaacctgtttctcagtgttgtcaagaagatcataattagcaacaatcacacaccgcaccctaataagactaaactgtacgcatccaaggagaacaaaattgtcaccggggtagtgattaaaggcagtaaaatactgatcatgaacaagcaccacaaagccatctatcaagatctgacagtgatcaacgcctgtaaactgtcaggaggggcaccttcttgctacgaaattacgaaaaagcggttattggggagggttaatgctctgaagctcattgacactagactacagcataaaatcgagtatttttccaacctgtga

SEQ ID NO: 10469 - RNA, 957 nt, synthetic construct
  source 1..957: mol_type = other RNA
atgaccagaaaactgaagctggacatcgatcacagacggcgtaagtataccctgattgagtctcctctatataagttgaagacaaaacgcaagctcgccgagttactgctggtgcagactaatgaactaaaaaatctcacccaggaccagggcaattacagggtctttcagcagatagggaagtccggaaaaccccgcgccattcaacaccctaaggattccctcaagatcgtccattgtcggatagcttcactgctgggaagggtggagctgccagactacctccattccggtcgcaaggagcatagccacatcagcaacgctaaaaaacatcttgggcaacacaacgtcctcaccacagacattaaaagcttctttccatccaccactaggaagatggttttcgacttctacttcaacttgttaaagtgttcagcagacgtcgcggaccttttggcgtccatctctacgtataactgccacattcctacagggagtcagatttcaatgcccctggcattttggtctaacatccgaatgtttgaacagttgtatagcctcgccaaaaaacacgatagtgagatgacagtttacgtggacgatcttacgttttctggacatgcagtgaacaaacgatttgcctcggtagtaaaaaagattatacacactaacggccacattgcacatccggacaaaactagactctacgccaaggacgaggtgaaggtgatcactggcgtggctattaagggtaatgagacacggattaccaatgatcagcatatgaaaatctacgaaacactggagttctggaagggctgcagggatgaacccatcatcgctgaactgatcaagccaaaacttctgggccgtttaaatgcccacctgcaaatagataccagaatccgggataaggttaagagtatcaccagctataagcccaaattctcaatatga

SEQ ID NO: 10470 - RNA, 954 nt, synthetic construct
  source 1..954: mol_type = other RNA
atgaacgttaagaagaaccaaaaatctaagctgaagatccagttgaagaataagtcctaccaggtgaaggattcccccttctacaaactggcaaccaaacgcaagctggcgaatctattaaacatcagcgtcagcgaactgcttactttgacaaaagatgccgtaaactataaggtgttctcccagtctaagggttatgggaaacagagagtaattcaaaagcctataggccgactggagtacgtccacacacgtatcgctagcctcctgtgtcgcgtgtctgtcccgagttttgtgcactctggacgaaaaggacatagtcacgtcaccaacgccaagcagcacctggggaacaatcgggtgctcacaactgacattaaaaatttcttcccttcgactactgaggaaatggtgttcaaacttttctttcacacctttaagatgaacggagacgttgccaagctcttggccaatctgtgctgcttctcaggccatgtccccacagggtccagggtgtcaatgccaatatctttttggagcaatagcaagatgtttgatgagctctcctctctatcaaccaaacatgacgtcgtgatgtcattatacgtagacgacttgacctttagcggagatggcatcaataggctgtttctttccaccgtgaggaaaattgtgcagaaacatggccacatcatgcaccccgataagacaaaagttcatacgaaaaacagtcggaaggttatcactggtgtggttgtccagggcgacaccctgaatattacgaataagcagaacctgatgatttatcgcgaactggctcaatggaaggtgattaaaaacctccctttcataccaaagagtctggagtcccggttactcgggagactttacgcaatgggtcagatcgacaagaagtataaagataaagctatgagtgtgagaaacagctcatga

SEQ ID NO: 10471 - RNA, 939 nt, synthetic construct
  source 1..939: mol_type = other RNA
atgcgcaaaaaccactccaaactgaaaattaccacaaagcagaaggcctattctatcagcgactctcccttctacaagctcagtaataagaagaagctggccgagcttctcttcgtgaaggcctcggagtttaaaaatctgacatctgacgaaaactacaaagttttcaagcagctgaacagcaaaggcaagtcccggcagattgaacagccgctattgaatctggatcgcgtgcatacgagaatagcttctctcctgtgcagaatcgacctccccaactatttacattcaggccgtaaaggacggtcacatgtatcaaacgcaagagcacacgtcggtaataagaaggttttgactacagatatcaccaatttcttcccatctacgaccgagaaacagatcttcagccttttctacaacatctttaaaatgacaccagatgtcgctagggtgtttgccaagatttgctgttacaaacagcatgtacctaccgggagccggctgtccatggtcctcgctttctgggccaattataagatgttcgaggaactaaacagtttttctctgtttaggaatgtgaggatgaccgtctacgttgatgatctgactttttcgggcgaaaacattaaccgagaattctcatcccttatacggaaaatcattaagaagcacggacacttggctcataaggggaaaactcaccagaaacaaagtcacgaggtgaaggtgatcactggagtggtggtgaaggggaatgacattaaacctaagctgagtcagtttaaggagctccacaacgacatccaagcgtggaaattagtccgcgacaccggtctgcccctttccagcctgagggatcgaattagcggcagattgtatagcatgggccaaataaacaagcgctttaaagacaaagcaaagtccgttcgtaattactga

SEQ ID NO: 10472 - RNA, 939 nt, synthetic construct
  source 1..939: mol_type = other RNA
atgaaacagaagagactgaagcctcggatcattaccaagaacaaaagctacccaattgaggattcagtgttctacaaacttagcagcaagaagcgtcttgcaaatttgctgtttagcacatctcaggagttgaaaagtctgggagagtcagataactacaggtgctttacccagaccaaaaacggtaaaccacgcttaatccaggagccgctgcctcgactcgacaagatccactcccgtgtagcaagcctcctgtgtaggatcgatacagtggacggcctccactccggaaaaaaaggtcgcagtaacatatctaacgctcacgctcacttggggcaggggaagaaggtcattacagcagatataaagagtttctttccagctaccactagacagaatgtgttcgactttttctacaccaccatgcaatgcgcggcagacgtggccgatctactctcgaagatccttacatacaatgatcacatccccaccgggagtcggatatctatgcctctggcttacttcgctaacaaacggatgtttgacgagatagaaagcgcagcctcagaattctccgcgaagatgacgatttatgttgacgacctgactttctcaggcgctatgcttcaaaagagctttattggcagactcgaggccactgccaagaagtatgggcataaaatccatccctccaagacgcgattctatgaggcctctgaagtgaaattaatcacaggagccgccatcaagggtgacgagattacacctagaaacaagcatctgaaacagctgaggggcgaattgtccgtttggctggacaatcccggcaatgacgaaaaactaactaataggatcctgggacgcatgacctttattggctccattgatccccgctataaggataaagccaaaacttttcggaagtctgtcttcaagtga

SEQ ID NO: 10473 - RNA, 939 nt, synthetic construct
  source 1..939: mol_type = other RNA
atgaagcagaagagacgaaagccgaagataattaccaagcagaagtcctatcctctccaggactcagtgttctataaactgtcgaacaagaagcgactggcaaatctgctgtcaagtactccccaggaattgaagatgttagccgggaatgataactatcggtgttttactcaaaccaaaaacgggaagaaaaggctcatacaagagcccttgccacgcctggatattattcatacacgtgtcgcctccctcctgtgccgcatcgagacaatagatgggcttcatagcggaaagaaagggaaaagcaacatctccaatgcacgggctcacgtgggtcttggcaagaaagtcatcactgctgatatcaaatccttttttcccactactacccgcctcaatgtgtttgacttcttctataataccatgagatgcagtccagacatcgccgacctcctgtccaagatgctgacgtacgacgagcacgtacctacaggctctaggatcagcatgcccctagcgtacttcgctaacaaaaaaatgtttgacgaaatcgagagtgcagcgaacgattgcggcgccaccatgacaatcttcgttgatgatcttaccttttctggaaccacccttaagcggtcattcattggcagactcgagacgattgccaaaaagtacggacacaagattcatccaagcaagtctcggttctacggtgccaatgaagttaagctgatcacaggagctgccgtgaaaggtaatgatatatctcctaggaacaaacacttgaaattactacgcagcgaactgtcagagtggttgaaatgtgcacagaaagacgaaaagctgaccaaccgtgtgctgggcagaatgacttttattggcagcatcgacgcaaggtacaaggacaaggctagggccttcagaaagacagctttcaaatga

SEQ ID NO: 10474 - RNA, 939 nt, synthetic construct
  source 1..939: mol_type = other RNA
atgaagaggcgcttgcccaagaatagaatcatcaccaaaaagaagagctatccgctccaggattcaccattctacaagctgtcaagtaaaacaagactggccagtttgctcggctcaacacctaaggagttgaaaagtctggttggcaatgataactaccactgtttcactcaaaccaaaaagggtaaaccacggctaatacaggagcccttacctcacctggataagattcacagtcgggtagccagcctgctgtgccgcatagagacggtcgacggcctccattctggaaaaaaggggagatccaatatttccaatgcgcgcgcacatcttggtcccggccgtaaagtgataactgccgacatcaaatctttttttccaagcacaacccgcctcatggtcttcgacttcttctataataccatgcagtgctcctctgatgtggctgatctgttatcccggattctgacctacgatgaacatatcccaacagggagcaggatttctatgcccctggcttacatcgccaataaacgaatgtttgatgaaatcgaggacgctgctatgagggtgggagccaaaatgaccatttacgttgacgacctgactttttccggagtgatgctgcacaaggactttgtgaagacgctggaaatgattgcaaagaagcatggccacaggatccacccctcgaagactcggttctattcagaaaacgccatcaagcttattacaggggcagcaatcggtgaggatcgtatcttccctcggaaccgccatttgaaagctctcaaagaggaccttcagatctggataaacagcccgcaaaaggacaggaagcttattaacaaaattctaggacgactcaccttcattgggagcatcgaccctagatataaggataaggccagaacttttcgaaacgtcgcgatcaaatga

SEQ ID NO: 10475 - RNA, 927 nt, synthetic construct
  source 1..927: mol_type = other RNA
atgaatacgcagaagcaaaaaatcatcaccaagaacaagtattacccagcgaaagattccttgttctataaactgtctagtaaaggccgtctagcaaaactggtttctagcaccgtccaagagctgaagtcgttaaccaaaaacgatcagtaccactgttttacacagagtaagagaggcaagactaggcctattcaggaaccacttcccaagctcgataagattcactcccgcatcgcgtccctgctctgtcgcattgagacggccgacggccttcatagcggaaggaaagggcgcagtaacatatctaacgccagcgctcatattggagtgggcaagaaggtaataacactggacatcaaaaacttctttcctagcactaaacggtcatctgtgttcgactttttctacaatactatgtgctgtagccctgacatcgctgatttactgagccatatttgcacctacgacgatcacatacccaccggttcgcggctgtcaatgccgctggcatacttcgcaaataagagaatgtttgacgaaatggaacagacagctaatgagtgcaacgccaaaatgaccatatacgtggatgacctgacattctccggagaggagctctctaagaacttcattaccagaattgagcttatcgctaaaaaatatggtcacaagatcaattcctccaaaactcgattctatgcagaagatgccgtcaagctcgtcacaggggttgccgtgatcgataatcagctgaagcccagaaacaagcacctcgaagccttgtttaagaagacaaatgactggcaagtgaataagagcatgcagtcacggaactgcatcttgggctatatgacctatctagggagtattgactcacgatacaaagacagggctcggacttttaggcagaaagccatcttttga

SEQ ID NO: 10476 - RNA, 924 nt, synthetic construct
  source 1..924: mol_type = other RNA
atgaaacagaagaaaaacaagatcattaccaagaacaagtgctaccccattaaggatagcgtgttttataaactgtcttctaaaggccggttggcaaatcttctttccagtacagtccaggaattgaagtctctgacgaagaatgaccagtatcactgcttcacccagttaaagagaggcaaaactcgcctcatccaggagcctctacccaagctggacaagatccacagcagaatcgcgtcactgctctgccgcattgagacagtcgatggtctgcactctgggtgtaagggaaggtccaatatcagtaacgcaaaagctcatgtgggcgtcggaaaaaaggtgatcacactcgacatcaaatcattcttcccatccaccaaacggtcctcagtgttctatttctttaacaacactatgtcctgcagccctgatattgcggatttactgtcgcaactgtgtacttatgaggggtacattccaactggttcccgactttctatgcaactggcctactttagtaacaaacgaatgtttgacgaaatggagcaggctgccagcgagtgtggcgcaattatgactatatatgtggatgacctcacattcagcggagccgaactgtcacgtaatttcatcaagcggttggaatttatagccaagaagtacgggcacaagatacagagctctaagacgaggttttacagcgaaaacgaggttaagctgatcaccggagttgctgtgatcggtgaacaactcaaaccgaggaataagcatctggccgctttgacccaggagattgagtactggagagtaaataaatcccagcagagtgccaataggatactagggtatatgacctaccttggctcaattgacagtcgctacaaagataaagccaaaacattccggcatcaaatggcatga

SEQ ID NO: 10477 - RNA, 933 nt, synthetic construct
  source 1..933: mol_type = other RNA
atgactcaaaatagaagaaaaccccgtatccagacaaagaacaaaagttatcctctgcaggattcacccctctttaaacttacaaccaaacgaaagctggctaagatcatattcagcgagctggccgagctcaagcagctgtgcaacgataacaattattcctgcttcaccgaaattacgaagggcaagacacgatttattcaggctcctctgcggcgccttgatatggtgcatactcgtattgccagtttgctttgtaggatcgacgttccaaatgaactgcacagcgggacaaaaggccggtccattttttcgaacgctaaagcacatttaggcgtgggacgcagaaccgtaactgtggacatcaaatcctttttcaaaagcacctctcgatctcaagtcttcgacttcttcagtgataccatgaagtgtgcgccagatgtcgccgacttactaagcagactcctcacatttaacgatcacatcccgactgggtcaagggtttctatgcctatggcgtacttcgcaaaccagaagatgttttgcgacatgcaagctgtggccgatgcgcggggagctacaatgactatatacgtggacgacctcacgttctccggtaccaaattgaatcaccagtttgtggacaagatctcaaatatcaccgaaaagtacaagcatacactgcacccagataaaacccgcttctacggccctaaggcagccaagtgcattacgggcactgttattgtggggaatgagttgaggccccggaattgtcagtataaagccgtccacgaggacatgcagaattggctgagcatcaacaaacccgacgacgctctagccgcaaggctgctgggaaggatatctttcattggtaacttcgatgccaggtttaaggataaggcagtacgctttcggagagccctgtga

SEQ ID NO: 10478 - RNA, 963 nt, synthetic construct
  source 1..963: mol_type = other RNA
atgatcaagaagaagaaatcaaagctgaaaatccggaccaatggcaaaatatacaggcttcaagacagccctttctacaagttgaccagcaaaaagcgattcgcatctttgctaaatctggagtacgaccagctaaagcagttactctctaattcagattctaagtttgagaagttcactcaggtcaaagagggtaaaaagcccagagctatccagaagcccatcaccagcttcgctccactgcactgtcgcattgcaagtcttctctgcagaattggtactccagagtacctgcacagtggaaaaaaagggcgctctaatctgagtaatgcccaatcccactcagggaagcacaagctgctcgctgtggacattgaatcattctttgaaagtaccagccatgagaaggtgtattcgtttttccggggccatcttaaatgctcttccgacatagctgacgcgttgtgtaaactgtgcctttgtgactcccacattcctacaggcagccaactgtctatgccgctggcctactgggccaactcaaacatgttcaacgaactggatatgttggccacaaagcatagggtgaagatgtccgtatatgtggacgatgttgtctttagtggagagcagctgaataagctctttttgtcgacggttaaaaaaatttgcgcccgctatggaatgacagtgcatcctgataagatcaggctttacaacaaggagcagcccaaagtggttactggggtggcgattataggaggcgagttaaaagtagatcacaagcagcataagctgctcgaaaacgacctgaaactgtggaacgcctgtaaagaagatcccatcgcatccgacctctccctcccacgaaaaatctccggccgtttatccgccatggggagcgtcgagaaggaatatctggatcgggcaagaagctttaggaaaaagaacagcatcagatga

SEQ ID NO: 10479 - RNA, 951 nt, synthetic construct
  source 1..951: mol_type = other RNA
atgaatcagattaatctgaagccaaagctgatcaccaagaacaaatcatacaagatccagaactccgccctttatatgattaagaccaagaatcacctggcgcgagtgctattggtcgatattgaggagataaagaacatcgagaacatttgcacgcaatacaatgtgttccagattgagggtaaatcctcaaagctcagggaaatacagactcccatcaattttcttgagattgtacacaatcgcatcgctagtctgttatgtcggattgaaacaccaaactttctccatagcggaaagaagtctcactctaatataaccaacgccaaagcccacttggggtataatctgcaagtgctgaccatcgatatagaaaatttctatcctagcaccactgcccagaaaatctacaaatttttcttacacggcatgaaatgctcggagacaatctccaagatcctcactaaaatttgcacatacaatgaacatctgcctacaggctctagaatcagtatgccgctcgcatattttgctaacatgttgatgttccaagaaattgagaagctgagcatcaaacacgaaatcaagctcaccgtgtacgtagacgacataactttttcaggatttaaggtcagcaccctgttctacaagctgattcgcaacattatcttcagacatcagcacctggtgaacataaagaaaaccaggttttatctgaagaaccagcccaaactggttacaggcgtcatccttaaagagaattccatcttcattcgtaacaagcatcataaagagctctacgaactaaaggagttgtacgaaattacgaaaactaataaccccgagcagcttttctccatccggaataaattagtgggtaaactctatagctgtggggttatcaacagtaaatataagtctgaggcaaagatctacctgaacacaccttga

SEQ ID NO: 10480 - RNA, 951 nt, synthetic construct
  source 1..951: mol_type = other RNA
atgatccaaaagaatagcaagcccaaactggtgaccaagaacaagtcttattccattcaggacagtgcactgtacatgatcaagactaagaaacacctagctagagtgctcctcattgacgtcgagaaactcaagaacatcaaggatatatgcactcaatacaacgtgttttctaccaacgggaagagtaacaaattgagagaaattcagaccccgatcaacgttctggagacaatacataatcgaatagcctcactcctgtgccgcatcaagacccctgactttcttcattccggtaaaaaaaaccacagcaacatttctaatgccaaggtccacctgggagagaatctgaagatccttactattgacatcgagaaattctttcccagcacggcaagcaaaaagatctatgagttcttcctttacggtatgaagtgcaataagacagtgtccaagattttaacccagctgtgtacttataacgaatgtctgcctaccggatcacggattagtatgcccttagcctattttagcaacatgttgatgtttcaggaaatggctctcctggcttccaagcatcagataaacatgactgtgtatgttgatgacattacattttcaggctccaatatttcaaccctgttctacaaactggtcaagaaaatcacaatccgtcaccagcacagtatcaatgatgataagactaggttctatacagagtaccaaccaaagttaataaccggagcgatcctcaaaggcaattccttgctaattaggaacaagcatcacaaagaactctatgagttcaaagaactttacagcttcacaaaggataataatccaacgcagttgtctgaagtgcggaataaactgatcgggaaactgtactcgtgtggcgtaatcaatgtgaagtacaaatctgaggccaaagtataccagaactacctgtga

SEQ ID NO: 10481 - RNA, 951 nt, synthetic construct
  source 1..951: mol_type = other RNA
atgaactcgaaacttaaaattgtgactctcaagaagagttacaatattcaggacagcgccctttttaaggtgaggtccctgaagcaccttgctaaagttctcctcatcgatatcgagaaactgaacgacctgtccttcactaaggatcagtacaggatcttcacaatcactggaaagtctggtaaggaacgcgagatccaaaatcccacaggattgctcgcccagattcacagtagaattgctagcctcctatgccgtatcaaaactcccgattatcttcattccggtaagaaaggccgcagcaacgttacaaatgcaaagtatcacaccgggcataacctggaaattttgaccgtcgacctcgtagacttctaccctagcaccaccagtaacaagatattaaacttctttctctgcacgatgaagtgttcttataaggtggcctgtatattgactacactttgctcttacaatgagaaattaccaaccggatcacagatctcaatgccactggcgtattttgcaaactgcatgatgtttaaggagattgaagccctgtccaataaacacaacatcaaaatgtccatctacgtggatgacatcacgttttctggcgagaagatcacccggctgttctacagcctgataaaaaaaattgtcgtaagacacggccattctttgaagcatacaaaaacccggtactataagaagagctcagcgaagctgatcactggcgtggtcgtgaaggatgcaaatctgctgattaggaataagcaccaccaggagatctatcaaacaaaagagttgttaaccatcgctatacactcagacagcaaagaacagattggcagtctacgactgaagctgattgggaagctgcatgcctgtgggtccattgatcctaaagctaaatctgaagcctattactaccagagacaatccataaattga

SEQ ID NO: 10482 - RNA, 948 nt, synthetic construct
  source 1..948: mol_type = other RNA
atgaaactgcccgctaaacattcccccaagcttcacatcaaatccaacaagaaaagctacctgccgagcgatagcgctctgtataacctgaccactaagaaacgcctcgaagcaatcattgggaaaaccatcgcagagatcgaggccgccgggattgacgagaactatagagttttcggactgaaaaaaggtggtaagactagggaaatacaggcccctaagtactcccttgatgtcatccatacccgaatcgcgagtctgttagtgcgtgtggccgtcccagattacctccattcgggaatcaaagggcgaagcaatatcacaaacgctaaggcacacattggtaatcatcctctgctcacaatggacattcagaagttctacccttccattagcaagaagtccatcttcaatttcttccatattaggatgaacgcctctcgcgacgtggccggaatcttggcagaggtctgttcatacaaagattgcctgcccaccggtagtcggataagtatgcccctaagtttttgggtgaactatgagatgtattctaaattggagtcattgtgcctgaataagggcatcattatgacagtattcgttgacgattttacattctctggcgatcaggtggacgaaaagtttaagaagcacgcaaagaagataatcaaggagtcaggcctggaggtgcacccacggaagactcggttatttgggaaaggattcccaagagtcgtgaccggagccctagttgacggcagcgggataaaggtaagaaataagcaccacaaatcaatctacacgctctttggcgaaattgaaaagtgttctgatgacaagaaacttgaaaagatgcagatgcaactcctgggcaaactttctgctgctggccagattgacaaatcctttaaaaataaggcggctcaatttaggaaagccatttgctga

SEQ ID NO: 10483 - RNA, 990 nt, synthetic construct
  source 1..990: mol_type = other RNA
atgaagaagaagaaaaagctgatcacacacaataaggagtacactctggacaagtctcctcttttcaatattgaatacatcaagcgcctcgtcagtgttctgaatgcagatgaggagatcatcaccagcctcatcaaatacaaggctgaaaactacaactgcttctcacagggaaagaagaagcgggagatccagacaccaatcaatgagctgtacctcattcataacagaattgcctccctgttggctcggattaagctgcccaaatacttgtactctggcgtgaaaaaccgatcctatattgacaacgccaaagaacacctgaatagcaaggcgatcctgacaactgacgtgacggctttttttccatccactaccagaaccatgatattctggttcttcaaagacaaaatgcagtgtagcagccgcatggccaatatcttggccgacttatgcagtataaacgatcatttaccaactggctcccaaatctcaatgcctctggcatattgggtgaactcctctatgttcaaggagctgcataggctagcagaagatcacaagctcaaaatgacagtttacgtggatgatctgactttttcaggggaaaaagtccctaaaggttttaagtatcaggtagagcagatcattaagaaacacaagcaccaaattaagagtgaaaaaaccaccctctacaataaccaatcggttaaggaagtgacagggcttatactgaaagagggtaagctgcttcctcccaacaggcaactgaaaaaactccatcagcatcttaacctatgggaaaaattgatagagtctccccgtaatggaattaaaatcgagtggctctatcccaaggtgatcggcgtcttaaacaatattacctattttagaccggagtataagaacgtaatctttgctattcagaaggagtatcaccagtataaaaatacgcccagcaattacaagaatcagatagacgccaactga

SEQ ID NO: 10484 - RNA, 978 nt, synthetic construct
  source 1..978: mol_type = other RNA
atgaaaaagaagaagttgataacccacaataagtcctatgcgatcgacaaaagccccctctataacattcaatacatcaaaaggctctcagatattctgcagatcaacgagaagacaatcttctccttgattgagaataagaccaagaattacaactgtttcctgcaggggaaaaaaaaaagagagatccagagccccattaacgaactgtaccttatccataatcgcatcgcctccctgctggcccgggtgaaactacctgaatatctgtattctggagtgaagaaccgttcttatatagacaatgctaaagctcacctgacatcaaaagaaatcattaccaccgatataacagccttttttccttctaccacaagaacgatgattttctggttcttcaagaacaagttaaagtgcagtcacaagattgcaaatattctcgccgatctgtgctccattaatgaacatttgcccaccggcagtcagatcagtatgccgctcgcgtatcttgttaacgcctctatgtttgacgagttaaacaatctagctgagaaaaacaagctgataatgacggtgtatgtggatgacgttaccttctcaggtgaaaaagtcccaaaaggattcaagtaccaagtggagcgcattattaagaaacacaagcacaacatcaaggcagaaaaaactactctgtataagaaccagtcggtaaaagaggtcactggtctgattcttaaggacaacacactgcttccacctaataggcagtttaaaaaactccaccagcatctcaccttatggaaaactctgatcgcaaaaccccgaaacggcatcaaaatagagtggctctaccataagatcgtaggcatcttgaataacataagctactttaagagcgggtacaagaatgtcgtgtttgctatccaaaaggagtaccatcagtacaagaatactccaacaaattacaagaaggccgattga

SEQ ID NO: 10485 - RNA, 969 nt, synthetic construct
  source 1..969: mol_type = other RNA
atgaaaaagaagcttatcacacacgataaaagctaccagctggaaaacagcccactgttcaagattcaatacaccaaaaggctgtcacaggttatactgcagtcagaagagacaatttcatccgtgttcgagtctaaggcccagtactacaatatctttcagcagggtaatcgcctaatcgaggttccattacggacactctacgcaattcataacaggatcgcctccctcctggctcgaatcactccccctgattacctgtactctggcatcaagaacaaatcctatattacaaatgcccagcaacatctggactctgatgtcatactaacgacggatattaccgcctttttccctagcactactaaagagaagattttctggttcttcaaggacaagatgcaatgcagtaccaaaatagccaatcacctggctgaactgtgtactattgacggacacttgcctaccgggagtcagatctcaatgcctctggcctattgggtgaatgcaaacatgtttgacgaactcaatcgactcgctaaggagaacgagctgaaaatgacagtttatgtggacgacgtaaccttcagcggggcaaggattcccaaggaattcaaatttcttgtcgaacgcaccattaagaagtatagacactccatcaagttagagaagacaaaactctataagtctcaaagtgcgaaagaggtgaccgggctgatactcaaggatggaaagttattgccgtcgaaccggcagatcaaaaaactgcaccaataccttaacctctggggcgaattgttgagccagcccagacagggccggaagatcgagtggctgtacccaaagcttgtgggtgtagtcaacaatatcgcgtattttaaaccagagtaccgtaatgtcgtgtttgctatccatagagagtataaccagtacaaaaatactccctccaactataaaaaggaagtgtga

SEQ ID NO: 10486 - RNA, 951 nt, synthetic construct
  source 1..951: mol_type = other RNA
atgaaataccccgtgaaatatagtaagccttcttacccactcagcaaaagccctttttatcgcctgtgctctatttcctacctaaagcggatcctcgaagtctgtgtttggtatgaagaggaactgttaaacgagatcgagcagttctactcctgttatgactctagtggccatcagaaaagatttccctatccaattgacgaactgtacgggattcataataaaatagcgtcctacttggcccgcatggagatgccagaatacattcattcaagcaaaaagggggcaagctatttaacaaatgctcaggtgcatcaaggcacaaaggagacgtttaaaaccgatatcagatctttcttccagtcaacaaccaaagccatggttttcaaattcttccggaagaagatgctctgctcgcgcgccgtgagtgagtatctggcccacctttgcacactggataacgctctgcccctgggtagccaggtgtcaatgcgactcgcttactttgctaatatggatatgtttgagcagctgtttctcttagcacaaagccacaaccttcgaatgtcagtatatgtcgatgacataaccttttccggggataagattcccaagggtttcaagggccaggtggcacagatagtccaccggcacggacacaagatcaagagaaataagaccaagtgctactcccagaataaaaaagagatcactggcattatgatcgacggagagactcttaaactgcctgataggaagctgctgcaaattcacaacgaattcaacaagttcaaggcactcctaaagacgaccgaaagggacaaagagaagatcttgtacaagactcgttatttgttcggcctgttgaatcatgcggcccaatttgacccgaagtaccagctgatcaggaaagagctcaaagccaaaatcaacgaaaagtgtggactttga

SEQ ID NO: 10487 - RNA, 1173 nt, synthetic construct
  source 1..1173: mol_type = other RNA
atggccatccacaaacgccataccctccaaacgtccccactgtatggtctgaagcatctgcatcagttgcaacaccttctgtaccattcccgttacttcagaaataccaacattgacttggacaagcagtacaaactctcagagactgctcatcgagaggttttctatcccgatgatacgctatataattttcacagcgagctgaacaagttcctcagcaaaatagagaaacccgagtttatcaaatctggaaagaaaggcgaatcttacctgacacatgtgtcatcacacattaacaagaatcagtacttcagtttagacattaggagctactattcaaacattaatcgccttgacgtgttcaagttttttaggaataacctcggttgttctcacaagatcgccaactacctagcctatttttgcacttacaaggatcagctaccgctggggagtcctatgtccatgaacttggcgtattttataaatgagcccatgttctattgcctcaatgaaatcgctgtgaagaataatttgagcatgaccgtgtatgtcgacgacatcgctttttctggaagggtgatcacctccaaggttaagtatgacatcatcggcgtaattaataagcatggctactccataaacgaagacaaacttcggttctacaaaagtaaaaagacatatcgcgagacaagtggactcctgatctataaggggaaacttctgccaaacaaggaaaagctggataagctgcacaagatgctgtccgaatgggatgcacttctccgactcgacaaacctctcgagacaaaaaatcatttcattcggttgatcagcttcatttcctatttatgtcagattgataccaagtacatgcaactgaagtataaggtcatcaaagaatacaacaacaagaaagagggcgatttgttagccatttaccaggatagaattaccgagtggaacactctgctgtctaatcacgagactagttttcacgcattaaatgaaaaacacgccgaactgaacgaactgatcaaaaacctttcgaagctcaacaagaagcacctgatactgtacaaacagatcaaatacgagcacgagaagttcaaaaaacacaagagatcaagcatagggcggttttttagcgcattctctaaatacctggcttga

SEQ ID NO: 10488 - RNA, 933 nt, synthetic construct
  source 1..933: mol_type = other RNA
atgatcctctgtacaactgacgagatcttttccatcattaacaacaagatcttctactacaacatgttcgagattgggggcagggtttgccacacgccctgttatgagttgaaggggcttcattccagactggcccaattccttgtgaggattaaaaagccccgctacttatattccggagttaaaggcctgtcttacgtggacaacgctcgcgtccattctgtctattatgaaacattcaagacggatatcagcgagttttattcagcgactacccaggctatcgtgttcaagtttttcaggaacaagatgcagtgtagccacaaggtagcaaatatattagctgaactctgcacacttgaggggaaactacctaccggctcgcagctgtctatgatcctggccttttgggccaattcagatatgttcgaacagttgaatcagctggcacaggagcaccatttggtgatgacagtgtacgttgacgacataaccttttcaggcgccaaaattcctgctggtttttgccagcaggtagcacaaattatgagcgaacatggacatgcaatgaataagaagaaaactcggctctaccaggcgaatagtcacaaagaaatcaccgggctgattattaaccgggtgggagacagcccgataccaccaaaccgtttttatctcaaactgcataacaaactggccgagttcaatcagatctacgccgaaattaaaaatggcaagagtaaaatggaggaggataccctgcgacaactaaccaaccacctgataggtctgctcaatcacgccagtcagttcgataagaagtacaagatggtgaagaagcacatccagaagcaacacgatgaccttattcaatatctgcagactacacacaaagtcggctccggaaagttgggtaaactctgcatcagatga

SEQ ID NO: 10489 - RNA, 987 nt, synthetic construct
  source 1..987: mol_type = other RNA
atgaataaaatcagacgcaagagtctgaagattcctatcaggcagacaaaagaatatgatctcaaccaatcaccgttctttaaattggtatcaatcaagaagctgctgtctattttgcgagtgagtcaggaggaactgaaggacattctcgacaaccccacctctcattactctatcaggattgagaataaaagggacattcagagccccaaaaagtatcggatcttatatagaatccacaacagaattgcccatcacctccgagctattatcactccagattacctgttttccgataaaaaagggtgcagtatctatgacaacgcaatagtccattttggctgcaaaatgctcctgaatgttgatatctccaaatttttcccaagcaccaataggaacaagatttactctttcttcaagtactccatgcaatgttcctcagaaatatcggacatcatgtcctacttgtgttcaatcaataatcacatccctacaggttcgcagatttcaatgagactggcttaccttgtcaataagaagctttttgatgatctgtacaagtttgccaaagacaaaaacctcaagatgagtgtatgggtggatgacgtttcatttagtggcgacaaaattgattcctccgtgatttatgtcgtggaaaagataatcaagaagcacgggttcaatgtgagcaaaaataagactcagatacggcactccaccgaaaacaaaagcgtgacgggaattttcataagcggagacataatggaggcgagcaaggagctgtataaaaagcgtcgcatcaagcttcgggagtggaagaatttcatcaaaaacaaggagatttccctcgaagaattagagaaagttaaagactctctactaggcctgcttaactacttaaacctgttcgagcccagcagcagcaagtatattgccctgatcgagaacgatttcttgagttactctaacaagcgcatctctatctga

SEQ ID NO: 10490 - RNA, 981 nt, synthetic construct
  source 1..981: mol_type = other RNA
atgaataagatccgcaaaaaatccctgaagatacctatcaaacaaaataaggagtacgagctgaatcagtcgccattctttaaattagtgtcacttaagcgactgctgtcaatcctgcgggtgagcgaggacgagttgaaggacatattggacaatccggcttcatactattccattcgtgtcgaaaacaatcgggagattcagtctcccaaaaaaacgaaaagtctctatcgcatccacaatagaattgcacatcatttgagggccattattaccccttgttacctgttcagcgataaggttgggtgcagcatctacgataacgcgtccgtacatatcgggtgcaaaatgctgctaaatgtggacatctctaagttttttcctagtacaaaccggaacaagatttacagtttcttcaagaaggatatggaatgcagcccccagatttccgaaattctctcctatgtgtgtagcataaacggccacatccccactggatcacaattatccatgagactggcttaccttgtcaacaagaagctctttgatcaccttttccattttgccgagagcaaaagtctaaaaatgagtgtatgggtggacgatatctctttctctggcgaaaagattaatagcaacttcctgaactcagtcgagaaaattatcgagagacacggtttcaacataagcaagcacaagaccaaactgaaacattccacagagtccaagtctatcaccggaatttttatctcaggtgaaaaaatggaagcctctaacgagtcttatcagaaaaggcgagtgctgctggaaaaatggaaggagtctataaagaacaaggagatcccaataaaagaactcgaaaagctgaaggattccttactcggcttgctcaattatctcaatcactttgagaactcgagtaagaagtatattttccagatcgagaaagactttatcgaataccttaagagggttagctga

SEQ ID NO: 10491 - RNA, 990 nt, synthetic construct
  source 1..990: mol_type = other RNA
atgaaaaagaaattcaaaaagctgcacatcacccagactaaagagtatgaactgacacaaagtcctttcttcaaactctattccgtcgataagctgttaaacatccttaaagtggagagggaaatccttgaagacatcctgaattttcccggcaactactacacattcaaaactagcaatggacgtaatatccagacaccttcaaaggatctgtcactctaccttattcataattgtatcgcaaaccatctccgcgctatcataacacccgattatctctttagcgacaagaagaattgcaccgtctacgacaacgccagcgtgcatttaggctgtgatatcctgctgaacattgatatctctaagttcttcccttccacgacctatatcaaagtttttaagttcttccggtacaggctgttatgttcaacagagatagcagacattttggctcacctgtgcacgattaatgaccacattccaactggatcccagataagtatgcggctcgcctttctggtgaatcagggtttgtttaatgacctgtacaatcttgccatttcaaagaacattaagatgtctctgtgggtggacgatatctccttttcgggtgcggaagtcactccgaccttcaagtacaaggtatataagatcattgaggaatacgggtttaaagttagcgagcacaaaactaaactatcctataaaggccaaccaaaatctgtgaccggcatcttcatagatggggataaaagtattggggccaatgagcactataagaagagacgcgtgctatttaagaaatggaaagacgcatgcaagaaaaagacctttaacaagaagcagtttcagagaattaaggctctgcgaatacagatcttgggactcttgaactatctgaatcattttgagcccagctctaagaactacataaacattatcgagaacgacttcaaaaagatcaagaacaagttcctctacaaaatttga

SEQ ID NO: 10492 - RNA, 960 nt, synthetic construct
  source 1..960: mol_type = other RNA
atgactaaactgaacactcgaaacaagtcttataatttggaggaatcccccctctataacatccagtacgaacagaagttgctcaagattctcaatattagtcagaatgacctgattttcgttcgggagaacttgaaggacttctatcattcattctccaaaaagcatagaatcatccagacccctaaaaatctgctgaaacaaatccactaccgcatcggagatcttctggctaggatagctatgcctgactatctgatgtcggggaagaagggtgccagtcacatagagaatgccaaattacatctgcaagaggacctccacgtattcactgccgacatagaaaaattttttccctcaacaaagcgccaggccatcttcaagtttttcaaaaacaagcttcagtgtagccacaacattgctaccatcttgtctgaactatgcacaacccacgagggcagattacctacaggcagtcaactttctatgcatctagctttttggacgaactttaacatgttcgaaaaaatcgcaaagttgtcaaatcagtatgacctgcgtttttctatcttcgtggacgatcttactttcagcggaaagactattccgcacaactttaagtaccagctgaagaagatcatcaccagctacgggtatcaaataaatacacagaagattctcctcttcaaaccatttaagatccggagagtcaccggcatttacattaaaaacggtgatacccacctgcccaatacctttctcagggagctacatacagcgttacagagctggaaggatattctgaaaacttccccagataaactggataaaaagaaactggagacgacctataataaactccttgggtccatcaactacgccgcactgctggacaaaaagtacaagcagatcaggaagaaagtgatagcagagaagcagaaaattacacagtaccaatga

SEQ ID NO: 10493 - RNA, 960 nt, synthetic construct
  source 1..960: mol_type = other RNA
atgtcaaagaagaagctgaagattaagtcctccaaaaagtactctatcaaccagtgccgactgtacaaggttacctcactgaaaaagttgtgtgaaattctgggcatcaataatcgcgaactaaaattgatcatcgacaaatcgaagaacagggagttttataactgttacatcaatcagaaggggcgcctgatccaggagcccattaacttaatgtatcgggtacacaacaggatcgccaatctgctagccagggtggagacacctagttacattcattacagtaaaaggggctattcacacatcagcaatgcaaaggctcacctggattccaaacagcttattacattcgacatcaaatcctattaccaaagcatcgactatgaaacgctcagaagattctttcgggagaaactgaaatgtgaacaagatgtcgcctacattttatcaatgatatgctctttcgagggaagcctgcctactggtagtcagataagcgtctacctctgcaatctgaccaaccttgatatgttcgacgaaatgtaccttcagtctaaccgagttgaccaaaagtttactgtatacgcggatgacataacaatcagcggacgtaccgtgaataactcccattacaacgtgatgaagaagatcattgagcgctacggctacatcataaaagaacaaaagactaagcggtacactagcaatcagataccaattgtcaccggggtggctctcagaaatacagtggatgtgaagaatgagtattataaaggcctgcggaagttgtgcgagggtgttaactttaatattgataacgagccgtatgcccagttaaaagacagatatctctctttgaaaggaaagacgcagtatatcaagcagcttaacaaagaagtgccctatttcattctccaaacccagatgctcctggagaaaaagctcgaagggcagctgtga

SEQ ID NO: 10494 - RNA, 960 nt, synthetic construct
  source 1..960: mol_type = other RNA
atgtctaggaagaagttaaaagttaaggcagacaaacgatacagcatagatcaatgccgcctttataagataaccagcctgaagaaactctgcgaaattctctctatcaacaacgaagagctgaaactcctgatagacaaatctcggaactcaaagttctataattgctacaccaatcagaaggggagactgattcaggagcccattaaccttatgtacagagtacataacagaatcgccaacttgttggccagggtggagacaccgtcgtacatcaattacagtaagaagggctgctcccatatcagcaatgctaaagcccacctctattctaagcagctaatcactttcgatatcaagagctactatcagtccatttgtaatgaggcgttgcgccgttttttccgggacaaattaaaatgtgagcaagacgtggcttatgtgctgtcaatcatctgttcctttgagggttccctccccacaggctcacagatctccgtctatctctgcaatctggcaaatatagacatgttccacgagatgtatctacaaagtaaccgctttcagcaagagttcactgtgtatgccgatgatattacaatcagcggagatattgttaacgactcccactacaacgtgatgaagaagatcatcgagcggtacgggtacataattaaggaagagaaaaccaaacggtatactagtaatcagacgccaattgtcaccggggtcgctctgaaagacacagtggatgtaaaaaacgtctactacaagggattgcgagaactgtgtgagtctatcaacctgaacgtggacaatgaaagttacgcacagctgaaggatgaatatctgtcactcaagggtaagattcagtacatcaaacagctgaatagggaagttccttgttttattctgcagacccagagccttttagagaagaaacttgaaggccaactgtga

SEQ ID NO: 10495 - RNA, 960 nt, synthetic construct
  source 1..960: mol_type = other RNA
atgagcggcaagaagctcaaggtgaaaactgataaaaagtatagcatcgaccaatgtagactttaccgggtgaccagcctgaaaaagctctgtgagatcttggggattaataaccaggacttgaaagtcctgattgataagtcgaagaacagtgagttttatcactgctatgtcaaccagaaaggcaggctgattcaagaaccaattaatctgatgtaccgcgtgcacaatcgaattgctaatctgctgagcagagtggagacacctagttacatccattattccaagaagggatgttctcacatctccaatgctaaagcccatctccactctaagcagctcatcactttcgatatcaagtcatactaccaaaacattgggaatgagacaatccggaaatttttccgtgataaacttaagtgcgaacaggacgtggcatacattcttagcatcatctgttccttcgagggctctcttccaaccggatctcagatatccgtatacctgtgcaacctcgttaacttagacatgtttcaagaaatgtacctgcagagtcataaagcccagcagcagttcaccgtgtatgccgatgacatcacgatatcaggccagatcgtgaatgattcccactataatgtcatgaagaagatcatcgagcgctacggttatacagttaaagaggaaaagaccaagaggtacaattcaaaccaaattcctatagtaaccggaatagcgctaaaaaatactgtcgacgttaagaacgtgttctataaagaaagcaggaagttgtgcgagaacattaacatcaatattgacaacgaaccctacgcccagctgaaagacaagtatctatcattgaagggtaaggcacaatatatcaaacagctgaacaaggaagtcccctactttattctgcagacacagatgctgctcgagaaaaaattagaggggcagatatga

SEQ ID NO: 10496 - RNA, 960 nt, synthetic construct
  source 1..960: mol_type = other RNA
atgtcgaaaaagaaactaaaggtcaaggccaacaaaacgtatcccttaaatcagtgtctgctgtacaaggtgccgagcctaaaaaagctctgtgttattctcaagatcaccaaggaggagttgctgactttaatggctgatagtgagagcaacgggctgtataattgctatgagaataaggagggcagacttatccaagaaccaagggacctcatgtacgtggtgcacaaccgaatagctaatctgctttctcgtgtaaaaacacctgactacatacactacagtaaaaaagggcattctcatatcagtaacgctgaagttcacctggacagcaaccagctcatgacctttgatattaagtcctactatccttctatctcctcagaattaatccgcaagttctttagacacaagctgaagtgcgaacaggacattgcatacctgctgtcaaaattgtgtaccattgatggctcactgcccacaggttcccaaatctcagtctatctatgtaatctcgtgaacctggacatgtttaacgagatgaagctgcagtgcgaccggtttaaccataaattcactgtctacgccgatgatataaccattagcggcgaatccgttaatgaaagtcactacaatgtgatgcgcaagatcctcgagagatatggatacgaaattaaggagtccaaaactaaaaggtacactagcaatcaaacgccaatagtgaccggtatcgccctgaccaaaaaccttgacgcgaagaatgatttttacaagcagctgaggcagctgtgcgatgacatcaacttcattattgacaacgccagctatgcacagctcaaagatgagtattactctttgaaagggaaagcccagtatttgaagcagcttcaacagaaggtacccgagttcgtgttcacaacacaggcacggttggagaagaagcttgaaggacagatctga

SEQ ID NO: 10497 - RNA, 954 nt, synthetic construct
  source 1..954: mol_type = other RNA
atgtcaaaaaagaaggtgaaggcgaataagatttacagtctcaaccagtgccggctttacaaagtaacttccttgaaaaagctgtgtagcattcttaagatcaccgaagaggaactgtctctcctcgtcgagagttacgagaatagtgacttttacaactgttacatcaacaaagatggaaggcctatccaggagcccaaaaaattaatgtacagggttcacaatcgcatcgcaaatctgttatcccgcatcgagacacctgaatatgttcactattctaagaagggacatagccacatctccaacgccgaggtccacctgcattcaaaacaacttatgaccttcgacatcaagtcttactattcaaatatcagctcagagagcattagagtatttttccgacataaactgcaatgcgagcaggacatcgcttacctgttgagcaagctatgcactttaaacggctccctaccaaccgggtcccagataagtgtgtatctgtgcaatctggttaacttggatatgtttgacgaaatgaaactgcagtgtgaaatgttcgagcagaagttcaccgtgtatgcagacgatataacaatctctggcaaaagtgtgaataagagccattataacgtgatgtctaagattctcgagagacacggctatgaaatcaaagaatctaagacgaagcggtttacatcgaatgagattcccgtcgtgaccgggattgccctcaaaaaaacaagcgacgtgaaaaactccttctacatggagctgcgtcagctctgtgaaggtatagatattcacattgatgacgcctcatatgcccagcttaaggatgaatactattccctgaaggggaaagctcagtacgtcaagcaactgaaccagaagataccaaagttcgtgtttcagactcaagctaaactggaaaagaagctcgagggtcagttgtga

SEQ ID NO: 10498 - RNA, 966 nt, synthetic construct
  source 1..966: mol_type = other RNA
atgaaagtgaaatctaacaagctcaaggtcaaaacagacaaatactatccactgaaccaatctgctttataccgtgtaaacagcaaaaaaaagcttgccgaggttctcttaatctcaggtactgaactggctacacttataagagatgatgacaagatcaagttctataactgctatctcaatgaaaaggacaggctgatccaacagcctcagggattgatgtataaactgcacaatcgcgtggcgaaccttctttctcgcatagaaacccccgaatacattcaatactccaagaaaggactgagccacatcactaatgcaagcattcatgcaaacagtaagcaggtcatcaccttcgacattaagagctattacctctccattaagagggagagtgtacaaaacttttttcgggaggaactggagtgcgagatcgatattgcattcattctttccaaactgtgcacactcgatgaggctttgcccaccggctctcagatctcaaattatctgtgtaatctggtgaacctagtgatgtttgacgagatgaattcattggcctctaggtttgggatgtcctttagtgtttatgcggatgatataacgatcagcggcgacaatctggattcatcgcatctcaatacaatgcgaaaaattatcgaacggtacgggtattgtataaaggacgagaagaccaaaatattcaagggcaatgagacggccgtggtgactggaatcgctctaaaagaaagtttggatatcaagaacgagttctacagcgatctgagaaagctgtgtgaactggtcaattcctacattgacaaagagtcctacgcccagctgaaaggcgactacttcaagctgaaggggaaaatccagtacattaagcagttgaaccagactattccgagactcgccctgaacaccaaggccctactcgagcggaagttagacggtcagatctga

SEQ ID NO: 10499 - RNA, 957 nt, synthetic construct
  source 1..957: mol_type = other RNA
atgaaaaagaagagaaagctgaaggtgcgccatttcaacaaacaatatcccattcatcagtcgccactttaccgcttgtctagccttaaaaagttgtccgtcctcctggccatgcctcttaaggacatccgtaagctcaacggtaataatgactcccgatacaacgtatttactaacaaagacgacagggagatacaggagccctttaacgagatttacgtgattcacaataagctcgcaagtctgttatctaggattgatactcctacctatctccactctttcaaaaagcagtattcgcacatcaccaacagcaaaacccacctgggcagcgagcaagtgataaccttcgacataaaagctttttaccaaaacatcacccaggataaaatccgaatgttcttcaagaacgacctaaaatgcagcccagatattgcattcctgctgtcaaaaatctgcagctacgataatcatctccccacaggaagccaggtgtccatctaccttaactttctggttaataggacgatgtttgacgaaatgcactctctagcggagacactgaagatctgtttaacggtgtacgccgatgatgtgacaatttctggagaaaaggtcgatatgggaatgttgaataccatgagtaagatagtggagcggcacgggcatacaatcaataagcaaaagactcggaaatatagcaataatcaggttccggtcatcactgggatcgccttatgtaatggcaagacccagcctaccaatgaaaagtttaaggaactgcgccagaagagtaacttcttgctgagagtatccaacgacctggatttggactttctgaaaaaagagagtatgtcactcgatggtactctgaactatttctcccagctttcctcagaagttccaaaatcaacactcgaggcccgggacagactggctaaactactgggcatttga

SEQ ID NO: 10500 - RNA, 957 nt, synthetic construct
  source 1..957: mol_type = other RNA
atgtctaataagaaacgcttgaagatcaagaatcacaatcagtacccctttcatcagagccccttgtataaacttaagagcaaaaagagactggctgatattttcaatgtggagctcagtgaactgaagtcatggtttaacacaattccaagcgaatataacgttttccttaacgagaaagacagagagattcaaactccactcaataacctgtacattatacacaataggcttgcgaatctgctgtcgagaatagagacgccttcctggctgcatagtttcaagaagaatttctcctacctaactaatgctaaaagtcatatcgattctcgccaggtgttaacgttcgaccttaagtctttttaccagtccacaactcaaaatgccgttcggaaatttttcaaggacactatgctgtgttccgaggatgtctcctttttcttgagcaagatttgctgctacaataaccacctgcccaccgggagccaagtcagtatatacttgtgttacctcgtgaacatcaaaatgtttgatgaaatgaggaggctggctgtcagccgaaatgccctcctgaccgtttatgcagatgacatcaccgtgtcaggtgacaagatcgactattcactgctgaacaccatgcggaagataatcgtgagacacggctataaactctcagaagataagacactccgcttcaaatataacgaaatacctgtgatcaccggcattgccttggtacagggagagctacgtcctacaaacaagtttatgtccgagcttaggagcaaagtatatttcttaaaccggaatgccgaagagctggacattgaactgctaaaaaaggagaaacagcggatcaacgggaagattaactacatcgagtctttaaaccgaccaattccctctcaggcaatcgacatcaacaagaaactcgataagctggtgccgatcaaatga

SEQ ID NO: 10501 - RNA, 960 nt, synthetic construct
  source 1..960: mol_type = other RNA
atgaaatcaaccaagaggacaccttccctgcaaaggtttcccaaattgtacccattaaatcagtcccccttttttaagctgaaaactcgaacaaaactcctcgagatcataggactgagtcggagccaagcggacaaactgatgctcgacagcgcctacaaggagttcataaatgatgcagggagaagcatccaggaaccgatcgcccagcttaaggcagtccacaaaagaatcggtatactgttcagtcggatcgagctgccacaatatcttcattctgggcgcaagaaacactccactcttacaaacgcagagagtcaccgtcatgccacggagctgctcaagctggatatccacaaattttttccttcaacctctgctgcaaaggtgtataaggcattcgtcgagaagttcgagatgagccccgatgttgcctatgtgatgaccaatttggccaccttcgcaggcaaggttcccactggctccccaatttcgatggccattgctttctgggctaacaaagatatgttcgacgaactgagtaaccttgccacactgtcaaacttggtgtttacagcttacgtagacgatgtggccttttccggagccaaaatccctaagggctttgctagccaggcgaagaaatgcattcattctcacgggttaacttcaaaggacaaaaaggaacgcttctaccctgcatctgaagggaaactactcaccggaattgtgatccagaacggaaagctgaaggtgcggtgggctcataatgacagcattggcaaagaattcgccaccctagctgaggccaaagataatgccgcgaagatttctcatctggagaagctcgcaggcaagctgcacgctgccggtcagattgacttcagacaaaaggataaggcgaggtttttcacgcagcagttgaaggtcgctaaaaaacagagcgaacaggactcctga

SEQ ID NO: 10502 - RNA, 978 nt, synthetic construct
  source 1..978: mol_type = other RNA
atgaaatcaacaaagcgcacgcctagcctccagagcccaccaaagatttatcccctgaaccagagtcccctgtttaaattgaaaaacaagcggaagtctctggagataattggtctatccaaaaaacaagccgacaaacttatgcttgatagcgcatacaaggagttcgtgaatgacgcagggcgtacaattcaggagccaatcgcgcagctcaaggctgttcataggaaaattggggtgctgctatccaggatcgagttgcctccgtatctgcatagcggtcggaaaaaacacagcacactgaccaacgtggagagccacaagttagccaccgagttgctcaagctcgatatacataagtttttcccgtcgacacgagctgctaaagtctacaaggccttcgtggaaaagtttgaaatgtcacccgatgtagcttacattatgactaatctgagtacctttgcaggcaaggtgcctactggcagtccaatctccatggcaatggccttctgggccaacaaagatatgtttgacgagctctctaatcttgcagcttctaacagcttggtcttcactgcctacgtggacgacgttgccttctccgggtccaagatccccaaaggattcgccgcgcaggccaagaaatgcatccgctcacacggccttacttctaaggacaagaaggagaggttttacccttcatccgaaggaaaactgttaacaggcatcgtaatacaggacggagaactgaaagttagatgggctcacaatgatagtattggaaaggagtttgccacgctcgcggaagcaaaggataatgccaccaagatcatccacctggaaaaactggctggcaagctgcatgccgccgggcaagtcgacttccggcagaaagacagagctagatttttctataccgcagctcagtctcacaagaaagccttacgcacccgatatctgaagcagcaagtggattga

SEQ ID NO: 10503 - RNA, 960 nt, synthetic construct
  source 1..960: mol_type = other RNA
atgattagcactaagaggtcaagctctttgcactcaagtcccaaactgtatccattaaaccagagccccctgttcaagttgaaatccaagaaaaagctacttgagatcatcgggctcagcaaaaagcaagccgataagctgatgttagactcagcttacaaagagttcgaaaatgacgctggcagagcaattcaggaacccatcgcccagctcaaggccgtccacaagaggatcggcgcattgctgagtcgtattgagctccccccatacctgcattccggccgaaagaaacacagtaccctgactaacgcaaagtgccacaggcatgccacagagctgctgaagctcgacattcataaatttttcccatccactaaggccgccaaggtgtacaaagcatttgcggaaaagttcgagatgtcgccggatgttgcctatctgatgaccaacctggtcacatttgcgggaaaagtgcctacaggctctcctatttctatggctatggccttttgggcaaatcgcgacatgtttgataccctttcagaacttgcttcttctaataacctggttttcacggcttatgtggatgacgtggccttttctgggtccaagatacctaaaggattcgctgcccaggctaagaagtgtatcaaaagttacggtctaacctccaaagataagaaagagagattctatcagtccagcgaggggaagttactcaccggtattgtaatccaggatggagaactgaaggtgcggtgggcacacaataacagtatacgcaaagagtttgcagacttggcgaaggtgaaagacaatagcgccaagatcatacatctggagaagcttgcggggaaactccacgctgccggccaagtcgattttagacagaaggacaaggctcggttcttcacacagcaactcaaagccgcaaaaaaacagtcaacggaaagctcctga

SEQ ID NO: 10504 - RNA, 966 nt, synthetic construct
  source 1..966: mol_type = other RNA
atgattagcaccaagaggagttcatctcttcacatttctccgaagctatatcctcttaaccagagccccctctttaagttacgatctaagaagaaactgcttgaaattatcggactctctaagaagcaggctgataaactgatgctggacagcagttacaaagagtttgagaacaatgcaggccggacaatccaagagcccattgctcagttgaaggctgtccacaagcgcataggagccctgctgagtcgagtggagctgccaccatatctgcactcaggcagaaagaaacactctacgttaactaatgcagagtgtcatagacaggctacagagctcctgaagctggatattcataagtttttccccagtaccaaagcggccaaggtttataaggcctttgttgaaaagttcgaaatgtctcctgatgtcgcctacgtgatgacaaatctcgctaccttcgccgggaaggtgcctactggctccccaatctcgatggcaatggctttctgggctaacaaagatatgttcgacgagctgagcgaactagccacgtcacataatctgatatttactgcatacgtcgacgacattaccttcagtggactcaaaatccccaaaggcttctccagccaaatcaaaaggtgcatccacagccatggcctggtgtcaaagcagaagaaggaaaaattctactcctcctcacaggggaagctgttgacaggtgtggtaatccgggatggtaaattgaaagtgagatgggcccacaactcctccatcaagaaagaatttaacgaattggcgaaggcaaaagacgacaccgaaaaaataattcaccttgagaaacttgccggacgtctccatgcggccgggcaaatagatgagaggatgaagaataaagcacgcttctttagcaaaaaactcaaggaggccaagcagtccttactgatccggagcactaagtga

SEQ ID NO: 10505 - RNA, 918 nt, synthetic construct
  source 1..918: mol_type = other RNA
atgaaccagtcgcctttcttcaaactgaagacgaagaagaaacttctggagattatcggactgtccaaagcacagtcagataagttgatgcagaagtccgcttacaaggaattcgtgaatgacgccggcagaacaatacaagaacccattgcacagctcaaggccgctcaccggcgaataggggtcttacttggacgcattgaacttccgacatacctgcattcaggtaggaaaaagcactctacattgaccaacgcagagagccatatccaagcgaacgaactcctcaagctggacatccacaaattttttccctcaaccaccgccgcgaaggtccacaaagctttcgtagaaaagttccagatgagtcctgacgtggcatttctgatgacgaacctagttaccttctccggcaaagtgcccactggcagtccagtctcgatggctatggcatattgggccaataaggacatgttcgacgaattgagcgatttggccatctccaatagtctgatctttactgcttatgtggatgatgttgcgttttcaggtgtgaagataccaaagggatttagcagccgtgttaagaaatgcattcacagtcacgggctcgtgtccaagcagaaaaaggagactttttacgatagcacacaggggaaactcctgactggcgtagtcattcaagacgggaaactaaaggtgaggtgggctcataattcttctatcaagaaagagttcgatgagctggccaaagcagagtctgataccgacaaaatcattcaccttgagaagctggctggcagattacatgctgccggacaaatcgacgagcgcatgaaaaacaaggcccggttcttttctcagaaactcaaggaagccaaacagcatctggccgcccagagctccgagaagagctga

SEQ ID NO: 10506 - RNA, 960 nt, synthetic construct
  source 1..960: mol_type = other RNA
atgaaatctactaagagaacacccagcctgcatagagcacccaaactgtacccgctgaatcagtctccgttttttaagctgaagaacaagaacaagttcttcgagataataggcctcagcaaacaccaggtcgagaagctgagtttcgaaacggcttacaaggtgttcataaatgaatctgggcggacaatccaggagcccattcctcagcttaaagccgtacataagcgcatcggcattctgttggggcgcattgagctgccaatctacctccattccggaaggaagaagcattcaacgttaacaaatgccgaaagccaccggtacgccaccgagctcctcaagcttgatattcacaagtttttccctagcacttctgccgcgaaggtgtataggacctttatcgacatctttaagatgtccccagatgtcgcctacctaatgactaacttggtgacctactcaggcaaagttccaaccgggtccccaatctccatggccgtggccttttgggccaataaggacatgttcgacgagctctcacggcttgcattctcgaatggcctgatcttcactgtgtatgtagatgacgtggcctttagcggagaaaaaatccctaaaggtttcgcagcacaggctaagaaatgcatccacgcgcatggtttagtcagcaagaaggagaaagaaaccttctatcctagttccaaagggaagctactgacaggcatagttattcaaaacggaaagctgaaagttagatgggctcacaacgcgagtatcaagaacgaattagataccctggctaaggctgagaatacacccgaaaaaattactcacttggagaaactggctggcaaacttcacgctgcaggacaaattgactataggttgaaagataaggcccgtttttttacacgacagctcaaaaaagcaaaaacccagtcagaacaagagaactga

SEQ ID NO: 10507 - RNA, 978 nt, synthetic construct
  source 1..978: mol_type = other RNA
atgaaaaatactaaaaggacccctagcctgcacagcaaacctaagctgtatccactccaccagtcgccattatacaagctgaaggtaaagagcaagttattccaactgcttgggataacaaagtcacagcttgccaagctttctcaggataagagctacaacgtctttaccaacgagaatggcaggaccatccaggagcccattcctcagcttaaactggcacataagagaatcggcaagattttgtctcggatcgagatgccaagttatctgcatagtggacgcaaaaagcattctacactgactaacgcacgcgctcatatcaaagctaatgagttgctcaagcttgacattcaccactttttccccagcactacagcggcccgagtttacaacctgtttcacaggaagttcgacatgtctccggatgttgcctacctgattactaacttcgttacatactctggtcggatccccaccggctccccgatttcaatggccctcgccttttgggcaaactgggaaatgttcgacgaaattaacaagttggcaatctcccacgatttagtctttaccgtatatgtggacgatctggctttctcgggcgagaagatcccaaagggatttgcttcccaggtgaagagtatcataagttcaaatgggctgatctccaaacggaaaaaggaaattttctatccctcctccaaaggaaaactactgaccggggtggtgatccagaatggcgagctcaaggtgcgatgggcccataatgccagcatcaagaatgaatttgataacttgagcttggcctcacaggacgtccaactgagaataaagctcctggaacgcctcacggggaaactacacgccgctggtcaggtggattacaaactcaaagacaaagcacgtttcttcacgaaacaactaaaaatagcgagatgcacactcattcagcaacctcatctgtctcaccagtga

SEQ ID NO: 10508 - RNA, 957 nt, synthetic construct
  source 1..957: mol_type = other RNA
atgaagaatactaaacggcccccaagtctgcattgtgccccgaaaacataccccctcaaccagtctcctttctataggctgaaggttaagaaaaagttgtaccagctgctcggtctaaccaaagcccaggtcgagcgacttagtcaagataatagctacaacgtcttcaccaacgaaaaagggagggtgatacaggaacccatctcccagttgaagttagcacataaacggatagggaagatgctggcccgcattgagctcccagatttcctgcattccggaagaaagacatactctaccctttccaatgccgaggcacacatcaatgctgacgagctgctgaagctcgacatacacaaatttttcccaagcacgaccgccgcgaaggtctacaaggtgtttaatgagaagtttgaaatgtcacctgatgtagcttacgtgatcaccaactttgtgacatttagcgggaaaatcccaaccggctcacctattagcatggccattgcctattgggcgaattgggaactcttcgacgagatcaataaggttagtattgcaaacagactagtgttcactgtgtatgttgacgatttggccttttctgggcgaaagatccctaaaggctttgcttcgcaaatcaaatccctgattgctagcaaaggtcttatcgcaaaaaagaacaaggaggtcttttatcccaaatccaagggcaaactcctgacaggcgtagtgattcagaatggaacgcttaaggtcaggtgggcccactcagcaagcattaaagacgaattcaagaacttagctatcatgtcacgtaacaaagaatctactgtgaagttgttagagaagctggcaggaaagctccacgctgcgggcagaattgattataagctgcgggataaggcccgcttcttcactaagcagctgaaaatagctaaatgcgtgctgatcgactga

SEQ ID NO: 10509 - RNA, 987 nt, synthetic construct
  source 1..987: mol_type = other RNA
atgaaaaacgctacacggagttcctccagcttttcttccctaaagaattacccaattaaccagtctcccctgtttaaacttaccaccaagaagaagttgttagccctcttgggctttagcttaccacagattgaaaagcttagtaaggattcatcctatcgtgtgttcctcacgccctcagacagatgcgtacaggaaccgattctgcagctcaaaaaaatccataagaagatcggatcactccttaaccgcatcgagcagcctgactatatccattctggaagaaaaaaacggagcattattaccaacgcaaaagttcaccaaaattcataccaactcctcaaactggacatccacaagttttttccatctactagtggcagcaagatctacaggctgttcgtgaatgattttcagatgcagcctgacgtggcccatttgcttaccaatctggtgacctacaactattctgttcctacaggtagcccactatcgatggttcttgcttactgggcgaataaaagcatgttcgacgagctgtatcagctggccaacgagaacgatctggatttctcagtgtatgtagacgatgtcgctttctcgggagagaagatccccaagggcttctcccactgcgccaaatcctgtatttctaaacacgggatgaagtccaagtccaaaaaagagatgttctaccaggaaaatcaggcaaaactgctgacaggcgtgattataagtgacggtgtcttgaagactaggtggaaacacagccaaatgatcaagaaggggtttgaaacactggccctgcagaccagtgacggcgacagggtcatcgccctggagaagttaactggaagattgcacgcggcagggcaaatagatccccgaatcaagagcaaggccatccatttctctaaaatactgcgcgctgcaaaactcgacattatagccgctaagaatgaaaacgataagcctgatgtgagctga

SEQ ID NO: 10510 - RNA, 951 nt, synthetic construct
  source 1..951: mol_type = other RNA
atgtcaaaaaataggtcgcctagctttaagtactatgagctcaatcagtcccccttgtataaactgcaatctaaaaacaagctgaacgccctgctcggaatcaataaaaatcaaatacccagccttctgtccgacgagctgtttaaccagttccttaataaagataaccgcctcatccagcatcctatcggcaagctcgagcttgtgcataaaaagatctactgtctcctcaacaaaattattaagccatcctaccttcactccggtaccaaaaaaaggagcacctcaaccaatgctgagattcacaaaaacaacaaggagatgttgaaaatcgacatcagtaagtttttcccgtctaattcagagcgaaaaatcagaaacctgttcctgtatcagtttgaaatgagcatagacgctgcatcttatctatcaaagctgatctgcattaatggaattctgcccacaggaagccaggtgagtatgcagattgcttacttcgccaataaggtgatgttcgatcgtttaaacactctggccaaagagaataatttgagcatgaccgcttacgtggacgatgtagccttttctggggaaaaaatccctacagggtttcttaagaaggttaagactattgtcaacgagagtggtctaaccatcaagaacaagaagattaagatctaccgggagaagcagccaaagatgattacgggcattatcataaagaataacatgttgaccgtccgcaataaaaacctgcggaagatcaagcaaacgttcttagaaattttcacaccaaatgcacacttatccctggaagaaaaagaagtcatatatacaaggctgaaaggccagttgcatgcggccgggcagatcaataaaagattcaagcagaaggcaaaacacataaacaagaaccagaagaagtacctgaaacagaaccaaactctctga

SEQ ID NO: 10511 - RNA, 903 nt, synthetic construct
  source 1..903: mol_type = other RNA
atggagagtagccctccttgcgactatgccaaatatgtttatgaattggaactgctcagctctcctctttttcatatcacgagtaaaaagcgcctggctattctcctgcacagtagtgtaaaagagctaaacaatatcgtgcgtagcaaagatcagatgtaccagtatttcaacgagactcagactgacaattccggaaacatcattaaagtgaggcccattcagaatccgcacgatagattgaagcagatccactcgagaattgggaaatttctgggtaatctgaaggctcccgaatatctgcattctaagaggtccaaaagcgccatctcaaatgcaaaggcccacgttgggattaaaggccacacacttaacattgacatcaccgacttctaccccagcacttcccgcgccaaggtgcaagctttttttggatacacccttcagtatccaacagatattgccaagtacctgtcagaaatctgtaccgttaagaattgcttgccaaccggatcccccttatcttcagcactggcattttgggctaacaaatccatgttcgacgagatctaccgagtggccaaatcacgggctataacaatgaccgtgtatgtggacgatattagcttcacgggtagagcggtcaatcagaacttcctgaagaagataatccagatcgtcggcaaataccaacacaagatcaagcaggagaagattaagttctttccagagtactctgtcaagttcgtaacaggcgtggcgattctcaatgggcgactacagcctgcacatcgccattaccgggatataagggtgctccaaaagatcgataacgacttacaagccactctgcggctcatgggcaaaaacaactacataaagcagatcaccaaccaggtctga

SEQ ID NO: 10512 - RNA, 903 nt, synthetic construct
  source 1..903: mol_type = other RNA
atgggaaacagtcagcccagtgaccatgctagatacgtttacgatctggaactcctgaactcccctctgttccacatcacctctaaaaaacggctagccatgttattgtgttccagcgtcaaggaattgaaccacattagcaggtctaagaatcagatgtatcagtgcttcaataagaaacagacagacaacaacggaaacgtaattaaggtgcggcccatacaggacccccatgagcgtttaaaacaaatccacagccggatcgggaaatttctcggtaatcttaaagcgccagattacctacacagtaagcgatcaaaatctgcaatttccaatgccaaagcacacgtggggctgaaaggcctcactctgaatatcgacattaccgatttctatccttcgacaagtaaggccaagatccaatcattctttggctacactctgcagtatccaacagacattgcgaaatacatcagcgagatttgtaccgtcaataattgcctgccgactggaagccccttgtcctcagctctggcattctgggccaacaaagctatgttcgacgagatttataggattgccaagagccgctccataaacatgacggtttatgttgatgatatctcatttacagggaaggccatcaaccagaagtttctgaaaaagatagtccagatcatcgaaaaataccagcacaagatcaaggaggagaagataaagttttttcctgaaaacggcgtgaagtttgtgaccggcgtggccattgtaaatggccatctccaaccagctcacagacacttcagagatatgaggcatcttcaaaagttcgacaatgacatccaggtggctctccgccttgcaggtaaaaacaactacattaagcagatcaccaatcattcttga

SEQ ID NO: 10513 - RNA, 915 nt, synthetic construct
  source 1..915: mol_type = other RNA
atgaaaaaacttagctatgtgtcctttgactacgtagaacacatcaaagatctggctattttcaatatacagagcaagcggtacttggcatttgtgctgaagacccagctcccactgcttaaagatatcagccgaaatcccaataacttttacagattcaaggtgaaagagattgtcaagaatgagaagctgaaaatacgtcgcattgaggagccaaattctattctaaagcccatccacaagcaaattcacaacctgattagtcagctccccgcaccggactacctattttctaagaagaaatcatcctgcgtgctgaatgccaaggtccattccctcgctaaaggcaaaacactgaacatcgatatcgagaactttttcccttcaaccgccaagtggaaagttcagaacttcttcggctattaccttcaatataatagggatgttgccgctttttttgccgacatttgtacggtggacggacatattccaactgggagtcctttatcgttgatgcttgccttctgggcaaatcagcccatgttcaacgaactgaacaagctctcaaaaagtcgccaaatcaccatgacaatctatgttgacgacatcagcttcactggggaggctgtgtccgagaagtttaagaacaaagtgatagaaatcgtcaacaagcatcaccacactgtaaatgcggacaaggtcagatttttcggtaaggatctgaagttcattaatggtatagccatagtcaacaaccagttggaacctagcaacgaattatctggcaaggtgcggaatctcaaaaaaagcaaggagatccagtacattaaaaatctgaacggaaaaatcgggtacatcaagtatatcaagaaggtggattccctgaacagggacatcacaaccgaatgcaaatga

SEQ ID NO: 10514 - RNA, 912 nt, synthetic construct
  source 1..912: mol_type = other RNA
atgtcttcacaactgaaagggaattacgagttaaaccagtgtgtgatttacaagctgaagtccaaacggaaattgaaaaaactcctgaatttgtccgaaaatagcaacctcaaaatctacttcaacgacgattatttctcttgctttgacctcatgcaggaagacggctcagccagaaatattcaaaccccaattaacgaactgcagcagattcacattcgcctggcaaatttcttcaagtatgtgaagactcctgattatcttcattccggtaagaaaaagcatagtatagtcaccaacgcgaaagcccacattgatagctcaaagcctaccctaacaatcgatattgccaagtttttcccatccaccaagcgggagaagatcttcaacttcttctacaagaagatgcaccagagcgcggacgtagcagacatattatctcgcttggtatgttacaataaccacgttcccactggtagttcgatctctatgctgatagctttttgggctaacaaagagatgtttgacgaactttacaaactgtgcgaggctaacaacatcattatgacggtgtatgtggatgacatcagttttacaggaaatggagtcgggaaactctttctaaagaaggttacagagatcatcgagcgatatggcctgaacatcaagaaagagaaggtcaagtttttcaaggccaatagccccaaaaccatcactggggtgatagtcaagaacaatagaatttacgccaggaacgaacactacaaaaaactgagggtgatggaaagcgcctataaaatcacaaaggttgaggatgtgattgagaaaggcatcatgcagaaggcatataatggacagctcgcttttctggtccagatccatccgcaacttcgtaataagatggtgttctga

SEQ ID NO: 10515 - RNA, 903 nt, synthetic construct
  source 1..903: mol_type = other RNA
atgacaaaaatgacccctcgttgtagcgcaaactatgacattagccaatccatactctacaaactgcactccaagaagaaattgtctgagatccttggcctccccttatcagtcctcaagatctgcaaaaacgatagctattacagttgcttcgacctcgagcagaagaataagatcaggtcaatccaacagcccattgaccagctgtttataattcaccagcgcatcgcaagcttattaacgagaatttaccaccctgattatctgcatagtggaagaaaaaagcattcgattatcaccaacgcctcccagcatctgatttcggataaaaaaaccctgaccatagatattgagaaattctttcccagtaccacacaaaacaaagtgtttcacttctttcggacaatttttaagcagtctgtggacgttgccgatctgctcagccatctgttgaccttcaataaccacgtgccgactgggtcccctgtatcaatgagtctggcgttctgggcaaataaaaatctcttcgacgaactatctaggtttagcaaaaatcgaaacactatcatgacggtttacgtggatgaccttacatttactggctcaggggtcaactccaatttcctaaaaaacgcttctaagatcatcgaaaaacacaacctgaaggttaagaagtctaaggtattcttgtacaaggaaaaccaggccaagtttataactggaacagtggtccttaataacaagctggaggccgagttcaaacagtttaaagctttgcgcgtgagcgagttcctgtttctcaatgacccaaagaacgaagtgtatcggaatgcttacaatggtaggctggccttcctttcccagatcaagccaaacctgaagatcaagatgaatttcaagtga

SEQ ID NO: 10516 - RNA, 936 nt, synthetic construct
  source 1..936: mol_type = other RNA
atgaatgtgcacaacggaatcaaaatcgaggacagttccctttacaggattaacagagagtgtctatttctgctgttaggtatcaagaataatgacgagctgaagactctcctttctaacaacaactataaggtttacactgttggaccaaaaaaccgcattatagaagagccagacaaaaaactcaagaacattcagacgaagtttaataagctgcttcagcaaatagaaacccccccctacgtcttcgctgggaggaagaaaatgaatcatatctcaaatgccaaggcacatattgattgtaatgacatgatctgcgctgatatcaaaaaattcttcccccacacaaaaatcaagtatctgcaggaattcctggagactaatctcaaatttagtccagacttggccctggacgtagccaacctgctgacaatcaacggccatttacccactggagccccatcatcccccctccttaccttctggtcttataaaatcgtgtttgacaagatctacgatttcgcgaccaatctgggtattaccatgactatatacatcgatgacatgacattttctagcaaaagcaaagtcagcaagaaactgattcctttcgtgggggcagaattgacacgggtaggcctggagttgcacccggagaagttaaagaactttaagtgctcgaagtacaaacatgtgaccggcgtctgtatcgatcggaaacacagactcgtggttaagaatgagcacagggacaacttgctaaagatcctcaacagcaaggatgatattacgcagctgtccaccgagcagattgaaacctgcataggcatgattaaatccatgcaacttattgaacctaagattttcgagcctacattgaagaagctgaaggaaatctataaactccgtcctaaacgaatagtgaagaagcgctga

SEQ ID NO: 10517 - RNA, 924 nt, synthetic construct
  source 1..924: mol_type = other RNA
atgaccattaaagataacttcaaaagcttcgagtccctggataagaccctgaaactgttggacgtgagtctggaggagatgcaacaggcaatcaataagggttacaggcgctacaaaacatttaagaatggcaaatttcggtggatcgaggaacctaatgacgaattgaagattatccaacagaaaatcctgctttacctccagaataatctggaatgtccaacatattgcacggctggattcaaaggccagaacaatatcaaaaacgccgaaaagcatagaaataaacgggaagttctaacaatggatattagccactattttccaaacactcaagagaagtacgtgcgaaaaatattttctgagttcattggcgtagacgacaacgttcttaacttgctagtgaagataaccacctttaacgggtatttacccactggggcagcaacctccacaatattatcttgctttgtgcacaaggagatcttcgacaatattttcaagaagatgaagagcctggacattgacatgaccgtgtatgttgatgatatcacactctccacgcacaaacatatttcaaactgggtcatcagccatatcaacaactctcttcagtcacacggcctcttcctgaaaaagtcaaagataaagaggtatgggtacaagcacgccgtggtaactggagtgcatatcgctcagagcggaaagatgagtgcgcccttcaagattggtcacagtgctatctgtgccctgtgcgataaagacctgaaacagatgtctctcactgagctccgcaaaattatagtcaagatttcgtacatccagcagtttaaccctttgaagatgatcaaagtcaagaaacaagccatcaaacagcttaagaagctgcagaagatctccgccaataagaatgaaagaatttga

SEQ ID NO: 10518 - RNA, 954 nt, synthetic construct
  source 1..954: mol_type = other RNA
atgaatacgctcatgaaaaagcgctacgacattacgcaatgctctttctacaagtgtcgatccaagagacggctaatgaatctcctgatgttgaatgaagaagagttcaagaacatcaagaagaagatttgctaccactcatttacccaggcaaaaaaggatggtgacaagagggtgataacagctccgaacgaggagttgaaacgtatacagaagcgcatactgaaactcttcagctatgtgaagcgtcccgaatggttaatctcaggagaaagagggaaatcctatatcgataatggccgatatcacattaacagcaactatttcctgaccatggatatccgcaagttctatgataattgcaaaagggagtacgtgtaccggttctttaatgacaacctggaaatgtctaaagatactgccgccatcttaacagacctggtgacatatgagggaaaagtgcctactggctgtccaactagccagataatcgcttattacgcctaccagaagatgttccattccatccacaaagtggcagaaatgcacgggtgtaagttttcactgtacgtagacgacatgaccttttcttcctcaagtccatttaatcccgattcgctacggaacgacattgacaaaattcttaggaagtatggtcaccgccctaagtactctaaagtcaagtactatagcaagaacaagttcaaactgatcactggggttaccatcagttctgatcataagctgttggtcagtaacacacttcggaaaaaaatttacgacggcgcgatgtcccaaattgagatggatagacagaagaaggtcaccattccaaaagagcttaggagactcaaaggaagaatccaggctgccagggtggttaatccccatatctttcctgaggtaaaccggtttgttgaggaaaaactgtatagcagtggcagctacaagtga

SEQ ID NO: 10519 - RNA, 966 nt, synthetic construct
  source 1..966: mol_type = other RNA
atgacacaaatacgtaaaaagcacgaactggatcagtgcgccctctacaaatgcaaatccaaacgcaagctcgcttactatcttaagattgattacgagaagctgaagaccatcagcaacataaccctgtaccactcgttctcactgcagaaaaacgatggcgaccctcggcttattactgcccccaaagctgaacttaagaaactgcagaagcgcattttgagactgctcgagaaagtgaagcggccagactatctaatcagtggcgaaaaggggaagtcctacttgaacaatgcgctcactcaccaacattccgactactttttaaccattgatatccgcaagttctacgataattgtaaacgtgagtacgtgtacaacttcttcattaaaatgcttcagaccagtaaggacgtggcctgcattctgactgacattattacgttcgacaataaaatccccactggatgtcctacatctcagatgctggcctattacgcttattttgatatgttcactgagttgaaggagataagtcagcggtttaacagcatcttcaccctatatgttgatgacatgacgttttctagcaagacaagctttaatccaaaagcattggccaatgaagtggatatcgtactgaggaagtacggccacaggcctaagtacaagaaggtgaagtatttttccaaggaggactttaaactggtgacaggagtcgtcatcactaaagaacatgctctcaccgttcccaacagactgagagagaaaatttataccgggtctatggccgagaaggaaagattatatacatataacccccgagaaatttctaaacggatcaagaagctcaggagcatcaagggtcaggtccaggcagcaaagaatatccaaaaaacaatcttcccggagatcgataggctgatagacgacaaattactggacatctcatcacatacccgatga

SEQ ID NO: 10520 - RNA, 960 nt, synthetic construct
  source 1..960: mol_type = other RNA
atgtctctgaagaaaaaacgctacgatctgaatcagtgtgccctctataagtgtagagggaagggacgattggcttacttactccatatgaataaggaggaatttgacaatctagagaaactgatcgaatattactctttcactaccgataagaatgacggcgataaaagactgataaccgctcctcgtaacaaccttaaaaaaatccagaagcggatcctgaagttgattacattcgtcaagcggcccgagtggctgataagtggcgaaaggggtaagaactatattgacaacggcaaattccaccagcagtcccattacttgctcacgatggatattaagaaattctatgagaactgcaagcgggaatttgtgtatcggtttttcaggtacacaatgtgcatgagcggggatatcgcggaaatcttgaccaacatcgtaaccctggaacaaaaaatcccaacaggctgtcccacttcacagcttatagcatactacgcatatcaggagatgtttgagaacattaagaagatcgccaacaaatacaattgcgtgttcactctttacgtggacgacatgacctttagcagcaaaaggccgttcaatccagacaagctgcgaaacgagatagatattgagctgaggaaatacggacaccgccccaagtatagcaaggtgcagtattattcccgcaactctaataagctggtgacaggagtagttatctccaaggatcacaatctcttagtggcaaacaagctgcaaaaaaagatctacgacaacgctatgaaactgaagaaagtcaacggcaacaaaaaagaagccaagattgcctaccaactcgaaagtgacctgagatccctaaagggtcagctccaggctgccagaaatgttaagaaagggatttttcctgagattaatcgcttagtcgagaattcgatgatcaatctttcaaagtga

SEQ ID NO: 10521 - RNA, 948 nt, synthetic construct
  source 1..948: mol_type = other RNA
atggcccgcattgtaaagcgttaccggttggatcagtgtgccctttacaagctgaagtccaaaaaaaagctggcgcattatctgaatgtggactacgagactttcaaggaaaccggcgagcttatccactacagtgctttttccctcaaagcagagggaaagaaggaccggtccatcacagctcccaacagtaaactgaagagtctccagaagcgagttcacaagctattactcaagatcgaacgtcctgaatggcttattagcggtgaaagaggaaagtcctatatcgataatggcaagatgcatcagaaatgcaattatgcgctgtgcatggatatcagatccttctacactaacacgaaacgcgagtatgtgtttcggttcttcattgaggaaatgttaatgagcaaagatacggctaagattgttaccgacatcttgacatttaaggactctattccaacaggctcgcctgcatctcagctcattgcatattacgggtatcacaggatgttccaggagatagagtcaatctcaaccaataaatatggttgtgtgttctctctatacgtcgacgatatgaccttctctagcgagaagccttttcaaatgaaaggcttgagaaacgagatcgacataatcctccggaaatacgggcataaaccaagctataagaagaccaaatactactcaaggaataaagcaaaacccattaccggcactactgtgagtagcaagcacgagctgctgatcccgaactctctgcaattgaagatcattaggggggctgaactgatcctggagaaaccccaggaactgtccagggcccagctcgctagctttcgcggacaagtccaggccgccagaataattcagaaacgagcctttccagaattaaacaagctggccgaagagatgctgtcaaacccccttaagatacctacatga

SEQ ID NO: 10522 - RNA, 927 nt, synthetic construct
  source 1..927: mol_type = other RNA
atggcacgcattgtgcagagatataaactcaaccagtgcgtgttctacaaactgaaatcaaagaagcaactagcttactttctcaaggtggattacgaaaccctccgggaaattaacgagctcatccattacaaatccttttctttgaggaccgaagggaaaaaggatagggatatcacagcccctaataaaaagctgaaggatctccaaaaacgcattcacaacctgcttctcagaatagaaagacccgactggttgataagcggcgagcggggcaaatcatatatcgacaatggaaagatgcatcagaactgcaattatgcactgtgtatggacatcaagtctttctataggaatactaagagagagtatgtgtttcgcttctttaccgaagagatgctaatgtcaaaggacactgctaaggttgtcacagacattctgacctttcagaattcaattccgacgggatctcctgcttctcagttgatagcctactacgcataccaccgtatgttccatgagatcaagtccattgcgacgaacaagcacagctgtatcttctccttatatgttgacgatatgacattcagttccgatactccattcgaagtgaacgtacttcgaaaggagatcgacatcttgctgcggaagtatgaccacaagcccagctactccaagaccaactactacagtaggaacaaagctaaaccagtgactggtacaacaataagcaagaaccacgaactgcttattcctaataccctgcagatgaaaatcaagcgagatagtgagatggtccttcagaaggggcgggaactgagcactaaacaaagagcctcgtttaatggccgcgtcaaagccgccaggattatcgagaaactggcgttccccgagttaaacaaactggccgagcgtatgctgaattga

SEQ ID NO: 10523 - RNA, 969 nt, synthetic construct
  source 1..969: mol_type = other RNA
atgaaagcccccattaagaggtatcctctgcatcagtgcgcattgtacaagtgcagctctaaaaaaaaactcgaacttaggctcaagcttaatgccggcgacgcctccctcctggagaacatgatccaataccataagttcagtatcccaaagaaagacagcactaaacttcgtgacatcacagcccctgccgatgacctaaaaaaggtacagagaaggatcttacggttgctgcaaagaattgagcgtccgcagtggctgatttccggggaacgcggtaaaagctacgtggataacggacgggcacacataaattctatgtatcttctagccgctgacataaaaagcttctacgacaactgtcgcagggattacgtttaccgctttttcaccgagagactgaaaactgccccagacattgcgaagttgctcaccgatatcatcacgtacaagggagggatccctacagggtgccctacttcccagattattgcttattatgcttatgagcggatgttctcggaaatcgcacaggtggctgagcggcacggctgtatctttacactctacgtcgatgatatgaccttttcatctcagacgccctttgatcccaagcgactgaagagggagatagaaatgatactgctcaggtatggccatcgcctgaaggattcaaaggttaaatactatgcgagagacgacgccaaaccagtgacaggcactattatcactaaggagcaccgcctggctaccccgaaccaattacaaaaacggatagtgaccgaattccaggctttgaaggaacagatgaacggccaggccctgacccctgaggaaaagagtagatatgcgaccctgcagggtagaatttacgcagcccgaaatatcgaaccatgtatctttcccgagattcaccgacaggtgacagcagtcaagcactcccccgagaatgggaagggagtcgagtga

SEQ ID NO: 10524 - RNA, 930 nt, synthetic construct
  source 1..930: mol_type = other RNA
atgaatagcgccatgcacaagtatgaaatcaaccagtgtgctctttacaagtgctcttcgaaaaagcgcctcgagcatctgttgttattgaaagagaacgaactgaagcagatcaagcagtatacaaggtattacaactttagcacccctaaaaaagacggatctccacgcaagataacagctccatgcgataaactcaagaagattcaacgccggattctgcggctgctgtcccccataaaacgtcccgattggctcatctccggtgagcgaggcaaaagctatattgataacgggaagagtcatattaacagcaaatacttcttgaccatggacatcaagaatttttacccgaattgccagagggagtatgtgtttagattcttcaccgatgttctgctaacagcccccgatatcgcaaagattctgactgacattataacctacaacaatggcatccctactggatgtcctactagtcagctgatcgcctattacgcctatgagaatatgtttaagagtatctacgagatctctttgaactatggctgtaaattcactctgtacgtcgacgacatgacattctcatccaattttccattcgatcccaaaaagctcgaacaggaaattgacatacagcttagaagatacaaccacaaaccaaagtactcaaaggtgaaatattacccggcgaatacatataaactagttacggggacgactgtatcacctgacaataagctcctggtgaccaataacctgcgacaaaagatagtggagaattttaagatcctcaaaaactaccagaagctgtccaacgacgaacggaagaagaaaatcgattctcttaaaggtcagattcaagcagctaggaatgtcaacaaaaccattttccccgagatcaataggttaaccaacgaccttaagtga

SEQ ID NO: 10525 - RNA, 936 nt, synthetic construct
  source 1..936: mol_type = other RNA
atgagggagaagagccacaaatacgacatcacgcaatgcgcattatacaaaatcaaaggcagtaagcagcttaagaaagtgttgtgtataacggaggaggagtataaggatatcctgtccatcgttcactatcattcctttcagatcgacaagaaagatagtaccgaaaaacggaatattacagcacccgataagagaatcaaggaaatccagacccggatactgaagctgctgcagaatgtcgaaagacctatctggttgattagtggtgaaaaaggcaagtgctatattgataacggaaaatcccatctcaactctaattacttccttaccatggacatcaagaaattctatgataactgctctagagaatacgtctttttgttcttcaagaaccgcctcatgatggctggcgacctcgctggcctgtgtacagacatagtgacttacgacggcgggattcctacaggctgtccaacctcgcagatcatcgcctactacgcctacgaatctatgttcaacgagatatatagcgtagcttgtaaatacggatgcgaatacactgtgtacgttgatgacatgaccttttcagccaaggagccatttgacattaacaggatgaaaaatgaggtagattgcattctacgcaaatatgggcacaaacccaagtataaaaaggtcaagtattacagcaagggaaagtccgtgcctatcaccgggacaatagtgactggtcaacatgagctgaaggtgcccaatcgactgcagaagcgcgtttatgacgattttcaggagctgaagtatttaggagggaaggagctctcagacattgagattcgaaagctaaacagcctgaaaggtaggattctcgcgagccgtaatatcgaagaaggaaaatttccggagatcaaccggcttactaatttcatttcatga

SEQ ID NO: 10526 - RNA, 936 nt, synthetic construct
  source 1..936: mol_type = other RNA
atggcgaagcagtataagaggtatgacatcacccagtgtgccctctataagtgcatctcaccgtataacttgaaacgagtgctcaagataaccgatgaagaatacaaagacatcgtgaaaatcgtcagataccacacattccagatcgacaagaaggacggggtcgaaaagcggaatatcactgcccccgatcggaggatcaaagagatccagacacgcatactgcaactgcttcagaaagtcgagaggcctgaatggcttatttcaggcgagaaaggcaaatgctatattgataacggcaaaaagcatatacactcgaattactttctgaccatggacataaagaaattttacgacaattgcgaacgggagtatgtgttccgatttttcagagataggctgctcatggccggggacctagcaggtctgtgtacggatatcgtcacctacgaaggagggattccaactggctgccccactagccagctgcttgcattctatgcttacgagaacatgtttaacgagatttctgaggttgcttacaagtacggttgtatttattccgtatacgtggatgacatgacctttagtagcgaggtggctttcgatgtgaaaaaaatgcgttccgaaatcgaccaaaagctccgcaagtacggccataagccaaagtatcgcaaagtgaagtattactctcacggacagtacgttccaattacgggtacaattgtgaccggaaaccatgaattgaaggtacctaatcggttacagaagagagtttacgatgacttccaagagatcaagagcttcgaaggccgtaaagtcacttccgaggagcaaaaaaagattaacagtctgaaaggacgcatccaggcctctgaaaatatcgagcccggaaaatttcctgagattaagagactgacaaagttaattgggtga

SEQ ID NO: 10527 - RNA, 936 nt, synthetic construct
  source 1..936: mol_type = other RNA
atggagaataagtggaaaaagtatgatatcacccaatgcgccttttataagtgtaattcacccaagaacctcaaacgaatactccagataaaggatgaagagtacaatgacattttctccattgtcaagtatcatggcttcagcattgataagaaagacggcattgaaaaacggaacatcaccgcacctgataaaagaatcaaggccattcagggcagaatcttacgtctttttcagaaagtggagcggcccgagtggctgattagtggtgagaaaggaaaatgctacattgataatggcaagcagcacgtcttctctaactacttcctaacaatcgacatcaagaagttctatgacaattgtaagagggaatacgtgttccgcttttttaaggatcgcatgctgatgacaggagacttggccggactgtgtaccgatatagttacttacgaaggtgggatcccgacagggtgcccaacttcccagcttatcgcgtactatgcctatgaaaatatgtttaaggagatctacgaggtagctacggaatactcatgcatctttaccgtttacgtcgacgacatgacttttagcagcgagaaagcattcgatgtgaataaaatggttaacaaggtggactgtaccctgaggaaatacggtcacaagcccaaatacaagaaggtaaagtactattcccaggggcaatatgtgcctatcacggggaccatagtgacaggaaaacatgaaattaaggtcccaaaccaattgcagaaaaaagtgtatgacgagttccaggaaatcaaaactctgaacaccgaaaacctgacagacaaggagcaaaagaaaatcaacagtctcaagggccggatacaggcttctagaaatattgaggatggcaagttccctgagattcgaaggctggtgaacaaaatcgggtga

SEQ ID NO: 10528 - RNA, 936 nt, synthetic construct
  source 1..936: mol_type = other RNA
atgtccaaggtgatcaagaagtatgacatcacacagtgtgccctttataagtgtaggtccccaaggatcctgaaaaagcgtctcgtcatcaaggatgaagagtacaaagacataaccgccatcgttaaataccacggttttcagatcgataagaaggatagcactgagaaacgaaacatcactgcccctaacaaaagaattaaggaaatccagactagaatgctgcaactactgcaaaaggtgatgcggccagagtggttaattagtggcgagaagggcaaatgttacatagacaatggtctgaaacacatccatagcaactattttctgaccatggacatcaaaaagttctacgacaattgcaagcgcgaatatgtttttttgttcttcaagaatcgcctgtgcatggcaggggatatcgcagggatttgtacggacatagtaacctataaaaagggaattcccactgggtgccccacatcgcaattgttagcattttatgcctacgaaaacatgtttacggagatttacgaagtggctcagtcccatgggtgcatgtttaccctttacgtcgatgacatgaccttctcatctccaaaggctttcaacgtgaaagagatgattcgcgagatcgattgcattctcagaaaatatggccacaaaccgaagtataagaaggtaaaatactacagtcacggaaggttcgttcctatcacaggaacaattgtgacagcgaatcatgatataaaagtgcccaataggcttcagaagaaggtgtacgatgacttccaggagctgaaagacctgtcaggcaaaaaattgtctgtcgaacagcagaagaagatcaatagcctcaaaggacggatacaagccgctcgaaacattgagaagaataagttccctgaaattaaccggctcacccaggctattggctga

SEQ ID NO: 10529 - RNA, 933 nt, synthetic construct
  source 1..933: mol_type = other RNA
atgcggaaggagacgaaacgatataacatcacacagtctgcactctacaaatgtcgctcgcccaagaaaatcaagaccttgctgcggctggaggacacggaatataagaaaattaccgaaatcgtgggataccacgagtttcaaatcgataagaaagatgggattgagaagagagatataaccgcccctaaccgccggattaagcagattcagtctcgagtcctagaactgattcagaaggtggagaggccgcagtggcttatctcaggtgaaaaaggaaaatgctacatagacaatggaaaggcacatatcagcagcaattatttccttactatcgacatcaagaagttttatgacaactgcaaaagagagtacgtatatcagttcttcaagaataagctgcagatgagtggagacattgcaggcatttgtaccgacatcgtgacttttaaccagggcatacccacaggctgcccaacttcccaactcatcgcttactacgcctacgaacagatgtttgatgaaatctatcgcctggctgtcgagcatggttgtatcttcaccttatacgttgacgatatgacattctcatccatcaaggcttttgacgttaacaggttggtaaaagagatcgactttaaactcaggaaatacgggcataaacccaagtataagaaggttaagtactattcccacggcaaacctgtcccaataactggcgccattattaatgcgaaacacgaaataaaggtgcctaatagcctgcagcagaaggtgttcgagggtttccaggaggtgaagaaactgcaagggcaggaactgagcggcaacgatcaaaaaaagcttgatagactcaaagggcagattcaggccagtagaaacattgagacaaataaattcccagagattaagcgtttagtgaatcaaatctga

SEQ ID NO: 10530 - RNA, 945 nt, synthetic construct
  source 1..945: mol_type = other RNA
atgaagaaccccaagtatcggtacgagatcaatcagtgcgcactgtacaagtgtcagagtaaaaagaagatttgctcactcctggatataagcgacagcgaattcaatactttgcgcgacagtgtgaaataccactgcttcgagatctataagaaggacaattcagacaaaaggaaaataaccgcgccaaatcagcgactgaaaattgttcagaaaaggctcctacaactgattcaatacgtgaaacggccagattggctgatatccggagagaaaggaaaatgctacattgataacgggaaggcgcatatcatgtcccactacgtgcttacgatggatatcaagaacttctatgacaactgtaaccgtgaatatgtctttcgattctttaaggacaagatgctgatggccggtgacatcgccgggttttgcaccgacctggtgtgtcttgagggcgggatccctacaggctgtcccacttcccagctgatcgccttctacgcatatgaagccatgttttttgagctctatgaagttgcctgtgaaaacaagtgcatcttcactgtctatgtagatgacttgacctttagcgctgagaatcccttcaatgtcaatctcttgaaaagggaggccgacatcagactacggaaatatggccatcgccctaaatacaagaaggtgaaatactatggcaaagacattccggcacctattaccggtacaatcctgatgcctgataacaaactgaaagtgcccaacaaccttcaaaagaaaatttacgacaacttccaggatattaagaatctctgtgatgttgaggctatcgataaggtggatttaaagaagatctacacattacagggccagattcaggcagctcgctcgattgaaccagaaaagtacaaggagataggaagaatctcttctgctaaggtacaaagatga

SEQ ID NO: 10531 - RNA, 930 nt, synthetic construct
  source 1..930: mol_type = other RNA
atggttaagaaatactcgatagagcaatcagcactgtacaagtgtagatctctgagacggctgaacacattactcttcttggatacggatagcaaacagatcgccgacatcaagaagtactactctttcgagataaataagaaggacggcattgccaaaaggaagataactgccccaacaaaaaagctgaaaacagtccagaaaagggttctgtatctacttcagaggatcgaacgcccaaattggctgatctcaggcgagaaggggaagagttacattgataacggaaaagcccacatttatagcaactactttttggccatggacattaagtctttttatgacaactgcaatcgggaatacgtgtttcgctttttcaaggattatctgcaggtgtccggtgatatagctggaattctgaccgacattgtcacttatgataacggcatccccacggggtgccctacctctcaactcatcgcgtattatgcttacggcaaaatgtttcgggagataagtgaaattgctcagaagtacgagtgcatcttcactctctacgtggacgacatgacctttagcagccaggaacacttcgacgacaatagcatgaaaaaggagatcgattgtacactgcgtaagtacggccataaacccaagtactccaagatgaaatattattcccacgggaaggatgtactcattaccggtaccgtagtgaacagaaatcatgagcttaagatccctaacaaacttcaaaagaagatctatgatggattccagaatgtgaaggacgtcgacatcaaagaaatggactgcaacaaaaaaaaggaaatcgcttcattgcgagggaaattacaggcagcaaagagtattgagtgtaacaaattctccgatatcaataagatcgtgggaaatattgagaaacagtga

SEQ ID NO: 10532 - RNA, 1035 nt, synthetic construct
  source 1..1035: mol_type = other RNA
atgcgtggcctcatgaaaaataagtcttatcccatcaaccagtgcgccctgtttaaatgcaatagcaagaaacgactagaacatctgctgactattgagcagggcgatctaaagctcgttcaatctatcataaagtacagcaacttcgaaattgataagaagaactccacagagaaacggaagataaccgcaccacaaaagactctgaaacagatccagagacgcattctttacttattacagtccattgagcaccctgaatggctgatctccggaacaaagggaaagtcttacatcgacaatggcaaataccactgtaagtcaagttacgtgctcacgatggacattgagaaattttacgataactgtacccgggaaaatgtgtatagcttcttcaagaacaagatgtgcacaagcagtgacgtcgcagagatcttgactaacatagtgacattcaataacgggatcccaacagggtgtcctacaagtcagatcattgccttctacgcatatgaagagatgttctccaatatcaagaaaatagccgacaagtatggttgtatattctcggtatacgtggatgacctgacgttttcaagcgataaagcctttgacgctgaaaaattgaagcgggatgtggatatcgaacttaggcgatataagcacaaacccaagaacaagaagatcaagtattacagcaagtatgaagctaagccgataactgggacaatcgttaccaaagaacatgagttggccacccctaatagtctccaacataagatttatacggattttcaggacatcaaaaacgactgcctgtcctcagacgaggagctgtacaaaaagatccaggtcctggagggtagaatccaggcttctaaaaacattgagattggagccaacaaatttccagagatttctagacttaccaataggattaaagagaatacccccattcccacccaacctaccgtcactaggaaaaataccaacaagaaggctaaaatccgcattaaaaattcaactcaggcgtga

SEQ ID NO: 10533 - RNA, 1011 nt, synthetic construct
  source 1..1011: mol_type = other RNA
atgaaggcaaaaaagtaccctttgaaccagtgtgcgctttacaaatgcaactctaagaggagactagagaaaacgctcactattgaacagggacaattgaagttgatcgattccgtaatcaaatactctcacttcgaaatcgataaaaaggatagtaccgagaagagacaaattacagccccaaagtataccctgaaacagattcagaggcgaatcctgcggctgatccagtttattgagcggcccgaatgggtcattgctgggacaaaggagaagagttatatcgataacggggaattccacctgaaatcaaactatgctcttatggtggatataaagaagttctatgacaattgcaagcgcgagtatgtctacaggttttttagggacaaaatgctaaattctcccgacgttgccgaaatactgaccgatatagtgacgtatgagggcggtgtgcccacagggtgtcccacatcacagctcatcgcctactacgcctatgaggacatgttcgcgaacattaaacgaatagcagataactacggttgcttattttcactgtatgttgatgacatgaccttttcgtccgaaaagccatttaataaagacgtgctcaaacgcgaaatcgacattgagctgcggagataccagcataagcctaaatacaagaaggtgaaatactacagcaagaacgacccaaaacctatcaccggaactatcgtgactaaggataatacacttgtagcccccaataaactgcaggagaaagtttataagggcttccaggacataaagaacctggacatcgacgataattccgaagagactattaagaagatcgctgcactccagggaagaattcaagcctcccgtaatattgaaaagaataagaagttcccggagatcgagcgcattactaaacaaatcagcaccgagcatagcggcagtgtccctgctaacccgcctaaaaagagccgcaaacgtccacggaagataaggattatcaaatga

SEQ ID NO: 10534 - RNA, 1029 nt, synthetic construct
  source 1..1029: mol_type = other RNA
atgaaagccaacaaacaaaaataccctctggaccagtgcgcgctatataaatgtcgaagccgtaaaaagttggaatccattctggcaatagaacagggcgatttgcggaacatccagtctgccatcaagtacagttcatttgagatagacaagaaggattcgagcgaaaagagaaccatcacagctccaaaaaggacaattaaggctgtccaggcccgcatcctgactctgattcagcgaatcgaacggccagaatggcttatatccggggagaagggaaaatgttatatcgacaatggcaaggcgcatattgggagtgcctacgtgctgactatggacattaagaagttctatgacaactgccggcgcgaatatgtgtataggtttttccttgacaagatgcagacggcaccggatgttgctaaaatcctgaccgatattgtcacgtacaagggcggaatacctacaggttgtcccacatctcaactcatcgcctactacgcatacgaagacatgttcaaacagattcaggcttgcgccgagtcctatggatgcatctttactttatacgtggatgatatgaccttctcctcaaaagaccctttcccccaggagaagctgagccgggagatagacattatcctccgtcgctacggtcataaacccaagtacaaaaaggtggttttcttcgcaaaggagaaacccaagccaatcaccggcactatcgtcaccagcgatcacgagttagaggtgcccaacagactccaggagaagatctataacggatttcaggggatcaagcaactctctgagcaaaatgacttcaaacagattgatcacgctgcacaaattcttctggggcaggtacaagccgctaagtcaatcgacaataaaaagtttccggaaattgaacgcttgaccaaggagatcaggaatattcaggagcctcagagggattttaaaccaaagccaccccatagaaggaaagccaaaggcaagatacacattcctaagcctagaacaaattga

SEQ ID NO: 10535 - RNA, 1035 nt, synthetic construct
  source 1..1035: mol_type = other RNA
atgaaaaataaagtccctatcaagaagtacgatatcacccagtgcgccctttataaatgtaggaccaggaaacgactcgagtatctcttgcgtctcgaccctggcggactgaagattattgatggcatcatcgggtaccataagttcgagattgataaaaagcacagtgatgagaaaagagagatcactgctcccgataaaaccctgaaggccatacaacgcaggatcctgtacctgctgcagcgggtgatacggccagagtggcttatttcaggcgaaaagcagaaatgctacatagataacgggaaggcacacctgaatggcaaatatgtgttaaccatcgacattaagaagttttatgacaactgcacgagagaacctgtttatcaatttttcgtgcagaagctggagactagcccagacgtggccgaaattttaacaaacatcatcacctacaacgggggaatcccaacaggttgccccacaagccagattatggctttctacgcgtactcagatatgtttagcgaaatttttgacttggccaagcaacacggatgtaagtttacgctgtatgtcgatgacatgaccttctcaagcaaggagcctttctccccacatcagctatctcagatgattgacagagttcttcgcaaatacggtcataagcctaaatacccgaaagtaaagtactatggcccctcggactacaagccaataactggcacagtcgtcacaccggagcactctttggctgtgcccaacgggctccagaagaccatatatgatgctttccaaactgtgaagcccctcatcggggtggaaacatgttctgaagaggacgcccggcaaatcctgagcctgaagggtcagattcaggccgcatgtaatattgaagacggaaagtttccagagatacgaagactaactaatcagatcaaagtacccgactcccagtccgtttccaccaggaaacgccagcatcaccgtcggagtaaaaagatccacatcaaacagcaggcacctattaaatga

SEQ ID NO: 10536 - RNA, 1011 nt, synthetic construct
  source 1..1011: mol_type = other RNA
atgaaaaacaagactcctctgaagaagtacgacataacacaatgtgcgctctataagtgtaggaccaaaaagagactggagtatctgctgcggctcgaatcaggctcactaaagatgatcgactccataatcgaataccataagtttgagacggataaaaaacatagcactgagaagcgcaagataacggcccccaataaagccttaaagactgtgcagaagcgcatcctttacttattgcagcaggtgctgcgacccgactggctcatttcgggcgagaagcggaagtgctatattgacaacggtaaagcgcatttggatgggagatatgtgctgaccatcgatattaaaaagttctacgatcactgcacaagagaaccagtataccacttcttcgtgcagaaactaaagacaagcccggatgtggccgagatcttgaccaatattatcacctacgatggctcaatcccaacaggttgtcccacctcccagattatggccttttacgcttactttgatatgttctcagaggtctatgacatcgcccagaaatgcgggtgcaagtttactctgtatgttgacgacatgaccttttctagtaaagaaccatttagcccacaccaactgcgacaaatggtagaccgtgtgctgcgcaagtacgggcaccgtcctaaataccccaaagttaagtattacggaccctccgattacaaaccaattaccggcacaatcgttactcctagacagtccctggcagtccccaacggactgcaaaagaccatctataatgcattccagagtgtgaaaccgttcatcgacgcagaaagccacagtgaagaggacgtcaaacagattctctccctcaagggccagattcaggctgctcggaacattgaggaaggaaagttccctgagatcaggaggcttatcaaccagataaggattcctgataatcagacagcttctaaacaaaagtcttatgcccggcttcatagcaaaaagtctgagtga

SEQ ID NO: 10537 - RNA, 984 nt, synthetic construct
  source 1..984: mol_type = other RNA
atggagaaccccagcttaaaaaagtatgatattacccagtgcgccttctataaatgtcggaccaagaagaggctggcctttctattgtgtcttagtctgaaagagctcgagcacatttctggaatcatcgagtaccatagcttcgagattgacaagaagaatagtgaagagaaaaggaagatcactgcaccatccaaagagctcaagaccatccaaaggagaattctggcactcttacagcgcgtgattcgacccgattggctgatctctggcgaaaaagggaagtgctatattgacaacggaaaagcccacataaatggaagatatatactgacgatggatatacggaagttctatgaccattgtgttcgtgaagcagtctaccaattcttcattcagaagatgaagacaactcctgacgttgccaaactgcttaccgatatctcaacctacaacctcggcattccaacaggttgccctactagccagctcattgcgttttacgcctatattgacatgttttcagaaatcgcggccatcgctcgggagtatgggtgcgtgtttaccttgtatgtagatgacatgacattttctagctccaaacctatccaggtgaacaatttgattcggaagatcgactgtatcctacgcaaattcaaacacaaacccaaatactccaagatcaagtaccatcacccgtcagattacaagcctgtgacgggcactgtcatatcgccaaatcagacactgcttacaccaaattctcttcagcacaagatttacatcggcttcatcaagttgaagcccaagctgtttgaaaataacgaggccctcagtaatgaagagggcaaagagctgcaatccctgaacgggaggatacaggctgctagaaacatagaagagggaaagtaccccgaactgaaacgcatcatccataatagccaggcagctatcagatacaacggtaagcgaaagaaaatttga

SEQ ID NO: 10538 - RNA, 924 nt, synthetic construct
  source 1..924: mol_type = other RNA
atgcaagacaaatttagacgatacgacatcaatcaatgtgcgttgtacaagtgcaagagcaaaaaaaagctcgaaaagcttttgaatctgcagatcggtgaacttaaatacattaacgtgatcaccacttactatcacttcgagattgcgaaaagttctagtcacgagaaaagagctgtcagtgcaccttcaagcaagttgaaatccatccagagcaggatactaagcctcatccagtatattaaccgtccagggtggttgatatcaggcgagaaaggaaagtcatatataaacaattcccagtgccatatcagcgccaactatctgctcgccatggacattaagaacttctataacaactgcaagcggaatcccgtttacctgttcttccttaatgagcttaaaacttctcctgatgtggctaacgtgctgaccaatattgtgacctacgaaaatctgatccccaccggtgctccaacctcccagctcatcgcctttcatgcttatactaacatgtttacggaaatcaaccaaatggccctgaattttgggtgtatctttacgctgtatgtcgatgatatgacatttagttcgtctgttcccttcaatcacatgagcctgtcttgtaatatcgacaagattctgagaaaacatggccataggccaaagtacaaaaagctaaagtactactccaagaacgaatctaaacctatcacaggcgccattctcacccctacacacactatcaaggtacccaataagctccgctacaagattcacaacacattccagaagataaagaataactccaacttcagcgatgaggccaaatcagagctgctgacattaaaaggacgcttacaggcagcaaaatcgattgagaagaacattttcccggagatttcccggataatcaattcttga

SEQ ID NO: 10539 - RNA, 969 nt, synthetic construct
  source 1..969: mol_type = other RNA
atgatcaacaaaaacaagctctataggtatgacatctcacagtccgcactgtacaagtgtagaagcaaaaataagttgagcgagttcctaaaaatctcgattaaagatgtggacaagatcattaagtactacaccttcaacatacctaaaaaagatacctccaaaaccaggcaaatctctgctcctcagaaaaaactcaagactcttcagaaacggttgctgtatttaattaagcgcattaagcggccaccctggttgttcagcggggaaatgggcaaatgctatctggacaatggtaaatatcacctgaataatccttacgttctgactatcgacattaagagtttttacgaacattgcacacgaaacgctgtgtacttgttttttcttgagaaaatgcagacctctccagacgtagcaaaaatcctcacagatatcactacactggataaaaagctgcctactggaaccccaacatctcaactgatcgcctttcatgcctatgaggacatgttcaatgagattaacaacctcgcaaagtcgtacaactgtatcttttctctttatgtggatgacatgacgtttagtagctcctaccccttctcccccaagaatctgacttacaaaatcaagaccatacttcacaagtacaaacaccatctgagttccgaaaaggtcaaatactatagcaaagacatggcgaaggatattaccggactgatactcaccaaagacaaccagatagccatcccaaatagactccagaagaagatttatgacaacttctccaagattaaggattatgaaaagatgacagtgtacgataaggagattatcaagagcattaatacgctgaaaggccaattacaggctgccaagaacattaattataatgtcttccccgagatcactcgcatagtttactcaatcaattgcaagacaaacaagaagccgctagggaactcatga

SEQ ID NO: 10540 - RNA, 912 nt, synthetic construct
  source 1..912: mol_type = other RNA
atgatgatgatcaaaaagtatgacatctgtcaatccccgctgtacaaactgaaaaataaaaggcgcctggaaaagattctcgggttggaaaaatacgagctgaataagctcaagttctggaacaaatacaaatcgggaaaaattcctaaggacgatggagactttcgcgagataaatatccccaatttcaagctcaagaaggtacagaagaaactgcagatcctgttaagcaagattcaacgaccagaatggctgattagtggggagaagaataagtgttatattaacaacgcacagtaccacataaagagcaagtatgtgattaccgccgacatcaaaaaattctatgacaattgctctcgtgagagggtgtatctctctctggtgaataagtttaaagtctcatccgacgtggctggcgcgatcacagatattgtcacatataacaagaggattcctacgggtgcctccacctctcagcttattgcttactactcatatgaagacatgttcaacgagatcaatactatctcacacaagtatggatgcaaatttagcttatacgttgacgatatgactttttccagtatcaacccaataaacgttcagtctctaaagagacaaatcgacatcatcctgagaaaatatgggcatcggttgaaaagtaacaagttcaagtactacagcaaagatgaagataaactgatcacaggcgtgacccttaagtcaaataacagtctcgccgtgagcaatcggttgagatacaacataatcaaggatttcaagggcatcaagtaccgaaaagattctaacattaagctacagagcctgaagggtcggataaccgcagccaaaatgatagagaaatccatttttccccagattaataactacgtctccaaccttaattga

SEQ ID NO: 10541 - RNA, 939 nt, synthetic construct
  source 1..939: mol_type = other RNA
atgcgaaaacagcctccgaaattctataacattaatcagtctgctctctacaagtgtcgttctaaaaggaaactcgcagaactactgaagtgcgatctcaagacaatccagcagatggctaaggatattaagctgtattacgacagcttctcaatgtccaagaaagattcagaaaaggttcgcaaagtagatgccccaaatgagcaactcaaaagaacgcagaaaaacattcttaaactcctacagcggattgaaaaacccgactacgtgatgagtggaacgctgggcaaatcccatattgataacgcccagtaccacataaaggggtcctactttttaaagaccgacatcaaacaattctacaataactgctctagggatcgggtgtacagattttatgtggacaagatgaaaactagtcccgatgtcgccaatatcctgactgacttgacaacatacaacaacatcattccaaccggttcgcccagcagccagatcatagcatatttcgcgtatgaggacatgtttaacaatatgtacatcaaggcaaaggagaatggctttctgatgagcctgtatgtcgatgacttagtcttttctcggactgactatatagactataagtcattcttgagagagattgaggttgaagctttgaagttcaatcatagtctgaaaaagtccaaaaccatgtattacagccctaacaggtctgcccttgtgactggggtgattatcaaaaacaagaagatgaagatcccaaatcgcctgcgcaataacaccatccttcaatacaagaacataaagaaggacaagaacaaggatgagaaaaccgaactgagtctgattggcagcatcaactccgcccgaatgatcgagcctaatcactttaatggagtgttctcattctacaaacagatcaagaaaacacccaagtga

SEQ ID NO: 10542 - RNA, 927 nt, synthetic construct
  source 1..927: mol_type = other RNA
atgaagaagaagaaactgaagttttacaacatcaaccaatcattactgtacaaatgtcgctccaaaaaaaaactcgctcagtatcttcattacgatctgaaatccttgaagaagatcatttctgagattgactctcattataacttcttttccaaggacaagaagaatagcgataaaaagcgggaaatcgaagcaccaagcgacgagctgaagaaaatccagaagaacattttgaagtacctgaagaaaatccagaaacctaattatgtgatgtccggtacactggggaagtcgtatattgacaatgccaagtatcacattaacgagaagtatttcctcaaaaccgatatcaaacagttctacaagaattgctctagggaccgcgtatacaggttttttcttgacaagatgtacacgagtcctgatgtggctgagatcctaactaatctgactacatatcggaatactatacctaccggagcacccagttcacagctcatcgcttatttcgcctatgaagacatgtttaacaacatgtacagaaaggcaaagaacaacgggtttaaaatgtccctttacgtcgatgatctcgtttttagcagaaacgattacattgacttcaagagtttcctgcgagagatagagattgaagctctcaagtacaatcacagcctgaaaaagagcaaaaccatgtactattcaccaaaaaaagcggccctcgtcaccggcgttataatcaataagggcgagcttaaaattcccaacagactgcgtaataacgccgtgcatcaataccgggacattaaaaacaatttcatcgatgacaaggtgttactaagcttcatcggaaatatcaactctgccaggctgatagaaccgaatcactttaatggcttgctgtcattctataaaaagacacccaaatga

SEQ ID NO: 10543 - RNA, 933 nt, synthetic construct
  source 1..933: mol_type = other RNA
atgcccagaaaaaaaaccaacgtaaatctgtatgagctgaaccagtgtgtgttctacaagtgttattccaaaaagaagctcgccgagatccttaagattactctccgggaacttaagaatacttcatggaacgcaaatacctcttactatcagtttagccagaaaaagaagggaaccgacgagctgaggaagatcaccgcacctgataaggagctcaagaaagtgcaatctacaatttactctttccttcggcgcattaaaaagcccgagtgggtcatatcttccacactgaagaaatcatatctaagtaacgccttgtaccacaagaaaagcaattacttttacaagaccgacatcaaaaagttttacgataattgccaccgcgaccgcgtgtatcgtttcttcaaagacaagatgaaaacatccagcgacgtggctaagattttgaccgatctgacaactaacgaaaacatccccacaggctgcccgagctcacagctgatagcttactttgcctacgaggacatgtttaataacatcaagatcattgcggacaaatacaagtgcattatgacgctatatgtggatgatatagttttcagtaacgccgacaagttcaattatagggccttaatccgagaagtggaaaatgaggtaagacatttcgatcacagtctcaagaagtccaaaaccaaatattacacgggggaaaaaggagcaccaatcactggtgttatcgtcaaaaataacttactgtacgtccctaacagcaatagaaaatcgatactggatagctttagtctcgctaaaggcattaataagatttccgagaaagagttcaagtctttgagggggaaggtgaatgctgcccggctgatcgaaaagaaccattttaacggcatcaactcatatctgaaaaagaacaatccatga

SEQ ID NO: 10544 - RNA, 924 nt, synthetic construct
  source 1..924: mol_type = other RNA
atgaacacactcacaaattggcgcaaaaatgacctcaagcagtttaagaagtatcctattcatcagtgcgccttctataagtgcaaaagtaagaagaagttggcctcgcttcttaagaccgacctgaaaaacttgaatcggctgagtaagtcaatcgaacaggagtactacacctttaacaaaaaaagacagatcaccgcacctaaaaaagaactaaaggcaattcagaaacgggtcctcaatctcctgaataaaattgaaaagccggattgggtaataagctccactaaagaaaaatcctacctggacaatgctcactatcacataggagctcaatatgtgtgtacaactgacattcgctcattctataacaattgtagcagggatcgagtgtatcagtttttcgccaaaaaactgatgaccagccccgacgtcgccaagctgctttcagatattacgacacttaaatacatccccacgggctctccctccagccagatcctcgcatactttgcctacgaggagatgttcatcaacatgtttaatatctcccaaaagttcaactgcaaaatgaccctgtatgtggatgatctaacctttagcaaggactctagcttcaattatcagaacctgatcaatcacatcgatatcgaagctagaaaattcaaccattctctgaagtacaagaaaactaactacaagtctgttaagaagggcgctaagataactggtgtgatactgaagaactacgagctcaagatcccaaactcattacgtatcagtattttgaaggacttcgagaacattaagaataaccaggagttgaagcaccaagttatgtctctgaagggaaaaattaatgccgcgaggctgattgagccaaaccattttaatgggaccaacagttacgtgaaatccttatga

SEQ ID NO: 10545 - RNA, 921 nt, synthetic construct
  source 1..921: mol_type = other RNA
atgaagcaccagaagtaccacagcataaaaaatagccccttttttcggctgaaatccatcgacaaattagccgagtacctgaataccaagagcaaacggttgatttacttggagaatatgccactgacggaaaggtatcggtgctttccacaaggaactcgcgatattcagcagcctatcggcttcaataggtttatccacaaccgcctgcatacccttctttcaaggatcctgagccccgattttgtgttttccggaaaaaaggggttctctcatgtcgataacgccctggcacacctcaatagcaagtatgcagctcttatggacattgaaggcttttatcgcaatagtaagagagagtacgtgtttcgattctttctcaaaaaactggagatggcctcagatatagcgaacatcctaacaaacatcgtatgtttcaatgacttcatccctacaggtagcccgctgtcacagctgatcgcttactgggcctattccgacatgttcgaggagattgaaacagtcgcctcttcaaacaatttcattttcagcttgttcgtggatgacctcactttcagttctcaggacagaatacggcacgacttccatctcgagatcaacgctattttaaagtcgtatcgtctcaacatcaaaaggaagaagctacagtaccgtagtaagaaccaaaccaagattataactggttgcgccataacccccgataataagatcaaagttagaaacaagcaccgagtgaagtacatcaataacctgcagctcttactggggtcgcatcagaacagaaaggatgagaaactgattgactccgctctcggcttgattagttccctgcaagcaatcgaacctcaaattttcatggaatctaaacgcatccttaaacagaagatttccttttcttga

SEQ ID NO: 10546 - RNA, 915 nt, synthetic construct
  source 1..915: mol_type = other RNA
atgaggaaggtaaacaaaatctacgatatcacattctctccgctttatgggattaagaataagaggaaattgcgcgaactacttgatatcggtactaatgaggagctcattcatctgcctctaacaaattcatatcggattttctccatcaacggccgcgaaatccaggagcctattgggctgctgcggaagatccacgatagattattccgctacctgtccagaatcgatacccccacgtatctttatagcggcaagcgtggcctgtcctacgttgacaatgccaaaagacacataaacagtagctacttcttgaaaatggacatcaagggtttctacaaaaacgcaaaccgagaatacgtgtttagattctatagatatcggctgaaccagtcagacgacatcgcgcatattttagccaatatctcgtgctacggaaaaatcattcctaccggaagcccaatctcccaacttattgcttattggagctacaaacagatgtttgacgagattgccatcctgaacaaagataagatatttacactctacgtcgacgacctcaccatatcatctgtggaactgagcttggccaaaaatctccacctgcaggtgcaggcaattgtcaagaagtaccgtctggatctgaaaaggaagaagattcgctactataacaagagggagaacaagcacatcaccggatgtgttattactagcgaccacaagtttagggtgccaaacaaacatcgaaagaagctcattagtatcatgcggaaatatccctcattgaatactataccagagggggagctcatgaaattaaccggcctgatttcttcctctcagcaaatcgaacccgatatatttatcaatacgaagaagcggctgagtcaaataatcaaaaagcagctcgcttga

SEQ ID NO: 10547 - RNA, 930 nt, synthetic construct
  source 1..930: mol_type = other RNA
atgcacacagtccatggaaatttcttctatactctgtcgaacaagaaacgcctggccaagtacttaagggtgtcattgaaggaattactcacgctgcaggatgactcaaactataaagtatggtttgaggaaggcgagaatgggaaactgagggagattcaggaacctagttacaagcttaagtctgttcactctattatccagaaaagtcttgcttccatcgtagcacctgaattcctattttccggcgttaaaggtaaaagcaatatcagcaatgccagctatcacaaggatagcaactatatcgtgacggctgacattcgttccttctacatcaattgcaacaaggagtacattttccgctttttcaaatacaccctgcacaccagtgatgatatagccaggatccttactgagttgtgttgctacaaaacattcctcccaacaggcagcccggtgtctcagatcctggcataccacagctatgccagaatttttaatcggatagacgcctttagtaaagcgaatgggatcacattctccctctatgtggacgatattactctgtcgtctgaaaagagtattcatccatacatcctgaagaaaataagcaagctgctcgagtcagtgaatttatcattgaaacgagagaagaccaagttttactccaagaactcttataagatcgtcaccggttgtgctataagccctgaccatattcttctccggcccaacaagataatgagaaagatcaacaacaagttgtgcaaacatgaaaaggacctgtcaaaactgacttccaaagagattgagtctgtcctcggacaggtgatttacctgcggtccatcacccccaacagctattctcaactgtttaaatcactatccctcatgaaggcagaggaaaagatcaagcaaagacccctgtga

SEQ ID NO: 10548 - RNA, 927 nt, synthetic construct
  source 1..927: mol_type = other RNA
atgaagacattgaaataccccattaataagtcctcactgtacaacctgcagaacaagaaaaaactgaaacagctgctctacatcgataattctgagttcaattacttcgccaaacaggtcaatatagacaatgaataccacccttttgttaacaaaaaggggagaggcattgacaatcctagtaaacggcttaagaaacttcattctcgtatccagaagctgctaagccgaattacttacccaaagtatttatattccgccgccaagcgctctaacatcaagaatgtgctgaagcacaaaaaccataagtacatgttcaagacagacattaacaagtttttcccaagtagcaagaaggagtatatattcagggcgttcaaatacaactttcagatgtcagaagatatcgcatggtacttagccaatcttgtgtgctacaatgaccacctcgctaccggaagccccgtgtcaactattctgtccttttgggggtacaagggcgtatttgattccatttatgcactcgctaaaaggagaggcatcaccatgagcctgtttgtggatgacatggcattttcgtctaacaagtatatcccaatctccttcaagtctaagatagagaagtatctgaaaaacgttgatctaatcctctcactgaagcccagcaaaaatattttctataagtccaacgaggagaaaaaacttacaggtgctatcataaccactgacaaaaagctgaaaatcttgcctgaaaccgagttgacgattaaggatctgctcaacaatatcgaaaacctcaaccatcaaaaactcaaaagtttgctgggaatgttgcaatatcagaagcaggtggagaaaaataacccgaatattacagaacacatcagcttagtcaaggccaagatcaagaacctgattagtaaatga

SEQ ID NO: 10549 - RNA, 903 nt, synthetic construct
  source 1..903: mol_type = other RNA
atgagtaataagcaatacaacatccaccagtctccactgtacaagttaaactctaagtccaagctgtcgtccatcctgcacatcgataacctggccaatcttctgcgggacggtcactacaacaggtttgagatgaatgggaggcagattgaatccccctgcaaagaactcaagagagtccataagcgggtgcttaaactgctctcaaggatcaacacccctgattacctgattagtggtaagaaaggcttaagctatgtggataatgcaaaagttcatacccgcagatgcaatttggttaagatggacattaagaagttctatcccagcagcaaaaaagaatacgtattccgattgttccactacaaattccgcatggccgaggacgttgcttggattcttactgagctccttacatgcgacggccatattccaacagggtcacctgtgtcacagatcttggctttcatgatctttgccgacacattcgaagagatcaacaatctagcaatcacccacggctgttgttttaccctctacgtcgatgatattactatatccagcaccggcaacatccccagaaaactgatctatgccatacgcaacgagctcaaaaaggtaaacttaaacctgtctggaaaaaagacgcggttttatagcctgaacaaaaccaaatgtgtcacgggatgcgtgataacacctgatggcgaactgcgtattccaaataagctccaccaaaagatccatgagaaatctactatgctgaataaggagggactgtcaccgcatgaccaccaggtgctctttgggctattgaatgccgcacaacagattcagaagagcacttttcccagtctgtatagggaggctaagcgaaatttcaagatatccgtggcgcagtga

SEQ ID NO: 10550 - RNA, 912 nt, synthetic construct
  source 1..912: mol_type = other RNA
atgaaaaattacagcctcgaaaagtctccgctcttcgggattcctagcaaagcaaagctggccgacctgctgaacgttgggaggtccgatttgttagctatgtctcggaaccccacttactctttctttaaaattcggaaaggagagaagtttagggacatagaggacccaaaccctgacctaaagaagctgcagaaaagattgaaccgactcctgtcccggattcaggtccccgaatatgttaaatcaagcagaaagggaatcagctatgtagacaatgcgaagtttcatcttggattcaattgtaccgccaagttcgacattgataagttcttccgaagcacaaaaagagagtacgttttcaggtgctttcactacacatttggcatgcccggcgatctcgcgtggcttctcacggatttagtcactctcgatgggcacttaccaaccggcgcacccacatccccactcctggcttattgggcatacgccgacgtgttctcccgcatgcatagcctggccgaaagtcggggcgccgtgatgtcgctgtatgtggacgatgtcgcagtaagtggaaatcaaccattgaaaagtgagtttcgtgataagctgtcaagtatagctggcgattacgagctgaaacttaagaaggacaagacccactattatttggaaggtgagacgcgcctgataactggctgcgccctaaacaccgtgggtcaggccattgtgcctaataagctgcgcaggaaaatctcaatcatgattcagcaaagagatatctctgacatgacagaaaaggagatccgcagactgtacgggcttctgaactccgctaggcagatcgagccggacttttctcccggtttgttcggacgggctaaatcacgtatcgaaacccttcctgtgtga

SEQ ID NO: 10551 - RNA, 990 nt, synthetic construct
  source 1..990: mol_type = other RNA
atgtcccagatgaaaatatatcctttggagaattcacccctatatcaactgtgcaacaaaagcaaactcgaggaacttttgggcctacctaagggctatatcaataactttacctattctagggagaattaccactgttggcatcagctcaagaaaaacaaaatagacacacgccccgtggaagatccttgcggtatcttaaaaaaggctcagagtaagctgaacaaactgctctcacgcatttacaccacagactacctgatgagcgggaaaaagcactccaattacatcaagaacgccaagtaccatcagaataatccatatgttttctgtttcgacctctccgccttctttcagacagcaactcgacactatgtcttttctgcgttcaagaacgagttcttaatgtcagaagacgtagcttggatgctgaccgatcttgtcactatcccaaacatcgaaaacacagatggatatatcccgacgggctcgccgagtagccagaatgtgatttactgggcttacaaaaaggcctttgataccctctttagagtggctgagtcgaaaaagctgaaattctccctttatgttgacgacatgacgttcagtagctccaggcccataagtaacaaatttccacagttgatccaaaagctgtgtagcaaagtgggtttgaaaatcaatagcaaaaagaccaggtacttctctaagaacgatttcaaggatattactgggaacgtcatttcacctaaaaaagaacttaaggtgcccaaccgtagacggaaggagattctggacattctggcattcaaaaacatcaaggacatgaatgtgaaggagattcggagcttttacggaaagctgtgctctatgcgccagatagagcccaatatctttccagcactctataatgaagccagatctcagtactacaagctgggagcccaatacaatcagtccaagcaatttatgaaggggcgacggaagtga

SEQ ID NO: 10552 - RNA, 990 nt, synthetic construct
  source 1..990: mol_type = other RNA
atgaagcagattaaaacctaccccattaataatagccctctgtacagactgtcaaataaatccaaactggcggagttgctgggcgtgtcaaagaaatacctggaacatttcaactatagtcgggacaattataagtgctggaagcaaaaaaagaagaacaaaaagggagcacgaccagtagaagacccaacactcattctcaaaaaagcccagtcaaaactgaataagctcctcagcagggtcattacaaccgactacttaatgtccggcaagaaacactcttgttatattaacaacgcacagtatcaccttaacaatccgtatgtcttttgctttgacctgcacacatttttccagaccgcctcgaggaagtacatcttcaaggctttcaaaaatgagtttcagatgcccgcacatatagcttggttgatcactgatcttgtgactattccaaagctcgataacagcgatgggtacatccccaccggcagtcctagctcccagaacgttatctactgggcttataaaaagacgttcgacaagttactggagatagctgaggcgaaggcccttaccttttctctatatgtcgatgacatgacgttctcatctcaaagacccatcagcgccactttcccgaaactcatccagaaaatgtgcgcccgcgtgggtctggagattaacgaaactaagacacagtacttctccgccaaggactataaagatgtgaccgggtgtatcatatctcctaaaaatgagctgaaggttccaaaccgacgtagaaacgaacttattaacatcgtgaagaacaagcctatcgaggaaatggatattcctgaaatacgcagtctatatggtaaattgaacagcatgcggcaggtggagcccaatatctttccacagctgtacaatcaagccaggaagcgctactacgagctgggagcacagtacaataccaagtccaagcaaaagatccggaaaaagaaatga

SEQ ID NO: 10553 - RNA, 987 nt, synthetic construct
  source 1..987: mol_type = other RNA
atgctgaccattgaacaatcatggttctaccgtctcgggagaaagcgcgacctagctgcactcttgaatcttagtctctctgagctgaaggctcttactaatgacaaaaacttcgagccctgggaaaagacgtttccagacgggaaaaaaaggttgatagaggagccgcagccccagctgaaaaaggccctgaccgaggtgcaaaagatcctgtctcatatccagacccctccttggctcatgagtggtaagaagaagatccaaccgcgagacaacgcaatcgcccacattaaaaacgcctacatgatcagcgtggacatagccaaattctatcaaaacagcaagagagaattcgtttatacactgttcagggacgattttaaacagactaccgatattgcctccctacttgccgatttagtcacctacaacggacatattcccacaggagctcccagcagccagctcctagccttttggacatatcggaaaacattagagaagattcatgcagaagcatccagacagcacataactatgactgtatgggttgatgacatcaccttttcatctcggaaacctttgccaaagaactggctgacatttgtcaaaaggagtctggataagaccgacttgcacctgaagaaggagaagataaagttccatggtcagaaggatcacaaaatcactaccggctccgcgatctcacctaaaggcgtgctgaaggtgaagaatcagaagcggctggaaattctctccttgattaagagcaagaaaatcgaacaactgacactgaaggaggcccgctcattactgggcaagctgactgcgcagcgacagaatgagccagatttctttagtagcacgtacattaggtgcaagaaacacctccggaatcttgaaaagatgaaacagaaagagtcgtatcacaagaaacccaaacgcatcaaatcccttaaacagaaaccagctgctcagtctagatga

SEQ ID NO: 10554 - RNA, 1032 nt, synthetic construct
  source 1..1032: mol_type = other RNA
atgagtaaatgttatccgattgagtcaagcccactttatagactgagaaacaggcgccgactggccaagctattatatctgcccaagaactatttccaggaggagcatacgtactgctacaatgagttctcacggcctaaacccaatggcgatggcaagagacatttcaccgtgcctccggacgacctgaaggacatacaaaagcacatctgtattctgctcaaacgcatcataacccctgaatgggtgatgtccggaaaaaaaagctgttcctacattacaaatgccgagatacatctcaagcaccggtttgtccgcactatggatatctcgaaattttacgatagcgctcagcgaagcaggatttacaatatgttctcccagacctttaagatggcaagtgatatcgcttggattatgaccgagctggtaacctataatggcatgttgccaacaggctccccctcatctcaattagtcgtttactggacgtacttcaacatgtttcagagaatcaacgaactcagcgagaagtatgattgtcgattctctttgtatgttgacgacatgacattttctagtgacttccccattaaacgtcagctgcgcgacgaagtcagtgtggtcctgaggaaaaatggtctgctagcgaagtctaagaaagaccactactatcaggccaacgattttaaagtaatcactggggtggggatcaggcaaggaaaaaagatcgtgccaaataacaaacgcaaacagattatcgaactttacgttcagtgcaagaaatcaggtaacatctacgacatcgaaaagctcaacggaattctgtgctccctcaggcagatcgaacccaatatttttcctgagatatatgggtacgtccactgctatgaaaaggagctgaagaaacttagcagagatcggttctaccggacaaagaggaagaaaaagccatatcggactaagcagatgtacaacgtggtgaataacatgaacttggtggagcaacgtaaggaaggcaagcagtgctga

SEQ ID NO: 10555 - RNA, 1011 nt, synthetic construct
  source 1..1011: mol_type = other RNA
atgaataagtgctaccctattgagaattcccctctgtaccggctccgtaaccgaagaagattagccgagtttcttaatctccctaagaactacttcaaagaggagcacacatattgttataatgaattctctcggccaaagcccaacggagatggagagcgccatttcaccgtacccccagaagacctgaaagacattcagaaacatatctgtaaactcttcaagagaatcatcactcccgaatgggtgatttctggcaagaagagctgttcctatattacgaatgctgaagtgcacttgaaacacaggtttgtcaaaaccatggatataagtaagttctacgactcagcccagaggtctaggatataccaaatgttttctcaaaccttcaacatggcaagtgacatcgcgtggatcatgacagagctggtaacttataatgggaagctacccaccggcagcccaagcagtcaactgattatctactggacttattgcggtatgtttcagaggattaatgagctggcagaagagtataactgctacttctcactgtacgtggatgatatgacattcagcagtgactttccgatcaaggccatactcagagatggtgtctctgacgttctgcggaagaacggcttgctggctaagtccaaaaaagatcactattaccaggtgaacgatttcaaagtcgtgacgggggtggggattaaacagggaaagaaattggtgcttaactccaagcgtaagcagattatcgaactttacgccaaatgtaagaaaagctccaacatctaccagatagagaaactcaatggcaccctgtgctcactgcgccagatagaacctgacatttttccagagatctatcgctatgttcacagctacgagcaagaactgaagaagctatcgagagacaggttttatcgatccaagcgggagaaaggacgctacttatcaaagcatatccataacgttggcatcaatacagaacaggggtttgactga

SEQ ID NO: 10556 - RNA, 1014 nt, synthetic construct
  source 1..1014: mol_type = other RNA
atgatgtctagcaaatgttatcttttagagcagtcgcctctattcagactcagaaacaggcgcaagcttgccactctgctgaaactagatgagaagtacttctcgaatgagcgtgcttatacgtacaggtcattctccaggcccaagcccaacggtatcggcatccgaaagttcaccgtgccctctgacgaactcaagatcatacagaagcagatctgcaaattgttgtcccggattgagactcccgaatgggttatgagcggcaaaaagagctgttcctatatcacaaatgccaaagtccacctggagtatccatttgtgaagactatggatatttccgaattttacgattcagcacagaggagcaagatctacaacatgtttttcaacctctttcaaatggaacatgatattgcttggttgatgaccgaattagtgacatataacggtgggctgcctaccgggagtccttcatcccagctgattgtgtactgggcctacagcgacatgttcaacgagatacagctgctgtctacaaaatacaactgcaccttcagcctctacgtagacgatatgacattttcatctgatgagtctatcagtggaaaactgagggaagacgtcagcgcacttctccgtaaaaataatctgaacgccaaggtcaagaaggaccactactatcagatgaaggactttaagatgattaccggagtcgggatttataagggaaatatggtggttccaaacagtcggcgcaaggctgccatctccctttactcagaatgccgcaaacatggcaatataaaagacatcgagaaattgaacggcatactgtgtagtatgagacaaattgagccaaatatcttcccggagatcgctatgtatgtgaaacactatgagaaagagctgaaagaatacagtcgaaagcggttttatatggcccggcgcaaggcataccaaaaaaagagaaattcctgttctgtagcggtgagcaatgaagttaagatttgctga

SEQ ID NO: 10557 - RNA, 996 nt, synthetic construct
  source 1..996: mol_type = other RNA
atgtctaagatgtatgctctcgaacagagtcctctgtaccggatgagaaataaaaagaaattggcgaccttactgaggatctcgactaattaccttatgcaggagcatgggcaagactattataagttctcacgtcctaaacctaacggggatggtacgcggaactttaccgtgcccagtgatgaactaaagtacgcacagaaaaagctctgtaggctgctgtccaggatccagaccccggactgggtgattagcggaaagaagaatcattcctatattacaaacgccgagaaacacatcgaaaatactttcgtgaaaacgatggacatctctaaattctacgacagtgctgaacggaagtatgtgtatcgcatgtttaaagagacttttaagatggcagaggatatcgcatggctaatgacagagttagtcatgtatgagaacatgcttcccaccggcagcccatcatctcagctgatagtgtactgggcctattgcgacatgtttaatgaaatcaaccaaatcgccaacgagcgggcctgcattttcacactgtatgtagacgatatgacattctccagcaagactcccattaccaaggaactgagacaggaagtatgtaatcagctgaagaaatacggcctcatagccaagtcaaaaaaagatcattactaccagggaaacacagttaaggtcataaccggtgtggggataaacgatggacaaaaagttgtcctcaataataagaggaaacgaattttggaacagtttgagaagtgtaaaaccagcaacaaaatctacgacattgagaagctgaacggcatgctgtgcgccctccgacagattgagccagagattttcccagagatctacaattacatcaagcactatgactccgaacttaaattgatggctaggaatcgctttttcaagcaccgaagaaagcgcagaaagatcgagaagcaacgccagtacattaaccagaacaatatctga

SEQ ID NO: 10558 - RNA, 978 nt, synthetic construct
  source 1..978: mol_type = other RNA
atgtcgaaactttatccaattgaacggagccctctttataaaatgtgtaatagacggaccttagccaacttgctgtgtctgccaaccaagtacttctcctacgagcatgagtaccagtacaatgaattcagtaagccgaaacccaatggcaatggcagaagggacttcactgtgccctccgacgaactgaaggccatccaaaaacgaatctgtagactgctcagcaggattgtgactcccgagtgggtcatgtccggtaagaagcattgctcttatatcaccaatgccgaacaccacgtggataagaaattcgtaaggacaatggatgtatcaaagttttatgatagcgtccagagaaactacatcttcaagatgttcaaaaacacctttcagatggctgaggacatagcctggttgatgactgatatcgtcacttataagggggtgctcccaaccggatcaccatcatctcagctgatcgtgtactggacatacgcagaaatgttcgacgccattaaacgcaaagcggatgaaaacgactgcgattttacactctacgttgacgacatgacatttagcgcagatcatcctatttctacggaattccggaacgaaatcgccatacagctgaagaaaaatggcctgcttgcaaaggctcagaaagaccactactaccaacccggaagttttaaggtcgttaccggggtgggtatagaaaacggggagaagaaggtgttgaataacaaacgtcagaagattctgttccagtatgagaaatgcaagaaaacgtgcaacctgtatgatattgagaaactcaacggcatgttatgttccatgaggcaaatcgagcctgacatctttcctgagctaggaaattacattaagcactatgaggccgagctaaaagagatggcgcgcaaacgattttacgctaacaagcgcaagaaagcaaaggttaaggagaagaattatgcttga

SEQ ID NO: 10559 - RNA, 987 nt, synthetic construct
  source 1..987: mol_type = other RNA
atgagcaaaacctactccattgaattctcacctctgtataggatgagaaaccggcgcaaactggcccgcgtactgaaattagatgagaagtacttcaagcagaaccacacctacaagtataatcatttctcagagcctaaaccaaatgggacaggcacacggaactttacggtcccagaaaaagaactaaagtcaatacagaaacgcatttgcaagctcatgagcagaatcgagacacccgagtgggtgatctcggggaaaaagaagcatagttatatttccaacgctagaaatcactgtcgaaactataatgtgaagaccatggatatttctcagttctatgacagcgcgaaaagaaagtacgtgtacagtatgttcaaagagaagtttcttatggccgatgacatcgcctggatcatgaccgacctcgtgatgtgcggcggaacattgcctactggatctccgacttcccaattagtcgtatactggtcttattctgatatgttcgaaaacatctacgagattgcacgaaagtacaagtgtgaatttacgctgtatgtcgacgatatgactttttcctccaatatcggcattagcaagcagcttagaaaggacgtggaggaactactgaacagttattgcctgcacgccaaagcaaagaaagatcattattaccagaacaacgcctttaagaaggttaccggtgtggggatcaaaaaaggaaaactcctcgttcccaatcagaagcgttacgagatcataggtatgtacaagacttgtctgaagaataaggacataatagagatcgaaaagcttcggggcctgctcatcagcgctcgacaaattgaaccagacattttccccgagatctataggttcgtcgagaagtacaaagatgacttgaatctgttggctaggaatcgttattacaggaacatgcggaaacggaaaaaagtgcagaggcgcgaggacgtggcatttgtttga

SEQ ID NO: 10560 - RNA, 972 nt, synthetic construct
  source 1..972: mol_type = other RNA
atgagaaagagcaagacttaccctctcgagaagagcccacttttcaggctaagaaaccgccgcaagttggccttgctgctgggcttagacgtagattatttcaaaaccgcacacgaatactcctataaggagtttgagaaacctaaggcctcaggtgatggggtgcgaaaattcgctgagccgaaaggcgaaatttgtgaaattcagaagcacatcctgaagtacctgaagaggattgagactcccgaatggctaaagagtggaaagaaatccgaaagctacatcacgaactgcaagatgcataaggacgcgctttatattcgtaccatggatatatgccatttctatgacgcggtcagttatgctcaaatcgagaaatccttttgtcaggtgtttaagatggcccccgatatcgcccggctgatggcaaaactggtcacaaatcgcaaaactattccaacaggttccccttcatcacagctggtggtgtattgggtttacagagacatgtttgacgagattaattcgatcgcagctacctttggctgtaaattctctctgtatgttgacgacatgacattctcatctgaaaagcagatcagtcaccagctccgggatgctgtggtcaaaaaattaaatgagtacggattgcacgcaaaacgatctaaagatcattactacgaggcccaagactataaggtcgtgaccgggtgcggcatcaaagatggcaagacggatgtgcccaataagctgcggtacaaaatcgttcagcagtacaggctctgccaacttaccgatacaatagccgagatagaaaaactcaacgggatgatgtgcagcgcccgtcagatggatgaaaacattttcgacagcgtaagcaattacctgtgtaagaacagggagaggctcaagggatatgtgcggtccagaaagtctaagcgccagtacgaagacaacgactttgagttctga

SEQ ID NO: 10561 - RNA, 930 nt, synthetic construct
  source 1..930: mol_type = other RNA
atgaataaagacatcaatcaatatgagctggaagatagtctgctgtatcggctgcgaaatcgcggtaaactggctgaaatgttcaacctaccccataactactttcgcactcagtataagctggacattgagtataaaagcaaacacatccagacaggacgaaacaagaaagataggttggtggagaatccttcgaagaagctcaaaaatatccagagagagattctcaagtacttatcccggatccaaacgcctgattggattatctccggaaaaaaggggaagtcatacattgataatagcaagtttcacaaggacaattcatacgttatcacaagcgacataatgaacttttacccctcctgcaaaaaggattacgtgtacagaatgttccgttatacctttaggatgagttccgaccttgcgacgatccttaccactcttgtcacttacaatggtgggatcccgacaggcgcaccaacatcacagatgattgcctattgggcttataaggacgccttcattagaatcaatgagatcgcattaaagtacaacgccaaattttcactgtacgtcgatgacatggtattcagctctaagtctaccatttctaagaggatgattctcgagataaagaaagagctgcagaaatataacttgagcctcaaggacaacaaaacccggaaatacggctccaaggattataagttgataactggagttgtgtacgacaagaatggggagcttaaaattcccaacaggctcagaaaagatatcatcgacggctacaacgaaataaagaaaaagaaggacaactgcaacgaaaccgataaaaagagcctgctgggcaaaatttattctgcccgccagatcgaaccagatgctttcagtcagctactgcataacgtgaagaaaatagaatgtaagtga

SEQ ID NO: 10562 - RNA, 924 nt, synthetic construct
  source 1..924: mol_type = other RNA
atgaaaaagatagtggagcgccatcacaaaaaacagtcgtttttttactgtctcgcaaacaaatcactgttagccactcaattcggtctacctcagaattttttccggagtaaatataaggagcagctgatctattctttcttcgagattagcaaaaaggatggatcaagccgtgagatcaataatcccaagtatgacctcaaggtgctgcagaggaagattttgaactacatgaaccgaatttacaagcctgattggcttatgagtggccggaagactatcagttacattgacaacggtagaaagcaccttgggtctaactatgtgattaccatcgacattaagaagatctacagcaactgcaaacgcaacaatgtttacaacatgttcaaggatgtgttcaagatgaccccagatatagcctccatcatggccgatttgacgaccttcgaaggggcagtacccacaggggctccgactagtcaagtcattgcattctggacatatcaggacgcttttgaaaagataaacgagatcgcccagcagtatgactgtatattcagcctgtacgttgatgacatgacattttcaagcctgggcgaaatcccaacacaattactgctcgaagttgacaaagagctcaaattggtgggcctgagcatcaaatggaaaaaggtgaagagatttggaatcaaccattgcaagcttatcaccggagtagtcctggacgaagctaagcagatgcgaattccaaatgcgcttagattgtctatcatccagggcgtcaagaaactgtccaataaagaactgtcacaagaggagcgcctccggctgattaagtccctaaaaggcaagatcaattccgccaggaatattgagcctgaaatatttcccgagattcacaggaaaatctcttccatttga

SEQ ID NO: 10563 - RNA, 927 nt, synthetic construct
  source 1..927: mol_type = other RNA
atgcgtccctccattccgctcaatcagtgcatgttttacaaatgccgttcaaagaaagctctggccagatgcctgctactcgatttacaccagttgcagcggcgcagcgaatggatccagtatcgagtgcatgcagagcaaaaggctagcggtggactgcgcgtcatttatgcccctgcagatgaactcaagagtgtgcaaaaggtgatcaaatcgcgcctgcacagaattgaagtcccctcttgggtttacagtggcgtgaaaggaagatgtcatatcgacaacgctaaacaccatgcggggtcccggtattttgtgctgtctgatatatcatccttctacgaaaactgcactagggacgccgtgtatcgattcttcagagacgatctgctgtgttctcctgatgttgcctccctcctcgctgacttgacaaccgtacgcaatgccgagggcaagaccgtaaaccccaccggaagcccctgctctcaattgatcgcctactttagctaccggagtatgttccacgagattgcgtctattgctgaccggtatggctgtaaattttccctttacgtggacgatctgactataagctcagagagtcctatctcgaacccacgaaaccttatgaaacaggttgccaagtcccttagagcatacggccatagggtgaagtgggagaagacagggtatttcggtaaaaatcagtttaagctggtcaccggcgtggcgattgatcagcaaggcgagctgaatatcccaaatcaccttggggaggctgtcattactgggttaaaggagacgttgtcaggggacaggagcgagatagccccaacactaggtagaatcaacgcagcccggcagatcgacggacgcgtcttcagcgaagcaaggaggctggttgaaaatgcacagaggtgtttttga

SEQ ID NO: 10564 - RNA, 921 nt, synthetic construct
  source 1..921: mol_type = other RNA
atgcggcccgaaatcacaatcgatcagtgtcagctgtacaagtgcaggtccaaaaagcgcctggccgagatattatacatcgagagggcagactttaacgatattcctacctgggcaacatacaggattagccacttggaaaagggagacggtgggacccgaactatctattcaccttccaaacggctcaagaaggtccagaaacgcatcaaacgcctgctagagaggattcacaaacctagctgggtttttagtggcaccaagggaaagtgtcacgtcgacaatgccatgcaccatgcgggtaacacctactttgtgctctcagatattgccgagttctatgagtcatgcactcgtgataccgtgtataagttcttcctgaacgaaatgaaaacttcccctgacgtcgctgaactgctcgccgacattacgacactggaaactaacggcaaaaccatcatcccaacgggatctcccagcgggcagctcttggccttctttagctacagagaaatgttcgatgagcttgaagagttgaccactagacatggatgccgcttgagtctgtacgttgacgacctgacaatctcgtctaatacaccgatagccaatcccaagtccctgcaaaaacagcttgctagaattatggcctcatatggccacagtataaaatggagcaagactagatacgtgaagccgtctgagtttaaggtggtaacgggggtggctattggtccagacgggaccccccatattccaaacaatctaggccgagcaatcataggtggactccaggatgcgttaggcggggactgcctttcccaagctagcacactgggccgtatcaatgctgcacggcagatcgttgaaggctctttcccagaggtggagagggtactttgtgattatcggcatctgtga

SEQ ID NO: 10565 - RNA, 921 nt, synthetic construct
  source 1..921: mol_type = other RNA
atgacccatccaatcgaccaaagccgcttctataagctgagatcgaagagaaaattggccgaggtactctgtaccaatcctcaggagttaaaacgtacactgagaaacgccagctaccgcatttctcagactcccaaagcggacggtaccttccgaactatatacaatcctaatccatcccttaaacgggttcagcacaggataggaaatcttttgagtcggattgagatgccaccctgggctttctttgccagaaagggcgtctgctacgtggacaacgccaggtatcacgagggtgctagatatctagtgaagtccgacctgtcttctttttacgaccattgtgacagggaacacgtgtaccgcttcttcaagaacaccatgaagtgttctcctgatatcgccgaagccctgtgcgacctcacgacatatacccttcaggatggatcaactatcatcccgacggggagccccagcgcacagatagttgcatttctggcatatcgggagatgttcgatgagatcaaggccgtggcggatctgtacaaatgcaaattttcactgtacgttgatgatctaacctttagctcacgctccgggattagtaaccctagcaatctcgaaaggagtatctcccacatcgctcggcagtatggccattgcatcaaggccgagaagactgtctacctggatgcatccacaagtaagattattactggagtggctttaaccccctccggcgagccaaaagcaccgaacgccttgcgtgaagccacagtgtctgacctgacacagatcagctcaggggacctgtcaaagattgtctcttgtctgggccggataaatgcagcgcaaatgattgaacgaaacctctttgctgatagtaaaaggcaggtagaacaaatcctcgcttccgcttga

SEQ ID NO: 10566 - RNA, 927 nt, synthetic construct
  source 1..927: mol_type = other RNA
atgaaaaagacggtgcggcagtatcccctacaacggtcacccatttaccggctcggaagacgccgagatctggaagagctgctctatatgcagaagggagatagccgtcgggttaaatgcttttctgaatacaacatcttcgacaaagagaaatccagtgggggctcaagaacgatcgaggccccatgtagcaagatgaagaaatggcagagaagggtttgggacctgatggctagaatcgagaagcctgattgggtgattagcgctactaagggaaagagctacaaagataatgcttccaaacatcgcagcaatggctacgtcatgaccatggatattagttctttttacccgtcatgcgtgagggagtacgtgtacagactgtttagggaacggttggaatgttctccagacgtagcccagtgtttaaccgatatatgcacctatcaggggggtatccccacaggtagtcctgcgtctcaagcagtggcctatttcgcatacgccaagatgttcgaggagattgaggatctcgccaggacttatgggtgtaccttcactttgtacgtcgacgatatgacattctctagccaggacaactttagctggaaaaagctggcgtacgaggtggacggagttctgcacaagtatggccaccgcgcaaagggctccaaaacaaagtataggctgcctggcgactttaagatagtcactggggtctgccttgcacccgacggtgctctcgtagcaccaaataaacttcgatcaaagattgtgggcaacacacgctccctgaaagccagtggggacctgtccttactttcgagaatccagggtcagatccaagccgctgactatgtggagggacgacgcaccttccctggcataaggtccgaactagaacgtatcgctgaagccgccttgtga

SEQ ID NO: 10567 - RNA, 924 nt, synthetic construct
  source 1..924: mol_type = other RNA
atgggggctaacagaaagaagtatgcaatagagcagtgtgcattatataacctgaccaccaaacgacgcctcgaagagaagcttctgctgcaatccggtgaacttaaaggtgtgatgcgaggagtgacttatcgggattttcagattccaaaaaagtcagggtctttccggcaggtcagcgaaccaaacaagcgcctcaaactggtccagaagcgcgtgctatggctgctgagtgcggtggagaagcctgactgggttatgagcgctacaccgggaaagtgtcacaaggacaatgccgtgtttcatagatctaatgcctacatggttaccatggatatagagagcttctacgacaagtgcgaaagagagagggtctatcagtttttcaagaggaagctgagacagcctggggatgtggcaaaagcacttaccgacctgtcgacatacaggcaaagcatccccacaggcgctcccaccagtcaaattgtggcctatttcgcttacgaatctatgtttgccgaaattaaccaggtcgctaaatcccatggatgcatcttcactttgtacgtggacgacatgacattctcatccggtgagcctttttcccccgacaagcttgcaagcgaggttgatgcggtactccggaaatatgggcacaaatccaagatgagtaaaacgcggtactacccaaaaggcacttgcaagctcactacgggggccgccatctcacgtcagttgctgttagtagcacccaacgatctgaggaaacgcgttttggagaattacgataagctaaggaaaaccggagataaatctctggtggccgtcattctcggacagatcggcgctgctgaattcatcgagggccgggacatgtttcctggcatcaagcaagccgtgcgtgccttcggcaatgcctcatga

SEQ ID NO: 10568 - RNA, 903 nt, synthetic construct
  source 1..903: mol_type = other RNA
atgaagagagcaagtaaaaagtacgatttagatcaatgtgccttgtacaaatgtaagtccaagaaaaagcttgccgagctgcttctcattgaccttcgatatatcaagaatagcaagaacttcatcgattatcattctttcgaactgacaggcaaaaataataaaacccgtctgattaatgccccacagcccattcttaaaaagatccaaaagagactcttggccctgttgaggcctatcaatcggccagcttgggtgatgtttggcgagaaagggaaaagctacatccaaaacgctatcgtgcatcagtataacccttattgcatcaccatggacatcaagggattttatgatcactgtcggagggacgccgtttatcggttttgcaaagacaagttgcaggtgtctcccgacgctgctactatcattacagactttaccacgtgggaacagcgcatacccactggctccccagtttcacagatcctagcttaccacgcctacgaagatatgttctgcaagattaacgaatacgcgaaaagtattggtgccaagttcacactgtatgtcgatgatataacgatatcgagtaaaaacgccattgaccctaagaagctcgcatcaaaggtccgaaagatcctgcatgtgtacggtcacacaatctctaagaacaagaccaaatactacagcaaaaatgacttcaaactcataaccggggtaattatctctcccaaccatcagctgctggtccctaataagctgagccacaaaattaacaatgagctcgagcacctgtattccattatgcaggagtcaactgatgtgcaaggagcgatattaaggctaaacgggctgctgcaggcagcaagactcatccagccgaactaccgctccgacatttga

SEQ ID NO: 10569 - RNA, 930 nt, synthetic construct
  source 1..930: mol_type = other RNA
atgaagaaaaagtatccacttagccaatcttatctcttcaaatgccacagcaagaagaaacttgccgattccttaggaatgagcttgaagaagctgaaatacatctcaaacaatccccgctattatagttttactaagagaacaggcactaaaaatcgagagatcgacgtgccttccgatgccgaactcaagaaggctcagaagaacatatacaattacctgaagtacaccaaccggccgaattacctgatggcaggggagattgggaaaaatatcctctcaaacgctaccttccacaaagatagtgactattggctgaaatttgacattagcaacttcttccccaactgtaaacgggagtacatttaccgtttctttcagtctagtatgcagtgttctccagacgtcgccagtatcttgacaaacattactgtgtatagaggtgggctggttcagggtatttccacatctatgttactctccttcttcgcgttcacccctatgtttgacgaactaagtcttctggccactaagaacaatctaaagttttctacgtacgtcgacgatttcacattcagctcgtcatcccctatcaacacaaattttatcaaactgcgcgtgaacaagatcgttagggcttatggacataccataaagaacaggaaggtgaaatattacagcaccaatgattcaaaacgggtgtcgggcgtgatagtcactaaaacccaccatctgaaagtacccaacaagaatcgtaagaagattatttctctcgcaaaatccatgcgagagaacatcaatacaggcaattaccaagaggcagaaaaaataagattgtcactgcgcggatgcatcaatagcgccaggcagattgagcccgaaatctttccagaaatctccaagtttacgaaaaccaagtttaagagctga

SEQ ID NO: 10570 - RNA, 933 nt, synthetic construct
  source 1..933: mol_type = other RNA
atgacttaccctatcaaccagtgttatctgtataaaatccacagcaagaaacgactctctaaaatttttggcctcgacctgaagaaaatgatggatatatccaacacccccatctataagaacttctacatcttgaagaagaacaagaaggattataggaagattgagtatgccagtgacaccctgaatggaatccagaggaagattcataaatacctggctaacatcaataagccaaaattcctgactgggggagtaaaaagtaagagtattctcaccaatggcaagattcacaagaataacaactactggatcaagttcgacatctcaaatttttacgtgaattgcaaccgggactacatctataaattcttcctgaatgatctcaagtgcagcccagatatatcagagatccttacaaatctgacgacttttgaaggccacctcatacaaggttcctcttcaagtgtggaccttagctactttgcctactccaaaatgttcaagcagctaaacgatctcgcgttgttgaatgacttaacattctctacctatatcgacgactttacatttagctcgaacattcccataaacattgactacatttcaaagaacgtgcttaagatcctgagattgtatgggcataaagccaaacgcaacaaagttaagtactacaacatcaacagcaataaactgatcacaggtattgtcgtgaataagaacaacgagattagagttcctaattacaatcgcgagatgattatcaatctaaggcggaaaatcgaagataatgattcttgtgacctgagagatattctgtccttaatcggcatgattaattccgctcgtcagatagaaaacggggtcttctccaactcttataactacgcacaaaatatactgaagcgacttcggaaaaataaaagctattga

SEQ ID NO: 10571 - RNA, 933 nt, synthetic construct
  source 1..933: mol_type = other RNA
atgaggaaggggaaatacgccctgaatcagagcgccctctataagtgtggaagtaaaaaaagactggccgagattcttgggatcccactgggtaccttgaaggaaaatgccgaaaacccgcaatatcacatagtgtacaaacccaagaagaacagtaccgagaaacggaaaattaatgcacctcggaagacactgaaacggatccagggcaaaatctacaagaagcttcaatacgtgaagcgccctaaatgggtgatggcgggcgaaaagggcaaaaactggccagataacgctgaattccacaaggactcctgttacgtgctcaagtttgatatagccaatttcttccccaattgcggtagggagtatgtctacaggttctttctgaatagactaaagtgcgctccagatattgccgaaattcttacaaatctgactacgtatcatggctgcatagtgcagggaagccccgtttcaatggtcttagccttctacgcttacgaaaaaatgtttgacgagctcgcaaacttggctgacgagaactccctgctgttttcgacctatgtggatgatctaacattctcctctaaaaaacagatccagaaagacaaactcatcaagattgttaacaagaagctgcacgcatatgaccataaatctaagtctaagaaggagatgtactacgggaagactaaatacaagaagataaccggagtcatcctgtatcccgatcatgttagcaaagtgcctaaccgaatccgtctcaagattaaacgctccctggtggcggccaaagaggctgagaaggaaggcaacgtaaaacaggccaatgactttaagaaggagttggtcggaactatttatagcgctagacaaatcgaaaagaacatctttcctgaggcattaaattatgcaaagcagcaggtatcatga

SEQ ID NO: 10572 - RNA, 954 nt, synthetic construct
  source 1..954: mol_type = other RNA
atgaagccgagcgagtctcggaaacggtataacctgaatcagtgtgccctctattgctgccgtagcaaaagcaagctctttaagctgctgggcaccaatgcaagggaaatccgggacctgactaaaaacatgaatgagcagtacagtatcttcgacttggaaaaaaagggaggcgggactagaacggtccatggcccatcacccttacttaagaggatccagaagaccttatataaatacttgagaaaggtcgagcgcccctcttggctgattagtggtgagctggggaagtctgttatagacaacgtacggcctcaccagttcgccggcgacatgattaagctcgatatctccggcttctttgataattgtaaacgagaacctgtattccagttttttcacactatacttcgccaacccggtgatgtggcttccatctgcaccgagctttgtatgcttaatggagccatagtgcaaggaagtcccacatcaatggtgattgcgttttacgcgaaccgcaaaatgctcgaagagctgcagcagttagcatcggatttcggtttggtctttacagtttatgtggacgatattgctttctcctgtgctgccagcttcaatgaagacgcactgctgtctcgagcttgccagatcgtgcgcgcctacggatttagggtgaagacgaagaaggtcagagagtaccctttggagaaacctaaactgctaacagggatcgtcatctccaagaagaataccctgtccgttccaaacagggtgcgtcgaacaatactcgactccatgaccagttacagaaaaatggatgactcaaacgagaaggaaaaactgcgccaaagcatgctcgggatgattgcatcagcccagcagatcgaaccagggattttcaacagcattcggggccagctcctaagcgataggagaaaacaactggtgtcttga

SEQ ID NO: 10573 - RNA, 948 nt, synthetic construct
  source 1..948: mol_type = other RNA
atgacaactaaggtaacaaaacgatatctgctgaaccagagcgctctataccattgtaccagcaagcggaagctggcccgggtcttacaaatcgatttaaagcgccttgtagggattgtgggggatataccaaaccaatactccaccattacacggccgaagaaagattcaggagagaggatcgtgcataatgcacacttcgaactcaagagggttcagagacggttgtttaccctgctcagaagggtgaaacggccaaattggctcatctcaggcgagataggtaaaagcattacagacaacgttaggcctcacctgggcggcactcagcttttgaaaattgacatctctggcttttttgacaattgctcacgcgaaagtgtctaccagttctttcatgttcaaatggcccagcccagtgatgttgctaagatttgcactgacttgtgtaccctggaaaatgctgtggtccaaggggcctccaccagtatgttgattgccttttacgcgaatcagagcatgctccaggagctgcacgagctggccgaggacaactccctaatatttaccgtgtatgtcgacgacatcgctttcagctctagtcactctttccaggcatccgatattcttgaccaagcgacaagaatcgtgtctgcctatggtttcagagtgaagaataagaaggtccgcgcatataacgatagccgacccaaacttctcactggagtgatcattacgacaacctccaagatggctgtgcctaattgcaaacgaaggaagatcctggacgatatgactcagtacaggcgctccaccaaccccgcagagcgtagatctatgcgttcaaagatactgggccagatctcggccgcccagcagatcgaacctgatttcttcacgggagtgaaaaaccagctgaaatacgaaatgcgcatggatgaggactga

SEQ ID NO: 10574 - RNA, 936 nt, synthetic construct
  source 1..936: mol_type = other RNA
atgaagaaaaatatcaggcgttaccccctgaatcagtcccagctgtataagtgccactctcgtcggaggctcgcccgaatgttagataccgacctgaagactctcgaagagatcgccaaaaaccccagatattatagctttacacggccgaaaaaaaatagcaacgagagacggattatcgatgcccctaatcaaaggctcaaaaaaatacagaccagcgtgtacgcttacctgaggaaagtgaaacgcccagactgggtgatggcaggcgaggtaggcaagaactggacagagaacgctgagactcacgcagacgactcatactttgtcaaggccgatatctccaagtttttcgataattgtgagagagagtacgtttaccaatttttcttgaccaagctggaacagtccccagatgtggccgacatctgtaccagtcttgtgatgttcgaagggaagatagttcaaggagcacccaccagcatggtaattgctttctatgcgtatcagaagatgttcgaagaactggcttgcgtcgccaaacaattccactgcattttcaccatttatgtggatgatgtcacatactccagcctcgatccaatagactctgccgccctggaggcaagaatcagtcagattatggcggcttatggccataaggttaagcgacagaaagtgagaacatacggatctcagcgggctaagcgcgtgactggggtcatcttatcgacggaccatcaaatgcttactcctaattcactgcgccaggaaatttacgctgactttcagcagtaccttgcgcagaaaaaagcagacaaggatgaccctaacctagaccaccagagggcctcattgctgggtaagatcaatagtgcccgccagataaaccccgggatttttcctgagatgcatcggatcttgaagaacggttga

SEQ ID NO: 10575 - RNA, 951 nt, synthetic construct
  source 1..951: mol_type = other RNA
atgaaaaacatcaccctgtcgaataatccactgtataacttgaagagcaagaataagttgaagaagttactgtacgtggataatttcgacaacataatcaaccagtatgatgtcttcattgcaaaacccgcacggctggttgaaaaaccaagtaaccagctgaaaataatccacacccgcatctttaaattcctgaagaagatagagatccctgactatctcttctcaagcaagaaagggaaatgttacatcgacaatgccaggctacaccagaataacagttttgtagtcactcttgatctgtcaaaattttttcctaagtccaacgcatcccatatctataacctcttcgagaagaagtttaatatgagtaaggatgtggcctacattatgacccaaatttgctccattgatacaagcaaaatcaccctgaaagatagtgtgaaaagatggtaccagaatgcgaataacaaactcaagtaccctattccaattagccatgtgcccaccggatcttgtacatcacagataatcgctttcttatctttcattgacatgttcgaagagatgaatagcatcgcctgctgcaacaatattactttttccgtgtttgtcgacgacatcatcatctcctctaatcagcccataaaaaggcacatcattaacaagttcaagtatatcgctacgaaatacggccatgagatcaacaaaagcaagattaagtactacgggattaactataacaagcgcatcacaggcgtaattataactaaggatcaccgtcttaagtctccgtccaagaatcactttcaatcttttaaagacgcccagcagtataagatcaatcccagcattaaatcaaagcaacgaacaattggtagaatccaggctgttcggaacattgaaaagcaaaagttcatacagctcatcaaagacattaaacaggtgtga

SEQ ID NO: 10576 - RNA, 942 nt, synthetic construct
  source 1..942: mol_type = other RNA
atggagaacgcgttattcaatctgaagtcaaagaagaagctagcaaagctgttgttctatgacaaaattgggtacctcgataaggacctcagcttcatcaacaactattccgtttttatcgtagagacatcaaatggtggaaccattaaaagcagaatcgtggagacgccaagagggatgctgaaagtgatccacgaccgtgtgtttaaattccttaaccaggttgatttgccggactatttgatttccaaaaggggctcttcctatgttcagaaccacatttcccacaagaataatagtaacgtggtgagcatagatatacagaaattctacccaatgtgcagcttcggcaatgtctacaagttcttccataacactatgaatatgagtcctgatgtcgcttacattatcagtgagatcctgacaatcaactacgagaacatcaaaatcaatgacaaagtggacgaatatctggagcagcaggaagtgaagaataaagtcaaatttcccaccaaacatatccctaccggttccagcgtgtctaacatactgtcatttctgtcttaccgagaaatgtttgaggaaatcgctcagcttagcaagcgctacaatattgaaatgacagtctatgtggacgatataaccttttcgtctaacgaacaatttcccaagactttcattggaaaggtaaagaagattctcatcaagaatgggcataagtacaacaaaaggaaatctaagaagctggacaagaaccacaataagaacatcactggagtgattgtcaacaagtacaagcagacaaaaatacccaataaactccaccttaagtacaaatatgccaaacgggatctgttaaaggatccttcacaactcaacaatcagaaactaaatggcattaaagaggccatgaagcaaatcgacaccgttagtaaaaagtga

SEQ ID NO: 10577 - RNA, 921 nt, synthetic construct
  source 1..921: mol_type = other RNA
atgttgaaaagactgcttcatatcgaagacaacaaattcctgaaacaagactatattgcaagtatggtcacaccctatatcgacaagaaaggaaaagcccgtctcatcgagccccctcgagaggagctgaaaactatacagaagaggatcaaaatgatgctaggccagatagtggtcccttctaatgtgttctccggaatccgggggcgctcatacgccgaaaacgcagtgatgcattccagtgagaaattacggaacctcttcaagattgatctgacggcttttttcccgagcatttcgcgtgaaacagtgtaccgcttcttttatgaagacctgtgttgttcacccgatgttgccgaaacactgacaaatttgaccaccatcgatctcgagaagagccaggcccactgccttgatgagatttacagcttcctgaactacaagggggttacatgcaaaaatcacctgatcagcggggcaccaacttcccagattatgtcctaccttgtcaaccatcggatgtttgaagaaatgcagaaggtggccgatgataataatgccgtaatgaccgtgtatgtagacgacgtcactttttctaccgaggatcatatctcaagacactttaagaaccgggtgattgacattgttaggaagtatggctatcagattagtaaggcgaaggtgaaaaactacaccaagctatacccaaaactggtgacgggtgtcataatcgactcacacggtaagccaatcatcaagaattctatgagagagaagattatcaaggagtatgagctgttgagggatcaccctgagagcgcagaatctaaacaacgattaaagggcctcctcaccgctgctaggcaggttgaccaccgcgcttttcccactatatacagattcgcgttcgacaaggagtga

SEQ ID NO: 10578 - RNA, 921 nt, synthetic construct
  source 1..921: mol_type = other RNA
atgctaaagcggctgttacgaatagaggatagcaaattcctgaaacaggactacgtggcatcgatggtgagcccttacatagacaaaaaaggtaagcctagacttattgaacccccacgggaagagctaaagatcatccaaaagcgtatcaaacagatgctggggcagattattgtgcctagtaatgtctttagcggaattaaaggcaggtcatacgccgacaatgcagtgatgcacaccggggaatcccgccgcaacctcttcaaaatcgacctcactgccttttttccgagtatcagcagggaaaccgtttatcacttcttctacgaagatctgtgctgtagcccagacattgctgagatactgactaactttaccacgatcgatctggacaaatcccaggcaaactgtttagacgacatctatagttttctggactctaagggcgtactttgcaaaaatcatttgatctcaggcgctcccacttcacagatcatgtcctatctcgtgaaccaccaaatgttcgatgagatgcagaaggtagccgacgagaatggagctgtcatgacagtctacgtggatgacgtgaccttctccgccgagaatcgaatttccaagaacttcagagatcggattattgccatcgtcaggaagtatggctatcagatctctaagtcaaaagtgaagaaatacacaaagctgtaccctaagttggtcacaggtgttgttatagattctgaagggaagccagttattaagaacagcatgcgtgagaagattatcaaagagcacgattacctccgggagcaccccgatgatgcaaagtctagacaaagactgaggggattgcttacggcggctcgccaggtgaataatcatgcctttcccaccatctataaattcgcgcataacaagacatga

SEQ ID NO: 10579 - RNA, 927 nt, synthetic construct
  source 1..927: mol_type = other RNA
atgctcctgctacatataaaggactcccgctacattaaacaggactacatcgcagatatggtatctccttacattgacaagaaggggaagccgagattaatagaacctccctgcgaggagctgaagacgatccagaagaaaatcaagaacatgttgggacagatagtggtccctaataatgtattttccggggtaaaaggaaagtcttatgctgataatgctattatgcacgtggacaataaaaggcgcaatttgttcaaaatagacatgactgccttcttcccaagcatctctagggagactgtttatcgctttttctgcaaagatctgtgttgttcaccagatgtcgccgagattctgacaaactttacaaccatcgacctgaaaaagagccacgcacggtacctagatgagatctacgcgtttctggacagtaaacacgtcaaatgcaagaaccaccttatttccggcgctcccaccagtcaaatcatgtcatatctcgttaaccaccgaatgttcgacgaaatgcaaaaactttctgacgagaacaacgcagtgatgacagtctacgtggatgacgtgaccttcagcagcgaaaattggctgtcgggtagttttcgaaacaaaatcgtggatattgtggggaaatatggctaccagatcagcaagaacaaggttaagaagtatacaaagttgtaccccaagttagttactggtgtggtgatcgccctcaatggcaagcctactattaaaaactcaatccggatgaagattgtgctggaacatgcccaccttcgggatcatcccgaggatgccgattcccgtcagaggctcagaggactgctcaccgcagcgagacaggtcgacgctcatgcctttccaaccatttataaatatgcctacgaactggacacgaagaacaattga

SEQ ID NO: 10580 - RNA, 939 nt, synthetic construct
  source 1..939: mol_type = other RNA
atgcttaaacgactcctacacattgaggatagtaagctgacaaaacaggactacatcgcctctcttataagtccttacattgacaaaacaggcaagccacggctgattgaaccccccagagaggaactgaagacagtccagaaaagactcaagaagctgctgggcgaaatagtagtgcctgacaatgttttctctggcatcaagggcaggtcttatgccgacaacgccaagatgcacattgggtccgggagacgtaatctatttaagatcgacctgacggcatttttccccagtattgaccgcgacacagtgtaccacttcttttcaaaagacttaaactgttccagtgacgtagcgcagatcctcactaatttgactaccgttgatctcgagaaggctcatattaccaataggaacgatgtgtatctgttcctgagcagcaaaaaagtctcctgccggaaccacttgatctccggagccccaacgtctcaaattatgagctacctggtcaatcatcacatgtttgatgagatgcagaccatagccgatcgcaacaacatctcaatgacagtctatgttgatgatgtgactttctcaagcgagggtagaatatcccatgattttaccgagcagatctacgcaattatcaagaaatatcgttaccaggtgagccggagcaaggtgaggaagtatactaagttatacccgaagcttgttaccggagtcgtgatcgacgctgatggtaaagcagtgattaaaaatgctatgcgactcaagatcatcaatgaatataaccacttgctccaaaacccaaacgaccctatctgtcggcaacgcttgagggggcttctgactgcagcgcgccaagtggatcagcatgctttccccaccatatacaaatatgcctttgaaggatcgctgaaatgccagcagaattga

SEQ ID NO: 10581 - RNA, 930 nt, synthetic construct
  source 1..930: mol_type = other RNA
atgctcaagcgacttttgcatatcgaggattcgaaatttactaaacaggactacatcgcagccttagtgtccccctatatcgacaagaccggaaagccaagactgatcgagccaccacataaagatctgaagacaatacaaaagcggctgaaaaatctcctcggaaccatcgtggtcccaaataatgtgttcagtggcattaagggccgctcatatgccgacaacgctaagatgcatgccggaagtcactcaagaaatctgttcaaaattgacctgactgcattcttcccctctattagtagggaaaccgtttacaacttcttttaccatgacatgacttgcagcagcgatgtcgctgagattctgactaacctaacaacaatcgacttggagaaggctaggattcatgagcgaaatgaagtactgctttttcttgagtctaaaaaggtgtcttgccataaccacctgataagcggtgcacctacatcacaaatcatgagctatctggtcaatcaccacatgtttgacgaaatgcagattgtagccgacaacaatcacgctataatgaccgtttacgtggatgatgtgacatttagttctgagtatcggctctcccacaagtttaaggaacagattcttagcatcgtcagaaaatacgggtatcagatctcaagacctaaggtgaagtactacacgaaactgtatccgaaactggtgacgggtgtcgttatcgatagcagcggctcccctatcattaagaacgcgatgagggaaaagataattaacgagcacaggcacctccgcgaattccctgacgacaaatcctctcggcagcgcctatgtgggttgttaaccgcagcccgtcaggtggatccccacacctttcccactatctacaaattcgccttctcctccccggatcatgagtga

SEQ ID NO: 10582 - RNA, 981 nt, synthetic construct
  source 1..981: mol_type = other RNA
atgccgctcatatacactgattgccccctttacggacttaagtccaaaaaacttctgaagagactgttacgtatcaataacaatcagatgatgaggcaaactcatattgctagcctggtgtcgccatatatagacaagagtggcaagcccaggctcattgaaccacctcacgaggagttaaaaataatccagaagcggattaagaactgcctggggagaattactgtacctgataacgtattttctggcatcaaaggcaggtcatacgcagacaacgccagattccacgttggtaataatagacggaatctgtacaaaatcgacctgacagccttctttccctccattacccgagacacagtttataggttctttgctgaggacctgttgtgtagtcctgacgtcgcgcagctgctgaccgacctgacgacaattgatctcgaaacatccaatacgaaaaacatcgatgagattcggttgtttctcaaagagaagggagtttccacctataaccatctaatatcaggagcccccacatcacagatccttagttacttagtcaaccaccaaatgttcgacgagatgcagaaaatcgccgatgataacaatattaccatgaccgtctatgtggatgatgtcaccttcagctctgaaaaccgcatctctaaagactttcgtgataagataatcgcaatcatccggaagtacaattaccagatcagcaagaagaaggtgaagcgatataccaaactctatccaaagctggtgaccggggtgattatcgatgcaactgggaagatcgtgctgaaaaacagcatgcgccaaaagatcatcattgcgtataatgaactcaaaaacgaccctgacaacgcagatatacgcatgaggttgaaaggtttgctaattgccgctcgccaggtgaataaagacgccttcccaactatttacaagttcgcttttcagacagaagagaataagtga

SEQ ID NO: 10583 - RNA, 930 nt, synthetic construct
  source 1..930: mol_type = other RNA
atgctgaagtacgtcctccacattaaaaatggcgaccttctgaaacaggactatgtcgtaagcatgattggcccttacatagacaagaccaagaagccccggcttatcgagccaccccaagccgagctcaaaactgtgcaaaagcgcatgaaaactctactggggaaaattcaggtccccgataatgtgttctcagggatcaagggacgctcttactcggataatgcctgcttgcatctgggcaaatccaaaaggaacctgtacaagatcgacctgacagccttttttccctccatcagccgcgagactgtctattgtttcttttttgaggatctgtgctgttccccggatgtggccgaaatacttaccaatctcaccacggtggacctgaagaaactaaaccagtctagtctgctcgaagtgtacgacttcctggctaataagggggtgaagtgctataaccatttgatcagcggcgccccaacgtcccaaatcctgtcatatcttgtgaaccacaagatgtttgacgaacttcagtctctcagtgacaagagcaacgtaacaatgacaatttacgtggatgatgtcgtgttttcgagcgaacacaagatttctagcgagttcagacagagtgtattgtctctgatcaaaaagtacaactaccaggtcagtaggaagaaagttaaaggctattccaagacataccctaagttggtgactggtgtgatcattaattcagaaggaagagctaccatcaaaaatgctctgagaaagaagataatggttgagtatgagcatttacggaacaatccagacgacataaaaagccgacagcgtctcaggggattagttaccgcagcacgacaggttgataagtcagcttatcctaacattcggaaattcgcattcgataaccctgcgaaatcctga

SEQ ID NO: 10584 - RNA, 927 nt, synthetic construct
  source 1..927: mol_type = other RNA
atgctgaaatacgtccttcagatcaagaatgacgatatgctaaagcagtctaacatcacgagtaagattcacccttatatcgataagaccaagaaaccccgactgattgaggccccacaggccgagctcaagattgtgcagcgaaggattaaaaccttgctgggtaaaattcaaacaccggataatgtctttagcgggattaaagggaaatcctaccccgagaacgccagaatgcatatcgggggcagaaaacgtaatctgtataagactgatcttacagcatttttccctagtatcagcagagaggacgtttatcaattcttcaacaatgagctctgttgttcacctgatgtttccgaagtactcacgaatttgactaccgtgagcttagagcgcttccccaaagaagaactgacagaagtttatgatttcctaggacagaaaggagtgcactgctataatcacttgatcagtggcgcgccaactagtcagatcctgtcatacctggtgaaccacaagatgtttgacgaattacacacactgtctgcaaagaatgacatggtaatgaccgtttatgtggatgacatggtcttttcgtccgaacataagatatcttcccattttcggaactccgtgaagtccatcatcaaaaagtaccgctacaagctctcacacaacaaggtgaagggctacagcaaaggatacccaaaactggtcactggcgtcgtgatcgactgcaatgagaatatgatagtgaagaacagcctccagcataaaattatccttgagttcgaacatctgcggaaaaaccccatggaccaagagagccggcagaggctgaggggtcttgtgacctcagctcaacagatagacaagtctatattcccaaacattaagcgctttgctttcgagaacccttctaagtga

SEQ ID NO: 10585 - RNA, 924 nt, synthetic construct
  source 1..924: mol_type = other RNA
atgctgtgtcacatgcttaacatcagagatacaaatctccttaaacaggattatgtgtccaaactggtagagccctatatagataaaaccgggaagccacgcctgattgaaccgcctcgggcggagttgaagctgattcagaagagaattaagaacatgttggggatgattgaagttcctgaaaacgtctttagtggaatcaaaggaaggtcctatgcggataatgcctcttttcatatcggggacagccccagatacttatttaagatcgaccttaccgctttctttccctcaatctctcgagacaaggtttacgctttcttcctgagcgacatgcactgctcgcctgatgtagccgccatcctgactaactacacgactatcgacctctcccgggcagccattcaggataggcaatccatctatacattcctgagtgagaaaaacgtgagttgctataaccacctcattagcggtgcccccacctcccagatactgtcatacttggtcaactaccacatgttcgatgagatccaaatgctagcagacaagcattcagtttctatgacaatatatgtcgatgacctcactttcagttgtgaacatcgtatcccgcgacatttcaaagagaatgtgctttcagtcattacaaaatacggctacgtgattagcgccggcaagaccaagagctacactaagaggtatccaaaactcgtgacgggcgtgatcatagactctaatggacagctcgctctgaagaatagcctgcagttaaagatctctctggagcacgcccatctgcgcgaccaccctgaagataccaagtcccgccagagattgcggggtctaataaccgctgcaaggcaagtgaaaaaagacgcatttccaacaattcaccagttcgcttttcaggccaatccatga

SEQ ID NO: 10586 - RNA, 975 nt, synthetic construct
  source 1..975: mol_type = other RNA
atgaagtatgacaattgccccctctatgaactgaagagtaagaaaatcctaaagtacttgctgggcataaaaaactccaatctgctgaaccaacagtatgtagcatcgctcgtgactccttacattgacaccacgaggaaaccaagactcatcgaaccccctcactctgagctgaaagccatccagaagaaaatcaagaccttactgggtaaaattgaagtgcccaacaacgtgttttccggaattaaaggaagatcctatattgacaatgctctgatccacaaaggcaacggacttcgtcacttgtttaagattgatctcacgaccttcttcccgtccatttctcgagaaacagtttacgggttcttctacaaagatctcaggtgcgctcctgatgtggcacagatactggcgaatctgaccaccatcgacttaattaagtctaatagtcgggacatcgagacaatctatcaatttctggagatgaagaaggtgcgttgtcggaatcaccttatttccggggctccaactagtcagatcctgtcataccttgtcaaccatcgcatgttcgatgagatgcaggctttggccgacaaaaaccgcgttacaatgagcatctacgtggatgacgttactttttcatcagactaccggattccacagaggttcaaaaatctagtcttcactattgtacgaaagtacaactaccagatatcaggcattaaggtcaagagctacagcaagctttatccaaagttagtgacaggtgtcatcatcgatacaactggggatctcaccataaaaaatagcctgcgcaagaagatcattgatgagcatcgaaacctcagaaatgaccctggcaacagagagtctcgccagcggctgagaggcttgatcaccgccgccaggcaaatcgacaagagcgcatatcccaacatacatcggtttgccttcgaaaaatttacaataaggtga

SEQ ID NO: 10587 - RNA, 966 nt, synthetic construct
  source 1..966: mol_type = other RNA
atgaattacaactattgccccttgtatggtcttaagtcaaagaaacgactgaagtaccttctgaagattaagaatagcaaaatgctcagccaggctcacattgccaaacatgtagagccctatattgatatccaaggtcgccctaggcttatcgaaccaccatccgtcgaactgaaagcaattcagaaacgaataaagaacctcctgtcgaagataattgttccggataacgtgttttccggcattaagggccggtcttatgttgataacgcaagaatgcatagtaatgggctccggtatctcttcaaagtcgacctgaccgcttttttcccctctattacaagggaaactgtctacaccttttttcgcgaggacttgcactgtagcagcgacgtggccgaggccctgactaacctaactacaatcgatatccagaaatccaaagctaagaacattaatgagatctattgcttcctggacgccaaacaggtgaatgttatcaatcacctgatcagtggagcaccaacatctcaaatcttatcataccttgtgaaccacaagatgttcgacgagctccagctattgtctgacaaaaacaagattacgatgagcgtgtacgtagacgatattaccttttccagtgaattcaggataagccatatgtttagagagaaagtgtaccagataatcaagaagtacaactacaagatctcaaagaagaaagtgaaagggtattccaagctgtatcctaagctcatcacaggcgtcatcatcgatgccaatgggaatctggtgatcaaaaacaccctgcggcgcaagataattctggagtttagaaagctgatggaggaccccgctgacgatgaatcaaggcagagattgcggggattagcaaccgccgcccgtcagattaataaagcggcgtaccctttcatctacaaattcgctttcgataacaagcaatga

SEQ ID NO: 10588 - RNA, 972 nt, synthetic construct
  source 1..972: mol_type = other RNA
atgatatacacaaactgcaagttatacaagctgaattctaagaaagtgctgaaatacctccttgcagtatctgacaacaacttcttcgaacagaagtacgttgctagtcagattgagccctacatcgataccctcaaaaaaccaaggctgattgaaaaaccttccgaacaactgaaagccattcaatccaagattaagggattgctgtatgctattcaagtccctgataacgtcttttccggtatcaaagggagaagttattctcagaacgcacagtggcacaagggaaccaagcatgtgtataagattgatctgacagcgttctttccaagcattactcgtgaaaaggtctacagcttctttaaagatgacctggagactagttcagatgtcgcagagatcatcactaacatcaccactgtggatattgacttgacgaatctccagaacgtggagcaggttaatgagtttttaatcagcaagaacgtcaaaaccagaaaccacttgatctccggggctcccacatctcagattctaagctatatggccaatcacaagatgtttgacgaaatccaaagtctggccaatcataacggcattgttatgaccatctacgtggacgacataacattctcctcagagaactacatcagcaataagtttaagaacaaggtgcagtccatcattaagaagtatggatatcagataagcgctcgcaaagtgaagtcatatagcaaatgctatcctaaactagttaccggtgcgataatagacaaaaacggctgtctgactgtaaagaattcacttcggtacaagatcatgtctacgctcaatgagctgaaggaaaacccgaataataagacagcccgcaggaaactccggggccttgtgatcgctgcccgacagatcgagcccaatgcctacccatcggtgcataaactggcattcgacaaaaaatacaaggtgaattga

SEQ ID NO: 10589 - RNA, 951 nt, synthetic construct
  source 1..951: mol_type = other RNA
atgtaccagctgaagtgcaagaaggtgttgaaatatctcttgaagataagtgacaacagcgtatttaaccagtggtatgtggcctctttgatcgagccctatattgatatttctagagggaaacctagactgattgaaccacccagtcttatgcttaaatctatgcagacacgactcaaaaatatgctggggactattgacgtccctatcaatgtgttctctggtatcaaaggacgttcctacgcacagaatgcccagtggcacaagggtaacaagtttgtttataagattgacctgacggcctttttcccgagcatctcaagggaacgagtctattcctttttcaaggagaaactccgcacaagccctgacatcgctgaattcctaaccaacataacaaccgtgaacttagacttgagcaatattaaatccatggaggagatcaacatctttctggagtcgaagaacattaccaccaggaatcatttaatcagtggagcgccaacatcgcaaatcctaagctatctggcaaaccaggatatgtttaacgagatacagaaactgagtgatcacaacaacattacgatgactatatacgtggatgatctgaccttctcttctaccgaccatatctccaataacttcaagcaggaaattttctccgtgatccggaagtatggctaccacatttcaaataagaaagtcaagggctactcaaaattctaccccaaactgatcacaggggtaatcatctccaaggacggcaatatagctgttaagaattcacttagactcaagaccatcaatgagctcaatactcttaaacaagcccctcaaaacaccactagcaggaaacgcctgcggggactggttacagccactcggcaagtcgaacccaatgcatacccaagcattcatcagttcgcttttgataagaaatacaaggtgtga

SEQ ID NO: 10590 - RNA, 975 nt, synthetic construct
  source 1..975: mol_type = other RNA
atgatcaacccaatccatagtaatctgtacaaacttaccagtaagaagtacttacttagtcttctccacatccataataggcagtttttgaagcagtcttacgtgtccaagcagattagcccgtatatacagaccgatccaaaacccagactaattgaagtaccttcggaagagctgaagactatccaacgtcatataaagaacgagctcaacaagattatcgtgccagcgaatatcttctccggaattaagggaaagagctatattggtaatgcaaagctgcattccgggaataagtatgtcttcaaaatcgatctctgcgcattttttccctgcattacaaggaacacagtctacaatttctttatagagtcccttaagactagccccgatatagccaacatactgaccaatctgctgactgtggatttaagcaaatgtagcatagagaatgttgagagtgtgaacgctttcctgatctctaaaaaaatcaagacccctaaccacctgattagcggctcaccggcatctcaaatcttgagctatctcgtgaatcacaaaatgtttgactcactacagaacttttgtgacaagaataacatcacaatgtcagtttacgttgacgacgtgacgttctcttcccaacacattattagtcacacacagaaacaggtgatctacaagattatctccaagaacttataccgactgtccagaaacaaggtaaagtactatacgaagaagtatcctaaactgatcaccggcgtcgtcatctcatcgaatgggaatctgaaaatcaaaaattccttgtctctcaacgtgattagcgaatggaaatatttctctcagaacccaaaaaacctccagtctaaagcccggttgcagggcctgctgattgctgcccgccaaagcgaacccgccaaattccagaatatctacaacctcattcgggaggcttcaatccctttctcatga

SEQ ID NO: 10591 - RNA, 975 nt, synthetic construct
  source 1..975: mol_type = other RNA
atgataaaccctattaactccaatctgtacaagcaaaccagcaaaaagtatctcctaaatctgctgcacattcacgacaaacgtttccttcagcagaggtatgtatctaaacacatctccccctatatccagactaaccctaaacctcgcttgatagaggtgccatcagaagagctgaagatcatccagcgccatatcaagaatgagctcaataagatcatcgtcccagaaaatattttcagcggcgtcaagggtaagtcctacattgaaaacgccaagttgcatagtgggaataagtatgtgttcaagatcgacctcagctctttttttccgtgcatctctaggaacactgtgtataacttctttactgagtcgttgaaaacaagtcccgacattgcgtgtatcctgaccaatctcttaaccgtggatctcagcaaatgtaatattgaagacgctgacagtgtaaacgagttcctgatctccaaaaagattaagacgtccaatcatctgatctctgggagcccagcttctcagatactgagctatcttgtcaatcacaagatgtttgatacactgcaagagttctgcgataagaactcactgattatgtccgtgtatgttgacgatatcacattttcaagccagcacgttatttcacatagtcagaaggaggtcatttacaaggtgattagcaaaaacctatacagacttagtcggaacaaagtgaaatactacaccaagaattaccccaaactgatcacaggagctatcatttcaagcaacggaaatcttaagatccggaactcgttatcactcaacatcatcaaagagtggaaacatttcaaatacaaccagcaggatgcccaatccaaagcccgattgcaaggcctgataatagcagcacaccagagtgaacccaataagttccagtccatttacaagatagttagagacgcctcttttgatgtgtcttga

SEQ ID NO: 10592 - RNA, 972 nt, synthetic construct
  source 1..972: mol_type = other RNA
atgattgatccagtgaagtccaatctgtttaagctaagctccaaaaagtacctcatgacccttttaaacgttcctacaaaagagtatctgaatcagaacttcactgcaaaacaaatcaaaccttacatacaggccaatcccaaacctaggctcattgaggtgccctctgattccctcaaaaagatccagaagaatatcaagtgcgagttgaataagattgaggtaccgtcaaatgtgttttcaggtatcaaaggcaaaagctatgttgacaatgctgtaattcatcagaactgcaacttcttattcaaaatcgacctcaccgcgtttttcccatgcattacccgagaaacagtgtacaagttttttaaggttgacctgaaaacatcgtcggatattgcaaacatcttgaccaatttcgtcactatagacctcactctttgtgacatacaggaacctgaaccgattgaacagttcttgctgagtaaggggattaaaacaacaaaccacctgatatctggcagtcccgccagccagatcctttcctatctggcaaatcataacatgtttgacgagctgcagaacttctgtgataagaatgacatcatcatgagtatctacgtcgatgacatcactttttcaagccagcacgagatttctcacaaacacaaggagatcatctacaacatcatattcaagtacctgtatcgcctgagcagatctaaggtgaagtattatacctcaatctaccccaagtccgtgaccggggctatcattagccccaatggaaacctgtccattccaaacagtctatcttacaaggtcattaacgagttgcggaattacaaaaacaaccctaatgatgaacactctcaaaagaggcttcaaggactgatcgtggtggctcagcaaacggaaccaactaagttcagcaacatttataaccatgtccgtaatgccacgataaaagcctga

SEQ ID NO: 10593 - RNA, 963 nt, synthetic construct
  source 1..963: mol_type = other RNA
atgatcaatgccacaaactctaagctatacaatctgcaatccaagaagaaccttatctaccttctgaaaatccacgataaggacttttttaatcaggattatgtggctgcccatatacatccctatatcgataaacggggaaaacctaggcttatcgagagtccatctttgcagttgaaaaagatccagaggaatctgaagaatgagctcgctaagatcgaagtgccatataacgtgttctctggcattaaaggaaaatcctacgtggagaacgctgaaatgcaccgtaagtccaactacatttttaagatcgacttaacggccttttttccatgtattccccgggaatccgtctatacattctttcgcaagcagttaaagactagtcctgatatcgcccaaattctgaccaacttgacaaccgttgacctcactagatgcaatatcaaaaaactggaaagcattgagaagttcattctggacaagcacatagtgaccacaaatcacctcatcagtggcagtcctacctcacaggccctgagctatcttgtaaatactaaaatgttcgacgagctgcaatacctgtgcgacaaaaataaggtgattatgagcatttacgtcgacgatataaccttcagcagcaatcacaaaatctcacataagttcaaagagattgtctacactatcatttctaagtacatgttcaagctgtcacataacaagatcaagtactataccaaagactatccaaagctggttacggggcccgtaatctctaacgggaaactcataatccgaaattcactccgcttcaagataattagcgaatttaagagcctcaaaaagaaccctaacaaggcgtcgtatgatagactgaaaggtctaattgttgcagcaaaacagatcgatttgaaccagtacccgaacatatccaagtacattaaagagaaccccatccactga

SEQ ID NO: 10594 - RNA, 909 nt, synthetic construct
  source 1..909: mol_type = other RNA
atgctgcggcacttcctccaggtgcaaagcaatcagctgttcaatcagaccttcatccttgacaaaatccatccttatatcgacactgtgggtaaaagtagactgatagaagtccccgacaaggccctgcgcacgatccagaagaaaatcaaaaacatgctcggaaagttagtgttacctgattacgttttctctggtgtgaagggaaagtcatatgtggataatgcgacacaccactctgggactaaattcacatacaaggtggatgtgactgcattttttccatcaatcagtagggagaaagtctatctgttttttagggagaagttgaagaccagtcccgatgtggccgaggcactcaccaacctgacaacagttgacttgcatcttattgagaacattcaggaagtacacgagttccttaaacgtaagaacatcaagacttggaaccatttgatttcgggcgccccaaccagccctatactctcatacctcgttaattctgacatgtttgacgctctgtattcactgagcaaggaaaatgagattgtgatgaccgtttacattgacgacatcgtcttcagttcctcctaccggatctcttacaaaattagaaccaagatcttgagcattatcaagcaatacggcttacaggtcaacaagaaaaaactaaagctgtatacccggaaataccccaagaagataacaggcgtcataatcgataaaaatggaaactccgaagtgccaaattccctgcgcaaaaagattattacagagctgcacactctgaaatccaatccgaataacctctcctctagacagaggcttcaggggctagtaaccagcgctcgacagattaacaaggaaacgtttcaaaacatctgcagctatgcctataaaaaggattga

SEQ ID NO: 10595 - RNA, 960 nt, synthetic construct
  source 1..960: mol_type = other RNA
atggaaatacagaaaagccctttatacaagctatctaacaagaactaccttaagtacctcttaaaaatccccgacaaaaagttcttcaagcaatcctatatcacacagcttataacaccatacatagataacaagaacggcaaaaaacgattaatagaagttcctgacctcgagctgaaaaagattcaatctagactgaagaacatcctgtccttgctgcagatgcccaattatgtgtttagcggagtcaaagggcgctcctattacgataatgcatatctccacaaaggaaataagtatgtgtgcaagatcgatttggagtctttttttccgaacatttcacgggaaaaggtctatctcttctttctgacctactttaaatgttcctcagatatcgcgtacattctaacgaatctgactaccgtagatcttactcgtacaaagatcaagaacaataagaagctggagaagtttctggagtacaaaaatatcttctgcaaaaaccacctcatttccggcagtccagccagtcagttgctgtcttatctggtcaataaggacatgttcgacgaaatctataacttggccaacaagaattctataaacgtgagcatctatgttgacgacattatctttagcagcttcaacaagattagttacgacttcatcaaacagatcaaacgcatcatcaataagtacaactacaatatctcgaactcaaagttcaaaaggtatcttaatgggtatcccaaaaggattaccggtgtgatcatagacaaaaatggccagctgagcatccccaattcgcttaggctcaagattattaaggaattcgagtacctgaaatcccatcctaacgatagtaagagcaaaattagattgcggggtctgattctctcatctagacagattgagccaaatgctttcgtgggaatttacaagtacctgaaaaagttttga

SEQ ID NO: 10596 - RNA, 954 nt, synthetic construct
  source 1..954: mol_type = other RNA
atgaataagaagtgcccactgcacggactgaagagcaaggcgcagttgtactccatgctcggagtgaatgataaaaagctgtttaggaatggtatccaggataaggtgaaaatatacattgcaaaggaccctaaagagagactcatcgaggctccagattacatcacaaaaaaagcccaaaagcaggtgaaaaactacttgatgaagtgtgatttcccaccctacgtcttttctgggatcaaaggcaaatcctattttaataacgcagagatgcatctgtcgagcaagtatatgtataagaccgacataagcaaattctttccgaatatctcacgagacaaggtgtatctatttttcctgaacgacctcaatacgtctcctgacgtcgcaaacatattgacaaacatctgtaccatcaacataagcgattccattgagactaatcctcaagtagctgaattcgtgagcaagaataagatcaggatgtttaatcatctgtgcaccggttcaccagccagtcccctgctgagctatctcgtaaatcggaagatgttcgatgaactcaacaatattgctgagaacaatggaatgtcctttagtgtttatatcgatgacgttttcttcggctcaaaaaaaccgattccctacggcgtgagacagcagattcttaaaacactgactaaacacggctacaacatcagtttcaagaaagttatctactacaaggacaaggaaaacaaaaaagtcaccggggtcattattagccccaacaacaagctagagattcctaacaagttaaagcttaagatcgtgtctgggttttctaaaggcaacttaaaggattcacgtgccaagattaatggaatgcttatagcctcctctattatcgacaaaaatagtttcaacgggatccgcgagtatatgaagcagctggaaaaagactccgaggaatga

SEQ ID NO: 10597 - RNA, 948 nt, synthetic construct
  source 1..948: mol_type = other RNA
atgcataaacattgcctcctgcacggtttaaagagtaagaagcaattgatcagcatgctggatattacagataacaaagttatgaagggcaaagcccaggacaaaatcaaaatttatatcgctaccgaaccaaagaaaagattgatagaagccccagaatataagattaagaaggtgcagaacaagatcaagaactatctcctaaagtgtgacttacccagctacgtattcagtggaattaaggggaaatcctacttttgcaatgccgccttgcatagagactgtaagttcctgtacaagaccgatatatctgcattttttccttccataagcaggaatactgcttacaagtttttcaagaacgatctcgagacaagctccgacgtggccaaaattcttacggacatttgtactgtcgatattcgcgatacccttgagaaagactcctctgtggcgggattcgtgaaggacaaaaagatcaagatgtataaccacctttgcactggctcccctgccagtcccatcctgtcctatctggttaataaggcaatgttcgacgagatgtacgctatcgcggagaacaacaatctgaagttctcaatctatatggacgatgtattctttagctctagtaaatcgatctctaacaatgtgcgggagcacattctccgcattctcacaaagtatggctacaatgtctcatttaagaaagtcatctactacacatcacagcagaataaaaaagttaccggggtgattataaccccccaaaataagctttctatcccgaataaactgcgtcgaaagataattgcatctttttccaaaggcaacctgaagaccggtgaacagaacctgcgggggatgctggtggctagcaacatcatcgagaaaaattcattcagcggaatcaaaaggtacctaaacgaactgagcaaaatccagtga

SEQ ID NO: 10598 - RNA, 954 nt, synthetic construct
  source 1..954: mol_type = other RNA
atgtacaaatcttgccctctgtacgccctgcaaagcaagaaaatgcttatgaaggtgctgggcatacaggataaaaagtggaccaagaatatctacgtccagcagaatatttcccctttcatcgattgtatggtgaagcccaggttagtggaggccccaaagcaggagttgaaagtgatccaaaaacggattaagaacggactgatgaaatgcaggttccccaactatattttttccggagtgaaagggaaaagctatattgacaatgccaaaatgcatgcaggcataaagtacctttacaagatcgatattagcgctttttttccgaatacatcacgagagaaagtctacatgttctttaagaacgagctgaagacttcaagtgatgtggctgagatcgtcaccaatctgtgtacctatgatatctccattgacctagtagaaaagaaagagattgacacattcattcgcatgaaaaagataaagcacatcaaccacctctgtacaggagccagccctagtccattactgagttatctcgttaacaaatcgatgttcgacgaaatgtactctctctgcctgaaatacaatgtgaacatgtcagtatatgtggatgacgttgtgttcagctgtgacaagcccatacagccagaatttcggggtagaatattgaagattgttctgaagaacgggtataacatctccaagaataaggtgaaatactatgggtcttccgacgtcaaaaaagtaaccggcgtgatcattaaacctgatggcacgcttgacgttcccaataaactcaagttcaaggtcactaagagatttaaggacactcaaaaaggttcagaactaaacaagttgtacggctgcgtcatcgcggcaaagcagatcaaaaagaatatctatccaagcatctctgagtacatcatgaaccagaagaaaaaggaaaagtga

SEQ ID NO: 10599 - RNA, 1023 nt, synthetic construct
  source 1..1023: mol_type = other RNA
atgcagtcatgggataagcataaccagtttaagtataatgaggtgtatcctcttgagtatagaaagtgttacttgtatggactcaaaagcaaaaagaagctcctggagcttctgcacattgacaggaagatatactgcaaaagctcgtttctgaattgtaaaatcaagccctacatcgaaattaacaagaacaagaagaagcggcttattgaagcaccagatgaggacgtgaaaaatatccagtccattatcctgagggctctgcagttgattgacgtcccaaattacgcttttagtgggatcaaaggtaagtgctatattgacaatgcgaaagcacacagcgataagaaatacctgttcaagatcgacatcagcaaatttttcccaaatattggccgcaataaaatctacaacttctacctgaacaagctcaaaacatctcccgacgttgccaacatactaaccaacctgtctactattaatctggatctgaagaaccagaacaataagaccatgttgaagattaatgagttcatcaacgatgcccatataaaagaaagaaaccatctcatcacggggagtccgctatcctcaatcatgagctatttcgctaatgtggacatgtttgagaaaattaacgaaatagccctgaagtataacattacaatgactgtctatgtggatgatgtagtattctcctccgacaataaaattccctacttcttccgcaaaaacgtgctgaacattatcaaccaaaattcttacgacgtttccgtcaaaaaatgcaagtggtataataaacctgagaataagaaggtgaccggtgtgatactcgataaaaaaggaaagatgcagatccctaacaaattaatgcttaagacccacaactacataaatgagatcaataaaggcgacaagacaaacatcgataagttacaggggtgtctcgttgtcgccaactcaatcaatggcaagtttaaagaataccgaggacaattgaagaagatgaagcgtaagttttga

SEQ ID NO: 10600 - RNA, 987 nt, synthetic construct
  source 1..987: mol_type = other RNA
atgacctataaactttgccggctgtatggccttaaaagcaaaaaaacactgcgcgagtggctggaaatcgacgattctagctttttccactctaaaaacattgctaagaactaccacccctacatagacaataaagctaacaagaagaggttaatcgaggtcagtagccctaaactgaaatttgtccaaaccaagattctgggaatgctgaagaatctggactatccggaatacctattctcatctgtaaagggagtttccttcattgataatgcaaagcagcactccggtaagtattacactttcaagatcgacattagcaaatttttccccaacacctctagaaacaaggtgtacaatttcttcaagaaagacctgaacaccagttctgatgtggcgaccattctcacagattgcacaactgtggacctgaggaattacaattcggacaaacatcacaacgagatcgtcaactttctggaggaatacaaaataaagcaaatcgcccacttgagtactggggcccccacatccatgctcctatcgtttctggccaatcgtccaatgttcgaggagctcaattcattttgtgaacagagaggctatatctttaccgtctatgccgatgatgttactatgtcctccataaatcctattagttactctgatcgatccgcaatcattcggatagctgagaaatacggacatttcgtttcaaaaagaaaggtgaagtactataacgccaatcagagcaagaagataacaggggtggtaattaataaaaacggcgaaatctgtacgccaaacaagttactcaacaagacgcacaacaaaattcttaagtacaagtccaagaacatcgacgagcatgaaatcaatagcttgaagggttgcatcaatgtggcatatcagatcgacaaacgctatcctcatctcaggaaggtgttgaacaaaaattcaaattacagcaaggagaagaacgggtga

SEQ ID NO: 10601 - RNA, 972 nt, synthetic construct
  source 1..972: mol_type = other RNA
atgacatataagctgtgtagattatacggattgaagtcaaagaaaaccctgagggaatggctggggatcaatgacagcggcttcttttgtagccagaatatagcgaaaaattaccacccgtatattgggagtaaagacaataagataaggctgattgaggattcatcttttaagctgaagcacgtgcagaagaaaattctgaaaatgctcaagaagctggattatccaaagtacctgttttccggggtgaaaggcctgagctatatcgataacgctaaacaacacctcggaaaattctatacctacaagatcgatgtaagcaaattctttcctaacaccagtcggaacaaggtgtactcattctttaaggacttccttaatacttctcccgatgttgcaaagatcctgacagactgcactactgtagacctgcggaattattctaactccaagcactacaacaaaattatgcgattcgttgccatagccggcatcagacagattgcccatctttccacaggcgcatccacgagtatgctactttccttttgcgtgaatcagagcatgttcgaggaactaaacgagttttgcaagcaacgggactatatctttaccgtctatgtggacgatgttactatctcttccacaaaacccatcacgtacaaagatcgcctcaaaatcatccgtatcgtcgaaaagtacggtcatagtattagcaggaacaaaatcaagtactacaccttgtctaagactaagaagatcacaggtgtggtcataaacaagaacggagaggcccgcacccctaacaaattactctcgaaaacccattgtaaaatcctcaagttcaagagaggtaatattggcgacgctgagattaactcattaaagggatgcattaatgtggcttaccagatagatgggaaattcattcaccttaagaagttgttgaacctcaaagacaatctgaaatga

SEQ ID NO: 10602 - RNA, 915 nt, synthetic construct
  source 1..915: mol_type = other RNA
atggatctgaccacatgcaaactgtacggtgtgcaaagaaaacgggatttatccaatatcctgaagatcaactgcaaggaaatcaataagattgtgaactcctacaaaccgtacatagcgaataagtcgaagaaaagacttatcgagcccgtgagctcagtagagctgaaaaaagtgcagaaacggatacagaatcttttgaaggagataaagtacgactctaatgtcttctcaggcatttctgggcgaagctatattgacaacggaaggctgcatctcgggtgtgaatatgttgtggctcttgatatttccaaattctttccaaacacctcccgagaaaaagtctacaagttcttcaagcacgatatgaaaaatagtagcgatatcgctgaaatcttaactaatctctgtacaatcgacttgtctaacatcgccgacatagacgaggaggttatcaagtatatctccgagaataggatcaggtacaaaaagcacatacctactggtagtagcatcagttgtattctgtcttacctggtgaattacaaaatgtttgacgagatcgtcaagttgggcgttgaataccggtgcaagaccagtatttatgtggatgatgtcgtcataagctcaaccgagaaaattaataaacagctgattgaccgtatcatgggaattattaaaagccgcggctattctatacagaaaactaagctcaagttctacgacaaaaatgagtttaagagagtgacgggaaacatcatttccaaggacggcacaaagctggtgattcccaacaaaatccgctataagatgatcaagctaaagaagaacaaggaaattcagaaggataaaaaggaagccaagctcaacgggtataaccaagtaattaaccagatcaacatggaggcattttga

SEQ ID NO: 10603 - RNA, 963 nt, synthetic construct
  source 1..963: mol_type = other RNA
atgaacttcaagaactgcgaattgtataagatcaaacgaaaacgggacctgttcattttactgcatatagacgagaataagctcaatgaggagctgtataaatataaggtctgcatcaaagacaagaagagactgctggaaaagccttccgaagaactcaaaaagattcaacgaaacatactgtacaagctttaccagcttgattttccacagtacgttttttctggcatcaaaggtcggtctgcatttgggaatgccatttaccatatcaattgtaagtacatgctgaaactcgatatgtcaaaattctttcccaatactcacagaaacaacatttacgagttcttcaaggataaactcaagatgagcagtgacgtgagtagcatatgcacagatatagtgacagttaactacgagaaagaggatgttgaaatcgattacgaggtgtatgacttcttaaagaggaaaaagatcaagaacacgaatcatttgccctccggaacccctacgagccaaattctgtcttatctagcgaatatcgatatgttcgacaagattatagagtacaccaagaagcacaaactgcagtgttctatttatgtagatgacatcaccatctcatcctcaaacagatacatcactaaaaaagaggagagcgaaattaaacgcatcattaaaaagcacaagcacaatctgtcgaaagagaaaaccattcgttatagcgtgaacgaatttaaaaaggtgactgggtttgtcattgacccaaacaatcgccttgtgattcccaacaaaatcaagagtaagatcaaaaaccagacaaagttcattaggaagaaggaactcgacgagcagcggaaaaactcaatcataggcctaaccaactttgctaatatcagcgtcgaaggaagttataagggcctgagggccacattgaagaatatctccacctccaatactgtatga

SEQ ID NO: 10604 - RNA, 918 nt, synthetic construct
  source 1..918: mol_type = other RNA
atgaacaagtataaatgcaccctgtttaattgcaaatccatcaaaaaactccagaaatacctgttcatccagaacaagaacaactttaagaagatttccaacgagttgaaaaacaatccccttaacttctacgtgtcctttaagaataacacagggcgagagctgttctcatgtaatgagcagatcaaaaagatccacaaaagattgcagaaactcttcaacgtggaaaaaagcgactacctgaaaagtggagtcaaaaaagaatctcatatcaccaatgtgaagttccataagaacagcaatttctttctactgctggacattaagaatttttacccgtctataacgaagcaaaagatcaaaaaacagctgatcactacatacaatcaatctagtgatgtagccgagattattagcaatatggtgaccgtcccacaagaaaaggcgttaggcaagcgcgccctggtgacaggctcagtgctaagccagttcttcgcatacatgataaacaagaagatgtttgacgagcttgataagatctccaaagaagagaatattcggttcagcctgtatgttgatgacctcacttttagcagtaacgttcctgtttcctatttgttttataccaaggtgtacaacatcattcggaaaaacgggtacattattcactcaggtaagatctatcgtggtaagattggcaataaatctaagatcactggagtacatatcacaaaatatggattcaggctgctcgatagacacaagattaagatcagggaaatcataaagaacaaggactatcttgagaacaataaaccccttctcgggttactgaattatgctttgcaggtcaatccgaaatacagtaagtacatgtacctgataaagaagaagctcatatcggattccaatatttga

SEQ ID NO: 10605 - RNA, 978 nt, synthetic construct
  source 1..978: mol_type = other RNA
atgaacgcatatcaatgcaccctttacggcgtgaagagcctgaacaaattgcaacaatttctgcagatcaaggccaaacaagaatttaaggccctgtcaagttctgtgaaatctacacccctgaaatattatagcccctttaaggatgagaataaacgggagctcttcaactgtagctctcacatcaccttcctgcacaaaaaggtaatgcgattatttaatctcgagcagtctacctatctgaaatcaggtgtgaagaaagagtcacacataacaaatgctaaagaacatcagaacagtaacttctttctgctgatcgacatcaagggcttctatcctagcataacgaagtctaagattaaaactcaactgattcagacctacaaacagtccaaagatgtggctgagttcctgtctaacttattgacagtgcctcaggagaaatcgctcgggaaaagagcacttgtcactgggagccccctttcccagtggtttgcgtatgtcattaacaagaagatgttcgatgaactttacaatgtgtccaaggaagaaaacataatcttcagtgtttacgtagatgacatcaccttcagctccaaatcgattatttcctacaagttctacacgaaaatctacaacatcatcaataagtacgagtatcgtattcaccagggaaagatgtataggggaaagctgtgtaacaaaactaaggtgaccgggattcagttcactaaatatggttttcgcttattggacaaacacaaagaaaagataaggaagatcgttaagtccaaagactgctccaatcagattaagtcactactcggcctcgttaattttgccatccaggtcaatccaagatacagtaagtacaagtacttgattgagaagagcctactcctgaagcatagcaatacaaaaaacaagaaccagtaccataagtcaccaaccaattccaaggccctgaagtatagttga

SEQ ID NO: 10606 - RNA, 903 nt, synthetic construct
  source 1..903: mol_type = other RNA
atgaatccttacagttgcaccctgtataactgcaaaagcttgaacaagctcaagtcctacttgaatattgaggacgataagtacttcaaatctctgaatgctaacctgagcgcgaatcccttcaaatttttccgtaagttcgagaaaaacgagagagaactgtttcgctgtaataaaagaatcacacagatacaccaacgattcatcaaactgtttaagatcgaggagagtgagtacttaaaatctggcattaagaaggaatcacacattaccaatgccctggctcataaagacagcaacttctttctattggtagatatcaagggcttctatccctctactacaaaggccaaaatcaagaaacagctgatcatgacatatcagcagtccagcaacgtggcagagtttatatcaaatgctgtgacagtcccgcaggagaaggccaacaataaacgcgccctcgttactggcagtgtgctatcccagtacttcgcatatgtcatcaacaagaaaatgtttgacgaactttacaagctgtcaaaacacaatgatgttatcttcacggtgtacgtggatgatatctccttctcgtctaagaaagtcctgacctataagtttcaccagcaagtctacaacataattaagaagtacgggtatactgtgcataacggaaaggtgtatagggggaagatcaataacaagtcaaaaattaccggtgtacaaattaccaagtacggctttaggcttctcaccaaacataaggacaaaattaaggaactgaagaacaaaatcgacataaaatccaaacggagcctcctcggaatgttaaattatgccattcaggttaatccaaagtataggcggtacaagaacctgtttaagaactacgaagaacttaattga

SEQ ID NO: 10607 - RNA, 906 nt, synthetic construct
  source 1..906: mol_type = other RNA
atgtttacctgcactctgtacaattgtaagtcactgaacagtctccagaagtatttactgatcaagaccaaggagttcaaaagcttgtctattgaactgaaggaaatccctcacaagttctttaaaagctttaccgatgataagggaagagagctgttcaggtgcaatggacaagtcacgaagttacataagagattgatgaagcttttcaacgttgagattcctatctatcttaagagcggcgttaaaaaacagtcccacatcactaacgtcaaataccatgagagttctaattttttcctcctgattgacgtgaaacggttttatccaagcatcaccaagagtaagattaagaaacagctgattacaacctacaaacaaagtagcaatgtggccgagtttatatcaaacctggtgacggtgccccaaaaaaagtccaacaataagcgagctctcgtgacaggctctccactctcccagtacttcgcattcattatcaacaagaaaatgttcgacgagctgaacaaaatatcgatcgaagaggacgtaaagttctcagtatatgtcgatgatatgacattttcatccaaacaggtgatctcctacaagtttcatcaaaaagtcttctctatcctgactaagtacgggtttgttacacacttgattggcaataagaaaacttataggggcaaagtcggggcgaaatctaagataaccggcgtgcatattacaaaatacggtctgcgcctcttgcagaaacacaaggacagcatccagcacattataaaacagaatctgcacgaagaaaaggggaaaactcttcttggactagtgtactatgccatccaggtgaatcccaagtacgacaagtataaacggttactagagaagtacaacaagctctga

SEQ ID NO: 10608 - RNA, 957 nt, synthetic construct
  source 1..957: mol_type = other RNA
atgattaagtacaaccttgacattttcaagaactttacctcaatagagaagacgtgtgaatttctctgcgtgaataaagtgctgaagtacaacatcatcaacaacaacatcaaagagtgttatatcaccgaaataaacgataatgggagggaaattcataagcccattttcttcctgaaaaagactcagaagaagctgctcaaatgcttacttcccaaagttctacctaagtacctgtttgcgcctagcatcaagaacacaaataagaacaacatcgagaatgcaaggtaccacctgggcaaaaaatactttctgaccatggatatcagctcattttataacagcatcaagggaaacactatttacgacctctttttcaacaagttcaaattgaactctgacattgctttgtttatcaccaaactcaccgtatacgataatggaaaggaaacgttcctgtccacaggttctccgagttcccagatcttggcttatctctgttactcggacgtctttgacaacatttacaacttgtgccttaaaaaaggcattagattctccctgtatgtggacgacatgaccttcagcagtgatataaagtttacaaacaagcttcccaacaagataattgacattttcgagaagaacaacctgaagataaaaccagagaaaactaagcgatataacaaaggctatgccaaaataacaggggtcatcctcaagaacaataagctgtacatcaagaattccaaacggaaagatattatcgaaaacctgaaactcctaaacaagtctaacgatatcattaagaaggagatcgagaacaacaacatcgagataatcaagacaattagcaagttaaacggtctgctgaattatactaaacaaatcgaagaggatcacttcctggccaatagaaatcgcatccggaagttgtataaacttattccaaaatga

SEQ ID NO: 10609 - RNA, 954 nt, synthetic construct
  source 1..954: mol_type = other RNA
atgcaatacaataattgcatactttacagcctgaactctaaaaagaaactcgtgaagattctcattgtgaacaagaacatcaacaagaagaaactcgttaaaatcttctctaaggaggaacaactgaagatcttgattgaaaaaagcaagaaggtacaactgaccgacaagaaaacacgcaataaaattctgaacagtactaacatcacgtttaatgagaacatacaccgtcaatttacatatgcccagaaaaagtcagactataagatgatccttaagaaactgtctaagattctgagcatatgggtcgaaaaaaacaacctgaactacttatactccattatcaaaaacgtcgattacgtcaaaaacgcttatttccataaggagaacaactactttctgaagatcgacttcaagaactactttaacaacatctcatccctccagatctttaatttcttcaagtacaagctgaacactagtatagacattgccaggatattgacagttttgagtgtggcagatatcaataataccaatcttaaacagggcctcgaaactagccctattctgtccttcttagtgaatatcgagattttcgaagagatataccagtactgtatcgagaaaaagtttaagatgtccctgtatgtggacgatttagttatctcaagcaaaaatcccatcaacaaaaaggagattcagtttgtattcaacatcctaatcaagaacaagctaaagatcaatcgacggaaaatcaaataccagaacctgtacaataacatcgtgattataaccggaattcagattctgaagaatcacaatctcaaaccaatcaacaaaacctgcaagaagttgagaattgagaaaaagatctctaagaaccagaatgtgattaatgggcttatttcgaacctcaaatacatccagcagataaatgataagaacaaatga

SEQ ID NO: 10610 - RNA, 1002 nt, synthetic construct
  source 1..1002: mol_type = other RNA
atgaattacaaagagtgctctatctacaagataacaaagaagagtgacgtaaattacctcctggacaacgccgacaaagccacaaacatcaataagtaccaccagtatattactacctacgtggtccttgatcctaatgggaaaccaaaaaggctgatcgaatgcattgaggaaaagtataggcacactaacaaagtcctattcaacttactcaagagcatcgaaacccctgaatggcatttctctaaaaaggctgttagctacctggacaacgccttttatcacctcgataatcggtacatgttaaccttggacattaagaagtttttccccaatacttctcaagattccgtatatcgcttctttctgaacaaattcgagttgacacccgacatcgcaagttacctcgccaagttgtgcaccgtgaacattgatctttgtaaatatgatagcgtcgagatgaagaataacgtgaacacatatatggagatcaagaagataagacagcggaaccatctgatcacgggtgctagtacttcatgtctcctaagtttcctggtgcaccaggaaatgtttgaggaaatcagaggccttctgaaaaagcacgaaaagatgtccgtgtacgtcgatgatattactataagctcaaattgccccattgacaagaaactcgtgaagcagatatccgcgattctgtaccgatatggccatcggttgtccaagaacaagacaaagtactatacaaaagactcctacaaaagaaccaccggggtgattcttactccatcaaagcaggcccgaattccgaactctaaaaggaatgagatctttagcctgttcggcatctataaagaaaccggatatacctgtgagaaaacgaaggaccgtctgcgcggactgctgaattacgcacgctccatcgagcctaacgcttttccaagaatctatgaggcagttgttagccagtctaaatcgtactcaaaacaaaatcccaccaggtga

SEQ ID NO: 10611 - RNA, 1251 nt, synthetic construct
  source 1..1251: mol_type = other RNA
atgaatttaaacgaattgattgagcagcagatacaaaaatgtcggctgtacgggctgactaaaccactcatcattaaggagattctgaatattcccgattacgtggatattaagcacctggataaatcaattgactccttttacgacaccttttacataaagaagaactgggccaaggagagccagacaaaagaagaacggtataaagagattctgaacattgagaagaacatttccgagaggttcaccagtatccccgacggagaagacaaaacaaaataccggaagatagtcaccatcaatacagactggctcaagaaatctcagaagaagtttaacaagatcctcatgtccattctcttggacaagaaagtgagaggaatcaagcagaagtcaatcatcccttaccttcacagtgccgtgaaacagcgtagctatcatacaaatgctcaagcgcatgtcggagataaatacgtctttgccatcgatctgaaagatttctatcctagcgtaaccaagtataagctgtaccttttcttcaaaaacgagttcaatctgtcttcagatattgccatgttctatgcagttctcagtacctgcatctctgacgatggcacttaccgcttaggtcaaggcctctcacagtccagcactttagcttatctggttaactattcccttttcaactatctgtacgagctaagcaaggtcgaagacattgatatgtctatttatgtggatgacgttgtgttctctagcaaaaacaaaatctcgcaggactttatagataaactgttcggcatcataaagtccaacaatatgcagatcaagcgacaaaaggtacattattacaagaaggaatcggtaaagaagatcacgggtgtgtatgtgaatggcaataagaccagggtggcaaatcacaagcactatgagtttcatacgcagtacaaatacttgaagaaccatatccttaacgtgaaaaccatcgaagactattacaagatctataacttgtacctcaagttttacgggaatttccaacacattaaaatggttgaaagcagagtgcacgataggtacgaaaagttcatcaaagactttgacgagttttttccaaaagggataaacaaaaagcagaagagtatcaactaccagaaagacaacattaagaatgtgactgaccgcgagaaactaaataaatgctatcagaagctgctgaataaaaataagatcatagagtctgtcctgtga

SEQ ID NO: 10612 - RNA, 1251 nt, synthetic construct
  source 1..1251: mol_type = other RNA
atgaatctcgacaacttactggaggagaaaattcgcgagtcgagactgtacggagtgaccaaaccgatgattataaaggagatgttgaatatccctgaagacatcgacatcaagaaccttgataagaacattgacagcttctacgatacgttctatataaaaaagacctgggttcagggtagtaaaacaaaggaggagaaaatcaaggagattctcaacatagaaaagaccacttctgaaagatacaaaagcattccagatggagaggagaaaacgaaataccggaagatcgtcacaattaatagcgactggcttaagaaatcccagaagaagttcaacaaaatcctgatgaacatcctgctggataaaaagatcaggggcgtgaagcagaatagcataattccctacttacattcagccgttaaacaaagatcttatcacacaaacgcccaggtgcacgtgggggacaagtacgtgttcgcaatagatcttaaagacttttatccctccgtgactaaatacaagctcttcctgttctttaaggataagtttaacctgtctagtgatattgctatgttttacagtgtcctctcgacatgcttagcagacgacggttcttatcgattgggccaagggttgtcccaatctagtaccctggcgtatctcgtgaattattccctgtttaactatctgtacaacctcgccaaaaatgacgacatcgaaatgtccatttatgttgatgacgtgatcttttccagcaaaaatgagatttctcaggtctttatcgataaactattcggaatcatcaagggcaatgacatgaggattaaacgccaaaaggtacacagttataagaaagagagcgtaaaaaaggtcaccggcgtcttcatcaatggtaataagactcgggttgctaatcacaagcattacgaatttcatatgcagtataagtacctcaagaaacacataatcgatatcaagtccatcgaacagtacttcaagatttataacctgtaccttaagttctacggcaattttcagcatatcaaaatggtggaagggcgggtacacgatcgttacattaagttcatcaaggaatatgacgacttctttcctaaaggaatcaacaagaaacagaagaatgtcaactataggaaagggaacattaagaacatatcagattcagagaagctgaaatcaagctacaaacgactgctaaagattaataaggtgtcaaaaagcgtgttgtga

SEQ ID NO: 10613 - RNA, 1266 nt, synthetic construct
  source 1..1266: mol_type = other RNA
atggacctcaataaactgattgaggagaatatctccaaaaacaggattactggcttgaccaaaccgaagattatcaaggagatgttatctataccagagaacatcaacctcaaaaaactggatcagatcataaatagctgctacagcactttctatattaagaagaattggtcgaagcatcaggaaacagaagaggaaaagtacatcagataccttaatattcaccaggaactgtctgaacgtattcaacagctgcctgaaaatgccgacaaaaccaaatacaggaaaatccttgtgattaatgagccatggctcaaagtgtcacaaaaaaaactgaataagctgctgacatccattctgttgacaaaaaaggagaaagcgaagaaaagagaatcaattgtaccttatctgcactcaagcgtaaaacagaggtcatacactacgaacgcacaggcccatattggggataagtatgttttcgctatcgatctcaaggatttttaccctagtgtcacgaaggttaagattttcaacttcttcaagaagcactttaagcttccctccgatatcgctatgatctatgccgtgcttagtacatacaaatctgacaatggagagtattgcctggggcagggattatcccagagctccaccttggcatttctggtcaattaccgactgtttaactatttatacctggaggctcagaagctcggtattgaaatgactatctatgtcgacgacgtgatatttagcagtagcagtcctattccacagaagtttataaaccgcctattcggcatcattaaggagaacaaaatgtccataaagcggcggaaggtgtattactatggcaagaaacaaacaaagaagatcaccgggatatacattaagaaaaacaaaaccagcgtggcctacgagaaacataaagaaatcagaatccagtacaactatctcaaagaaaagatcaaggagataaagactttctctgactacctatgtatctacaacctttacctgaaattctacggaaactaccaccatatcttgaatgtggagaagaagatcaataacaagatcctgaacttcgtggataagtatgatgagttttttcccaaaggtatacacaaaaaacagaagcagccctattctgtccaaaatatcaagaccatcaatgacgtccaacgcttgaataagtgttatcagaagctcaagaacaaaaacctaaacgaagtgattctggactatcccaacgttaatctctga

SEQ ID NO: 10614 - RNA, 1227 nt, synthetic construct
  source 1..1227: mol_type = other RNA
atgaaaaagaattttgacggtctaaaacggctgaacaaaaagaagaccatttactcactgttcgagtttcctaaagcagcatccaacaaggactacgactttagcaataattatgagttccgctacctggcaaagaagaaggatgacataaatagaaaggagcgaaaactcgaaagacttacagggtatatccagctgcaagatagcgataaagatgctcttatgcgctccaggcccaaagactacgacaaaaattcctatcggaccatagtgaactattctaactcctccgattggttaaagaaagcccagaagaagatccataaatatatcgtgaaggagctaggagaagtcgaatacctgcacagtaccatcaaatcaaagagctatgccactaatgcctttcagcacaggggagaaaactacactttggccatcgacctgaagaatttcttcacgtatgtttcgagggagaagctgcagtataccctgaaggatttcctacagatcgattctgacgtagctttcctgtacagttccatgttgactagtcccgtggatgagccgccgcatcatggagggaagtataacttgggccagggcctgccatcatctcctatcctggcttatttgtgtcacgcgagtctgttcgagtatatctacaataactcactcaaggaagagatcaccatgacagtgtatgtggatgatgtcgtgtttagtagcgttaaacccatcccacagcacttcattgacagactgtttggattatttaagcggaatggcctcgagattaacaaggataaaatacgcctttacatgaatggctctaccaagaaaataacagggacatacgtgagccctcagaagcttagcatcccaaatcgaaaacacgaagaacttcataacctctaccaaactctgaaggaaaagaaagaaaagattgagacgatggacgactacttgttcctctacaatatttacctcaaattctctggcaattaccaatacctcattcaggtagaatgcaggggtgaggacgggaaaatttctgtcaacccacggtacaagaaatttgagaagttaaacaacgagctgaacattctgtttcccagaggcctcaaaaagaagaagaagaaaaccccttatagcaaagaaaacatgtacttcgaggaatataagcaactcgaggagaaatataaactttccgtttcacgtctgaaatga

SEQ ID NO: 10615 - RNA, 978 nt, synthetic construct
  source 1..978: mol_type = other RNA
atgaaaattctcgaaaactgcaagctctttaaactgaacaagatcaagaccatatacaagaaattgaacatccccatagaggcacagcagaagaattttgacttcgattctctatacgacttcaaatacctgaagaaggactctaaagataacaacaagattagcaaagaggaacgctttgagaaatatgtgaatattgagaagtccataccgcagctgattgatgagcgaccaggggacttcaataagagcaaatatcgggttattatcaacatcaatcaggagtggctgaaaaagagccagaaaaagttccacaagatcatagccaaggaactcaacaatatcccctatcttcattctaccatcaaacacaaaagttttgcgacgaatgcccataagcacattggtgaaaaattcaccttgactattgacctgaaaaacttcttcacatgcatttcgagagagactctagctaataaactgaaaacgcttcttgaaatcgattctgacatcgccatctattacagccgtttgtttacaagtccttctgataaacccccctacaataacgggcaatataacctgggacaaggactcccttcaagtccaatcctggcatttctctgtaactacactcttttcgaatatatcaacgatctcgctaagttatacaatacctccatgaccatttacgtggacgacatcaccttttcaagcgacttacctatttcccaggagtttatagacaagctgtttggtttgtttaagcagaatggcatgaggatcaatccaagtaagatccacctgtcaaaaaacaattccttcaagaagatcacaggcgtaaatattattgatggcaagccaaagatacctagcaggaaacatgaagagattatgatccaattcaagaccattaagacactgatgactatcaagtccttttcagattatttcgacgataaccaggtcatattctga

SEQ ID NO: 10616 - RNA, 1260 nt, synthetic construct
  source 1..1260: mol_type = other RNA
atggatagggtcaaagaatgtcttaaaaattgcagactgtacaagttcaacaatagaaagggtataaagcaactcttgaagatcccagacaatctgaacctgaacgacatacgcggcgaactgtctagctattacaacttcttctacctaaagaagccggataaaatcaagtcaaagatgagcaaagaagagattaggaataagtacctctcaattgaagagaatttggagatctacgatgagaggccggccgattacaccaaagacaaatatcgaatgcttatcaacatcagagagaaatggctgaagcagacccttaaacggattaataaactgctgagtcagagtctaatcaagaagaacaaaaagaacgtggaatatcctatcccctatctgcacagctctctcaaaaagcgatcctataatactaacgtgaaagctcacaagaaccataaatacatattggcgatagatctcaaagcattctaccccagcgtttcgtatgagaagatcattaacttctttcggcatgatttaaagctggagaaggacatagcagagatatatacagccctgtgcacttgtccattggatgatccacagcagggcaatatccaatacggcatcggccagggactggctacctctcccgtgttagcctttctgacgaattaccgtatgttcgagtatatttacagtatcgcccaaaaaagcgggatcgaaatgactgtgtatgttgacgacattgtcttttctagttccaaacctattgagcagacatttatcaattccctgtttggcattgtgaagaaaaataacctgaagatcaacaagaacaaggtaaaactctatggaccaaaacaggtgaaaaagatcaccggattatgcattattaaggggggttcaatcaaagtgcctaattccaagcactttgagacaaaaatacagtttgagtacctagtgaacaaaattctggtgattagcaatatcgacgactatctttctttctacaacttgttcctcaagtttaagggaaatgttcagtttatcgaacttgtcgaagacaaaattcccaaaaagtatagcgacttcattaaagagtacaaggattatttcctctacggggtccctaaaatcaagaagtccaagatttacacacaatcaaacgtatccaatgacgattacaagaacttcgtcattatgtatgaacgcctcaagaaaaagatagacaaggtgaagaacaataagatcatcatgtga

SEQ ID NO: 10617 - RNA, 1242 nt, synthetic construct
  source 1..1242: mol_type = other RNA
atggacaatgttaaagagtgcttgaagaaatgccgcctgtattgctttaacagccgcaacggcatcaaaaatctgcttaatatacccaaagacttcgacctggagaatgtccgagacggcctgctgccctattacaattttttctacctcaaaaagcccgacaaaagcaaaaccaaggaaactccagaagagaggaagatgaaatatctctcaatcgaagaatcgtcagatatatatgacactaggccagatgattattccaaagacaagtaccggatgttaattaatatcaacgagaaatggctcaagaagaccttaaagaagattaacaagctactgagcttgtcccttatcaagaagaacaaaaaggaagtcaactacccgattccttatcttcactcatccttgaaaaagcggagttacaaaacaaatgtggaggctcataattcaaacaaatacctgctggcgatcgatattcagaacttttacccaagcatatcctgtgaaaagatcttcaatttcttcaagtacgaccttaatttggatgacgatattgccggaatttatacttccctgtgtacctgtcccttagacgatcctgtcgtgggaaaatttgaatatggaattggtcaagggctggccacgagccctgtgttggcatttctgtctaattatcggatgttcgagtacatcaatgatttcgccacaaagaacaatatcgaaatgactgtctacgtggacgatgtagttttttctagcaacaaaccaatcaagcaagagttcatcaacagtctgtttggcataataaaacgcaatggtctgcgaataaaaaagtccaaggttaagatctatggtcccaatcaggacaaaaagattacgggcctctgcattacaaagggggggaaagtgagagtgcctagatctaaacacgaggagctgaaaattcagtatgactacctctctaaggaggtgctgaacatcaagaacatcaacaactatttcaacttctacaacctctttctgaaatttaaggggaatgtgcagtttgtactacttgtcgaggaacgtgctacaaccaagcatttcaagtttatcgaagagtacaaggatttctttctatacggcatcagaaagaacaaaaagggaaacaagtataccaaagacaacatttctgaagaggattacaagaaattcatcctcaaatacgagaatctgaggaagaagattgatagtctcaagtga

SEQ ID NO: 10618 - RNA, 1017 nt, synthetic construct
  source 1..1017: mol_type = other RNA
atgcagttcaacaattccaagctctatggcctgagcaataagaaacttttggccgacattctgagtgttgacaaaaagtcacttaagaatgtttccctcgaattcctcccctacaaactgccacaacatctatccacaattaacggcaagcaaagagatatatacaaccctaatgacgaacacaagaaggctctgcggaaactcgtccgcttacttatgcaggttgagctgccttcctatgtcttcgggggaatcaaggagaagagccacattcagaatgccagtatccataaggctaataactacctgatgctcattgacatccagaatttcttcccatcgacgttagatagctatgtgtatgatctctttaagggaaagtttcagatggccgacgatatagcaaaaattctcaccgatttcgtaaccatcccttgcgagaaaaaagacggtaggtatctgccccagggctatccaactagtccgattctatcatatttggcatatgtcggtatgtataatgaattggccactgtggccgtggaaaatgagatgattttttcctgctactacgatgatctgacattttcaagcaataagttcatcaacaagagcttgaaacgtaagtgttaccagatcatcgaaaagcaccaactgaaagtgcatcccatcaaatctaagctgatagtaaagaaaggggtggaagtgaccggggtttttctggatgacctcggagaggcaaaggcgcccaaaaagctgcttaagaagctgcaggagtcatacgagaaggtgaaaaatatggataggaacccttctgagtttaccaaaatgaactttgtcgacgagttaaacaaactgcagggccttatctctgctgtcaaatctatcgagaaaaaccggaagattgacctgtttttgaacgaactgaagttcatacgcaagaaatacaacgtgccatacagaaagaacgacgtgaaaaaatacttcaacacagaatacgctagcattatccgatga

SEQ ID NO: 10619 - RNA, 1017 nt, synthetic construct
  source 1..1017: mol_type = other RNA
atgcagttcaacaacagtaagctgtttggcctgtcaaataagaagctcctggccgacaccctgaatgtcgagaagaaatctctaaagaacgtggcaattgaattcgtgccttataagttgcccccccagctctctaatataaacggaaaacagcgggatttatacaatccaaatgaggagcacaaaaaggccctgcgcaaactcgtcaagctgttgatgcaggtcgaactgccctcatatgtttttggaggcattaaggaaaaatcccacattcagaacgcgtttgttcataagcaaaacaaatacctgatgctgatcgatatccagaatttcttcccttctaccatggatagctacgtgtatgaccttttcaagagaaaattccaaatggaagaggatctggctaagatcttgacagactttgtgacaattcagtgtgaacgaaaagaaggcaggtaccttccacaagggtatcctaccagcccaattctaagctacttggcctatgtagatatgtataatgagcttgaagcactggcagtggaaaatggtatgtctttttcctgctactacgacgacctgacattttcgagcaacaagtttataaacaagagcctcaagagaaagtgctcccagatcatagagaagtaccaattcaaaatccaccccaccaaatccaagctgattgtgaaagagggcgtggaagttactggggtgttcctcgatgatctagggaacctgaaggccccaaagaaactgctcaagaaactgcagaaatcatatgacaaagtcaaggagatgaatgagaatccgagtggatttactaaaaaaaacttcgttgacgagcttaacaggctccagggtcttgtggctgccgtccgcagtatcgagaacaatcgtaaggtaaacttattcctcaatgagttgaagtacatcagaaggaaatataacgtgccttaccggaagaaagacatcaaaaagtactttaagacggagcatgctttactgattcagtga

SEQ ID NO: 10620 - RNA, 1017 nt, synthetic construct
  source 1..1017: mol_type = other RNA
atgaattttaacaatagtaaactctacggcctgagcaataagaaaatcctggccgatctcttgaaggtggataagaagcggttaaaaaatgtcatcgaagagtttgttccgtataaacttccaaccgagctttctaccattaacggaaaaaagagagacttgtacaaccctaaaaacgagcacaagaaagctctgaaaaagctggtagggctgctaatgcaggtgggtattccatcctacgtgtacggtggaatcaaggaacgcagtcacatccaaaacgcatcaatccaccggactaaaaagtacctgatgttgatagacattcagaatttcttcccttcgactagcgattcctatatctataacctgttcaaagatcgcttcggaatggccaatgacctggcaaaaatccttacagatttcgtgactgttcaatgcgagaaccgtgaagggcgatatctgccacaggggtatcccacatcccccgtcctgagttacctctcttatgccgccatgtatcaagaactcctgcatctggccgtcgaaaacggcatgcagttttcctgctactatgacgacctcacattttccagcgacaaattcatctctaagtcactaaagaggaaatgttctcagataatagagaggtaccatttcaaaattcaccccaccaagagtaagctcatggtgaagaagggcgtcgaggtgaccggtgtgttcttaggggatagcggcgaggttaaggcccccaaaaaactgttgaagaaggtgcagaattcatacgaaaaggtgaaggagatggacaaaaaccctaatgcttttacgaagattgattttgtggacgaacttaatagctttcagggactcattgctgcagttaaaagcatagaaaatgatcggaaggtcgacttatatttgaacgagctgaagcacattagaaagaaatacgacgtaccttacaggaagggctcagcgaaggagcattttagatctgagaacgctaaattcatcctttga

SEQ ID NO: 10621 - RNA, 1017 nt, synthetic construct
  source 1..1017: mol_type = other RNA
atgaatttcaacaactctcgtttatacgcccttagcaataagaaggtgttggctgacatcctcggcatcgacaagaaacggctgaagaatgtgatccaggaattcgtgccctatcggctgccacctgaattgagcacagtgaatggcaagcaaaggaatctgtacaatccaaatgatgaacataagagagctctgcgaaaactcgtcagactgctgatgcaactcgaaattccgccttacgtgtatggcgggatcaaggagaaatctcatattcagaacgcatcaatacacaagaaaggaaaatacctgatgcttatcgatatacagaacttctttccctctacatcggatagctacgtgtacgacctgtttaagaacaaattcggcatggctaacgacattgccaaaatcctcactaatttcgtaaccgtcccctgcgaaaattccgatgggcggtatttaccacaggggtacccgacttcccctattctgtcatacttgagttatctcgatatgtacgaggagctgctttacctagcagtagaaaacggtatgaagttcagttgctattatgatgatctgacgttctcttccgacatatttattagcaagagccttaagcgcaagtgtagtcagatcatcggaaagtaccactttaaaattcaccccaccaagtcaaagttgattatgaagaagggagttgaggttaccggcatatttttgaacgaccttggggagatcaaggtgcccaagaaactgctgaagaaactacagtccagttatgagaaagttaaagaaatgggtgagaacccatcaacctatataaaatccgacttcgtcgatgaactaaacagactgcagggactgattgccgccgtgaagtctatcgaggtgaatcgcaaggtcgacctctacttaaacgagctcaaatatatcaggaagaaatacgacgtcccttataggaagagctccatccataaacactttaaaacagagagcgcgaaatttattatgtga

SEQ ID NO: 10622 - RNA, 1014 nt, synthetic construct
  source 1..1014: mol_type = other RNA
atggatttctccgcttccaaattgtttgggattagcaacaagaaatacgttgccgagctgctgaatgtggagaaggcaaaactgaagaatgtgtcgtctgaatttgtgccctataaatttgaacagagtgtcaagggcaaaaaacggatcctctataacccaaacgatatccataaggccatcctgaagaagattacaaagatgatcagccagctggacatcccggattacacatttgggggaattaaaggccgcaattatatagacaatgctaatgtgcatcgggacaacagctatttactgctggtcgatatcaagaacttctttccctccaccagagactcttacatctacggtttgttcaagaataagttcgagatgccatccgatatagctaaaatcttcacagatctggtgaccgtaccttgcgaaaatggagaggggcgatacctccctcaggggtaccctacaagccccatcttatccttctttgcatacttggacatgtatgaggaaattttcgaagtggtgcgcgccaacaacatgggcttttcttgttattatgacgatctgactctcagctctaataagttcattgcgaaaagtgtcaaaagaagggtcacccggattatcaggaagtacggattcgaagttcaccccactaagagtaggcttgtgatcaaaaagtacacgaaagtaaccggtgtcattcttaaagaggatgagatcgttgcccctaaggctctactgcgaaagttgcacgacactcataacctcatgaggcttatggataaggactgtgttaagcacaccaaagaggacttcattgatgtgtgcaataaggtacaaggcctcatatcagccatcaaatcaattaacgaccagaaaaagctagacatatacattaacacgctgacacacatcagaaagaagtacaacgtgccatatcgcaaagccaacatcgcaaccagttttaatactgactatggccgtcttataggagtgtcaatttga

SEQ ID NO: 10623 - RNA, 1026 nt, synthetic construct
  source 1..1026: mol_type = other RNA
atggacttttcaacaagcaaacttttcgggatttctaataagaagtacgtcgcagagctgttaaacgtagagaaggtcaagcttaagaatgtgagttcggagtttgtgccataccggtttgagcagagtgtgaagggaaagaaaagagttctgtacaaccccaatgatgcccataaggcaatcctcaaaaaaatcgttagaatgatctcacagctgtacttgcctggatatacctttggcggcattaagggccgcaattatattgacaatgctaatgtgcatcgaaacaactcctacttgcttctcgtggacatcaaaaattttttcccaagtacaagggacagttacatctatgacctgttcaagaacaaattcgagatgccccccgatatcgccaagatattcacagatttggtgaccgtaccttgtgaaagcggtgaaggcaggtatttgcctcaggggtacccgacctccccgattctgtcatttttttcttacctggacatgtatgaagaaatcctcaaagtgacgctggagaataatatgctgttctcctgctattatgatgacctaactttgtcttccaacaagttcattgctaaatccgtgaaacgaagggtgacccgcatcattcaaaagtacggcttcgaagttcaccctaccaagagccggctggtgatcaaaagacacactaaagttaccggtgtcatattaaaagagaatgatattgccgctcccaaagcgttactaaaaaaactgcacgacacttacaacctgctgctgtctctcgataaaaactgcacgaaatatactaaggaagagtttgtcgatgtctgtaacaagcttcaggggctcattagcgccatcaagagcattaacgacaagaagaaactcgaaatgtaccacaacacactttctcatatccggaagaagtataatgtaccatacaagcgcgcaaacatatccacctcattcgagacagattatggaaagctcataggaactctgccacgtcacatcagctga

SEQ ID NO: 10624 - RNA, 1209 nt, synthetic construct
  source 1..1209: mol_type = other RNA
atgaaacacgcaaagcacaggaagaagcagtgcctgaatgactattatcaggccttaaaagagattacgatcgtgaaaaacctggtgtacgtggtgaaagctatccaatatctgacgatccttaagatcatcatcgccattattttcttcacccttcaagtcatcgtgaaaatcatctcatgggtcattccatatctggagattatctacaacttcctgtcccaggtaacaagtctcttttgctgctttcaaaggggtaatgtcaaaatgtactggaagtcatgtaggctctacggcgtgaagagcaaacgggaactgtcctatctgttgaaggttcctctggagtcactcaaaaacatcgacgaaaactatatcagcgagaatttcgtatacgatgggcgggagctgactaaccccagtgacaagcttaagaaggtgctagaaagaattctaggctatctcttcatgctccgcattccaccctacgagtacggaggcatcaagggaagaaacgccattcagaatgtgcagagacacgtgggccatgggtttatcctgagaacagatatacggcattttttccccaatactaagtatgacaatgtgttcgatctcttccgtaataaattgaacatgtccatcgattgtgccacaatactgaccctgctgactaccaatgtcgctgttaacgcatcttataggagcttggcgcagggctacccaacatcgccggttttgtctctcctgtcctaccttgacttgtttaacgagatttccgactatgcagatgaacacaagttcacttttaccgcttactacgacgatttaacactgtcctctgaaacctttattaacaaatcgcacctgcgaatgattgagcacattataaagaagtacggatttgacgcccatcctcaaaagactaaacttgtgaaggttagcaaggtccatagcaagataaagataaccggcgtgctgttgcagaaagatggtttatacgtccctaaaaaactctataaggggctttacgaatacgtacagcgcctccggagtgtcttaagcggagacgtttcaatcagtaatgaagagaaaaagacactgatacagcaggtacgcggttgtatcgctgccatccaggtgatatctgatgatgaaagcttccaggggtatgaggacatggcgcgatctctagagaaaaccattatttga

SEQ ID NO: 10625 - RNA, 999 nt, synthetic construct
  source 1..999: mol_type = other RNA
atgatcttcttccttaagttgcaccttttttttgtcgctttcaaggaggtgcgaaaggtgtattggaaatcttgcccattgtatcgcgtcaagtccaaaagaaagctctcatacctgttaaaagtaccagttgagtccttcaaaaacgtcgatgaaaactacataagcgagaactttgagaaggacggtaggaatctgaccaaccctagtgataaactgaaggtggttcttgagaggatcctcgactatctgtttatgctgaagatcccgccatacgaatacggagggatcaagggcagaaatgccattcagaatgtacaaagacacgtgggacatgggtttattctgagaaccgatattcggcatttttttcccaacaccaagtataataacgtgttcgacttcttccgcaataagctggacatgtctatagattgcgcaacaattctgtctttactgacaaccaacattgcacgcaatagcgatcatcgttctctcgcccaggggtatcctactagccctgtgttgagccttctggcctatttgaatttgttcaacgaaatttcctcctacgcaaatgagaagggatttactttcacagcttactacgacgacctgacgctgtcaagcaacgacatcatctcccactcacacctacgaatggtgaaacatatcatcgaaaaatatggcttcgaggcccacccccggaaaaccaaactcgttaacgtcagcaagtttcaatccaaaatcaagatcacaggagtgctgctccagaaagacggcctttacgtacccaagaagctatacaagggcctacacgagtctgtcaatcagctgaacctggctctcaatagtaggcaggggataagtaacaaagagaagaaaaagctcgtggaacaggttaggggttgtattgctgccatacattcaatcaatgacgatactgtgttccagggctacgaagatatggcgcggcacttagaaaaatcgattgtgtga

SEQ ID NO: 10626 - RNA, 966 nt, synthetic construct
  source 1..966: mol_type = other RNA
atgtattggaaatcctgccctctgtacggcgtggaatcgaagcgaaagctgagctatttacttaaggtgtctttaaactccctcagagatgtcgatctaaattatccctccgagaattttgaggagaagggaagaaatctgaccaacccctcaccaaagctcaagacagttctcgaaactatcctgaactacctgtttaaattacgtattccccagtacgagttcgggggaataaaaggcaggaatgccgtgcaaaatgtgcagtgtcatgtcggtcatgggtatatcctgcggactgacatccggcactttttcccaaacaccaattataataacgtgtacgacttctttcggaacaagatgaagatgagcatcgactgcgctaccatcatatctctgctgacaaccaacatagctgctggagcgcagcacaggtcacttgctcagggctacccaacgagtcccgtcctatctctgcttgtgtacctgaacctgttcgacgagatcgattactacgccagagcacatgattttaccttcacagcctactacgatgatctcacactgagctcaacttctattatcaataagcagcacctgcgcaaagttaaacacattattcgaaagtatgggttcgaggcacaccctaagaaaactaagcttgtaattgtcaccgaaatccatagtaaaatcaagattacgggcgtgctcttgcagaaaaatgggttgtatattccgaagaagctgtacaagaaactccacgaagccgtcagcttgatcgatcctgtgttgaacggaaacctcaaatatagcgacgatgacaaaaagaagctagtagagcaagttaggggctgtattgccgccatagaagcgattagtttggaaaacgactttcagggttaccgcgaccaggcacgccatctggaaaaaacaatcgactatgagcaactttccgagaataaatga

SEQ ID NO: 10627 - RNA, 945 nt, synthetic construct
  source 1..945: mol_type = other RNA
atgcagttcacgacctgcaagctgtacgggattcagagcaaacggaagctgagttatatactaaagacatccctcgcttcgctcaaaaatgtcgacctctccttccagtctaaaaatttctaccagcagaacagactgctgacaaacccgagtgaggagcttaaagttattctgcaacggatcaccaagtacttatttacaatcggaatccctgaatacgagtttggaggtatcaaagaccgttcctttgtaactaatgtagagatgcatgttggccatgggtttgtgctcaggaccgatattcgccacttttttccaaacacccactacggcgatgtttacgtgttctttcacgaaataatgaacatgtcagtcgactgcgctaccattatggcgaaacttacaacttataggtgcaatcaaaactatcgctccctgccccagggctaccctacgtctccaatcctgagcttgttctcataccttaatatgttcgaggaaatcaatacctatgctgtgaaaaatgggttcacttttactgcctactatgacgatattacaatctcaagcaagagattcatcggacgaagccacctacgcgtgattattcatatactgaagaagtacggattccaagcacatccccagaaaacaaagttggtcaagatcagtaagaactctagcaggatcaaaattactggcttactgctccagaaagacgaaaccttggtgcccaaaaagctttataagaagttgcacgtggccatgaaaaacatcgattcagcactcaaacaatctaactcccgactgaacaaggctgatgccaagaagatagtgcagcaagcacgggggtgtatcgccgccattaacaccatcggcagtaatgatgaattccagggttatagcgaccagattagacagctggagaagaggtgttactattga

SEQ ID NO: 10628 - RNA, 1263 nt, synthetic construct
  source 1..1263: mol_type = other RNA
atgattaaaaagcataagattgtgcaggtaaagcagtggctcaaggagaagacttgcaaagatggaaagattaacttcacaaaaacctgcacctttctggccgcaattcaggtttgcctttggctgatagaaatcatttgtatgctgtgtggatttatcatcagtacgtttgtcgagattgcaccattccttgaggccttttttaaaatcctggaaaacctcgccagtactcttagttacaacctcaggcggtcattctttgtggacttttacaactctaagctatatggggttagcaacaaaaagtatctttccgagctcctgcacctggagaagtcaaccctaaagaagatcgacaaattctacgaagtgaaaccctttctgaagaaagtgaataagaaggagagactcttatataatccttctatgcagcacaaaatcgcacttaaacggatagtgaaaatgttgtcattcatcggatttcctgactacctgtgtggcggtgtgcccgaggtgtcctacgtgaccaacgccagcagacatctggagaagaataacctgcttctcttggatattactaacttcttcccatccactaaggatagctacgtctatgatttcttcctgaacacactaaatcagagtaccgatatcgcgaaaatcatggtcaatttgacaaccgccaaatcggaggacggtgattataggtttctcccccaagggtactcaacatcccctatgttgagcttctttgcctaccataagatgtatgaacgtttaaatgctttcgctgagaaaaatgacctgaccttcagcgcatactatgatgatttcaccttctcttctaaggactttatccctaagtacttaatgaaggaggctatcaaaattatctctgactatggcctctccgttaacgaaaaaaaaacaaagctcgtaaaggtgaatcacactaaaataaccggcgtcgtggtacataaagataagatgagcgtcccgaaagggctgttcaagaaaacgtatgagcactacctgactttgctggacatggacgaaaatacagagaattatacccaggataactttatcgacacgtgtaatcgaatgcagggctgcctggcggctattcaatccgttgagcccgaacgcaacctggaacactacaagaacatgatacgctatattaggaataagtacgacgtgccagtcgaaagaaaaaagaaggacaagtacttcaagaagaaagaagtgcggcaaacatga

SEQ ID NO: 10629 - RNA, 1227 nt, synthetic construct
  source 1..1227: mol_type = other RNA
atgatcaataaacataaaatcgtgcaggtgaagcagtggttaaaagagaaaacctgcaaggacgggaagctggacttcactaaaactattgcttttctcgcagcaatccaagtttgcgtatggttgttcaagatcatttgtaggatctgcggtttctctattagtatttttatcgagatcgcaccttttctggaggctttcttcaaatttctcgaaaatctggctagtacccttagctatataaaggagggcgtcttcttttacggattctataacacaaagctttacggtgtctccaacaaaaaatacctgtcggaattgctacacctagagaaaagtaccttgaaaaaggtggataccttttacgaagtaaagcctttcctgaagaacattaatgggaaagaacgacttctctacaatccatccagccagcataaaatcgccctgaagagaacagtcaagatgttatccttcattggcttccctgactacctgtgtggcggcattcctgaggtgtcatacgtgacaaatgcctctcggcacttggagaagaagaatctcttgcttctggatatcaccaactttttcccaagcaccaaagactcttacgtgtatgacttttttaagaacacgctgaatcagtccactgatgttgcgaagattatggtgaatcttacaaccgcgactaataactctggaaattcaagattcctcccccaggggtattccacttcgcccatgctgtcattcttcgcttatcataagatgtatgacaggctaaacacgtttgccgagaagaacaacctgacattttctgcctactacgacgatttcacttttagcagcaacgagtttatcccgaaatattgcatgaaggaagccattaagatcattaatgattacgggttatccgtcaacgagaacaaaaccaagctggttaagctcaatcacacgaaaataactggcataatagtgcatgaggataaaatgagcgtccccaagggactgtttaaaaaaaccttcgaacactatctgaccctcctggacatggataagtatcccgaaaagtacagccaatacaatttcatagacacatgtaatcgcatgcagggatgtctcgcagccatccagtcagtggagccagaacgcaatctggatcactacaagaacacaatccggtatgttaggagtaagtataacgtgccagtaaacaagaaaaacaaatga

SEQ ID NO: 10630 - RNA, 972 nt, synthetic construct
  source 1..972: mol_type = other RNA
atggattttagcaatacaaagcttcacggtgtatccaacaaaaagtacttatcagagctgatccacttagaactgcacacactcaagaaggttgaccaattctatactgtcacccccttcgtcaaaaacatcaatgataaggagaggattttgtacaaccctagtttaccacataaaatcgccctcaagcggattgtgaagatgcttgggtacatcgggtttccggactacctgtgcggaggaatacctaatgtgtcctacgtctcaaatgcatctagacatctgatgcagaagaatcttctgctcctggacattacaaacttctttcccagtactagcgattcctacgtttacgatttcttcaaaaacactctcaatcagtcgaccgatattgctaaaattatggtgaacctgaccacagcgaagaacgagtctaacaacgttcgctttttgccccaggggtattccaccagtccaatcctttcattcctatcttactttcgtatgtatgaacagctcaatgatttcgccttgaacaataacctggtcttcagcgcttactatgacgactttacttttagctccaataaattcatccctaagtactacctcaaggaaacaacgaagattatcaacaagtatggtctaaacgtgaatgagcgaaaaagcaagatcgtgaagataaatcacaccaaagtgacgggcgtaattatccatgacgaaaagatcaaggccgccaaaggcctgtttaggaaaatgtatgagtgttatctgactctgctggacgtggacgtcaataacaatttctatagcaaggacgacttgattaacacctgtaataaaatgcagggctgcctggctgcaatacagtccattgaaagagatcgcaacctcgagcactaccaaaacatgatcaggtatatcagacggaaatatgatgtgccagtgtcaaaaaaatctataaatcggtga

SEQ ID NO: 10631 - RNA, 993 nt, synthetic construct
  source 1..993: mol_type = other RNA
atggacttcgctaagtccaggttgtacggcgttagtaataagaaatacctgtcagaactgctgcagctggaactgaaaacgttaaaggatgtcgattctaattacgaggtggaaccattctttaaagaagtcaatgggaaaatcagagaactctacaacccctctgatgcccataagcgtgctctgaaaaatatcgttaagcgcctgtcgtatattgggtttccacactatatttacggcggaattcccctggtaggatacgtggataacgcttcacggcatctcgaaaaagagtaccttctccttttggacataactaacttctttccgtctactaaagactcttacgtctatgacttctttcacaatactatgtcccagcccgccgatatagccaaaattttaaccaacctcactacaatcaagaaggacgaagagcgatttctacctcagggtttcagcacaagtcccatgctgtcctttcttagctatcaccagatgtatgaggagctggacgtgttctcaaaacggaataactttacattcagcgcatactatgatgatttcacctttagctccgacaagtttatacatacgagcaagaggagagaggccatcgcgatcatagagaaatatggattgcaagtcaacaaaaagaagacacggctaacaatctgcaatcatacccgcgtgactggtgtgattatccacggcgacaccaagaaggcacctaagaagctgcacaagaaaatgtatgactactacaggctgttactcgacatggacaaagatccaacaaagtacacccaggatgagttcattgatacctgcaatagattgcaggggtgtattgccgcaattcaaagtatcgagaaggagcgaaaccttgaacattataaaaacaccctccgctacatcaggaccaagttcgacgtgcctgtagagaagaagaagaaacacctgtatttcaaaaacgtgcagatcaataactga

SEQ ID NO: 10632 - RNA, 999 nt, synthetic construct
  source 1..999: mol_type = other RNA
atggaattcactaaaagcaagttgtttgggattagcaacaagaagtacctatccgagttactgaacgttgagcttaagaccatcaaggatgtcgactcaaattacaaagtggagcccttcttcaaagaggtgaatggaaagaaccgggaactgtacaatccaagtgaagtgcacaaaaaggtcctcaaaaagatcgtgaaactgctctcttgcattgagtatcccgagtacgtgtatggcggtattccaaacgtaggctatgtggacaatgcatccagacatttggaaaaggagtatctgctgttgcttgacataaccaacttttttccaagtaccaaagatagctacgtatacaacttcttctacaatactatgtgccagtcgtccgatatcgcgaaaatactcaccaatctcacgactgtgaagattgagaacggtgacgagaggtttctacctcaaggcttttcaacgtctcctattctgtcatttctcgcttaccatgaaatgtatgagaagctggagggcttcgcaaagaacaataaatttacattctccgcctattacgacgattttaccttcagctctaataaattcatccatgccaacaaaaggcgagaggctatagccatcatcgaaaaatacggactgcaggttaataacaaaaagacccggttaacaatctgcaattatacacgcattacaggggttatcattaatgggaatattaagaaggcccctaaaaagctgcacaagaagatgtacgattgttatcgcctgctgttgaacatggacaagtgcccggagaaatttactcagaacgaattcatcgacacatgtaataggttccagggatgtatcgccgctatccaaagcatagaaactgaacgtaaccttgaacactataagaacacactcagatatattcggaccaaatttgacgtccccatcgagaaaaagaagaagcacctttacttcaataacatcctgattgcagattga

SEQ ID NO: 10633 - RNA, 969 nt, synthetic construct
  source 1..969: mol_type = other RNA
atggagttcaaggaaaagttcaaacagaagatagtgcaaatcaaacagtggctggactctctggaggctaaggcagataattatatatggctccagttcattctcatcattgtccggttatgtgatttcatcaaagtcatcagcatcatagccctggttatcaagtgttttctccggttgagttacatccttttgccctaccttattgagtttatcgagtttatcgagactctagcatccaccttctcatacaaacgcagatctttctttatggactttacgcaatcagtcctgtatggagtgtctaataaaaagtacctaagcgagcttctgcatctggaactgaagaccttgaagaacgttgataagtactatacggtgtatccatttgaaaagaaaactaacggcaaaacacgggaactgtacaatcccagcaatgagcataaacgtgcgcttaaaaggatgaccggtatgctcaacaagattaagttccctagctatctgtgcggagggattcagaacgtgagttatgtcgacaatgcctctcgacacctcaacaaggattatatgttactgctcgatattgccaacttttttccatccaccagagactcctacatttacgatttcttctacaatagcatgtcccagccttctgatatagctaagattttagtgaacctcgtgaccgccaaagttaacaaccacaggcatctgcctcagggctacagtactagtcccgtactgtcatttctgtcctatcacaggatgtaccaggaactttatgaatacagcttgcataattgcttcacattcagcgcttattatgacgacttcacattttcgtctaataatttcatccacccaaaccgccgaagagacatcatcaagatcattgagaaatacgactttaaggtgaactccaaaaagacaaaactggtaattgggaatcacgtgtcatccccgtga

SEQ ID NO: 10634 - RNA, 948 nt, synthetic construct
  source 1..948: mol_type = other RNA
atggattttaagagatctatcctcttcggagtgtcgaataaaaagtggctggcagacctgcttaaaattgagaaatacaagctcaccaacatctcttccaacttcataggtaaatctttctttcgggaagtaaacggaaaaaccagagagctctataatgcaggtctgatccataaaagggtcctgcgtcttatcgtgaaatacctgcagaaaatcgatgttcccgcatatctacacggagggatacccgggagaagttatgtcaccaatgttgagatgcattgcgaaaataacttcgccatcattgtggatataagtgacttcttcccttccacaagcgcccagaaggtgtttgatttctttaggtacgacatgaatcagagtccagacatcgctaaaatcttgaccgatttgacaaccgtaactaagtatgagaagtcatttttgccgcagggctacccaacttctcccattctgtcctactttgcctattataacatgtacgaaacgcttatgaggtacgcccaagctaatgactttattttcagcgcctactatgatgacctgacttttagctcaaagaagcctatacctaaacgatgtatgaaccgaattatcaagattatcgagtcccacaagctgaagattaacaaaagcaagtcaaagatccggaggattaacaatgtgaaagttacagggtgcattattgtgaacggcgagttaaaggcgccacgcaagctccagaaggagacatacgacctgtatatgatcataaagaatgacgtgctgagcacgaacgacttatcacggatgcttaagaagttcatcggcaaaatttccgctattcaaatgatcgagaagaaccgcaaattccccaattacatgaagctaatcaaagataagcaggccgaactggaagaactccgcgtcgagaaagcgaaagcttga

SEQ ID NO: 10635 - RNA, 951 nt, synthetic construct
  source 1..951: mol_type = other RNA
atggatttctcaaagtctatcctctacgaaattagtaacaagaaatggttagccgaacttctcaagatcgagaagaacatgctgtcaaatgtaggcgacaatttcgtcggcaaatcctttatgaaagacgttaatgggaaaacaagagaactgtataatgcaggtaccattcataaacgctccctaaagttgatcgtgaaatacttgcaaaagattaacttccccacctatctgcacggaggaatcccggggcgtagctacgttactaatgtcgagagccattctaagaataaattcgcggtgatcgtggacattagcaacttttttccatccacaaacgcccagaaagtgttcaactttttcagatacgatatgaatcaggctcccgacatcgccaagattctaactgacttgacaactgtgtctaaagatgagcactcattcttaccacaggggtatcccacgtcccccattctgagttttttagcctattatcacatgtacgagaaccttatgaaatatgcccagaacaacggcttgacattttcagcatattatgacgatctgaccttcagtagcaagaaacctatccctaagatatgtctgaaagagatcgtgaatatcattgaaagctttaacctcaaggtcaataaagagaagtcgaaagttagcaaacttgattacaccaagattaccggatgcgtgatcgtaaagggtgaactgaaggctccaaggaagctgcagaaggaaacctacgacctgtacaggtacctcaagaattctaatctctccgacgaggaactgctgagcctgctcaagaagtttgcaggcaaaatcagtgctatacagtctatagagaaggagcggcaattccctaactacttcaagcttattgagaacatgaaatcggagctggaagaacgacggatatccgagctcgattggctgtga

SEQ ID NO: 10636 - RNA, 936 nt, synthetic construct
  source 1..936: mol_type = other RNA
atggactttacccgcactattctctacggtgtcagtaacaaaaaatggctcagcgaactgttaaagatagagaaaagcaagctgaagaacatccgaaacaacttcaacacggtgcccttcgtgaaaaaagttaacgggaagaatagggagctttataatgccggcaaaatgcacaagctcgtcttaaagaggatcgtcaagtatcttcagtctattgatatcccaaactacatacatggaggcatcactggaaaatcatatgtcaccaacgttgaatcccacaagaagaatcggtacggcgtgattattgacatcagtaacttttttccctcaacggacgcacagaatgtatacaatttctttcgctttgacatgaatcagtccaccgatatcgcaaaaatcatgacagatctgaccactgtgtctaaagggaataaatccttcttgccgcaaggtttcccaaccagccctatattgtcctttctggcctatcataagatgtacgagctacttaataactatgcgaaggtgagagacttgacatttagtgcttactacgatgacttgactttctcttcccgtaaacgcatttcaaagcggtgccttagggagattgtgagcatcatcgaatcgaacagcttggagattaatctcatcaagagtaaggtaagcaaactgaattacaccaagattacaggctgtgtgatagttggcaacgagctaaaagctcctaataaactgcaaaaggagacacacgacctgttcctcaagatcaagaatggaaacttatcagagacagaactgtctatcctcctgaagagattcctggggaaaatctccgccattcagatgatagaaaaaaaccgaaagttccccaactatctgaaactgattgaggataagaagcgggaactgatgtctaggagaaatgattga

SEQ ID NO: 10637 - RNA, 975 nt, synthetic construct
  source 1..975: mol_type = other RNA
atgtatattcaaggaggaatcttcctttttcgggagagcttcttatatgagctgtctaacaagaagttcctctccgagattattcaggtcgacctctccgtattaaagaacctggaagatctgctcgaaacggagaagtggaaaccttacaagttggagaataaaaaacgcgatctgtacaaccccacagtgcaacataagcgagcacttaaaagactggttcgttccctttactccatcacttaccccacatacttgtatggcggtattaaaaacaaatcttacatcgacaacgccgccattcacaagaataacaagtatttcctcatcgccgacatcgagaagtttttcccatcaactcacgagagctatgtatacgacttctttaggaataagatgcagatgagtatagatatctcgcggatcctgactcttctagtgacgtatcaacatgaagaggactcttatcgatatcttccgcaggggttcccaacctcacccctcttgagctttctggcttacagcgacatgtttaaagaactggagcagtttgctgagacaaataatctggtgttcagtgcgtactatgacgatctgaccttttcatccgccagtttcatatccaagcacctgaaaagagaactggctctaatcttacggaggtacggcttcaatctgagcacagagaaaacccgttttcagaagaggaaggccaacaatataaccggtgtgatagttaccaaggatggcctcaaatctccttacaagctaaccaagaaactgatgcgcttgtctagtgatctggataacaacttgaaaaatagcagcctgactaaggaagaaatcattgtccagctcaggcgcattcgggggtgcatcattgcaatccagtcagtggacccttcgagaaatctccaggtgtacgaaaagcagattaacgaggtcaaaagagttcatgacgtgacattttcttga

SEQ ID NO: 10638 - RNA, 1158 nt, synthetic construct
  source 1..1158: mol_type = other RNA
atgaaaactcgcaacgaggtcaagaagacaagagggaaacacagaaaacagttggcacagtttaccttatgcaacatagtcgtgaactttttgatggactttaaagatgtgctcgaatctcttagagccgtattccgcttggtgagtttcgtagtggacagccttcagtattggatcgatctcctgtacagtctgctgttctacttctgtgaagtctacaagatgaactattcaacaagtccactatttgaagtgagctccaagaagcgactctcgtatctgctcaaaaccgatatttccaagctcaaacaagccgacatctccttttctgcgccttacttctcaaagatgaaaggaaggaaaactcgacagttttttaatccaactgacacacagcggattactataaacgctatcaagaattgccttgagcaaattgagatccccaattatatctacggcggaatcaagaatcgttcctacatcgcaaatgcccgtgttcacgagaatgctaagagtctgatcctgatcgacctcaaaaacttcttcccgagtacaagcgactcctacgtctacgatttcttcaagaacaaactaaatcagcctgccgacgtggccagaatacttacaattatcacaaccgagtctggcgaccatggccggtttataccccagggatatagcacctcacctctgatgagctttctggcctacgaatctatgtaccagcagctgaataatctggctaatcaacaacagctccacttctcagcatatttcgacgatatcaccttcagcagctctaaatacatcaacaaggctgtggaacgcagcgcgaagaaaattgtcaggtcatttggtctgcagattaatcaggagaaatccaggactttatttaacaacgcttccaaactgaccggggttgttattaccccaacgcaaatacaggcatctggtaagctccataagcagatgatcgataacttcgacttactgttgaactcgttgtattccaacagtaagcccagcaagaaggatcttctgaatctatgcaacaagacccaggggtgtattaattctattaaggccatcgaagagaacagggatctgtcatattatacgaataaggtgaaagaggtgcggcggctgattaaatga

SEQ ID NO: 10639 - RNA, 948 nt, synthetic construct
  source 1..948: mol_type = other RNA
atgattctcctcaaatataccaatagctcactatatggcattactaccaagaaacatcttagctacatcttgaaaatgaacctgggatcactctccaacattgaacccttattttgcgccaatagcttctccaagaaaaagaacaacaaatctcgggaattttacaatccgaccctggaacagcgggcagtattaaaccgaataaatgtggctctgtgtcaaatcggggctccaaattacgcctacggagggatcaagggtcgttcctatatcgacaatgcaaaagtgcacagcggtcagaaggcgttgtttcttatcgacatttcgaatttcttccctagtaccagggataaatacgtgtacaagttcttcaagaacaagctcgcaatgtccacggacgttgcgactattctcacactggtggtaacggagaagctgttcgattccgacaaacgctttctgccacagggctatcccacaagccctctgctatcactgtttgcctacattgagatgtttgaaagcatcaacaagatcgccatcaacaatgatctcaagtatacatgctactatgacgacttaactctctcttcaagcagttacatagacaaaaagatccttagacaagtgaaaaaagagatttcgagttatgacctgaaggtgaacgatttcaaaacccgcgctctttttaataaagcctctaagctgacaggcgttgtcgtgtctcctgagaagatagttgccccagggaagctgcagctgcagatgatcgacaatttctccaagttgatggatgctatttactctggcaaaatgaccactaagatcgagatcaacgaattgtgtaacaaggtccagggatgcctggcatccattaagagtatagagcccgatagggatcttacctattacgtcaacaagctgaaaattatcagacagatgttgtga

SEQ ID NO: 10640 - RNA, 957 nt, synthetic construct
  source 1..957: mol_type = other RNA
atgaactataaaaatagcaatctctactccgtgcagtcaaaggcaaaactggcccggctgctgaatattgacgcaaataagctcagagcggttagagaaaacttttccgtcgatgcatttgtggtcgagatcaacggcaagaaaagactgcttcataacccgtcatactgctacaaacagatcctcaaacgtatgcttttattgctctaccccattggcgccggagattatgtttttggtggcattaagaacagggactacattatgaacgctaaagtgcacaaaaacaatacatacttctgtctaatcgacatcaaagacttttttccctcgaccaactctgattttgtctatcgcttcttcaggtataagatgaatatgtccattgatgtggccaagatttgcacacttctgacgacagtttcaaattctgagacaagcaggccagacaatttaccacaagggtttcctaccagtccttatctatcctacttatcctatctggaactgttcgagcagttgaataacatctcgatatcaaagaacatgaacttttcttgctactacgatgacctgactttcagcagcccccgcttcataagtaaggggaccaagcgagacattatcaaactgataaacagctatcagctgcaggtaaacagttccaagacgcgactcctcaaaaactctaacggagtgaaagtaaccggtgccgtcatccgggacaaccagctgttgacccctaattctctgttccttaagctgtacaaggaatacgataatctcctgagcgagttctatttgaatagcttcgaccagaagaaaatccttaatatgtgtgaggtggtcgatgggatcctggcttccgtgactcggatcgaattgactgaaaatgccgagtatattaagaacaaggtgcaaatcatacgcgagacttctaatgctaccattagttga

SEQ ID NO: 10641 - RNA, 957 nt, synthetic construct
  source 1..957: mol_type = other RNA
atgaatttcgagaagtccatactttataacgtgcagagcaaaaagcacctggctaacctcctgaggattgatgctaggaagctcaaagccgtacgagaatacttctctgttgagcccttcgttgctgaaatcaacggtaagaaaagactcttgtacaatcctagctactttcacaagcagctgctgaagagaatgctgctactgctgtaccccattggggcagcgaattacgtgtttggcgggataaagaatcgcgattatattatgaacgccgaattccacaaaaacaacaaatgcttttgtctgatcgacattaaggacttcttcccttctacatcttcggacttcgtgtatagattcttccggtacaaaatgaatatgagtatcgatgttgccaaaatttgtaccctactcaccactgcatcatcgcgcgagacaaacaaactcgactacctgccgcaaggatatccaacaagtccatatcttagttacttgtgctatctcgagttctttgaacagttgaataacatcagcgtatctaagaacattaccttcagttgctattatgatgatcttacgttttccagccaacattttatatccaaaggtaccaagcgcgacattattaaattgatcgagtcctaccagtttcaggtcaataaagataaatctcggcttctgaagaactcaaatggcgtgaaggtcactggcgctgtgattagggatcataagctcctgatccccaatagcatgcatttaaagctgtataagacttacgacaagctgttaaatgatttttacctgtcctcatttgaccagaccaacatcgtgaatatgtgtgacgccgtcgacggaatattagcctcaatcagccgagtggagagcatcgaaaacatcaaacacatcaagaacaaggtccgtatcatccgggagatatccaatgcaattacatcttga

SEQ ID NO: 10642 - RNA, 1041 nt, synthetic construct
  source 1..1041: mol_type = other RNA
atgagccttcagatctcacttgcgctcgctttcattatcctcttactggagaaagaaatagaaaactacatgaacttccagaactcgattttgtacgggatcaaaactaagaaggaattggcaaaactcttagacattaacaagaagcttctcaatgacgtgaattatcacttttctacgaaaccattcgaagccaatatcaacggcaaaaagcgaatgctgtacaatcccaatgatatacacaaggagattctgaagaaactgatcgagctgctgtcaccaatcaaggctaaggaatacgtatttggtggaatcaagaaccggagctatataatgaatgccaccctccataaagattctacctttttctgcctcatagacattaaggacttttttccttccaccaaagagaagttcgtctataacttcttttacaacaacctgaagatgtctagcgatgtcgccaaggtatgcacgttactaacaactgaatatgatattcagcagagaaatcgtcatctgccccaaggctatcctagtagtccttatctctcctacttgtgctactttaaattgttcgaggaactgaatgcaatttcaatctccaagaatctaatcttctcctgttattacgatgacttcaccttttccagtaagcagagcatttctattaagaccaaacgcgagattatgaagtgcatcaagaaatataacctgactgtgaataccgataaaacgaaattggtgaagaacaaaaacggcatcaaaattacaggtgtggtgatcaggaataatgatgttatacccccgaataagaatctgcacaaactgtacattggatttaaggagcttaagataaagttcgagaacgatttctttgagaaagacgaagttctgaaactttgtgagaaggtgaaagggctgtacgaggccgtgcaaaaaatcaagtttaataacgacctgacgtatatggtcagctacatcaaggacattaagatcttctacgagaagaacaaatcaatcaaaaacaagagcgactga

SEQ ID NO: 10643 - RNA, 954 nt, synthetic construct
  source 1..954: mol_type = other RNA
atggtagattttaaactctcaaagctgtacggcatcaataacaagaaatacctatctgagcttctgaaagtggagctcagcaaacttaaagacattgagactcacttttctaccacccccttttatcagaagaatcagaaggggaagaggagaagactatataaccctcatcctgactataaaaaagtgttacagagactgaacatccacctctcacggatcgttgcccccgactatgtgctgggcggcattaaaaagcgatcttatgtcatgaatgcgaacttgcataaagagaatgattatttcctcctgctggacctgaaagattttttcccgtccacaagagataatcatgtgtactacttcttccggaacaagttaaagatgtcccaggacatcgcaaagatatgtacattgctgactaccgagccaagcgaagataggacctttaggcaccttcctcagggttattcaaccagcccttacctgtccttccttagctatttcgatatgtacaacggaattaagaacattagtgacaaccagaacattatcttcagttgttattacgatgacttgacattctccagtaagaagcgcatctctttcaaatttaaggagacgattagcaacattgtcgcagactaccacctgaccattaataaggacaaaactcgcttttacactaagaaacgcaaggtgatcaagatcacaggagccataattaataaggggcaactgttaaaagcccccaattcgttgcaaaagaagatgtacatctacttcaaagagctgactcagaaaacacagcagaggccagttgaaaaagaacacataatcaagctctgcaacaaggtgatcggttgcctgacggctattcaacacatagaacccaagcgtgaatttccacatatccgaaaaaaggtcaaggagatccggaaagctctccggtga

SEQ ID NO: 10644 - RNA, 948 nt, synthetic construct
  source 1..948: mol_type = other RNA
atgaattattcgactagtaaactgtttggtgtaacgaataagaagtatttgagcgagttgctgtccatcgatataaacgaactcaagaacattgaggagttctataacacaagccccttcaccaaaataatcaaagggaaagagagaaccctctacaatccacctttcaagtataagaaggtgcttaacaagataaacatctacttacagcagatcacacctccgagttttgtgttcggaggaatcaaaggcagatcatatgttatgaacgcgactctccacaaagatcatagcaacttcctgctgctggaccttaaggattttttcccctctacacgggacttctacgtctacaatttctttaagaacaagcttaggatggctacagacattgctaagatttgtaccctgcttactactgtgaagctcggtctaaatacccaggagaggaatctgccacaaggatttgcaacctcaccttacttatcttttctgtgctattacgacatgtacaacagcatctacaagatatcaaaccacaaacagattgtgttcagctgctactatgacgatctgacgttttcctcttccagttatatcagcaaggggttcaaacgcaatattgtcaaagtgataaaggagtacggcttggttgtgaatgacaaaaagacccgactattgtttaataagcacggcatcaaaatcactggcgccatcgtcaaagataactctttgctgtcaccaaacaacacacagctgaaaatgtactcccattttgaaaagctgatggtcctctactccaccgaccccactaaacagcaagaaattcttgagctctgtaacaaggtgaatgggctgttaatcgccctgaaaattgtagaaacaaatcgcgatctcgggtatattaagaataaggttaaggaaatccggaaaaccattaatggctga

SEQ ID NO: 10645 - RNA, 951 nt, synthetic construct
  source 1..951: mol_type = other RNA
atgctgaatatccaactgtgcaagctgaagaatctgaagtccaaaaaaatgctgagcttgtacctacgcatcgagctgtacaagctcaaagacattaccaaacactacagcactgccccatttgagaaagagttcgataatggtaagaaacggatgctgtacaacccaaacaaggactataaacaggtgctgaagaggatcaatttaattctgcagcagatccccatccccaattatgtctttggagggatacgggagagagactacgttcaaaatgccacggtccacaaagacaacaatttctatcttctgatggacctcaaaaatttcttcccctctacctccgattcgtacgtttacgacttcttcaagaacaagttaggcatgagtatggataatgctaagatcgtcactcttctagtgacagtgcctaacgaagggaattcagggatcaggagcctccctcagggcttttctacatcacctgtgcttagctacctcagttattcagacatgttcgaaaagatccatgatctggcagtctctcagggcataaagttcagctgctattatgatgatttgaccttttccagcagtaacatgatcggcaaatcttttaaaaaccgcgtgattgagatcgtggaacagtttaacctgaaggtgaataacaagaagacacatcttacacgaaatataaacggaactcggattaccggaaccatagtaaaaaataacacgttgtttgctccaaacaagctccaacgcaaactcactgaaaagttcaacgagctcgagaaaatggaacaggttgacattttaaacaagagggaggtgattcagctgctgtgtaacacagttcagggttgttgctccgcgattatgtccgtagagcgaaccagaaagtttccgcacatcttgagaagggtcagagaaattcggcgttcagtgtga

SEQ ID NO: 10646 - RNA, 945 nt, synthetic construct
  source 1..945: mol_type = other RNA
atgatagactatacagtgtgtacgctgtatggtgtcaagaacaaaaagtacctctcagaactgctcaagattgagctctttaaacttaaggagatcgaaaagtactacattactctcccattctccaagaaaatgggaaacaacaaaattaggctactgtataatccctccaaagagtacaaggacattttaaagagacttaactacttcctgcagaaaattgtgttgcctgactatgtttttggggggatcaaaaaacgggattacatacagaatgctagcaaacacaaagacaacaagttctttcttatcatagacttgaaggatttcttcccaagtacgtctgacacctatgtgtacaacttttttaagaacaagctgaacatgtcaatcgatgtcgccaagatatgtaccctgctggtgactgaacagagtgagatcaatacccgttatctgccgcaaggatatagcacatcacctattctttcctatctgtgctacttcgagatgttcaatagtattaatagcctgagcatcaacaacaatatcacctactcttgttactatgatgacaataccttctcatccaaaaacatcatcatcaaggatttcaagaacaagatagttgagatcatcaaatcttacaacctgcaggtaaatcccaaaaaaactatcctgctgaagaatacaaagggcgttaggattaccggcacaattgtcaataacaatatattgagcgcacctaatcccttacaaggcaagatgtacatcaattttaacaagctcgtgaattctgatctaactgacatgaatgaagcgaagaacatcatcaaattatgcaacattgtgcagggttgcagtagcgccattaagtcgatcgaacgccagcgaaaatttccccacattctcaagaaagtaaaggagattagatccttgatcaaatga

SEQ ID NO: 10647 - RNA, 954 nt, synthetic construct
  source 1..954: mol_type = other RNA
atggagtatcagaaatgcaagctgtatggaatctccaacaagaagtatctctctgagttgctgcacatcgatgcattcaaactgaaggacatagatagacatttctcgactgacttttacatctctaaaagccgaaataaagagcggcacatttacccccccaaaccctactataagaaggtactgaaacgacttaattggtacctcagcagaattgccgtgcctgattttgtgaacggcggcattaaaaataagtcctacatcatgaacggtctgtatcacatcaacagcaatcattttctgctccttgacatcaaaaatttctacccatcaacaagcgattatttcgtgtacaggttctttaagaacaggctcaacatgagtaccgatatagccaagatttgcactctgctggtgacagagccccacccaatgcacgacaactaccgccatctgccgcaaggctatcctacttcatccctgctgtccttcttggcctattctgacatgtacatacacttatacaactacgcgatgttgaacaacattaccttcacatgttttgttgatgaccttacgtttagctcagatgactacattagtaagagtttcaagcggaacatcaataaaattgtccgccagtataatctggaaatcaactctgggaagacaatgcatagacggatcaataaagggatcaacatcaccggtacctacataaaagagaataagctattcgctcctaatcgtcttcaaaaggacatgagcatagccttttccgaattatgtgcagcttatgaggccaacccaaaggacattaatcagctgaagctcctatgcaatcagttgcagggatacatcgtgaacgtcaaactcattgaagaagcaaggtcattagattacatgcagaatatgatcaccaaagttagacgctatattaagaataaggcttga

SEQ ID NO: 10648 - RNA, 960 nt, synthetic construct
  source 1..960: mol_type = other RNA
atggatatcaataactgtaagctgcagaacatcagcaataagaagtacttctcagagctaattcgaataccactcagccatctcaaaaatgtccgtaagtattacaccaccgtcccatttacccagatgacgcagaaaaataaacctcgaaccctgtataacccctctaccgaacacaagcgcatcctcaagtccatcaataggcacctgcagaagatcattattcctgaatatgtgattggcggagttaaaggtaagagctacatcaacaatggagaaatccacaacggccaaagttttttttgccttatagacttcaccgacttttttccatcgacaaatgagaaatacgtctacaacttcttccggtacaaattaaataactccgtggacatcgcgaaaatcctgactctgcttgtgacagagacttcacccagtactggggtggatattctgcctcagggctatccaacatctcccatcctaagctatttaagctatcacgggatgttcagtaaactcaaaatactggcagatgccaacaattacaaattttcctgctactacgacgatgttaccttttcatccaacacattcattaacaagaacttcaagaagcaagtaatcagagtcactagcgattatgggttgaaagtgcatcctcagaaaagtggcatatacatactcaagaatggaattcggatcacagggacgattgttagaaaagagggtctttatgccccgaacaagttgcaactgaagatgattaaccagttcaaggagctggaacagaaggctaaggtgtctgcagaccatgatgagattataagcctgattaatagggtacagggcactgtgtccgctatcaaatcaatcgaaaaagacagatccttcccccatattacacggcgcttgaaggagatcaggcactcttctaagattaacaatatcgccaagtga

SEQ ID NO: 10649 - RNA, 930 nt, synthetic construct
  source 1..930: mol_type = other RNA
atggattactcgagttgtaagctatacaaaatcgagacaaagaaatccctgtcgtatattcttcagactcccaagagttcactcaaaaacgtaaacctgtgctactacccaaaggtgaatatcttcaacaaaaacactagttcaggcaaagtgaggacgttctacaatcccaccggtgaacataagaaagctctgcgcaatatcaatcgatccttatcagtacttccgataccgccatatgttattggggggattaagaaacagtcaattatttccaatgcctctaagcatatgagtagcagattctttctgagcatggacatcaaagacttttttaatcacgtgcctcagaagtacatctacagctttttcaagaatgatctcaagatgtcaatcgatagcgcaaagatttgcacgacattggtcacctacgagatcgataaccactctatattgccacagggatatcccacttcccccatcctctcttacctgaccaataaaaagatgtttgacaagatctctcagcttagcagccagaacaacattattttctctctgtatgtcgacgacctaacatttagctcccccaaccctatctctaaaaaattcgaaaacgaggtcagaaagatactcaatttctatagctacaaggtgaattccagtaaaaccaaacgtcagtatatcactaagccagttctgatcaccggagtgattatcaacaatggcgagctgttacctcaaattaagcatacaaagcaaatgatcgactacatacacaacataaagagcagggatttgcacgaggtgaatattgattcctgggggaagaaaattcggggatattattactaccaccaagccttcgaatcctattctggtataaaattccctcagatcaagaactttctgggcaactataaaaagtga

SEQ ID NO: 10650 - RNA, 1029 nt, synthetic construct
  source 1..1029: mol_type = other RNA
atgttcatcgacgagaagaacagcctagccaacttgcagaaaaagaccaagttggccaagattttaaattgcgatgtggaatacctgaagaactttagcgattattcagaggtgaaatcctttgataagcgcgtaggtcccaagacaagacgacttttcaacgcagatcctaatcacaagaagattctccgcaaaattaacaaactgctgctcagcatgaatatccccgattacgtttacggaggaaggccgaacagggactatctttcgaacgcgtttctgcataagaaaaatccctatatccagacagctgacattagatcttttttcccatctacccatgaatcctacgtctacggcttcttcaagaataaacttctcatgtctgaagatgtaagtaagattctaaccgatctgactacctattcaagctccgaaagtcctcactaccccgagaaatcattgccacaagggttccctacgtccactatcatgtcttaccttgcttacttcgatatgttcaatggcatctataagcagtgtcgtgacaggaatattcatttttcactctttgtggacgatatgacttttagttccgacgtcaaaataccaaaatcttttatcaggcacatcaacaacattgtgacccaatatgacctgagcctgcatcccaataaaatccggcgcttttctgttgatcagccaaaactggtgaccggtgtcatcattgaccccaagacaaataattttcacataccgaacaagctgcataagaagatttacacaaacatccagaacttccacagcttgaacgtcaacacatacactgactacgtgaatttaaagcggatcatactgagcctcaaaggccaactcgcctcctgctcccggattgaccaggagaaaactttcaatcacatcatcaaggtcatacaggacgtggagatacactttatcgttccttcagtgaaaggggccacgcaccgacagctgtatgaagagtatattagtttcgtgagtttcagatga

SEQ ID NO: 10651 - RNA, 1017 nt, synthetic construct
  source 1..1017: mol_type = other RNA
atgctgatctcccagccacacagcctttttgaattacacaacaaacggagactggcatctctgctaaagacggacgtagagaatttcaatcgtatcgaagagagatatacagtctatccttttaagaagaaggtcggtaagaaagtgaggactctctttaataccgatcagcactacaagtcccttctgcgtcgcttgaacaagatgctttgcaagacgaatatccccgattatgtgtacgccggcatccccaagagggacttcttggacaatgcgctgattcatcgccagaagccttatattcaaacagccgacatccagaatttttttccatcgactagagattcttacgtgtacgggctgctgctccataagttccacaccagccctgatgtcgctaaaatcattacacagctgaccacctacccactcgattcaaagactgcattgcgacacatccctcaagggttccccacatcaactatactgtctttcttatcctacttcgacctatttaacggaatttataacctctgcaaacagaacgatatccattttacgttgttcgtcgatgatatgacttttagtagtcacaaaaggattcctaagtcattccttcggcatattaatagcattgtgaagaagtacgacctgcaattacacccgtctaaaattcataggatgaacccctacaattacaaaaccgttactggtgtcgtgatagacccatgtacaggacttctgaaggctccaaataagctgcagcggaagatgttcaacaactttaaagccatacacaactacagcattaacacattcaatgactatatccagttcaaacagctggttctgaaactcgagggccaactcaaaagcataaatcggatcgaaccgaacagacagatgccctatataaccaccgtagttaaagacatcaaacgcaactttatcacccattccgtgaaaggctcatcccgagacgtgctcaagagtgagtatgagttctttgtgaaatga

SEQ ID NO: 10652 - RNA, 1266 nt, synthetic construct
  source 1..1266: mol_type = other RNA
atggatgacaagtccattggtagggacagaaatcattacctggaaaccaggccctcacgcaaggagaaacacggaagaaagaaaactaagctgagaagcgtactgatagacgtgttcatccggaccctcctgtcacgtctgtttaccgaagtcttcaacattgtgagcaggtttgtcttacgaattattgacatgatctcgaacctgctgtaccagaaaaataaagtgatattcatgcggatccctgaaaaccacgcgttctaccagcttaagagtaaaaaacggcttgctgctatcctcggcattgattcaccagctttcttcaaacacctcgacctgcatttcacctgtacagaatttagtctgacgaagaacaataagacacggaccctattaaatccgtctaagcagtacaaacgtatactccgaaaaattaatcagctcttgcaggggattaatttccccacatacctgcatagcggtgttaagcagaaaaacgccctgtctaatgcatgttatcacaatagccatagtcacatatgcacgatggatattaaaaacttcttcccttcaacttctgaggcctttgtgtataagttcttcaaagacaagttcaagatgtctgaggacgtcgccaaaattatgacattgctggtgacgtataagaacgagaacgaagtcgcccgcttaccacaaggatttccaacttcctccatcttgtcatatttggtgtacttcgatttctttaacggcgtgaatgccctggcccatagcaggaatatgaagttctccatatacgtggatgatcttaccttttcctctaacagagcatttactcccagttttctgaaccgcatcgtcactatcgcacaacagtatgagctaacaatccatcccgacaaaacacagttttataaccgacatgcgcacaagaagattactggagtgatcttgaagcaggagactgttagagctcctctctttatccacaaacagatcaatcagcactaccttgacatcctggactgcgatctgctaaccttttccaacttcattaagttcaagcaaaaggtgatcaagaccctggggcaaatccagtacgtacgctccatcgaggggacccacaaatatattagcatcgagaggaatctcaacgatttcaaagaacacttttctgttctcagcgttaaggataagtaccggatacagcttaaacaggagtataagcattttcaaggcatgtttacacacagtattatcttttga

SEQ ID NO: 10653 - RNA, 1053 nt, synthetic construct
  source 1..1053: mol_type = other RNA
atgttgaatcaggggtaccctaagcttaatttatacacaaagaagcagctggcagacgctattcgggggaaagatctttctttcgattctgccatgaaactgatcgatgactgcctgatcaacaaagacaagtattggagcgacaacagtgaggaaagcaagtccaacgagaataagtgggtcagaaatgcctcaggtacccccctcggcaagctgcaaaagcggatagaccaaaaggtactagccctacacgacagcgaactccccatttttatttacggcggcgtggggaaaaaaggaatcaaaaatgccgttatcgcactccagggcaagagaaataagagaactctgctgaagctggacatgagccattttttcgagcacatatcttatggggacgtaatcaaaatcctggtgtgccattgtgggtgtggcaaagatgtggcccacattatagcagaaatcgcgtgcattcagagcggaaaaaagtcaagtaataacaccaacgagaaagtccttgctaggggcttctcaaccagctctcggctcgcagtgtggcgcaacttatctctttttcgttccttattctactgtatggctaagcgccttaataagcacgatccacgcatcgctgtctatatggacgatatcggtatcaccgcctcgcggatagatccagtgtcgctgagcagtttgtataaggatattacgaagctgattgagaattcctccaagctggtcgtgaacaaaaacaagactaagatcatcgattacctccagcatgaatatgacgttacagacggacatctgctcgaggacaagatagcgcagtttgaatttctgggtattggaatcggccgaaaccgactgtaccctggagtgaagattaggtccaaaatggctaaattgatcaaaaagagtcacctgtccgatgaggagctgagaacattgaaagggcagaaaaggtacgttaagttcattactggcaaaaaactaggtctgcccccgaacgatgcctcattgaacaggaagggactcctctggcaaaattga

SEQ ID NO: 10654 - RNA, 996 nt, synthetic construct
  source 1..996: mol_type = other RNA
atgatcaaccagggttatcctaaacttaacttgtatacccggaaacagttagccaacgctattcgagacaaagatctgtcctttgatgccgccatgaagctcatcgatgattgcctgataaataaggacaagtactggtcagacaatcctaaggagtccaagcaggatgatgacaagtgggtgcggaacgcttccgggactcccctaggaaaattgcagaaacgcataaatcaaaaggttctggccccccacgacagtgaattgccaatttttatctatggtggagtggggaaaaaaggaatcaaaaatgccgctatcgcactccaggggaaaaacaataagcgaactctgttgaaagtagacatgagaaggtttttcgaacacatcacctatgaggatattgtgcgtacactggtctgtcattgcaactgcggcaaggacgtagcgcagataattgcagagatcgcttgtgtgagaatggggaagaagtctctcgataatacgaacgagaaggtgcttgcgcggggcttctcaacttcaagcagactggctgtgtggtgcaatctgatcctgttcaggaaactcttttactgtatttcgaagagactgaagggccatgatcctcgtattgcagtctacatggacgatattgggatcaccgcaagcagggttgatccggccatgctgagtagcttatacaaggacattgtcaacctgattgaaaacacctctaaacttgaggtcaacaaaaacaaaacccgcatcatagactatctacaacgggagtatgacatcatcgacggtcacctgctcgaggataaaacggcccagttcgaattcctgggcataggaattggaaggtctagattatacccaggcgtgaaaacacgctccaagatggccaagcttatcaagaaacccaatagtagcgacgaagagcgcaggacactcaagggccaaaagcagtacgttaagtacatcacatctaagaattga

SEQ ID NO: 10655 - RNA, 1002 nt, synthetic construct
  source 1..1002: mol_type = other RNA
atgaacatgatcaattatcccaacttcaacataagatcaaagaatgagatcgccaaacgcatcagtagccgaaagcttccccagtccgaggcgctggctctaattaacgactgcctggtggacttcgatagtctgtgggtcgataacttgaagatgtccgagcctggaaaaaagaagtgggtccgcgacgccagccgcactaagcttggcaatctcttgagtcttattgacaaacggatttttgccccatacgataccaagctgcctagctttatacatggcggagtggccgggaaaggagtgaagtcagctgcatctagcttgctggggaaacgcaggaagcgtatgttactgaaagttgacatgagtcggttctttgaacatgtatcctccgagaggctcaaatatgctctcatccacaaactgggcttctcaagagaagctgccttaattatatgcaaactgtgctgtgtggatgcagggccgaagaatgggttggaaaaaggtaagaccatcgctcggggattcgcgactagcaaccgcctcgcaatatggtgtaaccttgagttattttaccggattaagtggctcaccgaaaagaggctaggtagatatgacgccaggctggcaatttatgtagacgatatcggtatcacagcttctcgaatcccacctaaaactatggcaaacttttactccggattgatcgtgctggttaacaaatacggtaatggacttgagatcaatcacggcaagaccaggattatcaattacctgggcaaccagttctctgtcaatggggaacccgccgttgataacggaggctcgccagtcaaggggagctatgaggtgctgggcatccgtatggaaaggaatagagtgacagccggccggcgaacaattgggaagattcaatcactgaaatctagaaagagcctcacgatcccccagaagaagtccctcaagggcctggagaaatacaaaagatacattggctcttga

SEQ ID NO: 10656 - RNA, 1005 nt, synthetic construct
  source 1..1005: mol_type = other RNA
atgaaaaaaaaagacaacccactcattccaatcaacataaggtccaagaatgaacttgctaagcgcatcagcaacaagtacctgtccgttaaagatgccctgaccctgattaacgaggtgaaaaacaactttgatgacctttggaaagacaatctgaaagacagtaagccggaggaaaataagtgggtaagaaatgccaagggcaccaagttggggaccttgcttagcctaatcaataagagactgttcgcaccttatgataactatctgccctgtaacatattcggtggtgtcagtggaaagaatacgaagtcagctactctccacctgctgggaaataaacggaaaaggacgctgctgaagatggatctgcatcgtttctttgaacagaatgactatgagaaggtgttggatttcttccataaaaaagccggttgtagcttaagaatgagccacttttttgccaccatttgctgcgtccctcttggacaaaaggggactttaggaactaagcgggttattgcccgtggtttctccacttctcccaggttggcaatttggtgtaacctccagattttcaagcagatagaccgcaaatcacggtctatgctgaaagggttcgaccccagggtatcattttacgtggatgatatcggcatcacagcttcaagagtgaacttgaagaagatgacagacgtcttccactgtgtgaaatctctactggacggcagtgggaattatcgacttgagctcaataccaaaaaatgctttatcgtggattacctcaacaatacttacgacacaaatggcgaatatatcgggaaaggccactttgagcacctcggcaacgaactgatgcggaactatgtgacacctggaatcaagacaatgtccaagctcaggtccgatgaggcgaagttaaaagctctgagcggccagaagtacaagcgctgcctaaactcgattcgagcacgcaagagatacgttcattacaccaagtcttga

SEQ ID NO: 10657 - RNA, 1005 nt, synthetic construct
  source 1..1005: mol_type = other RNA
atggccctcaaaccaaacaactatcctgcaatacgcatcaggagtaagaacgaattagccaagcagatttcctctatcaagaggaacccgtccagcagtttgaagctgattaacgatgtcgtgggaaattatgataactattggaaagaccatcccaagcttagccaacccgagaaaggtaagtgggtccgagactcatcacggactaacctcgggaaactccttagagatatcgacaaacatgtactgcgcccacacgacaatttagtgcccaaatttattttcgggggtctgaccgggctgaaccacaaggccgcagtgcttcacttactgggccggaggcgaaataggaccatcctaaagctcgacatcactaagttcttcgaacagatatcccaggaaagagtctatcacttgttttactcgaagtgcgagtgcagtaaggtggcctctaatctgctagcctcactctgttgcgtgccttatggcccgaaggagaagcctgaggattacaataccattgcaagaggatacccaacgtcacccaggctggccgtttggtgtaaccttgatacgtttattaagatcgagagagtggtgactcgggagctgaaagggaaagacccacgtatcgctatttacgtggacgacatcgctattacagcttctaatgtttccattgaggatatgatgaaactctaccccaagataaaggatatcttggagaatggcgataagaaccagaaactgcctctgaaccacgctaaaacaaagatcgtaaagcattccggcgaaacctacgatatagaaggcgaatatcagggaaaatgggcgtttgaacatctcggtttgcaaatgaataggaacagcgttactctgggaacaaaaacacgacggaaactgcgcaataccaatcaggacttcaagaagtctggcagaaaggaccgcattatccgccgtaaacggaaaagcttgctgctgtacaaaagctacatcgagaagtga

SEQ ID NO: 10658 - RNA, 1002 nt, synthetic construct
  source 1..1002: mol_type = other RNA
atgaaaaacaatcagcgcaattatccgaaaatcgccatccgctcaaagcgagagctcgcgaaacgcttgtctgacaagcgggactcagttgaggacatggccagacttataagcgatgtcaagactaattacgacaactattggaccgatcacccaactcagtctcaacctgaaaaaggaaaatgggttagagatgcaagtcggacagaccttggaaaactgctgaagctgattaacgtgaaggtgcttgctccccatgacagtctgattcccacatttgtcttcggcggagtctcagggcgaaaccacaaggtggccgtaacccatctcctcggggtaaaacgtaagaggattatcctgaaactggatgtctccaggttctttgaacagataaaatatgagcgcgtgtacagcttcttcttagccaaaggaagatgtggccagcggggcgcccgcttattagcagacctatgttgcgtgcccattggtgcaaaggataatcctggcacgtacaagacaatcgcccgaggcttttctaccagttctaggctggctgtgtggtgcaatctcgatactttcctgagattggagcggttggtgaagaaggaattgcaggggaaggacccaagaatcgcaatctacgttgacgatatagccatcaccgcttccgggatcactaaagaggatatgatgaagctgtacccaaagattaagacaatcctggagagcgacaaaaaccaaaagctccctctcaacgatgcgaaaaccaagatcatttaccactccggggacgagtatgatatagacggcatttatcagggtaagcggggatttgaacacctgggtctgcagatgaaccgtaacagcctaaccctgggcaccaagactagatggaagcttgctaatctgacgcatagatacaaggaatcgaggaggaggaataccacaattcgtaaaaagaggaaatccacactccgctataaagagtacgtggaacggtga

SEQ ID NO: 10659 - RNA, 978 nt, synthetic construct
  source 1..978: mol_type = other RNA
atgactgtaaggaggtatccgaaactcaatattcggtcgaagaatgagcttgctaagcacttgagcactaagaaaatctctaaagagagtcgcctggcccttatcaacgatgtgttaacgaactttgatacatactggaaggacaatctgcatgaaagtaaaccccaagaacgaaagtatgtgcgcaatgccaagcacacccatctggacaagctgctgcgtgcaataaatgaacaggttctgtctccacacgacaatcttttgccagagttcatatttggcgggatcaaaggcaagaaccatatcaaagccgccggccacctcctaggtgagaaacggaataggacattaataaagctggacatccaaacattcttcgaaaaaatcgatgacaagcgcgtgtactacttcttcaagaacaagtgtgggtgttccagtaaggcaagcaggattttagccaatctgtgctgtatcccagagggacctaaggataagcctggtaccaaaaaagttctagcacgggggtttgccacttcaagccgtcttgcgatttggtgcaacctggatacttttctgaagcttgactggatgataaaaaaagagctgaaggggtacgattctagaatcgcgatttatgtggacgatatcggcattaccgcttcaagagtcggaaaacagaaaatcttgaacctcgaacagaagattgagatgattctgtgcagcgataaaaacgctgagctccccctgaacaaggagaaaacccgcgtcatcccccatcaggaaggaatggaacacctcggaatcattttgagaaggaacaagctcagcctgggcaagaagaccagatcaaagctcgaggaaacaaaaaaacggatatctcgggctaaagacaaggacaaagtgaagaagattaaaacccagaagcgatccttgatgtcctataagagatccgtggagacgtacaagcctgcaaaatga

SEQ ID NO: 10660 - RNA, 972 nt, synthetic construct
  source 1..972: mol_type = other RNA
atgaagcacgaggacggctaccccaaactgtgtatcaggtcaaaaaatgagctggcaaagcacatctcccataaaggctttctgccagatgaagcactggccctgattaacaacgtcaagtccaatttcaacgattactggaaagactctaaaaaggcgtccaaaccacagaatgataagtatgtccggaacgctaagggctcacccctagggaaacttcttcgaaaaatcgatcggctcgtcctcacaccacacgacagcttacttcctaattttatttttggcggagtgaaggggaaaaatcatgctatggccgcctacaatttactggggaataagagaagaaggcggttgcttaagatcgacatcagcaggttttacgaacgtgtggaactgcaccgcgttattaacttctttcagtataagtgtgggtgccagtatcgggcggcaaaactcctggctgagttctgctcggtacccttcggcgccaaagacagtaagaatcccaggattaccatcgcccgaggattcgctacatctagccggttggccatttggtgcaatctgggagtgtttaagaaaatggagcgcctcgttatgcgaagactgaagggtcacgatccgagaatctctgtgtatgtggacgacataggtattaccagctctggagtaacgaaggaacagatggaaaacctccgcgatgaggtgatccaattattgcagactcacgacaagaaccagcctctgcctgtcaacaagaagaagacagcaatccaaagtcatgaggaaggtctgtacatactggggattaaactcaatcgcaacaacctaactatcggcagaaaaacccactcccgcattcataatttcaagcataagctcaaagtgagtaaagccaaaaaggagagggataagctgaaacagttgataaggggaatatcacgttacaagaactatgttgagaacatgtga

SEQ ID NO: 10661 - RNA, 987 nt, synthetic construct
  source 1..987: mol_type = other RNA
atgctcaataaaacgtaccccaagataaacattaggagcaagtgtgaacttagtaaaaggatctcacataagaagctgcctcggcaggacgctcttaccctgatcaacgatgttaaaaacaacttcgaaaagtactggaaagacaacattagcaaatctaagccagagaagaataaatatgtgcgtaatgccaaaagaacacctctcggaaagctgctgaagatcattaattctaagattctcgccccccatgacaacattgttcccaactttatttttggcgggccaaaaggacgagatcacgtaaaagcagcctattccctcttaggcacctacaagaaacgcaccctgttgaaggccgaccttcagggattctttgagcagatagacgaaaagaacgtgatagacttctttctgaaatgcgattgcgattacaaaactgcaaagttcctcggctatatatgttgcgttttcgacggtcaaaaagggagcaattccaagaagcgagtgctggcgcggggcttctcaacatcttccagactagctgtctggtgtaatctggatgtgtttatcgagctcgatcgcttagtaaaaaaaaggctcaaaggctatgatccaagactggcaatttttgtggatgacatcggtataactgcttccagggtccctatcgatctgatggacaacttatacaaggaaatcaaagaactgttcgaggggaaaaaacaaaagcagccgttgatccttaacgacaagaaaaaagacattaagcagcacttcgagggaatggaaatcctgggtagctttttgtatcggaataagctgaagcttgggaagaaaagtttcagtaacaagcagaagattaagtcactactgaaagagaagaatgtcacaaacatgaagaagatcaagaacaagtatcgctcgatcaaacagtacgagaagtacgtggagatgcaaggcaaacagaagaataagatcttgtga

SEQ ID NO: 10662 - RNA, 963 nt, synthetic construct
  source 1..963: mol_type = other RNA
atgcagaacaggagatatcccaaaattttcattcggtccaaaagcgaatttgctaaacacatctctcacaagaatttcacaaaggaggatgccctgaagctgattaacgacgtgaagatcaattttgaaaagtattggaaggactctaagcggagcgaccctaagaaagaaaaatacgttcgtaacgccaaaggtactcctttaggcatgcttctaaaaaagatcaacagtctcattctggctccccacgataagattctgcccaattttattttcggcggacttaaggatctgaatcatgcgaaagctgccaaacacctgttgggcaataaacgcaagaggaccctgctcaaattggacattaagcattttttcgagcagattggcctgggacgcgtgttcatttttttccagaacaaatgcggttgttcaaagaaggcctctaagcttttgagttccctttgctgcgtgagcctaggaccaaagggatccaataaccctataaaaacaatagcacgcgggttcgctacgagctctcgattagcagtatggtgtaatctcgatatctttatcgccctaaacaaactgatccagaaaagactgaagggtcacgatccgaggattgcaatctatgtcgacgatatagggatcacagccagtaggataaataaggagactatggagaagctgtacatcgagatcaagaaactcttttactcattcgacaaaaaccaattgctgccactgcatgatataaaggacaaaggcgggatcattactcataacgaaaatatgcagatcctgggcctccaactcaatcgaaatacccttagtatagggagcaagacccggtcaaaaaagaacaagctcatgaacaagttgaaaatctccaccgacaagaaaattctgaagaacaagtacatgtcgctcatcagatacaaaaactatatcgagtccttatga

SEQ ID NO: 10663 - RNA, 927 nt, synthetic construct
  source 1..927: mol_type = other RNA
atgcagacttccagatacccaaagctgtatatccggagtaagaacgaactggtcaagcacttatcccactcaaaatttcccaaaaaggaggtgttggccctcatcaatgatgtcctaaataacttcacccgctattggagagataatgaatatcggtcagagccagaaaaagagaagtacgtacggtcagcaaaaaggacacctctgggcagattgctggacaacatcaataaagctgttcttgcgccgcatgacaaaatgattcccgatttcatattcggcggggtgaaaaacatgaaccatgcgaaggctgctaaatatctcttaggaaagaagagaaagcgcacaagcctgaaactcgacatcaccaggtttttcgagcagattagcgaggaacgcgtgtatcacttctttcgggataagtgtgcctgctccaaaaaggccgccgctctgctggctagtttttgctgtgtccccgagggtcctaagggcaatgcatcagagcgcaagacaattgcccgagggtttgccactagtagccgcctcgcagtgtggtgcaaccttgatacattcataaagttagaccggctgattaaaaagaggctcaaaggaaacgaccccagagtagccatctacgttgacgacatcggtattacggcatctagggtgtctaaggaggagatgggcaaacttagcttggaagtggagagccttctgctaaacactgacagaaatcaaaagctgcctattaacaaacgaaagaccaaaatctcctcccacgaggaaggcatcgagcacttgggactgcgcctctacaggaataggctgtctataggggccaagaccaaatcgaagattgatcggatccgtaatcgttctgaacgaaaaccactgatacgttacaagcattacatcgaaaagatttga

SEQ ID NO: 10664 - RNA, 966 nt, synthetic construct
  source 1..966: mol_type = other RNA
atgcagtcacggagataccctaagctgtttattaggtccaaaaatgaactggctaaacacatctcccatgaaaattttcccaaggagaaggctttagtacttattaacgacgtcattgccaatttcgatttctattggaaggactctgtgcacagtgatcctctgaaagagaagttcatccgaaacgcaaagcataccaaactggggctcctgttgaggaagcttaacacgctggttctggcaccccacgacaaattgttgcccaaatttatatatggaggagtcaaggagatgtctcatgccaaggccgcgaaaaacctgttaggcagcaaacgaaagcgcattttgctcaaaatggatctgaagaaattctttgaacaggtcagcagtgagcgggtagcctattttttccagaataagtgtgagtgctccaaaaaaacatcggaaatgctatcatgtctttgttgcgtgcccattgggccaaagaataacggggcctccaaaaaagccatcgcgaggggctttagtactagcccaagactcgcagcctggtgcaatcttgacatattcattaagctggaacgcctgatccagaaacggctctctggtcacgaccctaagatctcagtgtacgttgatgacatcggtatcactgctagccgtctcccaagggaggttatggagaagctccgtgacgaggtgagctcattcctcctgacagctgacagcaagcagcagctggagattaaccaagataagaccatcataacttctcatgaggaaggaatggagtatgtgggcgctagattataccggaacaagcttggcctgggcaagaaagcaaagtccaaaagagatcaaaccaagaacaagctgaaaaagaactctgatccgaaagtgagggaatccctacgccgcaagttgaatgggatgaatcaccacaaaaagtacatcgaaacaacctga

SEQ ID NO: 10665 - RNA, 969 nt, synthetic construct
  source 1..969: mol_type = other RNA
atgtccaatcggtatccccagttaggcctccggagtaagaatgaaattgctaagaggatttgctctaaaaagctgagccaaaacgaggccctcgagctgatcaatgatgtgattaaaaacttcgacgactactggaaggactccaaagagtcagagccacggaaacagaaatatataaggagcgctgccgggaaccccttgaataaactcctaaaggctatagacgccaagatcttacagccacacgaccacttggttccgaacttcatatttggcggacttaagggcacatcacatattgatgcagcctattctctcatcggaagacagaacgcaaggaccatcttgaagatggacatcaagagattctataagcaaatcactcgggagagagtcttttttctgttttatcgcaagtgtggatgttcagtgaaagccgcgaatctgctcgcagatctgagttgcgtgccagtcggtaagaaaggctctgggagtacaaaaaagaccatcgccaggggtttccccaccagctcccgtctggccatttggactaacctcgatacctttctccggctgcagtgggaagtgtccagattgctgcgaaagcatgaccctaaggtggtagtgtttgtggacgatatcggggtgtcagcgtctcgcgtctccggtaaactgttcaaacacgtcaagcacgttgctcagacgattcttgctgcctacgatgagaaccagcccctacctgtgaacaaacgcaaaactcaagtcatccctttcagtgatggagcggaacatctggggttactgctgggccgcaataagatttcgatagggcgaaaaacaaagtctaagatggccagagtaaaaaataagattgcatccgctgttggccttgaaaggaaaagcctgcttaaaaagcgtagcagctactacagctacaagaagcagatcaagaaagcatacgacaattga

SEQ ID NO: 10666 - RNA, 966 nt, synthetic construct
  source 1..966: mol_type = other RNA
atggcgaatatctacccgcagatcagcattcgctcgaagaacgagctagcaaagcaaataagctcagtgaagttgccctttgagggtgccctgagcttgataaacaacgttattgagaattacgacacctattggaaggattccaaaaaaagcgagccccaaaagcgaaagtacgtaaggacagcagtgggaacccccttagacacactgctgaaagccatcgacaagaagctgttacagacgcacgacaaactgattcctggctttatttttggcggggttaaaggcaaatcccacatcgccgcagcataccatcttgtcggaaatcgcaataagcggattctgctcaaaatggatatctctcggttcttcgagaagatcactcgcgagcgggtcttctatttctttaacaagaagtgcaactgctcagtgaaggccagtaatctcctcgcggacctctgttgtgtgccaaagggaaaaaagggcagtactgatcctaccaagacaatcgctcgggggttccccaccagttctaggctcgctatctggactaatctggaaacctttcttaaacttcgtcatacagtgacaaaaaagcttaaaaaccacgacccacagacggtaatcttcgtcgatgatattggtatttcagcttccaggactagtaaagagtccctggacgagattcgtaagagcgttcagaaaattctgttgtcccacgatagaaaccagcctctccctgctaacaaaggaaaaaccaagatcataccattttctgaaggcgctgaacatctgggcttgctgctagggagaaataagatctctatcggtcgcaagaccaagagccgaatggccaccataaggtccctggtggggaaatcaagaggagaaactaaaaagagcctgataaaaagagaagcctcttactataggtataagaagcagatcgaggaaacaatcatttga

SEQ ID NO: 10667 - RNA, 981 nt, synthetic construct
  source 1..981: mol_type = other RNA
atgcagacaaattctaggtaccctattatcaatatcgggtctaagaacgaactggcgaagcgattatcttccaagaacttcagtaaggataaatctctcgagctgattaacaatgtgctggctaatttcgataagtattggtacgactcaaaaaagtctgacccagaaaagcaaaaattttttagaagcagcgtcggtacccccctgcataaactgctgaagctgatcaacgccaagattctcaaagtatacgacaaatccttgcctgagttcattttcggcggggtgtcggaccggaatcacatccttgccgcgagggaactcatcgggaataaaaacgacagaacgctacttaagattgacgtgagccgttttttcgagcagattactatgcagcgcatagttagattcttccaccagaaatgtaattgctcactgcgcgcatcctatctcttagcttccctctgttgcgttcccggcggccaaaaggattcctcggccaatatgcagaagtatctggcccggggttttccgacttcaagcagactcgctgtctggaccaatcttgatacatttttgcgccttaaatgggagacaaataaaaggctgaagaaccatgaccctaagatagtcatctttgtagatgatatcggcgtgagtgcttcacgagtggacatcaagaccatcaattgcttgaaggaaagcctgataggcctgctagagagttacgatattaaccagcccttaccagttaaccacaaaaaaactgagatcattgcattcaagaacggtgcagagcatcttggaatgcggctaggaaagaacaagatatccattgggaggaagaccatctctaataagagcaagctgaacaactccataaaaacaagtgatggattgggaaagagcttgctgctcaaaaaaaaagcagcctactaccagtatctgaaacagatcgaacaagtgaacgacatggcctga

SEQ ID NO: 10668 - RNA, 972 nt, synthetic construct
  source 1..972: mol_type = other RNA
atgaaaaagaacaattacccgcagttcggcattcgttcaaaaaatgaactggcaaagaggatcagctccaagtctctgcctgccaacgaggcactgatcctgatcaacgatgtcctcgaaaatcacgaaggctattggaaggatagcaagatgtccgagcccgagaaagggaaatacgtgagaagttgtgttggtacccctctacataggttactcaacctgatcgacaaacgaattctaaggccatatgacaaactggcaccccattttatcttcggtggcttgtcaaaaaagaatcacattcaggcagcccattatttgattgggagcaagaagagacggtccctcataaaattagacattaagcgtttctacgagcagataacacaggaacggatcttttactttttctataagaaggccggctgcagtgtgcgcgcttctagactgctggcctacatctgctgtgtaacacaaggcgctaaaggcaatccaggtgtccagagagtgttggcccgcggattttccacttcttcaaggctcgcggtctgggccaacctcgacacgttcctgaaattacggtggaagctgcaggccgagcttgggaaaaatgacccaaaaattgctgtttatgtggatgatatcggaatttctgtggcagacgtgtcacagactaagctggaagagatagcccttatgatggcggaaatcttggagagtagcgatgccaatcaacccctgcctattaataacgagaagctggacattatgtcctttgagaaaaacgcggaacaccttggactccgcctgggacgcaaagctatcttcatggggaacaagataatgagcaagatccgaaagatcaaaaacgactaccagagagctgagaacaacaccaaatttaagctcatgtcgaagaggattgcttaccggctttatcagaagcaaatcgataagcagaatgaacaatga

SEQ ID NO: 10669 - RNA, 972 nt, synthetic construct
  source 1..972: mol_type = other RNA
atgtttgagcaacttcgctatccaaaaataggtattcggtctacctgcgagctggccaagcggattagcgactcctacttaccttacgataaggctttgcttctgattaataacgtgattctgcacttcgatgagtattggcacgactccaaatcttctcaacccaaaaaggaaaagtacgttagaagcgccgtaggtaatcagctgggagaactgctacgtcggatagacaggaagatcctggctccacatgacgggaagctgcccgaattcatcttcggcggcctcagcgggagagatcatatccaggcaggaaagcgccttctcggcaaaaagaggaaacgagtcttactcggactcgatataactcgcttctttgaacagatcaaggagtctcgcatctcctatttctttcacaaaaaatgtggctgctcactcgaggctagtaccttgttagccaggatttgttgcgtgccactgggaccgaagggggggtctagtactaaccgagtcctggctcgggggtttgcaacgtccacccgtttggccgtgtggtgcaatctggatacatttctgagaatgagctggaaagcgaaaaggttgttgagacatcacgatcctaaagtaatgacctttgtggacgacattggcatcacagcgtctcgggtgagtcatgaggagatgaaggagatcgaaaaaaaggtcatcagcattctgagccacttcgacaaaaaccagcctctgcccattaaccctacaaagactaagatctgttccttcagtaatggtgctcaaatactagggctcggaatgggcaagcgactctcagttggtgccagatcacgcagcagaatctccaagacccggctcgccctaaagctggcaacatcgccccttgaaaagaggtatctgcttcagaaaaaacgtggccaggattcgtaccgaaggcaggtggcacaggcctcagactga

SEQ ID NO: 10670 - RNA, 978 nt, synthetic construct
  source 1..978: mol_type = other RNA
atgttttccagaccgcgatatccacgcctaagaattggtagcaaaaatgaactggccaagaccatatccgatagcgctctcccctacccacaggccctgaccttaatcaacgacgtgatccgtaactttgattattactggcgggataacagtgaaaactctcagcctaacagaggaaaattcgtgcgatctgctgcacggacacccttgggagtgctgttggagagaatcgacaaaaaggtgctggccccccatgataggctagtgcccaattacattttcgggggcatgactggaaggtcgcacatccaagccgctcgttcacttctcggccaagagagaggccggatcctggcctctctggacatcacacatttctttgagcagattagagaacagagggtctttttcttcttttataggaaatgcggttgttcacctcgcgccagcaggctgctggcttccttgtgctgtgttccagtagggcagaaggggagcatgagcacagaaaagaccctcgctagagggttcgcgaccagcacacgactggctgtttggtgcaacctcgacactttcatccacctggaccgggaggtaaaaaagctgcttaaaaagtatgaccctcgcgtcgccatcttcatagacgatatcggcattagtgcaagtagggtgagtcaggaaaaaatctcagccgtggtgaaaatagtcgagaagattttgtccgattttgacaataatcagcgcctgccagttaacccggcaaagaccaagattcgcacttatgccagcggtgcagagcacctcgggcttaagctcggcaggaataagctggccatgggatccaagtcccgctctaggagagattcagtcataaatctccttaagaaacgcggagcgtactctcctacgcgggcacgtcggttactgttaaaaaagcaagcgtaccagcgataccaaggccagattcggtcggcttga

SEQ ID NO: 10671 - RNA, 987 nt, synthetic construct
  source 1..987: mol_type = other RNA
atgcagaacaacggccgttatccgagaataaatcttcggtctaaaaatgagcttgccaaacgcatctccgataaatctttctcctttcaaagctctctcaaactgattaacgatgtgctcaaaaattacaacgactattggtacgactctagacaatcacagcccgagaaagggaagtttgttcgctcttccgtgggaaaacccttagggaagctacttaaacgaatcaatcggaaagtcctgattccttatgacaagctcgtcccaaactttatcttcggagggatttcgaagaaggatcacattcaagctgcttacagcctgttgggcaaacagaagaacagaatgctgttgggactggacattagcacctttttcgagcagattaggaaggagagggtgttctacttctttcatgccaagtgtgggtgctccgcacgggtgtcacggatactggccagcgtttgttgcgtgcctgcagggaaaaaaggatcaggttcaaaggtcgaggtgctcgcacgtggcttctccacctcgtcaaggttaagtgtctggaccaatttggatacttttcttagactgaagtgggttacagatcgaaatttaaggaaccatgatagcaaaatcgttatcttcgtggacgacataggcatttccgctagtagggtcacgaagaataacctcgaaatcctatccagaaagattcaggccatcctgagcgactttgatcgcaatcagaagctgcccatcaacaataagaaaacaaaaatccggtctttcactgaaggtgtggaacacctgggactgcgactgggtcgcaataagatcactgcgggctacaagacaaagaaaaaactcgacaagatcaagaccgaaataaaatccagcagtggcctgaacaagaaagacttgattaacaaggtgaaggcctactatgtatataagaagcagatcaagaacgtatacagtaacagcagtaatgtgtga

SEQ ID NO: 10672 - RNA, 990 nt, synthetic construct
  source 1..990: mol_type = other RNA
atgccactggaaaagagatatccgactattaatttgcgctctaagaatgaaatcgccaaaaggatcacagataataagctacccttcaaagagagtattaagctcctgaacagagtgatcaataatcattccgaactttggcacgatgtgatctctttcagtgagccaagcaaaggaaagtatgtccgtagtgccaagaatacacctctggggaaactgctttccttgttcgacaagaaaatcttaaggcctcacgataagctgattccaaagttcatatttggcggcgtttcaggcggcagccatgtacaagccagctatcatctccttggtatctgcaaaaaacgaaccaaattgggcctggacatcaccaagttttttgagcacaatagcgagcagcgggtgttttatttcttccacaagaagtgtaactgctccgtccaggcaagtaaaatactctcgaagctctgttgcgtgcccttaggggccaaaggatcaaataacagcaaaacactagcgcggggattcgcaacctctacgcgcttggctgtgtggtgcaacctggatctgtttctgcgcatttactgggaagcaaaaaaaaccctgaagtacaaagatgtcaagatcgctgtgtttatagatgatattgggatctccgcttcccgagttgataagagaacaatggaggacctcagcctgaagattagggacatcttggagaactacgataaaaaccaatgtctccctcttaacaacaagaaaactgaggtaaagtcatatctggacggagagattgaacacctggggctcatcctgggcaataagaagctgtcattcggtaggaaaaccagaaaaaaactatccgaccttaaaaaagacctcgacaacaagcagattaagggtaagcagcggaagtctttatatactgccaagaaatcttactacagctacaagaagtacattaagaaccccatagacgacaagaaatga

SEQ ID NO: 10673 - RNA, 981 nt, synthetic construct
  source 1..981: mol_type = other RNA
atgcgaaaagaggcccgataccccaaaattaatattctgagcaagaacgagctggcaaaacacatctcgggctcaaagctgaggttctccgatgcgttgaagctgatcaataacgcagccgacaacttcaataatcagtggtatgactcagagcattctgaacctgaaaaggagaaattcgttagatcagcggtggggacctgtcttgggaaactactcgagctgatcgacaagaaagtgctggccccacacgataatttggtacctgactttatttttggcggcgtgtccagtaaaaaccatatccaagctgctcatcaccttttggggaataaacgagagcgcgttctgttacggcttgatataaagcggtttttcgagcagatccacgaggacagggtgtttaattttttctatgccaagtgtcgctgcagtgccagagctagtcgcctgatcgccaggttatgttgcgtcccactggggcctaagggacagggctctgccactaaatcactggcaagaggcttcgctacatctccccgcctcagtttatggtgcaacctcgacctattcctgcggctgagctggatggtaaaaaaggagcttagaggtcacgatcccaagatagcaatctacgttgatgacattggagtgaccgctagccgtgtgtccctagagcggatggaagagatctccagaattgcagaaaacatactcgaaaactttgacagcaaccagaagctgcccatcaacccgtctaagaaggaaatactgtctaatgtcgatggaatggaacatttgggcctccgctttggacggaataaactttctttcggtgggaaaacgaggttcaacctgaacaagatctactccaagctcaaatcgccactcagcaagagcgaaaagctgaggctcctgaatcaattgaggtcctatcagcgttacaaacagcagattgtcaagacaagcaacgccatttga

SEQ ID NO: 10674 - RNA, 972 nt, synthetic construct
  source 1..972: mol_type = other RNA
atgctaaaggaccggagatatcccgtgatagccctccgcagtaagaacgagctggctaagcgaatcagtggcaaggaccttccatatccagacgcacttgccctgataaacgacgtgttgcagaattttgatgcttattggtatgatagcgatcgcagtgagccaaaaaaagagaaatacgtaagaagcgcaatcggcaaacctctcgggaagctcttgaagctaatagataggaagattctggcccctcatgattctaaggtccccggattcattttcgggggcctctctggtaaaaatcacatccaggctgcataccacctgttgggagaaaagcgaaaaagaacgcttttgcggctggatatcaaaggcttcttcgagcagatacatgaagagagggtgttccatttgttcaacaaaaaattcggttgttccgtcgaagcggctcaactgattgcccgattatgttgcgtcgctgtgggtccgaagaattcaggatctactaaaaaaacactggcacgtgggtttgccacatcacctaggctggcgctgtggtgcaatctggacctgtttcttaggttacagtggaagatgaaaagggttctgagacaccacgatcctcggatcaccatctttgttgacgacatcggggtgacagcgagccgcatcgaggaggatcagatgcgtaagttctccaccgaattagagaatattctggcccaccacgaccccaaccagtcactccggattaacccacaaaagaaagaaattctcaccgccggcatgcacaaggagcatctcggccttcagctgggacggaaccgcctctcgatcggaaagaaaactcgctttaagaggaacgaaatcgccaaggctctgaagcaaccccagagcgaggccgacaagaaggcacttctgaaaaaaagacattcctactttgcctaccaagaacagattaagaatatttcctga

SEQ ID NO: 10675 - RNA, 978 nt, synthetic construct
  source 1..978: mol_type = other RNA
atgagcgatctgcgctacccgcagattaatttagagagcaaaaacgaactggctaaacgcatttccgatcgttatcttccttattcagaatctctcaagctcataaacgactgtctggaaaatctagaccactactggtacgacagcagagccagtgagcccgagaaggagaagttcgttaggtctgcgaggggtaagcccttggccgagctgcttaagaggatcaaccttgccgtactggccccttacgaccggctggtaccagattttattttcgggggcctgtcctatagaaatcatgtgcaggctgcagccaatttattgggcttccagaaaaagcggactttgctgaaactggatatttcccgattttttgaaaggataggcgatgggcgaatattccacttctttaataagaagtgtggctgcagtgtgcgtgcgtcgcgcctgttatccaaaatctgctgcgtcccaaaagggcctaagggatctggcgaggtcagtaagacactggcccgaggtttcgctacaagtccacggctagcagtgtgggcaaacttggacatttttctgaaaattgacctgactgtccacaagatgcttaggggacatgatcctagattggtggtgtttgtggacgatatcggaatcagcgcttcaagagttgaaatgagcaagatgcaagaggtgaaggaaaaggtcatcgatattctccagaactacgaccccaaccagaccctccccgtcaatcaagacaaaaccaaggtgatccctttccagaagatcccagagcatctggggatcaagctcggccggaacaaactttccccgggtaaaaagacgcaactcaggatgaagaatgttagcctgctcctcggagaagcaaaatcaaaaaaggagcgcgaccgcctgatgataaagaaacaggcctacagacagtataaacggcagttgtcatctgtgaacatccccaaatga

SEQ ID NO: 10676 - RNA, 1005 nt, synthetic construct
  source 1..1005: mol_type = other RNA
atgggtaaacagtacacccataaacacccaaagctaaatctccggactgaaaaagacctgctcagatttttgaacgccgccaagactgtaaaaactaagaacaagacactgaagaagcaagtgacctctaaggacttacacttcctgagcgagaacgcacatctcgagtggagcgatcaccccactgagtccaatcccatcaagaagaaatatgtgcggtttgttaagccgggcagttcattaaatattaccaataggcgcctcaatgcagccctgaaactgacacttgacaagaaggttcctggcatcttttatggttcggtgagtaaaaagtcacacattcaggccgctgaggttttatgtaacggcaagaataccaccataatatctttggacatcacccgattctttgaatccatcagcccaagtcgagtcgctagattcttcgggaaggcaggatgctcacctgaaataattaaggtcctggtggatatcacgtgcgtccccctcggatctaaaaacgagcccttgagcgattatagccttgctaggggttttccaacatctcctcgtctggccctgtgggccacatacgaaatcttcgtgaagcttaacagggtgctgctcaaaaacttcccacacctctcacctaaaatggtgattttcgtagatgatgtcgggatctccattaaaaatgctaccattatcgacgtggaggcgatcaaggaaaccgctttcagtataatcgaaaacgacaaaaacgggatcaacttggaggtgcataaaaaacctccaaagctgaaagtgcggcatatttcccagacagcggagcacctaggcctggtcattggaaaaaaatccctggcccccggatttaagactcgggttaagattggggacgtgaagactaaacttagcgataagtctctgtccaagacggaacgcgagacagcacttcagcataaacgcggcctgatgaattacaagaggagcgtaagaccgtga

SEQ ID NO: 10677 - RNA, 1008 nt, synthetic construct
  source 1..1008: mol_type = other RNA
atgcggaaacagtttgcacataaacaccccaagcttaacctgagaaccgaaaaagaccttctcagatttctgaacgcatcgaaggagattaagaccaaacgagggactcttaaacgtcctgtgctctttaaggacctcacctacttgtatgaagagccacggttggattggtccgaccaccccactgaaagcgattctacaaaggagaagtacgtccggtctatcaagcccggatccatactcaacacagccaatcgcaggttaaatgaggccttaaggcgcacacttgatgaacaagcgtcccaaatattctacggcagcgtgtctaaaaaaagtcacatacaggccgctggatcgctgtgcaatgggaagaataccactatcgtttcacttgatatcacgcgtttctttgagagcatcagctccgaccgagttgctcgcttcttctgcaaggcaggctgtagtccagagatcgcgaagaaactcgttgctgtaacatgtgttcctgtgggcccgaaggaaaaacccgaagagaagtactccctggctaggggattccccacgagtccgaggctggcactatggagcaccttcgaaattttcgtgaagctgaatagggtcctgcagaaaaagttcgctcacctgagtcctaagatcgtggtctttgtggacgacataggtatctcactgaagaacgccacaggcgaagatattcaggccgtcaaagagatcgcctttagcgtaattgagtctgatactaaggacttatcactcaaagtgcacaaaaatcctcctaaactgaagattcagcatatctcagagaacccagagcatttgggtctggtcatcggcaagaagaatctgtctctcgggtttaagacccgaagcaaaattggggacgtgaaagtgcggttgtccgacagaaccctatcccaggaggatagatataaagccctgcagaacaagagaggactgatgaactataagcggtctattactcgcccatga

SEQ ID NO: 10678 - RNA, 1008 nt, synthetic construct
  source 1..1008: mol_type = other RNA
atgaggaaacactacactcacaagcatccaaagctgaacctgcgaacagagaaggatctcctgcacttcctcaatgctcggaaaacagttaaattgaaaggaaagaccgtgagaaggcaggtggctacgaaggacctctcctatctcgataagaattcgagatcagactggaatgaccatccttcagaatccaagcccgaaaacggcaagtacgtgcggtacattaaacagggcagcacccttgatatctcaaataggaggttgaatgccgccctcaaacaaacgcttgacaaaaaggtgcctagcatcttttacggaagtgtcagcaagaagagccatattcaggcctctcgagcattgtgcaacggcaagagtaccgtgatcatatctctggacgtcacccgcttctttgagtccgttagtttagcccggattttccgtttcttccgcaaggctggttgctcgaccgagatagcagatattctggtagaattgacatgtgtgcccctcggcgctaaggagcacccacaatctggattttctattgccagaggattccccacttctccgagacttgccttatgggcgacttttgaaatcttcgtgaagctgaacagaattctccagaaaaggtatggtcatttatcccctaagctggtggtatttgtggatgacgtcgggatctcactgaagaatagtactcctgaggagatcgaagaaatcaaggcactgtccttcgagacaatagaatcagacaaaaacgggattcaccttgttgtgcacaaagaggctccaaaactgaaggtacagagcatcgaccagaacgcagaacatctaggcctggtcatagggaaaaattccctgtctcccagctttgagactcgccacaagatcggttatgttaaagcgcaactgagcaaacagacactaagtaccgagaaccgtgatcgcgcccggaaaaataagcgaggcctgatgaactataaacggtccgtcagcaacgggtga

SEQ ID NO: 10679 - RNA, 1032 nt, synthetic construct
  source 1..1032: mol_type = other RNA
atgaaaaaaaactatacccacacgcatccgaagatcaacctccggacagagaaggacctgctcctgttccttaatgcgaaggccacaaaagatcggagatacaaaatacctaggaagctggtgagtcaaaaggatgtggcttacattaggcagaatgttcaccttgactggaaggattatgcatatgggggagactccctgaaattcgaaagcgccgctgagaagggcaaaatgactcgctcaatcaagcagaatagttgtttagacgtcgttaatagacgtctgaacgcaagttttcgacgggttctcgacaaacacgtgcctgatgttttttacggcagtgtgagcggacggacccatatcttagctgccaaggagctgacaaacgggaagaagactgtgttcctgtcgttcgacattcagaagtttttcgagtcaatttcctctaaccgtgtgcaacgattcttcgttaaagccgggtgcaccaaggaaattgctgattttttggtgagcattacctgcgtgcccctgggtgtgaagggattgcaaaaggacaaactatcactggcacgaggttttccaacgagcccaagactggccctttggtgtacttttgaaatattctctaagctcaaccgcatcttacagaaatccttctcccacctctttccaaaaatcgtcctgtatgtggacgacatcggcatatctctaaaaaatccctccgaggatgagatcgtccagatcagggacttggtattcgagctgatcgagtctgataaaaacgggctttctctcactgtgcaccgcgatccccctaaatttagagtgcagaaggtagaaggtcgcgccgaacatcttggcgtagcaattggcaagagcaagatagccgtcggaagcaagacagtcaggaatattgcgatcgtgaaaaatcagttgctgtcaaccaatgacaaggatgaaagaggacgcgtcttgcagaaaaaaaggggcctgatgaactaccggaagaccgtcacaaagaacaacctctga

SEQ ID NO: 10680 - RNA, 960 nt, synthetic construct
  source 1..960: mol_type = other RNA
atgtgtaaactgaatatctactccctgaaaactctctcagaacgatcctggattagtcgcgacttcctgctctcctgctctgacggtagcgggcggtttaggaaaaagttcttttccgaccataaaaactctaagatcaccgatgatatcacaacatgtaagtacataagagtggtcaagtatggctctcaaatgcaaaagttccataagtggataaactgggagctcaaaaggtttgacagcaaactcccattgactatttacggctgggtagaggagaaatccactattgatgccattagcatacacattaggggagtcccgtttgtttttataaagagtgatctgtccagattctttgaatctatccccaaagaacagatcttctcgctgttttgcggcaagtttaactgtgataagatcgttgctgaggtgatctctaattcaattacgtttcctcagtggcccctaggttcgaaaggggagcttttcctggcacggtggttgcacgttagttcacgtatcgcagtgtggagtgccctgaactttttcaaagatctgtgctacttcttccagaaaaaatacaagaagtacaagcctaagatctcatattacgtggacgatattggaattagcctcgtgacgacagatcagattattatcgacgaattcatggcggaccttgtctggttcgtgtggcagatccataagaactccgacttcctgaacttgcacccagacaaaaccaattgcaccattatcaaggataacaatgacttcgtagagtatctttgggggaagatctatatgaatcgcaaggacataagcaataaaactaccgaaaaaaccaagcagttatatttcctgtacaagaaagctaagacaatcgaggagaagaatttttatgccaagcggctaacccccttacgcagctataaaaagagaatgcgaagctcttga

SEQ ID NO: 10681 - RNA, 909 nt, synthetic construct
  source 1..909: mol_type = other RNA
atgaccaaacagcacaagatcggtcttgtgaaggtccttgaaatagtgacaaccattcttgccttcattaatgagagctggacatttgtggaaaaggtacttagtctgttcaacatcgtgcccaattacatgaattcatccatgaagcctgcctcagattggctgcataagttcgagatcaaggagaatcgctgggttttcattcccaatgaagacactctgaccctcggcagaaaaattcacaagtacatcaaaagcaagtggaagtttccactgtacatgtttcatttgcgggatggcggtcatgtcgccgcagcgaattatcacatagagaacacatatttctgcttgatagacatttccgattttttcggggcaacttctcagagccgtattacaagggaactgaacaaatttataccatacgaccgagccagagagatcgctaaattaagcacggtgaagaacctgaatagtaacgggctgaagaaagtactcccgtacggatacccccagtctcctatactcgcaagcttttgcttcaggcaaagctattgtggaaaggtgatccacactctcagtaaaagcggcaacatctccatctccgtttatatggacgatatcctactgagctctgatgacatcgagcaactggtttatgcattcaactccattaagaccgccttgaagaaatctggatacactgtgaacgaagctaagacgcagtcacctagtacctccgtgaatgtctttaacttggtcctgtcaaagaacctactcaaggtgtcgtctatccggattgtcgagttcctgcaagcctacatctcatctcagaacccagctgagaaaaaaggcattgcttcctatgttgggagtgtgaataaaacccaggcgaaattatttcagtga

SEQ ID NO: 10682 - RNA, 909 nt, synthetic construct
  source 1..909: mol_type = other RNA
atgaccaagcagcacaaaattggactggtgaaggttctggagacaactaccgtggtattggcctttatcaacgagagttggaccttcgtcgaaaaagtcctgtcccttttcaatatagtccccaattacatgacattgagcatgtcgactccaagtgattggcttcacaaatttgagatcaagaccgagaggtgggtgttcgtacctagtaagaagacgttagaaagaggaagacagatccacgcctacatcaagcagaagtggaagtatccacgatatatgtttcatctaagaaacgggggtcatgtggctgccgcaaacttccatctgaagtctaactatttctctctgatcgacgtgtccgacttctatggcgctacttcccaaagccgggtgaccagggagctgggtaggctagtgccatacgtgaaggcccggcagatcgcacgattgagcactgtggccaatcccaaccgcaatggcttcaaacacgttattccctacgggtaccctcagagtcctattttagcgagcctctgtttccaccattctttttgcggcggcgtcatttcctctatatccaaatcggagcgcgtctttgtgagcgtatatatggatgatatcctgctgagctctgacgacatgaacctcctggttgaagcgtttgatacagttagacaagcactgaggaagtccggatacaaggtcaacgagaataaaacgcagtctccttcacccaagattcaagtgtttaatctcgaactggggcacaatcatctccgggtcacaccgaaacggattgttgagttccttaaggtgtttatatcaagcgctaatgaacacgaacgtaaagggatcgcctcatacgtgggctccattaacaaatcacaggctaaactcttccgctga

SEQ ID NO: 10683 - RNA, 930 nt, synthetic construct
  source 1..930: mol_type = other RNA
atgaaaaagtttaaactgggcctggtgaaagtgttatggggagtctatgcactctaccactttcttaaggacttcgtgcccttccttaacgaatctatctctttgttcgagaagttgctcagctactttaacattgcccttaactacttattcctgaggcgcttttttctgatggtgaaatgggaatctaagttcgaaatcaagaaggaccgctgggtgtatgtcccaaccgatgaagtccggctttatggggagaaactgcataattaccttcggaaaagatgggtccccccactgtacttctatcatctgcgtgatggaggtcacgttgcttgcgccaaaaaacatctggccaatgaatatttcgctctgatagatatcaagaacttttttgagagcaccggccagtcgagagttacgcgggagatcaagaattactttaagtacaacgatgcacgcgagattgccaagttatccactgtaaggaatccactccctgtgggacctaaatacataattccttatgggtttcctcagagtccgattctgtcaacattgtgcctgcacaagagctattgtgggggactattcaaaaagatagattccagctttgggatcgacatcagtatctacatggatgacattattatctccggtaatgacctggagctatgtaacctcaattataaactgttgtgcgacggcctcattagaagcggctatgaggtaaacgaaaataaaagtcaggcaccctccaagtcaatcagggctttcaacctcgaattgaagaaggacagtctgcgagtcctatcctctcgagtgatagagttcctcgtggcctacatcaagagcgacaacccccacgtgaggaagggtattgcctcatacgttggctcaatcaatgctgagcaagcgaaactgttcagatga

SEQ ID NO: 10684 - RNA, 939 nt, synthetic construct
  source 1..939: mol_type = other RNA
atgaggaagggcgcattaagaagaattccacggggatttaccgcaatcccggccaagtggaggtggggcagattccacctagcccccatcgtgatctttttggagaacatgcgaaacgtagcccgctccttccttaaggatggcactcggtacttcgtgctgactaagagctacgccggatggcgtacctttagtgagggcggtagagctgcttatgacggggaggaggaatggcggctgctcaaagaacgtgtcttttcgcattggcagccaaatgccgcttttaccgcattcgcgaagagggctcatgttgccgccttgcgccctcacctggttaataagtgctttgctgtgatagacctgaaaggcttcttcgaccatgtaaccaggacgaaagtgtgtcgggcactcgaagcaatcgggctggcgagatcttcagctttcaaaatagccggtgagtccacaattcggcaaggggataagtgcaccttgccccgcggatttcgccagagcagccttctcgctacattagtgttagagaagtcactcttcggtagtgccttgacgggaaacagatttgagtctaaagttactgtctatagcgacgacataatcttcagttctaatgatttcgagacacttgccgacgaacactcacaggctatcgcactcctgcgccgctctcacttcgccattaaccctacaaagacacagaccgcgcgggctgaagtcgacatttttaatctgaggatgagccaccgtactctgaggtttaccgatgagcgaatgtggaagtttctggagcaagccgcctccttcgtgaaaggggaggatgcagaacataaactgcacctgtacgaaaaactcttcggcgattatattaggtccatcaaccctgaacaggagaagagacttcgaacttccctggggctaccctga

SEQ ID NO: 10685 - RNA, 933 nt, synthetic construct
  source 1..933: mol_type = other RNA
atgcctaaagggctgaacttccaaagaaagtccgatatagtaaagaggttgggaatcgaacctaaggtgctggaggagatcctgtacgacaaggagaaattgttttacgtggaggaggaaatcatcaaggggaagacccgggactttcacaaatgtaggggttccctatacggctttctcccccagctgaacaaagccataatgtcactcgacgctctcccccctgaactgtgcggtggcgttcgaggtaagagcatctttaaaagcgcctctcagcaccaaaaaaaaaagttcgtcctgaagcttgacctcaaggatttcttccattccgtgaagccctatcaggtgcaggctgtgtttgaaagactgggctgtacaccgagcatgtctaagttattgacatatacatgcactgcgaataatcacctccctcagggcttcagtaccagcccaattttagctgcgcatgtgctcgcaccattcgtggaagatatgcgagcacttctgcgcccacatcacctgtcatttaccatttgggtagacgatatcacaatttccgggtacacaaatcccgtgcggctgctcccaaccattagatctatctgcaaaaaacacaaagtccaccttaacgagaagaaacgtaaactgttaagggccggaaagcagactcaggaagttactggcgtccggatttcgtatgataagttgagtactggagccactttctttcgtgacacggagaggatggtgtatgtgcttaaaaaatttgggtggcatgaggttaagaaaaagttcgccttcaacgttaccgacaagcgcaaggtcatccaaaaaataaagggacgcattaaccatattcggcaggctaatgctcaccaagcaggcaagctagacacggccctgagagataccctggaggtccaggcacactga

SEQ ID NO: 10686 - RNA, 960 nt, synthetic construct
  source 1..960: mol_type = other RNA
atgaacgacaccagactgaacctcaggtctgagaatgatgtcgtcaatagacttcacctgcgcgacaagaagtttttgcaaacactgtgtgagaatcgcgaccggtactttcagaaaaggatgctaaacactgggacaaaagaacgtgaaatatgtattccgcatgacccattaggccactttcttagaaagtttaatgcggtgctccgtacgctgcctgttccaccagaatgttacgggggagtccccggaagatccgtcaaggacaacgccagcaagcacaccaacaagcgcttcgtgatgaacttggacatccagaattttttcccgagcgtgaccgccaaccaagtgttcgaggtacttcggaggcacggctgctatagagagacgtccgaactccttactaaactggtaatgatagataatcgcctgccccagggattcaacacttcacctctgctgagcatccaggtgttaacacccataatcgaggagctgaggcccctcttaagtgaacaggatgccacattcaccgtctggatcgatgatattgcaatctctagtgacaaatcacctgaaccactggtgaagcgaatcgctgagaaatgccgacgccacgggttccggctgaacactgacaagtaccattgcggcgaaaggggtgtgagcgtccaagaggtaaccggcgtggttattaatggtgatgaactaagacctgccggtgggtttatcaaacagacagaaaagatgatccatgtgctcgttaagtatggcctggaggatctgaatgcagcattcgatcgggagtttctcgacaccgctaaagcccaggctcacattgagggacgaattgtgtggattgacgagttcgactccgccaaagctgataagctgaaacaacagctccataagttggtggtgcccgcgtctttccggtcggttttggttactgcacagtga

SEQ ID NO: 10687 - RNA, 906 nt, synthetic construct
  source 1..906: mol_type = other RNA
atgagaaatgccctgaattttcagtttcccaatcagatcgcccggcggctgaagataaagtcttctatgcttcagaacgcactccacaatatgactgatctctattgtcaccaagagcgcgacattgacgggaaggtccgggatatttacatgccctatcctccccttaagaccgtgcagaggaaactgcacctgacacttaggaagatccctttcccagctgaatttatcgggggaatgccaaagcacagtatatttgataacgctcgacggcacgtgggtaggaattttgtactgaaccttgacctgaagaacttttaccctagcatcaagccctcgcaagtggagtcagtctttctgagattggggtgtaacaaaggtatgagtcgcctgctcacctacttgacaacagccgacggccatctgccacaggggttccctacctccactatgttatcagcactggttttagtcccactcgccgatgatctgagagctctgttacagcctaagttcgtgttctccttctgggtggacgatctcactatttccggagactctgatcctacaccactcattcccgctgtgcgcaagctatgcagaaaacatggcttcaggcttaaagaggagaaaaaacatctaggagttcgggggaaagttccgcaagaagtaactggcattatcataagcggaaaggacttcagtccggccaacggttttttgccccatacaaagaatatgttgcgagcgctgaataaggagggatgggaatatctcaacaccattgaacgttggggctgcaccagcaagagagaggtgacgtcacgcctgaaaggccgtatccgattcatcggccagttcgacaaaagcagggcagaaaaactgtacgactccttgaacatgtga

SEQ ID NO: 10688 - RNA, 963 nt, synthetic construct
  source 1..963: mol_type = other RNA
atgccacggtgcaagatcatggtcacaaagagtgccaacaagaccataatctccactaggcggctatgcgtggaaatcctccaaatccacaaggacgaactgctgtcactcgtggcagacacagacagttactatagaccttacgtgcaaaaaaagaagagagccgatggcaccgctaaggagaggcgcattgaaccatcctacggatatttgaaaactgcccagagactggtaaataaacgcatcctgaagcccgccatggcagacttaccaattgagattatgggaggccggcccggcgtaagtgtcgttaataacgcaaaccatcatgctcagagcaaaagtctcatgaaatatgacgtgaaaaacttcttccccagcattaagtacgggcacgtctatcacatctttaggtaccgtcttggcttctgcgaagaagcagctaacattcttaccaaactaactacctatccgtccacaggagatgtccatgtgcctcaaggcgcccctaccagcactagcctggccatgttcgcgctggagcctatgtgtgatagactcaaggtttactgtgacgataacgatttacgctcctctatctggatagacgacattacaatatctggggacccaaaagccctgagacagcatcgaccccggattaatcacatcgtcaatggtacgccctttcagatccaccctgataaggatacaggcgtgttggtgaaagggggtaaggcgggccatgagaaggggagaaagattactggggttgtgatcgataataacaataggctgacgataggtcgacagaaactgcgaagcctccgttctaaagtgcggaggtccaaagtggtttcagacaagttggagggatcacttcagtttctgaggcacgtaaatccgacccagggaaacaagctgcttcgcgagtaccgctctaagcacaaacggtcggcttga

SEQ ID NO: 10689 - RNA, 918 nt, synthetic construct
  source 1..918: mol_type = other RNA
atggtcaaccagaaatgcatcaccaccaccaaattgtgtagagacattcttaagataccgaaagaggagctactggctctgctggctgacaggcagtcatactatgtgccattcgaaaaaaagaagattacagccggaggacgggtaaaaatccgtaccattgaacctcctcacggatatctgaagcgggtcttgaagaaaattaacattactgtgctccagccccagatggaacggctcccatacggggtgatgggggggagaaagggctactcggtggtggataatgcaaaataccatgcatctgctcccgcgctgatgaagtatgacataaaggactttttccccagtatcaagtatgcagatgtctttcacatctttcgctaccagctcaattactgtgaagaggcagccaacattcttgcccacctgacaacgttcgagaactcccagcatggtgttcacgtgcctcagggcagtcctacatctatgagcattgccatcttcgctgtcgaaaagatgagctgtgccgtggacgactattgccgtgagaatggtttaaagttttccatctgggttgacgatattacaatcagcggcccctatgataaattatgccgccacaggagcactataaaccacatcctcaattccactcattacagaatcaacccagacaaagattctgggatcgttaagaagggccaaaaaggccgatccgtcacgggtgtaattatcagcaatgatgggagactgactgttggacattcaaaactgtctaggctccgacgccaggtgaagagatcaacccgcccaagtgataagctacgaggccggctgcaattcctgttgcaagtgaacaaacaccaggcccggaggcttatacatgagtacgcggagaagcacaggaagaattga

SEQ ID NO: 10690 - RNA, 918 nt, synthetic construct
  source 1..918: mol_type = other RNA
atgaatacctcctccaagaaagtgtgcctttggggcagtgtggaggccttggccaaaacgcttaaggtgcccgttgatgatctgtttgcttggtgcggcagaaagaaaagattcgttacagaagaggaacgtctcatcggtgccaaatataggcagctgaaagtccctcatggcgaattcaaggaactgctacgcaagatcgaccagcagctgaagaggtgtcccattcccaactacttttatggctctcggaaaggagtgagcgccatagactgtgcccttgtccatttacatagcccctatattctcaagctcgatttgaaggattttttcccatctactgattaccggagagtaagtaactccttgagccaggtgtgcgacaaggaagcggtgctcaaactgcttaccgagctatgtaccttccagcaccacctaccacaggggttcccgacttccaccaccatcgcagagctgacgctgattcctctggctcagagactcttcggaatgtgtaatcagtacgggctccaattatcaatctacgttgacgacatatgtattagtggtagcccagtccttctgcggctggaggcacgcatcttacgaatgtttcaggaaatgcactttaggttgaacctgaagaaaaaggagctgcgctctaagcaagagggaatcgccgtgactggtgtatttatgcagaatggcttctgcaccacaaaacctaaatttgacgagaaactcttgaagaagatatgggcatatgagctggctcagatgatttgcgactctactctcgctgaggatttgctgggctcaatcaggggacaacttctgtggacacgacaactggacgaatcgaagtacctgtgcttcctcagcgaactgcggcaagggcagatgatgtcagggacatga

SEQ ID NO: 10691 - RNA, 927 nt, synthetic construct
  source 1..927: mol_type = other RNA
atgaagaaaagacagcttctgaacatcaatacgctaaatgaactggcgctccagctagagatcccctacgatttcttaattaaaatggctgatcgaatggacaacaactactataccttcgataagaaactgatcaagaagaatgggaaaatcaagatcaggaaattcttcgagggcaataacaatctgaagattattcaccggaaaatcaatcagttgcttgaccatatcaattatcccgattcgattcaaggaggcattgtggggaagtccatagtaacaaatgcctctattcacgccagtagaaaatacgtcgcaaactttgatattagcaactttttcccttcaatcgactatcgcgtagtgtatcgggtttatcgatttttgaaatgttcaccggacgtggctcggattttgactaagtttaccactgcagacgcacatctcccacagggtttcggtactagcccaaaagtgtccggactggtgttgtttgaagtcgacatgcgtttaaacaagctcctgtctcgctatgggctcaaacattcattctggatcgatgacctcacaatttctggcgatcacagcataaagaagttcaagaacatcatttgcaagatctttcagcaaagtggatttaagcttaaccacgacaagacggagtttactaatagtaagcaaaagcaggtgtgtacaggcctgacaatcaattaccagcctaatgctgacaaagccatcagagacaaagttaggaaagagctgtttctttgcaagaagtttggcgtcgagaacttcctcaacgaacacggatactccatagataaggataagtacctgaggtccatggccgggaaaatcagcttcctgtatagcataaaccccaagtacctgacctacaaaaaaaccttccaggaaataaccacctga

SEQ ID NO: 10692 - RNA, 918 nt, synthetic construct
  source 1..918: mol_type = other RNA
atgaagaaacgacagttcttgaagataaatacagtaaaggagctttcctatcagctggggctgccagaggcttttctgattagctcagcaaataagatcgacaattgctaccgaaaattcacagataaggacaagaagggcaaagaaagaactttttatgtggctaacgagaatctgaagaaggttcatcagaaaattaacaaactcctcgatactctggactatcccatcaacatccaagggggcattgctggcaggtcaattgtgacgaatgcgagcgtccatgtggggaagaaatacgttgcaaactacgacatcaaaaactttttcccctcggtgaattataaaattgtctatcggagcttcgagaaacagaagtgtatgcctgaggtttgcagaatgctcactaggtttaccaccgccgacggatgtcttcctcagggcttcgccacctccccaaaagtgtctggtcttgtcttgtactcaagtaacttcagaattgagacgctattaaaaccttatgacctgatccacaccttctggatcgacgacctgactgtatccggaaataggccgatcaagaagtttcagaagctgttttacaagatattcaagcaggaaggcttttccctgcatgatgaccccaaaaaagcccgcatcaccgatagtcaacaccggcagacatgcacagggctaatcataaatcaggaactcaatcccgaaaaaggtctgaaagataaggtgcgtaaggaattatttctctgtaagaagttcggagtcaacaattttttgaaagagcacaacagcccattcgataaagatcgctacctgcggaagctcgccggaaacatttcttttttgtgctctgtgaacaagaaaaacttcatctacaaggagcaactgaagcttataaagtga

SEQ ID NO: 10693 - RNA, 951 nt, synthetic construct
  source 1..951: mol_type = other RNA
atgaagcggaagaagtacttcaagttctattcgatcaaatccttagctaaacacttaggggttagcgaaggctttttgattgatctggcaaacaaacaggacggaaactataaattctgtcagggtgttatgatcaagaataagtcccgggacctgtataaagcaaacacctccctgaaaatcgtgctcaacctaatcgacaagaagatactgaactattacgatttccccaaaaccttccaaggcggaatccgtgggagggcactcagagataatgctcagttccataccggaaagaagtacattcttaagattgacatcgccgattttttccccagtatcagccctgagaagatctttaagactctgaagcagcttcaaattgccgataaacctgctagcctgcttacgactttggttacagtgaaaaatccccacccacacctacctcagggcttttgtacatccccaaagatcgccagtctcgtgttgctcaatttggaaaagaggtttcataacctgtttaaggagaaaaaatgcgactactccttttgggtggatgacatcacgttttcttctgacatgcccatcggaaagttcaagaacctgatactcaagattctcaaagatgaagggttctcagtgaaccagaagaaaatagagctgctgaccaataaagaaagaatggtagtaacaggggtcgtggtcaattcatttcctaccctctctaatgatcgcaaaaaggaaattgagaaaccactttattgcctggtgaaattcggtattgtcgactacttcaagaagaacaaaatcgagatttctgaggcgagcataactaaaattcgaagcagtctgttgggcaaaatcaactttgccaagtcaataaatccggagctgggcatcaaatacaagaaggacttcctgaagattacatgggagttaaagaaatga

SEQ ID NO: 10694 - RNA, 1152 nt, synthetic construct
  source 1..1152: mol_type = other RNA
atgaatgctctttgtaaagcgctggatctgaccctcgatgagatctctgaggccttatcactgacggctgcagatagatacaaggagaggtcagtccccaaaccaaatggctccattaggattgtacacaacccgcatcacctgatccgcaagattcaaagacgaataaatcggcggatcttttctaacccagatatcatcctctggcctgaccacgttttcggaagtattcccaacgaagagttttcggatagccccgccgccgagaaggactacgttaactgcgcgcggcagcattgcagagctaaatctgtcctgtctgtagacatcaaagatttcttcgacaacatccaccgagatagggtgcatcagatattctccgacttcctgaagtgcgaagaggaagtgagtgacgtcctggccaacatttgttgtaggggagataatttagtccaaggtgcactgaccagcagttacatcgccaccctgtgcctctattccaatgagggactcgttgtggagagattgcggaacaagggtgtggcatatactaggctagtggatgacatcacaatatcttccaaaattgctgactatgactttagcttcgccatgcgccagatagagaggatgctcgacgaatttggcctgcccctgaacacaaataagactaagcttcagaatgcggggatgcaacctctcatcgtccacgggctacgggtggacttcgatcagcctagattacctccagacgagccacggagaattagagcagctgtgaagaacttggagctcctcgccagcacacccgggtacagagcatcccgcgcttatcgtaaagatttcaataggtgtctgggacgcgtgaacaaactggatcgtgtggggcacaagcagcataaggttcttttggcaaggttgcgatccgtaattcctctaccatcacatatggacatcgaacgggccgagcagcaggtgactcgattgcaaaatgacagtgccaaagccggctacaaggaaacctactggttttatcgcaggtggtatgtggccagccagcgtattggcatacttaaacgctcatttccgggcaaggctagcgaactgcgcgaacggcttaatcagctgcgacccatcaagaactacgaatga

SEQ ID NO: 10695 - RNA, 1209 nt, synthetic construct
  source 1..1209: mol_type = other RNA
atgcattccccaataagactccagccgatcaaagtggctagaggttcggtccccaccttagccgccttgtgctccgccctcgacatccaacgggctgagctcgatgccgcccttgctcttacggcagccgaaagataccaggtcagaaccgtgccgaaggccgatggaagcgaacgcattgttcacaatccccaccatctgatcaggaaaattcagcggcgtctgaatcgaagattttttgccaaccctgacgtcatcaagtggcccgatcatgtgtttggctctatacccaacgacgacttgagcacaagcccggcagcggataaagattacgtgaactgtgcgcggcagcactgcggagcgaagtctattctgagcgtagacattaagaatttcttcgacaacatccaccgcgataaggtcagggacgtgtttaccctattctttaagtatcctacagacgtggccgaagccttagcagacgtgtgttgcaaggaagaccatgtagtgcaaggggctctgactagctcctacatagctacgctgtgcctctacgatgtcgaagggcttgtggttagtaagttaagacacaaaggactggtgtatactcgtctggtagatgatattacagtgagttcacgcgtgactggctatgatttttcttatgcattgaggctcattgagagtatggtggattctgccgggttgccactcaatacacgaaagaccaggattcagagcgtcggcatgaggcctcttctcgtgcacgggctgcgagtggacttcgctgaaccacgcctgcctcctgaggaaccaaggaagatccgggcgtcagtaaaacaggttgagctgctggccgcatcacccggttatcgcgcttctagggcctaccggagggatttcaaccgatgtttgggcagagtcaataagttggcacgcgttaagcatacccaacacctgcctctgctgaagcggctacagaaaatagttcccctgccatcccacaaggacatcgagcgcgcagagaaacagatcacccggctggagagggactccctcaagcctggctacaaggatacatactggttctataagcgatggcatgttgcatccgagagactgactatcctcaaacggagtttcccaaaaactgcttcagacatgcgtgaccgccttagaaaactacaccccaaaaaagcttacgagtga

SEQ ID NO: 10696 - RNA, 1209 nt, synthetic construct
  source 1..1209: mol_type = other RNA
atgacttatactgccaaacttcacccggagaaagtcgccctctccagcatctccaatattgataacttgtgtgatgctctcgacatcagcgtggccgagttgacagctgcgatgaagttgtccccagaacagcgttacacctccggagttgtgcccaaaaaggatggttccgaccggattataaataatcctcaccacctgatccgtaagatccagaggaggatcaacaagcggatttttagcgaccaggacgtgattagttggccagatcacgttttcggaagcattcctaatgacgatctctctatttccccagcgtctgacaaggactatgtgaactgcgccagacaacattgttgtgcaaagagtgtgctgagtgtcgatatcaaggatttctttgacaacatccactacgaagcagtcgtgagcatattcgagtcgttcctgaaataccctgcagatgtggctgatgctctggctaacgtttgctgtaagggggaacatgttgtccagggtgcattaacatctagctacattgctacactctgcctgcatgccgttgagggcgatctggtaaaacgccttaggcacaagggcctggtgtataccagactggtggacgatataacgatctcctcaaagctcgctaattacgacttcggattctctctcaaacaagtcgaaaagatgctgcatggcgctgacctgcctcttaacgatggtaagacccgaattcagcatgcatctatgcagcctctcatcgtgcacgggctgcgagtagacttcagtcagccgcgattgcccccatcagaaccccgaaatataagagcagcagtgaagaaccttgaactaatggccaatagccccgggtatagagcgagcagggcctaccggcgggactttaaccgctgcatgggcagagtcaacaaactgggcagggtgaaacacaatcaacactcagagctgctagcccgcgtacggcgtgtcttgcccttaccctcacataaggatatcgagagggccgagcgccaggtagacagacttgaggttgactttctgaagcctaactaccggagtacctactggttttataaaaggtattacgtggccatggaaaggttagggattctcaaacggtcttttccaaagaaagccgccgagttgcgcgcgagactgatcgtgatgcgcccatcaggaaaatatgagtga

SEQ ID NO: 10697 - RNA, 1209 nt, synthetic construct
  source 1..1209: mol_type = other RNA
atggcccatactccccggtttcatcccgtcaaggagagcgccggctcaattgccgatgttgcctccctgtgcgtggctctagacgttgcactgtccgagctctctagcgccagaaacttaccagcagaccagcgctattttcgcagggaggtccgtaagaaggatggctcaatccgggttgtctacaacccacattacttgatacggaagatccagcgcagaattaaccgtcggatttttagtaatagctccgtggtgtcatggcctgaccacatcttcggaagcattcccaatgatgacttctctgagtcagatgcaagtgaaaaggactacgtgaattgtgccaggcagcactgtggagcaaaatctgtgctgagcctcgatatcagagattttttcgacaacatccaccgtgaaatcgtgcgcggcattttctctagattcttcaattacccagacgatgtgagtgacgctcttgcggacgtgtgttgcatgggggaccacgtagtacagggtgctctaaccagcagctacatcgcgaccttgtgcctgtgggatgtagaggggcaggttgttcggaaactcgggtacaaaggtctggtgtatacacggttcgtcgacgacatcaatatttcctctaaagtcgctcgctatgacttttcttacgccttgcggctggtggaggagatggtgtccgaagctggactgccactcaacgggaagaagacaaaaatacaatatgcgagcattaagccgctgattgtccacggacttagggtagatttcgaccaaccccgattaccacctgaagaacctagaaacatcagagcagccgtgaagaaccttgagctgctagccgcatctcccggctatagggctagtcgatcctatcggaaggattttaaccgatgcctgggacgcgtcaataagctcgccagagtggggcatcagttacacgaatttctgatgcagagactgaggaagatcctccccctcccttcgaatatggatatcgaacgcgccgaaaaaatgatttcaagacttgagagggatgctgtgaaatccggctataccgaaacttactggttcaaaaaaaggtacttcgctgcctcggagaggataggtatattgaaacgatcctttccgaacaaggcaaaggagctgagggagaagctgaaaaatatcggccctagtacgtaccgagagtga

SEQ ID NO: 10698 - RNA, 1206 nt, synthetic construct
  source 1..1206: mol_type = other RNA
atggagacgcccaaatttaatccagtaaaggaagcgcccgggtctatctcaagtatcgctgggctgtgctctgctttggatatcagccagtccgaattggatgaggctcttgccctgcccgtggaagagcgatacaagaagggagaggtgcccaaaaaagacggcagtatgaggatagtcaacaatcctcattacctcgtccggaagatccagcgcagaattaacaagcgcatcttttcagattccaatgtgatttcttggcctgaccatatattcggatctattccaaacgatgacctcagtgacagcgtagcagcagataaagactacgtgaattgtgcacgacagcattgcggcgcaaaaagtgttctcaccctcgacattcgcgattttttcgataacatacacagagacagggtgtttgggatcttcttcaagtttctcaagtatagcgaagacgttagcaatgtgctagctgacatttgttgtaagggcggggccatagctcaaggcgctcttacttccagctacatagctaccttatgcctgcacgagacagagggtgacctggtcaggagacttcggtataagaacctgacttacacccggtttgtcgatgatatcacaatttctagccgtgtggcgaattacgactttaagtacgccctcggtctgactgaatcaatgctgtccgaggccggcctgccaattaacggacagaagacaaagatccagtatacatcaatgaaacctctgattgttcacggtttacgagttgatttcgaccaacctagattgcctccagaagagcctagaaaaatcagggccgcggtaaagaatttagagctgttggccgcaggcccaggttatcgtgcaagccatgcttatcggaaagacttcaacagatgcatgggacgggtgaacaaactaggaagagtgggccactcacagcacagcattctccttaacaggctgcggaaaatcctgccgcttccctcccacatggatatcgagcgagtggaacgtctgatcgcccggctggagaaggatgtcgccaaaccgaattattctgaaacctattggttccgcaaaaggtactacgccgccagtgagcgcatcgggatcctgaagagatccttcccaaagaaagccgaggagttcagggggaagttgagggaaattcgcccctcctcgcagtacgaatga

SEQ ID NO: 10699 - RNA, 1209 nt, synthetic construct
  source 1..1209: mol_type = other RNA
atgacccagcctcaaagatttgacccgatcaaagtgtcagctgagagcatagccacaattgattctttgtgcggggccttagggattggagcggccgaactcgctcaagcacgaggtctggccccatccgagagatatatccaaaaggagctcccaaaaaaggatggctctactaggatcgtgcataatcctcattacttagtccgtcggattcaaagacggatcaaccggcgcatttttagcaaccctagtgttatttcttggcctgatcacatcttcggttctatccccaatgatgatacttatgagagcctggtttatgagaaagactacgtaaattgcgcgcgccaacactgtggcgccaaatccattctttccatcgacatcaaggatttcttcgacaatatccacagagatcaggtgtccaggatattcaaaaacttcctccactactcagacgtggtggctgaagccttgaccgacatctgctgcaaggatgcctcgatcgtccagggagcactcacctcttcttacctcgctacactgtgtctgtttcgagaagagggcgcactagttaagaggttagggtacaagggcctagtctataccaggcttgtcgacgacattacgataagtagcaagatcagcaactatgacttcagctatgccctgggacaggctgtccagatgctgagtgaggccgatctgccactcaatgctaagaaaacacggatacagtacgcatccatgaagcccctgatggttcacggtctgagagtagactttcagcagcctagacttccaccggaggaagccaagagaattagggcggccgtgaagaacctggagctgctcgctgctagtcctggctatcgagccagtcgcgcctaccggaaagacttcaaccgctgtatgggacgcgtgaataaactgcggagggtggaacataatcagcatccagtgctaatcgctaggctccgtaaaattctgccccttccctcacatagcgatattgtgcgtgcagaacagataatccagcgactgaagaaggacatgtcccgccccaactaccaggggtcattctggtttcacaaaaggtgtcacgtagcagcagaaagacttggcatcttgggacggtcctttcccaaaaaggcgaaggagctgcgggaacagttgaaattgattcgcccatcaactgggtacgagtga

SEQ ID NO: 10700 - RNA, 1206 nt, synthetic construct
  source 1..1206: mol_type = other RNA
atgccccagttccagaagctacacccgattaaggaaagctccggttctattgcgaatattgatgccctctgccgagccctggacatctcatccaccgaacttgcccaagttcgggctcttagcagcagccagagatacgagaaaaaggaggtcccaaaaaaagacggatccactcgtacagtccacaaccctcattacgcactgcgtaaaattcaacgccgaattaatcggagaatatttgcaaacccagatgttgtgtcctggcctgactacatttttggttcaatacccaatgatgaaagtgctgaggatcctatagatcgggattatgtgaactgtgcacgacagcactgcggagcaaagagcatattgagtgtggatatcaaagacttcttcaataacatccacaggcatcaggtgatcggcatcttcaaaaacttcctcaagtattctgaggaggttagcgtgatcctcgctgatatttgctgtgacgatgaacacgtggttcaaggcgctctgacatcgtcatatattgcctcgctctgtttgttcgaaaccgagggcgacctggccaagaaacttgggtacaagggactggtctacacacgatttgtggacgacatcactatcagttcaaaaatcgctaagtacgagtttagttacgcactgacgctcactgagcaaatgttaaatgacgccggtctaccactgaactctggcaaaaccaaggtgcagaacgcctctatgaagcccttaatagtacacggcttgagggtagacttcgaacagcctaggctgcccccggatgaggctcgtaggattagagcgtcagtgaagaatctcgagttgctggcggccagtccagggtatcgcgcaagcaggtcctaccggaaagatttcaataggtccatggggagagtgaataaactggcccgggtcggccatagccagcactctatcctgctttctaggctgcggcgcatccttccattaccctcccacgccgacattggaaaagcagaagaattgatccagcgcctgcagaaggacttttggcgccccaactatcagacctcctattggtttcataagagatatcatgtcgccatcgagaggctggggattctaaagcgctcttttcctaagaaggctgaagagctcaaccggatcctgaagctcatcagacctgctagcagaaacgactga

SEQ ID NO: 10701 - RNA, 1206 nt, synthetic construct
  source 1..1206: mol_type = other RNA
atggaggctagacagatcgacatatataacccaaagaagataagccttgaaagtatcggatctctggccaagctcgcctcgtgcctggatgtgaccctcgaggaaattcaagaagcccaagagctaagcgctagcgagcggtacaagatcaaagagacacctaagagagatggatcattacgtaaggtctattccccccactttttgattcggaaaatacagcgaaggattaacgcacgtatcctgagtaactcagacgtaattgcttggcctgaccacatttttggctccgtgcccaatcagcattgcggcgaaagcctagtcgtagagagggactacatttcgtgcgctcgaagacactgtggcgccaaatccgtgctcactctcgacatccgcaatttcttcgataacattcaccaatcctacgttgagaatatctttacggagttccttaaatatgacgttgaggtgtccaaagtgttgagcgatttgtgttgcttagacgggcatgtggtccagggggctctcacctctagctacatcgcatctctctgtctgtgggacgtcgaaggagagttggtcgtgaaactcggccacaagaatcttgtgtatacacgctatgtggatgacatgaatgtgtcttctgtgatcagcgattacgatttcacctacgcagtgagagccatagaagttatgctggacaagaaaggtcttccgctgaaccccaataaaactaagatccagcatatttcaacggaacccctaaccgttcatggtctgagaattggtttcaaggagcctaggctgccaagttccgaagtccgaaacataagagccgcagtgaagaacatcgagatcctcgcgtcagagcatcgttaccggacatcccacgcattccgcaaagactttaacaggtgtatgggccgggtaaacaagcttggccgcatcgggcataaccagcaccagaagctggtcctgaggctgaaaaaagttatcccattgccaagcaaaaaagatattgtacgcgcgaagaagattgtggaaaggttagagaaggattactccgccaataaatctactttctggtatatgaagcgcttttacctggctcacgaaagactgaatatcctgcagcggacttatttcaagaccagtgccgaactgaggggacggctgaagtcaatcagtcctacatacgggttttga

SEQ ID NO: 10702 - RNA, 1188 nt, synthetic construct
  source 1..1188: mol_type = other RNA
atgacgcaatataaccccgaaaagaaagcatccgggtcaattgccggtctggacaatctgtgcagtgctctggatatacatagaagcgagctggacgaggccctggcgctgtctagctctgctcgctacactgctcggtcgatccataagaaagacggctcactgcgcgtcgtacacaatccacactacctgattagaaagattcagcggcgcattaacagaaggatttttagcaatgcgagcttgattagatggcccgaccacatcttcggatctatcccaaaccagagttctgacgacggtgtgcctatcgcaaaagattatatgagttgcgcctctagacactgtgaggccaagagtgtgttaaccctggacattaagaatttcttcgacaatatccatgcgaccctcgtgaggagcgtattcctagatttttttaagtactgccctgaagtgagcgatgcactttccgacatctgttgcctggactcccaccttgtgcaaggggctcttacttcgagctatatagcttgcctctgtatgcatgacatagaaggcagcgtggttgagaagctgaatcgaaaaggcctcgtttacacaaggctagtcgatgatatcaacatctcatcccgtatctcccaatacgacttttattacgccatttccatggttgacaacatgctcttagagaagggcttgcagctcaaccttgacaaaaaacgggtccagtacatatcaaccgagcccttgaccgtccacgggctgaggatcgcttttaaggaaccaaggcttcccgcagatgaggttcgacggatccgtgccgccgtgaggaatatagaaacaattgcctcagagcgggattaccgcacgacacacgcctatagaaaggatttcaataggtgtatggggcgggtgaacaagttatctcgcgtgggacacaaccagcataaactcctagtgggaagactgaagcgagtgttcccactgccttctaaaaaggacatcgatcgcgtcaccactattgtaactaaactcgaagctgatagtggccagaagaaaggaacatactggtactggcggcgtttctatctcgcacatgagagattgaccatcctgaacaggtcctttcctcacgccgcacaggatttgcgccagcgactgaaactgttgaagccgctctatgaatga

SEQ ID NO: 10703 - RNA, 1203 nt, synthetic construct
  source 1..1203: mol_type = other RNA
atgatccctgtctcttctacaacccgcctgtaccccgttaagactgctacccacgccatcactacaatccaaggcctgtgcgaggctttggacatagtggtggaggagcttgacgatgtgctgctgatcccgccaaaagataagtattctagccaggaaaggcggaagaaagatggttccgtgcgggtcgtccacaatcctcaccatcgactaagggtgattcaacggcgtattaacaagaggctgttcagcaaccagaatttcgtatcctggcccgatcacatattcggctccattccaaatcagaaattcgagggcagtaaacaccccaaagactacgtggcatgcgccaaagtccattgtggagctaaaagcatcttgaccttggatatagagaacttctttgggaacatccatgtctcccaagtgatcaaggtattcactcagcttctcaagttttcacctgaggtcgccgaagtagtttctaagatttgttgccacgaggactacctcatccagggagccttaacatcatcatacattgcaggactgatcctgtttgatgtggagggcatggtcgtcgaaaggctcctgcgaaagaatttacgctatacgcggctggtggatgacatcaacgtttccagcgtggtgagtgactataacttttcgtacgcaaagacaatcattgaagacatgcttatagggaaggacctacccgtcaaccattctaagactaagattcagtacagcagcactgttccccttaccgtgcacggactcagagtggggtttaaggaaccaagactgccctccgacgaagttagaaaaatcagggccgctgttcattcaatagagctcatggccaaggagccaaactacaaaacaacccacagctatcgccgtgattttaaccgttgcatgggccgagtgaacaagttgtgtcgggtggggcataatcaatatgacaaactgcttctgcggctccagaaaaattacccactccctagtaaaaaggatatcgagcgcgctatcaaaattgttacgaagctggaagtggattatcctaccaagcagggtaatttctggttcgccaaaagattttatctggcacacgaacgcttaaatattctacagaggagttttccgaatgtggcgtacgacttgagattcagactgaaggcgattaaaaccgtatacgagtga

SEQ ID NO: 10704 - RNA, 1194 nt, synthetic construct
  source 1..1194: mol_type = other RNA
atggtgagggtcccgcaattatttccgaagaaaaccgccgtaggctcgatcgcaactattgaccagctgtgtaacgctctgtccatcaccgaagacgagctgagagaggtcattctgcttcccgatatccttcggtattcctccaggccaatccctaagaaggatggctctctccgattcgtgcataatcctcacttccgattgcgccgcattcagcggagaatcaataatcgccttctgtccaatcagagctttctgtcttggccagatcatatctttggctctatccctaaccagcaattcgacgatggcatccatgccaaggattacatcgcctgtgcgcgggtgcattgtgaaagtaagtcaatactgacgatcgacatagctaactttttcgacaatgtgcacatcagccatgtcctgcaaatatttcgggatttgctgaagtgctcagagattgtttctgaggtgttagcagacatatgctgccacaatgacgctctaattcaaggagcactgacctccagttacattgccgggctagcactctacgacgttgagggtcgcgtggtcgagagactggcgcgtaaagggctgcgatacacacgcctggtcgacgacatcaatgtgtcgagcaaaaacagcgagtataactttgattacgctaaaaagatcgtggaggacatgttgttcagcaaagacctccccgttaataccagcaagacaaaagtacagttctcctcaacactgcccctcgctgtccacgggttgagagtgggctttaaggaaccacggcttcccggggaagaagtgtctaggatccgggccgcggtccattccattgagatgatggcaagggaaccaaactatagaacatctcacgcttatcgcagagatttcaaccggtgcatgggtcgtgttaacaagctaagtagagtaggtcacaaacagcacggaggacttgttcaccgcctccaccagattatgcctctcccctcacagaaggatgtgcagcgtgccattaaaattgtggagaaacttgaagccgatttcagcttaaagcggcatacttattggtacgccaaaaggttctacttggcccacgagaggctgaacatcctcaagaggagttttcctggaataactgatatgctgaggctgcgactcaagccaattaaagccagatatgaatga

SEQ ID NO: 10705 - RNA, 1197 nt, synthetic construct
  source 1..1197: mol_type = other RNA
atgcccaccgtccctcagctgaatcccgtcaaagtatcaacagagagcatcataacggttgagaacctctgcagcgcactgtctatcactctggaagagttgaacgaagtgcgttccataccaaatggggagcgctacattgcctcccagatcccaaagaaggacggaactatgcgcgtcgttcacaatcctcattttcggctgagacggatccaaaggcgaattaacaaacgaatactgtcacggcagagcgtggtttcatggccagatcatatctttggatctatccccaatcagctggatagtgaacggattgaacacgagaaggactatgtggcctgtgcaagagtccactgcgaggcgaagagcattttatcgattgacatagctaacttcttcgacaacattcacatcaccaagatttccaaaatcttttgtgagttcttcaagtattccacagaggtgagtaatattcttgcagaaatctgctgtcacaacgacaatctgattcagggcgcattgactagttcatacttggcgacccttagcttgtatgaggtcgagggcaaagtggtggaaaggctgttaaagaaaaacctgaggtacacacggctggtcgacgatatcaccgttagttcaagactggccggctacaacttcgattacgctaaagccctcatcgaggaaatgcttattgatatggacttgcctatgaactcctctaagacaaggatccagtacaacagcacagtgccgctgaccgtgcacggcctacgagtagcctttaaagaacccagactgcccggggatgaggttcgaaagatacgtgctgccgtccattctattgagcttatggcttccgagcccaattacagaactacgcatccttatcgcagggactttaataggtgcatgggtcgggtgaataaactaagccgcgtggggcaccagcaacattctgtgttagtaaacaggcttcggaaggtgatgcctctccctagtccaaaggatatcgagagaaccattaagatcatcacacgcctggaacgggactatccaactaagcgtggaaccttctggttttcgaagagatattacctcgcccacgagaggctcaatatcctgaaaagatctttcccgggtataagcaaagaactacgaaaacgcctcaaaccactccgctccaagtatgaatga

SEQ ID NO: 10706 - RNA, 1191 nt, synthetic construct
  source 1..1191: mol_type = other RNA
atgattatactgaggccctacaagaaaattccctcgagcatcgctaacatagacaacctgtgtagcgcgttagacattagcacaactgagctggacgaggccatcagtctggctgaaacagacaggtaccaggtccgagagatcgccaaaaaagacggtagccctcggcgcatctataatcctcactatttgatccgcaagattcagagacgcataaaccaccgcatattcacggatcaaaattttctcgggtggccagattatatcttcggaaccattcccaaccagaaaaagtcggacggaagaattgtgcagcgagactacatttcttgtgctaagatccattgtaaatccaaatccatagcgtctatcgacatccaggatttcttcgataatattcacatcgatcacgtggagaacatcttctccaaattctttaagtacccagacgaagtgtcagaggtcttggctaatatctgctgcctgaattcccatgtgatccagggggccctcacatcttcctatattgcttctctttgcctgttcgatgttgagggcgatgccgtggaacgcctcattcggaagaatctgcgatatactagactggtagatgatatcacaataagctccactgtctctaactataactttgactacgcactaagtatcatacgtaagatgttggagagtaaggaccttcccatcaacgagaataaaacgaagatccaatacgcctcaaccgtgccgttaaccgtgcacggtcttcgggtcgccttttctgagccaagatttccatcagacgaggttcgtaggctcagagccgcagtgaagaacattgaaactctgtcccaggaaaaaaattaccggacatcacacgcatatagacatgattttaacaggtgcatgggccgcgtgaataaactcagccggatcggccacaaacagcacgcagcactagttaagaggttacaaaaggtaatgcctctgccgagtcagaaggatattgaaagggccttcatgattattgaaaggctcgagaaagattattctacccataatagctcctactggtacagtcggcgctactatttggctcatgagcgactgaacgtcctccaacggacctacaccagaatcgcctcagacctgaggagcaagcttagatatctgcgtcctagctacgaaaagtga

SEQ ID NO: 10707 - RNA, 1197 nt, synthetic construct
  source 1..1197: mol_type = other RNA
atggaaaagcagcctcagctgaatccagtgaaaactgccgtggacagcatcgcctctgttgcaaatttgtgccacacgctgaacgtgacacaggaggaattggacgccgccctcaccttagaccccgaagagaagtacgaacgcagagctattcccaaaaaggacggaagcgaccgtcttgttttctcccccgatcgccgtctccggaaaattcagcgaagaataaataaacggatcttcgcggcccaaagtgttgtcagttggccggatcatctttttggctcaatcccaaatcaaaacggccccgaaaacattaaaatagagaaggactatgtggcttgcgccagacggcactgtcagagtaaatccatcctcaagattgacatcaagaactttttcgacaacatctcggaattccacgtgaaggatatcttcgttaacttcttcaagtacagcgacgacgttgctaacgtcctcgccaacctgtgttgccttaacggacatgtcattcagggtgcattgacctcatcttatatcgccgggctctgtttatatgatgtagagggagatgtggtacgaaggttggctaggaaaggactggtgtacactcgtctagtagacgatattaccgtgtccagcaagtccgcagattttgatttcggtttcgccaaaagcatcattgagcagatgctcgtggggaaggacctgcctataaatgagtctaagaccgcagtacactacgtgtccacaacccctcttacagtgcatggtctgcgggtcggctttaaagagcctcgactgccctctgatgaggtgcgcagaatccggagcgctgttaaaaacatagaaacgcttgccaaggaggactcttatcgcattacccatggctacaggcacgattttaatagagctatggggagggtgaataagctgggccgcgtcaagcacaaacagcacgagccattggtgagacgcatgaggaaggtcctgccgctgccaagcaaaaaggatatcgaaagggcaactcgcattatcgacaggctgcaggcagatcatgcggggaagcatgacacttactggtactggaagcggttttatctggctcacgagcggctgaatgtcctacaaaggtcatttcctgaagtgtcaaagaaactgcgaacaaaactcagattactgagaagttcctatgagtga

SEQ ID NO: 10708 - RNA, 1197 nt, synthetic construct
  source 1..1197: mol_type = other RNA
atggcccacattccactactcaatcccctgaagacagcactcggctctatttcctcaattgactcactctgcgaggcgttgaatatcactcgggaagatcttgaggaggcacttcagctcgaccctagtgagaagtacgttcgcttgaccactcctaaaaaagacggatcggacagagtaattttcaagccagattatagactgcgaaaaatacaacgaagaataaacaagcggattttttctaaccagaacgtcgtcacgtggcctagccacctgtttgggagtattccaaatcagttcgatgcggataagacaaaaatcgaaaaggattacgttgcttgtgctcgtagtcactgcgaatctaagtctatcctgaagatagacatcaagaactttttcgacaacatacatcagcactatgtggaggacatctttttgaatttcttcaagtacccggaagacgtatctagtaccctagccgagatttgctgtcacgagagccatgtcgtccagggagccctcacctcaagctacatcgcatccctgtgtctgtatgacgtggaaggagagactgtgcggagactcacccggaagggcctgacctacacccggttagtggatgatattaccgtgtcctcaaagatcgctgattacaactttgactacactaaaaacgtcatcgaaaccatgcttgtagggaaggaactgcctattaactcctcaaaaaccatcactcagtacatcagcactacagcactcaccgtgcacggtttgcgcgttgggtttaaagagccccggctaccgtccgacgaagtgaggagaatacgctccgccgtcaagaatgtggagacactggccaaagaggacagctacaggacatcccatggttatcgccgagatttcaatagggtcatgggcagggtgaataaattaagccgggtgaagcataaacaacatgccagcctcgtgaaacgaatgaggattgttctgccccttcccagtaaaaaggatatcgataggacgacaaggatcgtggaacgtctgttaactgattatgctagcagacatgacacgtattggtattggagacgctttttcttggcccacgaaaggctgaatgttctgcagcgctcgttcccagaggtgtctaagcacctgcgtaagaaacttaagctgatcaaacccacatacgagtga

SEQ ID NO: 10709 - RNA, 1191 nt, synthetic construct
  source 1..1191: mol_type = other RNA
atggccgccattctcaacccaatcaaagtggcaacaggttcaatttctagcatcgacaacctgtgcgcagctcttgacatcacacgggcagaacttgatgctgcccttgaactggatattctgacgaggtatcaacgtgatgaaaccccaaagaaagatggatcaatgagagtcgtgtacaagcccgactacagaatacgaaggatccagcgcagaattaacagacgtatcttcagtagggctgacgtaattctgtggcctgaccacctcttcggctcgatcccaaaccaagagtcagacgatggcgatgagattcagaaggactacgtggcttgtgcaaggcttcattgcgaggccaagtccattgtcagtatagacatccagaacttctttgacaacattcatagcgatctggtcctggatatctttgaaaagttcctgcagtacccgagcgatgtcgcccggacgttgaccgatatttgctgtaggggcgaccatatagtgcaaggagcgttaacttcctcctatattgccagcctctgtttgtatgacatcgaaggaaaaaccgtggagagattgagcaagaagggcctcacatatactcgcctggtggatgacattactgttagctctaagatcgccaattacaaatttgactacgccatgtccgttatagaggacatgctgacctctaaggatctgcccattaacacctctaagactaaaatccagtacgtgagcacaacaggtctattggtgcacgggctgcgggtaagtttccagcagccccgactcccttccgatgaggttcggcgcatccgagctgctgtccagaatatcgagacactcgccgctgaaaaggggtatagacagacccacgcatacaggcaggactttaatcgatgcatgggccgtgtgaacaaattatcacgcgtggagcacaatcaacatgctaattttctccggcgcttacagaagatcctcccacttccttctaaaaaagacatcaaccgcgccaccaagataatcgaaaatttggagcgggatttcgaaaagaaaagtgggacttactggtacgcaaaacgcttttatctggcgcacgagaggctgaatgttctgaaccggtccttccccgccataaccaaaaggctgagagcgagactaaagcctctaaaacagaattatgagtga

SEQ ID NO: 10710 - RNA, 1191 nt, synthetic construct
  source 1..1191: mol_type = other RNA
atggccctgctcaatccaagaaaggtgtcaaccggatccataagttctattgaaaatctctgcagcgccctgtccgtgagcttagaggagatctatgcagctctgtcactgcctgacgaggagaaatatgccgtctcccaagtgttcaagtcagatgggagtgtcagactggtccacaacccccacttcttgttgagaaagatccagcggcggattaataagagaattttcagcaggctttcaatcatcgaatggccagatcacctttttggtagcgttccaaaccagcgagaacaggacaccaaacgcctaattaataaggactacgtgagttgcgcagcaaagcactgtggcgccaaatctctgctgaaagtggatgtgaaagacttctttgataacattcacaaggacctggttctggatatcttcagtaactttatgaagtttgaccgtgaggtatccgagttgctcgctgagatatgttgtttccgctcccatgtaatccagggggcccttacatcttcataccttgcctccctctgcttgcatgatattgaaggcgcagtggtccacaggctgagccggaaaggactcgtgtataccagactggtcgatgacatcactgtttctagtaagatctcgaactacgatttttcttttgctctcgacatcattagggctatgctaacctccaaggacctgccgctgaacatagttaaaactaggagcatttacgtgtcttcggaaccactcacagtccatggattacgcgtcgcgttcccccaaccgaggttacccagcggcgaaatcgcccggattagagctgccgtgcgcaatattgagaaccttgcgagtgagcgtggctatcggactacccatgcctatcggcatgacttcaataggtgcatgggccgcgtaaataagttggttagagtgggtcacgaccggtacgatagcttgctcgctcgccttaagcagatattccctctgccttctaagaaagacatagaaagggcaagagcgatgctggatcggctagcccgcgattgtgctacaaaacgatccacgtactggtatgccaaacgatattacaagctgcaggagcgactcatcatcctgaagcgtagctttcctgcagtgacaaaagaaatcaggaagtcactgaaggggttaaaacccgactacgagtga

SEQ ID NO: 10711 - RNA, 1191 nt, synthetic construct
  source 1..1191: mol_type = other RNA
atggtgctgctcaatcccaaaaaaattagcgcaggttccataagtagcatagagaacctatgctccgcactagatatcacgttggaagaaatttatggcgccctgagcctcagcgaggaagataagtacgccgttacagagatttccaaaagcgacgggggcatccggctcgtacataacccaaattatttgctgcgtaagattcaaaggcgggtaaacaagaggatattctctaggccgtctgtcattcaatggcccgaccatctttacgggtccgtgcctaaccagagaaataggcagaacagtgagatgttaaacaaggattacgtctcatgtgccgccaagcactgcggcgcaaaatccctgctgaagatcgatgttaaagatttctttgacaacatccaccagaatctcgtgctcgacatctttaacaactttatgaagttcgatggtgaggtaagtggactgcttgccgagatctgctgctttaaaagccacgtcattcagggcgctctcacttcttcataccttgccagcttatgtctctatgacgtggaggggagtgtcgtggagcggctgatgaggaagggcctgatctataccagactggtggacgacattaccgtttctagcaaggtttccaattatgatttcgggtatgcgcttgatatcatacgcactatgctgacctctaaagacttgcccgtgaatctagctaagacacgcgcgatatatgtgtcgtccgaaccactcaccgtccacgggctgagagtgggattttcacagccccgtcttccatcaggagaagtggccaggattcgctcagctgttcgaaatatcgaaagtctggcctccgaaagaggttaccgaaccacacatgcttaccgtcatgatttcaatcgctgtatgggccgggtcaacaagctggtaagggtgggccacgatcgctacgaatctttgctgaaaaggctgcggaaggtgttccctcttccttcgaagaaggacatcgagcgagcgcacgcaatgctcgcccgactgaatcgggactatagcgacaaacggggaacttactggtatgctaagagatactacaaattgcaggagagattgatcgtgctgaaacgctcttttcctgctgtcacaaaagagattagaaaggcaatcaagggattacagccagactacgagtga

SEQ ID NO: 10712 - RNA, 1194 nt, synthetic construct
  source 1..1194: mol_type = other RNA
atggccacacaattggcccctaagaaggtaagtaaacgttcaattgcatcgatcgagaatctttgcagcgcactcgatatctcactgtccgagatttactccgcgctgagcctcagcgatgaggaaaaatataaggtcagtacgagagccaaatccgatgggaccgataggatcgtccacaacccgcacttcctactgcggaaaatacagcggcgcataaacaagcgcattttctccaagccttccgtgatcaagtggcctgatcacttgtttggctcagtgcccaaccagctcgatcagagtatgacccatatcatcaacaaggactatgtctcatgtgctgcaaagcattgcggcgctaaatctatactgaaggtggatatcaaggacttttttgacaacatccatgaggatctcgtgctggacattttccgcaacttcctcaaatttgatcaggaggtcagtgagacgttgactaatatttgctgttttcatagcagacctgtgcaaggcgcactgacttcttcttacctggcatctctgtgtctatacgacgtggagggctccgtggtggaaaaattgtcccgcaaaggccttacttatacacggctggttgacgacatcacagtgagcagcaaatctaacaactacgactttagttacgcccttgatattatcaaaggtatgttaacagccaaagaactgccacttaatgttgcgaagactaagtccatatacattagctcagaaccgctgagcgttcacgggcttagagtcagtttccctcagcccaggcttccctctggagaggtttcacgtatcagggctgccgtaaaaaatattgaaagcttagcctctgagaggggttatcgcaccacccacgcttatcggcacgacttcaataggtgcatgggacgggtgaataagctcgtaagagtggggcataatcgccaccagcccttgctcgacaggctcagaaaggtcttcccactgcccagcaagaaagacatagaccgtgccagagccatgctgaagagactgatgcgggacaaggattccaaaagggacacctactggtacgcgaaacgatattataagctacaggaacgattaatcgtgctggagcgatcgttcccagcctcagctaaggaaattcgagcttctctgaagggactgaagccatcctacgattga

SEQ ID NO: 10713 - RNA, 1188 nt, synthetic construct
  source 1..1188: mol_type = other RNA
atggccgctgtgaaccctaaaaaggtgacttccgaatcaattgctaatatagataggctatgcgctgccctggatataactgccgaggagctctgtcaggtccagaatcttcatgaggatgctaagtatcaggccagcaccgtggaaaaatcggatggaagtttccggaaaatttacaacccagactttcgattgcgaaaaatccagaggaggatcaacaagagaattttttccaactcgaaggttatagcctggcccgaccatctgtacggctcagtcccaaatcagatcaatgacgacttcgacctgatcaacaaggattacgtttcttgcgctgcaaaacattgtggggctaaaagcatcctgaagctggacattaaggacttttttgacaatatccacaagatcattgtgcacgacatcttcctgaatttcctgaagtatccacaagacgtcagctctgccctggcttcaatctgttgcctcaacgatcacgtagtgcagggcgcattgactagcagttacctggcttctttaagtctgtacgatgtggaggggtatgtggtggagaaactgcaccgcaagaacctagtgtataccagactggtcgatgatataacagtgagctctaaaacctcaaactatgacttctcttacgcgattaacctcattgaaggaatgctgacagaaaaggaactccctttgaacaagaagaaaacaaaggtccaatacaccagtagcgagcctctcactgtccacggccttagagtggccttcaaacagcccagactcccgtccgatgaggttgcacgcatcaggacagcagtgaagaacattgagacattggcaaaagaggtgggttataggaccaccctctcttaccggcaagactttaatcggtgtatgggacgcgtaaataagttatcccgcgtaaatcatgagaagcacttgggtcttgtaaagcggctggttaaggtctatcctcttccctcaaagaaagatatatcccgtgcggaggcaatcgttgcccgtcttgaaaaagattacgcctccaaacactccacgtactggtatagcaaacgcttccacacggcgcatgaaagactaaatatcttaaagcggagttttccctgcgccgaaaaggccctgagaaaaaggctcaaaagcctgcgaccaatttacgactga

SEQ ID NO: 10714 - RNA, 1200 nt, synthetic construct
  source 1..1200: mol_type = other RNA
atgacccggaatgtgaccgcccgtagctttaagatctctacccgatccatctcgaatttggagaatctgtcttctacgctgtccatccccttgaaaactctccagaaaacactggtgttacccaagccagacagatatcggagagacgaactgcccaagagtgacggaggcatcaggatcatatacaacccttcccaaatgattagacttgtgcagcggaggattaattcacggatattatcaaacaaccagattctcgcctggccgccttttctgtttggctccatcccaaaatccaaagacgcgcttggtaatgagatcacgagggactatattacttgcgcagcccagcattgtggggccaagtccttactcaagctggatgtgaaggactttttcgacaatgtacacgcagatctggtctatggggtctttagccaacttctgaagtttccccacctggtttcagcatctctcacgaatatctgcaccttcgaatcccatttaatacagggtgccctcaccagcagttttttggcaaacctgtgtctccacgatgtggaggctttcgttgtcgatagactggctaagaaaaatctcacctatacacggtttgtggatgatattactatctctagcaaaacctcaaagtatgatttcagctacgcgctgtcaattgtggaagagatgctgacatctaaagacctacctctcaatcgccaaaagacaaaggtgtacttcagcagctctaccccgcttactgtacacggcttgaggatatgtttcgccgagcctcgacttcccagtgacgaggttagaaggattcgcgctagtgtcaagaacctggaaacaatcgctaacgagcgctcctaccgaatgactcacgcctacagacacgactataacaggtgcatgggaaaggttaacaagctcgcccgcctaaagcataaccagcatattccactgctagatcgactgcgcaaaatccccccattgcctagtaaaaaagacattagccgtgcaatacagattgtgagcaggcttgaacgcgatttcttcctgaaaaaaaacacttactggtactaccggcggttctacatcgcttatgagaggcttaacgtcctgaagatctcgtatcctcgtatgacaaaactgttgaagattagactgaagaaactcaaaccaatctacgaaaagtga

SEQ ID NO: 10715 - RNA, 1197 nt, synthetic construct
  source 1..1197: mol_type = other RNA
atgaccagaaccgtagctgcacgtagctttaaagtgagtaacagttccattgctgacctgcagaatttagcaaccgcgctttctgtcccgctgctgacactgcagaagacactgaccctgccgaaatcggaaaggtacagacgggatgagcttccaaaatctgatggagggttgcggataatatacaatccctcccacgaaatcagacttgtgcagaggagagttaatactagaatcttctccaatagtcacatcctggcctggcctcctttcctcttcggttctattcctaagagcagggacgccctcggaaacgaggtgactagggactacatcacgtgtgcggctcagcattgcggcgcgaagtctatcctgaagctggacgtgaaagacttttttgacaacgtgcactcagatcttgtatatggagtgttcaataagctgctcaaattccctcacctcgtcgcagcctctctgactaatatctgcacattggattcccacctgattcaaggtgcactgacctcaagcttcctggctaacctttgcctgcatgatgtagaggcctttgtggtcgaccgacttgccaaaaagaacctggtttacacacggtttgttgacgacattacgatctcctccaaagtggccaagtatgatttcagttacgctcaggctattatcgaggagatgttaatcagcaaggatttacccctaaactcccagaagacaaaggtgtctcacgccagcagtactccactgacagtccacgggttgagagttagcttctcaaagccccgcctaccctcagacgaagttggccgtattagggctgccgtgcgcaacattgaaaaaatcgccgacgaacggagctatcgaatgactcatgcctacagacacgattttaatcgatgtatgggccgcgtcaacaagttggcacgtgtcgaacataatcaacatcgcccactgctcaaaaggttgttgaagctcccccctctcccatcgaaaaaagatatttcccgagcaattcagatagtgagccggctcgagcgcgatttctatctcaagaaaaacacctactggtattcacggcgcttttacatagcctacgagcggctcaacgtcttgaaaatctcttatccaaggatgaccaagctgctaaagctgaggcttaagaaattaaagcccgtgtatgagtga

SEQ ID NO: 10716 - RNA, 1197 nt, synthetic construct
  source 1..1197: mol_type = other RNA
atggccgggatcgcggaagtacagcgctataaagctagcgtgcattcaatcagctcgattgaaaaccttgcctccgccctgggagttagcctgtcctttctgcaggaagtgttgcagattccagatgaacataggtataagaaatctgagttgccaaaaagtgacggtggtatccggactgtgtattcacccgactaccggattcggctgatccagagacgtataaataagagaatcttctcaaactcccgcgtgattacctggccggactttctattcggatccatccccaaccacaaagataaatgcggccaggaggtcactaaagatcacatcgcatgtgctgctagtcattgcggcgcaaagagcttactcaagctggatgtgaagaactttttcgataacgtgcacagcgacatagtttacggcgtgtttcgcgatcttcttaaatatcctgatgaggtcagtcgcgccttaacgaatatatgcacattcaagtctcaccttgttcaaggggctctgacatcgtcctatttggctagcttatgcctccatgatgtggaggcgtatgtcgtggacaggctttcaagaaaagggattgtgtacactaggtttgtagacgacattaccctatcctcaaagatctcttccttcgactttggattcgcccggggggtcgtggagcaaatgctgacagccaaggacctgccgctcaactccggtaagtctaggacgcagtacctctctagtgagcctttgatggtccacggcctgcgaatctgtttcaacgagccacggctacccgccgacgaggttaggagaatcagagcatctgtgaagaatattgaggttatcgctaatgaacgtggatatcgcctgacccacgcctaccgccacgacttcaatagatgtatgggcaaagtaaacaagctggcacggctgggccatacccaacataccgcgctggtggccaggctggttaaggtctaccctctccccagtaagcgagatatcagccgagccattcagataattatgaggctcgagagagatgtcagcgcaaaagcttctacttactggtacgccaagcgattttacatggcacacgaaaggctgaatatccttaaacgcagctatcctagaattacattgctcctccgaaatcggctgcggaagctgcgtccaaattacgaatga

SEQ ID NO: 10717 - RNA, 1200 nt, synthetic construct
  source 1..1200: mol_type = other RNA
atggccatggacgcctcagccgctggtggattcaaagtgagcaaaaactctattggtagcgttgacaatttgatccagattctggctgtttcacttaaggattttgagagcgtactgatgatgccgtctgaacttaggtatataaagaccgaaatcccaaaatccgacgggggggtaagaaggattcacaaccctcacttcctcatccgactccttcagaggcggatcaacacacgcatcctctctaatcccagagtcatcggctggccatctcacctgttcgggtctatccctaaccagagagacgaaaagaataatatagacagccgtgactacattgcctgcgcgaaagcacattgcggcgccaagtctctgctcaagctggatgtcaaggattttttcgataacgtgagcgaggatctggtatatggagtctttcacgatttgctcaagtactcagaagatgtttcttctgtgttaactgacatttgtacctacaattcacatttagtgcaaggggccttgaccagcagttatctagcatccctttgtctgcacgacgtggaggcccatgtggtggacagattgaggaagaaaaaccttgtgtacacgcggttcgtggatgacataaccatctcctcgcgaaccagtaattatgatttcgccttcgcacgaagcgtcgttgagcagatgctgatctcaaaggacctgccactcaattccggcaagtcccgggttttttacacgagcagtgagccgctgacagtccatggactcagagttagtttttccgagcccagattgccttccgatgaggtgcggcgcattcgggctgctgtacgcaacgtggagacaatcagtagtgaaagggcatatagactgacccatgcctatcgccacgactttaatagatgcatgggccgtgtcaacaaactggccagggtgggccacaaccagcacaagcccctgaagaaccggttactggctgtctatcctttgccctccaaaagagacatttcccggagcatccaaatcgtgtcaaggctagagcgggatgtggcggaaaaacgagcaacttactggtactcgaggcgtttctacattgctcatgaacgcctcaatattctaaagcgcacttacccaaggatgacaaagatactgcgcgcgcgactgaaaaaactgactcccacctacttttga

SEQ ID NO: 10718 - RNA, 1197 nt, synthetic construct
  source 1..1197: mol_type = other RNA
atgatcaaagacaaggcgcatcggatcttcaaggcaagcacaagctccatctcctcactggagtccctagcaagtgcattggacctgcaagttgatgacttcgagcgggtttgggcgaaggaagaatcatctaggtacacgagaaaggaaatacctaaatctggtggtggcgtgagagtggtctttaacccttgtgttgaggtgagaaagatccagcgccgcgtgaacacacggattttctccaacccacacgtggtcaaatggccaggctatctctacggaagcatcccaaaatcgctgaactcagaagatgagttggccagcagagattatatttcctgcgctaaacagcattgcgaggcaaaatctctcctgaaaatggacatcaagaacttcttcgataacgtccatgatgacctggtctatggggttttcaaagatgttctaaaataccccgaagtagtctcaaatgtgcttactcgaatttgcacctatcgcagttctctcgtgcaaggcgccctcacctccagctacctcgctatgctcagtctctataaggaagagaacgacgtagtatctaagctaaagagaaaaggactcgtctacaccaggtttgtcgacgacatatctatctcttcaaaagtgagtggatacgacttttcctacgccagaagcctggtggagaagatgcttttgaatgccgggctgccccttaatagcaataagacaaaggtgctgtacgccacagccactcctctgacccttcacggcctgaggatatgttttaaggacccaaggctgccgccggaagaggtgagacgcattcgagctgccgtgaaggagattgaaattgtagctggggagagtaactatcggaacacttacgcatatagacgcaatttcaaccggtgtttagggagggtgaataaactttcacgagttaagcataagcagcacagtaatttagtgcgccggctgtccaaggttctgcctctgccctcgcagaaggaagtcaattatgtgcagcacgccctggtgaaattggaaggcttgtttcagagcaggggagatacgtactggtaccgtaagcacttttaccagttgggtgatcgtctcaatttagtcgctcggagctatccccgcctggctgaggagatccgacgtaggctgagggaggtgaaacccacctatgagtga

SEQ ID NO: 10719 - RNA, 1197 nt, synthetic construct
  source 1..1197: mol_type = other RNA
atgcggcggagctcagctcaccgagcttttaaggtggcatccggttccatcagcaatgtggaaaacctggcggccgcgctcggacttactaccctgcactttgaaaagctgtgggaaatcccggaggagttgagatacagctcgaaaacgatacctaaattatccggggaattgcgagaagtacacaatccttgcagagaattgcgcattatccagaggaggattaacactcgcatttttagtaatccagatgtggtcaagtggccatcttacttgtatggctccatcccaaaaggagacaatcccgaggacgagttcaattctcgggactacgtggcctgcgcaaagcttcattgtagggccaagtccatcctgaaactggacattaaagatttcttcagcaacgtgcacgacgatttagtgatgggggtgttctcagaagtgctcaagtatcctgatgtagtgtcacaggtcctcactcgcgtatgtacatacaagagttcgcttgtgcagggagccttaacaagctcctatctggctatgctgagtctgtatggggccgaggacgatctggtgcatcgattgagaaagaagaacctcatctatacccgctttgtggacgatatcaccatttcttccaaagtggccaattacgatttctcatacgcagcaagactggtagagcaaatgctcgttgaaaagggtcttcccctgaataccaaaaagaccataacacagtacgcttcacttgctccactaactgtgcacggactgcgggtctgctttgccgagcctagactccccgcggacgaagttcgtaggatcagggcagccgtccaaagcattgagattgtcgctaaggagaaaaattaccgccagacctacccttatcggaaggactttaaccgttgtatgggccgggttaacaagctggctcgggtcggccataaccagcactctaagttcatcagccgcctgcataaaatactgccgcttccatctgccagggaggttgagtatgttaaagcagccacactcaaactagagtctctatacgccacgaaacgtgagagcttctggtataagaagctctactacagagtcggcgatagactgaacctggtgggcagaagtttccccaacctggcaaaaagtttgcgagaaaggctcagggaggttaagcccgcttatgaatga

SEQ ID NO: 10720 - RNA, 1197 nt, synthetic construct
  source 1..1197: mol_type = other RNA
atgaaaaaagattttgcacaccgagcttttaaggcctccagtggaagcatcgccagcgtcgagaacctcgcaagtgcactgtccctagaagtgtcagattttgaacggctgtgggagattcctgaggagaagaggtacaaacttaaagaactgcctaagtcctcgggcggtttccgtacagtatacaacccatgcgtggctctccgagtcattcaaagacggataaacaccaggatctttagtaacccctatatattccagtggcccgtgcatctgtatgggtcaattccaaagtccccaaacgccgacgacgaatataggtccagagactacgttgcttgtgctaaacagcattgcggagcccggagcctgctgaagctggatatcaaggacttctttgacaacatacacgaggacgtggtcttgtcaattttccgcaaggtgctgaagtatcccgaggacgtctccctagtacttacaaggatatgtacgcataatagcaaagtggtgcaaggggcgctgactagttcttacatcgctatgttgtctttacatcaggaggaacagggcgtggtggatcgcctacgtagaaaaggcctggtttataccagattcgtcgatgatatcacagtcagctctaagtgcaccaactacgattttagctatgctcagtctatcatcgagcagatgctcaataatgcggacctccctgtcaacacaaaaaaaaccgaggttcagtacgccactgcagcgccgctgatggttcacggccttaggatctcattcaacgaaccccgattaccatcgaacgaagtcaagaaaattcgggccgctgtgcagggactggagatcgttgccaaggagaataattaccgccagacgtatccatatcgaaaggacttcaacagatgcatggggcgcgttaataaacttggtcgggtgaagcacaatcagcaccaaaagctcgtgcggaggttagtgaaaattctcccgttgccttccgcaaaggaggtggcctacgtaaaaactgcagtagaacgtctggaggccacatatgaaaccaagaagtcttctttctggtacaaaaaacactactaccgcgtgaatgatagacttaatctggtgaagaggagctacaagaccttggccgtcactctcagaaagcgcttgcaatgtattccccctctgtatgaatga

SEQ ID NO: 10721 - RNA, 1197 nt, synthetic construct
  source 1..1197: mol_type = other RNA
atgaagcggacattggcacaccgagagtttaaagccgccagtggatctatatcaagtatttccaacttggctaaggcgctgaatctgcaggtcagtgatttcgaacgactgtgggaaattccagaggaaagtaggtacaagagcttagaaaagccaaaaaccagcggaggtatgcgagtggtatacaatccttgtccccaactgcgtttaattcaacgtaggattaatacccgcattttttctaacccgtatgtcatacgctggccgtcctacctgtacggctctatcccatctagccctaataagtccgacatcaatcactcaagagattatgtggcgtgtgccagactgcattgcgaagccaagtcgatcctgaagctggacattcagaactttttcgataacatccatgagaaacttgtgatcgagatcttctcagatattttgcgctatcccgaggatgtgagtgagatcctcgctaggatctgcacttataaaagcagactggtccagggggccctgacttcatcttatctggctatgctgtccctttacaaagaggaaccagaaattgtggcaaagctaaagaggaaagatctcgtgtacacaaggttcgtggacgacatcactgtttcaagtaagatcgctaactacgactttagctacgcacagaagataattgaggacatgctcagcaacgccgaatttcccgtgaactccaagaaaacgcagacccagtacgcatctgcctcccctctcaccgtgcacgggcttagagtatgttacaaagagcccagactcccctcgcgcgaaatcagcaatatccgggcagctatccgaagcctggagatagcctccaagcatggcaattatcggcaaacctatgcgtaccgtaaggatcacaaccggtgcctgggcagggccaacaaattagcccgggtgaagcaccctcagcattcaaaattcgttgctcggttgtcaagaatcctccctttgccatctcagaaagaggtcaattacgtaaagagcagcgttgagatacttgagcgggattatcttcataaaaaggactccttccgctataagcgccactactacagaacaaatgacaggctcaacgtggtccagcgatcctatccttctctggttagggacctaagaaaacggctacgccccattaaaccaacatatgaatga

SEQ ID NO: 10722 - RNA, 1164 nt, synthetic construct
  source 1..1164: mol_type = other RNA
atgacaacccgccacacctttaaggtcgccacaggcagcattgctaccctggataacctcagtctggcgctgggagtttctcattgcgagctggaaaacgctctctctatgcctcaagacgagaggtacactcgactcgaaagacacaaagctgatgggagcgttcgctcggtgtacaaaccccattatttaattcggctcctgcagcgccggatcaaccataggatattggctaatcctgatgtcattgcctggccttcctatctatttggcagcattccctcattcaagaatgaagacggtgaatgggtggctaaggactacgttgcctctgccagattacactgcggcgcaaagagtctcctgaaaatggacattaaggactttttcgacaacatccacagttccgtggtggaggacatattccttgggctcctgaattacccgggggaggtggcaaaagccctgacgaacatttgtacatacaacagccacctagcccagggcgcgttgacatcatcctatatcgccaatatgtgtcttcatgggctcgaggatgaggtttttaccaagctgtcccgcaagaacctcaggtattcacgcttcgtggatgatattactgtatcaagtgtggtgaataggtacgacttttcctatgtgaaatcgatcatcgaaggcatgttgttggaaaggggtctaccagtcaatagcagaaaaacaaaagtccagtactccaccaccgaggcactgactgtacatggtctgagggtatgcttccccgagcccaggctgccatctgacgaagtgcgtcggatcagagcagccgtcaagaatgtggagatgctggctcaagagaacggataccggatgactcatgcgtaccgccgcgactttaataaatgtatgggaagagtcaacaagttgagcagggtcagtcacaaacagcacggcaatcttgtgcgtcgactggttaaggtatatccacttccttcaaagaaggatatctctcgagctcggtctatggtggcccggctggaacgggattatctggagaagagagatacgtactggtattccagaagattctacatcgcccacgaacgattaaacatactgaaacgaagctataaggcaagcgcaatcgagcttcgtggagcctcctga

SEQ ID NO: 10723 - RNA, 1191 nt, synthetic construct
  source 1..1191: mol_type = other RNA
atgaagaaaaacaactatctcaaaatcagcaagtcctcaatctcttctgtggaaaacctctgcctcgccctggacctcactcttgatgactttctcaatctaaagatgatgagtggctgcgataggtatgtgctgaacgaaaaaccaaaacctggcggaggcattcgaaagacttacaaccccaataatctggtcagggtcttccagcggcgtattaataatcgcatcttcagcaacccacacatcataaaatggccagatcatatttatggcagcataccgaatgatatgaactccgatggggggattaggaggcgggactttgtcgcgtgtgcctctgttcactgtggtgcaaaatctatactgaaggttgacgtcaaagatttctttgacaatatctccaaggacatcgtgtacgatatctttaacggtttcctgaagtttaacagcgaggtgagcgaggcattaaccgatatttgtacatatgatcgttcgcatctggtacaaggggcccttacctctagttacttagcgaccctggccttgttcaacatcgagggacgcattgtgcagcggttggcccttaaaaaattgaagtatactcggttcgtagacgatatcacgatttcctccgttaactcacgctacgatttcgattttgctaaaagcatcgtgatcaatatgttgcacgagaaggacctgcccgtgaacctctccaagacaaaagtgtactattcaggttcagaacctctgacggtccacggacttcgggtgtcctttaatcaggtgagattgccaagtgatgaagtccgcaaaattagagcagccgtgaagaacatcgagattattgctaacgacaccagctacagaaaaacaggcagttatcggaaagactttaataaatgcatggggcgcgttaataagctgtctagagttgggcacaaacagcatgagagcctagtcgcccgtcttaacaaggtgtatcctctaccttcattcacagacatcaagaagaccaaggacctgatagaaaaaatacgaagtaagtacgacgacggcaagaactacttctactatcataagatgtactacgctgcaatggagaagttaaatctcgtaaagagatcgttccccaatactgctaagaatctgcgactgaggctgagaggactgaggcccgagtacgactga

SEQ ID NO: 10724 - RNA, 1224 nt, synthetic construct
  source 1..1224: mol_type = other RNA
atgtctctgccaattagacacacaaagaaaaagacagttagctcaatcaactccatttcctcactgtgttcgacattgagcatcacgcgcgccgaactggaaaccgccctgagcacccccgataaagagcgttacaccccctctgaggtggagaagtcagatggcacgatccgcaacatctacaatcctaagagtttaatccgtaaaatccaacggaggatcaatcgtcggatcttcaatatttatactcctaagggacgcgagaaaaagaaccccccgataatctgggcgagttacctgtttggaagtatacctaatcaattccttgatgaagacatagagcagaaagattatatagcttgtgccagggtccactgccagagtaagagcttgctgaaagtggacatcaagaactttttcgataacgtccaggctattcatgtggagagcatcttttccaaatttttcttcttctccgacgacgtttctcaggccctcaccaatatctgttgctacgaagggcacctcgtccagggcgcattgacatcatcttacctgtcgtgcctgtgcctccatgatgtggagtggaagattgtcgatagactgagccggaagaatctcagatatactagactagtggacgacattaccgtgagctctacggtcagtaattatgatttttcctacgccaaggatatcattatcaacatgctccacgaaaaagacctgcctgtgaacttcaagaaaactcagcaatactatacctccaccacaccacttacagttcatgggctgcgagtaagcttcagtgagccccgcttaccctctgacgaagcaaagcgaattagagcatcagtacggaacatagagtctcttgcagctgagcgaaattacagaactacacacgcgtacaggaaggatttcaatagatgtatgggccgcgtgaacaaattgaaacgcgtgaatcactcacagtatgagtccctcgtgaatcggctgttcaagctatttccgctgccaagcaagaaagacctcgatagggtatttatttccattgctaacttagaagacgactttcataagggtaaacacgacacttattggtactggaaacgatatcatagggttcacgagcggatcaacatacttcagaggactttcgtgagggaagccaccatctttcggaacaagaccaaaaacattaagccatcctacattcagtga

SEQ ID NO: 10725 - RNA, 1224 nt, synthetic construct
  source 1..1224: mol_type = other RNA
atgagcttccagattaggcacacaaaaaagaatactgtgagtgccataaattccatccagggcttgtgtaacgctttagacattagcttgcacgactttaacatcgcactgagtacccccgattctgagagatatacccctagtgagatcgaaaagtccgatgggagctttcgtaaaatctacaatccgaagtcgttcctgcggaagattcagagacgcattaatcggaggatttttaacctgtataccaaaaaggggagagagatcaagaacccaccaataacatgggctagctacctgtttggctctattccaaaccaatttctggatgagaacatcgagcagaaagattatattgcttgcgcccgcgtgcattgccagtcaaagagcctcctgaaggtcgacatcaagaatttctttgacaatgtgcaggatgttcacatcgaggacgtttttagaaacttcttcctatttgacgaagaagtatcacgtgccctaactaatatatgctgctttgaaggtcatctggtccagggggcactgacctccagttacttgtcttgcctgtgtctgtacgatatcgaaggaaaaatcgttgataggctcgctcgcaagaatttacggtataccaggctggtggatgatattacggtcagttccgtggtgtctaactatgacttcagctacgccaaagacataatcatcaacatgcttcacgagaaggatctgcccgtgaactctaagaaaacccagtgttactacacgagcacttcacccctcacagtccatggactgagagtaagcttctctgaacctcgactgccctccgacgaggccaaaaggatcagagccagcgtacgcaacatcgagtcactctcctcagaaacaaattaccgcacaacccacgcatatcggaaggactttaatcgctgtatgggcagagtcaacaagctgaaaagggttaaccactcccagtatgaatcattgttcaataggctcttcattcttcttcctctgccttcgaagaaagacatcgagagggtgagtgtgtctctcctacgactcgagaatgactacaagttgggtaaacacgatacatattggtactggaaaagataccatcgcattcatgaacgacttaacattttacaacgtactttcacccgggaggcgtccgtgttccggattcgactccggcttgtgaagactacttatatacaatga

SEQ ID NO: 10726 - RNA, 1224 nt, synthetic construct
  source 1..1224: mol_type = other RNA
atgagttaccacattcgacacacctctaaacgcaatattacagctattaactccatagaagccctctgcaaagccctgtcaatatccaaggaagaattagagaacgccctcgctactcccgaccattttcgctacaccccgagcaccgccattaaaagcgatggatcaccaagaaaagtttacaaccccaaaccgatgattaggatgatccaaaggaggatcaatcgccgcatttttaattcctacaataataaagggcgggaaaagaaaaatcccccaataatctgggcgtcctacatttttggctccattcctaaccagtactacgatttggatctggaaaacaaggactatattagctgtgccgcaatccactgcggggcaaaaagcctgctaaaggtcgatgtgaaaaatttcttcgacaatattcacgacatctacgtgaagaacgtgttcgaaaatttctttcacttcagcaacgaagtctctgaggctttaacaaatatctgctgttatcagggccatctggtacagggagcacttacgtcatcctatcttgcttgtctgtgtctctacgacgtggagggcgatatagtgcaacggctcgcgagaaagaacctgaagtatacgagattgatcgatgatataacaatcagctctgaaatctcgaattatgatttcagctatgcaaagagtatcgttatagacatgctccataagaaagacctccctatcaacaatgaaaagaccaaagccagttacattagttctgagcctctgatggttcacggactgagagtggcctttaaggagcctagattgcccagcgatgaagtccgccgcatcagggcttccgtgcggaacatcgagtgtctggcctcagagacaaattaccgaactactcatccatatagaaaagacttcaacaggtgcatcggtcgggtaaataagctgaagcgggtcaaccacacccagtacgacaatctcgtcgcaagactgctgcggatccttccactgccctcgaagaaggatatagagcgaatttcagagcagatcgacaggttggagaacgagtattctaacaatctgcacggtagttattggtattggaggcgtctaaacaaggtgcatgagcgtattaccatccttaaccggacatttaaatctgaggctaaaacttatagggaccgcttaaagaagattaaccattgctacatccagtga

SEQ ID NO: 10727 - RNA, 1182 nt, synthetic construct
  source 1..1182: mol_type = other RNA
atggcagtcctgaagagagtggcaaaaaaaagcatatcatcactgacgaacctttgtgatgctctcagtattaccatccacgagcttaacggagctcttgcgctgtcagatgaccagaaatatcttagatcaaccactcctaagcccgacggctcccttcggatagtgcacaatccacaccggttgttaagaaaagtgcagaggaggttgaatagccggattttttctaattccgccgtggtgacatggccagattatgtatacggatccattcctaatcagattgatgtaggcggggccattgtggaaaaagactacatcgcctgcgctcgcgtgcattgtggtgctaagagtatgctgaagatggacatcaaagacttctttaacaatgtccacgaggaggccgttcgagacatcttcctcagattcttcaagtacagcaaagaagtttctgacgccttaacttcgatctgcacatttgagggggggctggttcagggagcactgacaagctcttacattgccaatctctgtctctttgatgttgaggactccgccgtggagaggctcaggagaaagaagctgagatatacccgtctggtggacgacatcactgtaacgagcactatcgcaaactacgatttcagttttgccaaggacgttattacaaccactctggtcgataaggatctccccgtcaacgaacggaagacccgggttctttatatttcatccgagcctttgacagtccatggattacgtgtcaactacaaagaaccacgactgcctgccaaggaagtggcacgaatcaggtctgcggtaaggaacgtggagctactggcttctgaaggcagctacagaaccagtcattcctatcgtcacgatttcaatcggtgcatgggccgagtgaacaagttgaaacggataggtcatcgccaacacatggtgctgatcaaacgcctgctgaagatcctcccgctaccggccaagagggacatcgagcgcgcggaaaagctcttgatacgcatcaagaaggactggctgtccaatccagattcttatggctacgctaaacgcttttatattctccatgagcgcctgaacgtgctagctcggagtttccccgcagtcagcgccgtcatgagaaaagaaatgagggggctgcgacccgtgtacgattga

SEQ ID NO: 10728 - RNA, 1203 nt, synthetic construct
  source 1..1203: mol_type = other RNA
atggcacgcgactccatgagctttcgtgggaccagcggtcccatcgctagcgtggagaaattggcttctgccctacgactgcccgagagcctccttctggaagtttccgaacgccctatctggcgaaattacaaacccgctagcgccccgaataggagaggcggacgaccacggctagtctttagtccatcccgggatgttcggctgattcagaataggattgtgcggacattcttcaaaaacccaaaagttatcaactggcttccctttatatacggcggcattcacaaggatgcactgaaatctggcgacagtagagatcatgttgcgtgtgccagacggcactgcggtgccaagagtattcttaagctggatatcgaagacttctttggcaacgtatcattcgatttagtggaagatgtgttcgtcggtctgctcggttggagtaaggacgccgggtcattagctgccaaactttgcacgagagacggcgtgctgccgcaaggagggataactagttcgtatttggctctgctctgtctgcacgatatcgagcctaaattggtccgccagctttcctataagaaactgacctacactcgctatgtcgatgacatcacaattagctctggctcctttacccaggaattcagcgggccaatgagaatggtggagcaacagctggcgtctaagggcctaggaatcaattccgccaaagtggaatcactcactgtgggcctggaggctatgtcagtccatggactgaacgtagcctatagggaccctgtgctgccaaagtctgaggtcaagagaattaggagcgtttgcaggcagacaatacttgacgcccgggaggtgggacggagaagcatcaattacaggcgaagatacaatcgagccatggggttggtaaacaaactgtcccgcgtgaactcttctagtcataagaagttggtgcagtcgctcaggctcgtgtcacctctgccctcacaggcagactttgagtatgctaccaagatcgcatacgatatgagggacgactatgataagaagaaactgggatactggtactggaggcgtttcaaccgtctcatggcgcgcttgacactcattggcgtcgataatcccggatgggcagggaacctccgcaaatatatgaagtcccactttttacctgggttcaaggacgataaggacaagtga

SEQ ID NO: 10729 - RNA, 1194 nt, synthetic construct
  source 1..1194: mol_type = other RNA
atgggaaaagactcaatgtcattccggggaacatctgggccaattgcaagtgtggaaaaactggcagacagcctaaggctcccaatcagcctgctgaaagatgtcgctgcccgccctgaatggaaaaagtataagccggccaaagcacccgataaaagaggtggccgcccaagactggtgttttccccctctaaggatgtaagattgatccagcatcggctagtcagaactttctttaagaatccgaaggtggtgaattggctccctttcctctacggtggcattcataaagatgccctggctgcaggggacagtcgtgaccacgtcgcttgcgcgcgtagacactgcgaagcaaaatcgatccttaagcttgatatcgaggactttttcgggaacgtaagtttcgatcatgttgagggcatctttgtgcggttgctgggttggtctagggaagccggccatctcgccgctctgctgtgtaccagagacggagtactgccccagggggggattaccagcagctaccttgccctgttatgtttgtacgacatggaaccagcgttggttagacaactggcctacaagaaactggtttacacaaggtacgtggatgatattacaatctctagctcatcattcaaccaggactttaatggcattaagagattagtggagcagcagctcggcgctaaaggattcaccatcaatagttctaaggtcgaggatttaacggttggcctagaggccctgaaagtgcacggactgaatgtggcttatgctaaccctgttcttcccaagtctgaggtgaggcgcatccggagtgtctgcaaacaaactataatggacgctagggaggtgggacgccgcagcataaactatcgacgacgctacaacagggccatgggccttgtaaacaagctcgcccgagtgaagtcttcctcccacgcggcgttggtgtccaagctgcgtgcagtctccccacttcctagccacgccgatttctcctatgctactgagatatcctacaacatgcgggaggggtatgacaaaaagaagtattcgttttggtacaggaggcgctttaatcggctcatggcacgactctcactgattaagtccgacaatcccgtctgggccgccaatctccggaactacatgaccagccacttcctgcctgaatataaggaagagtga

SEQ ID NO: 10730 - RNA, 1182 nt, synthetic construct
  source 1..1182: mol_type = other RNA
atgaccctgaggggatctgccgggccgattagatctaattgcgccttggccagagctctcggttgcactgaaaaatttctatctgacgtgatcgcgagggacacctctagcaaatataggctggtggaggccccagctaagctggatgggaccagacgggaggtctatagtccgtctcgagacgtacgtctgatccagcgccgcatcgttaaccgattcttcaaaaatccacgggtcataaagtggccaccttttatatatgggggcattcacagagacgccttggcacccggagagagtcgtgatcacgtggcatgtgctcaaaaacattgcggagctcgatcaatggtgaaattggacattaggagcttttttgacaacgtcacacacgatatggtggtggaaaccatggtaatgcagcttggctggtccaggggacccgccattcttctcgccgatctctgtacgcgcgacggcagccttccacaagggggaatcacttcctcctatctggccctgttaagcatttatgatgtggaatcgaagatcttcaacatagttggttacaagaagttggtctacacacggtacgtcgacgacatcactatctcttccaggaattctggctatgatttctcacccatcgtgaagatggtggatcagttcctcctttcgaagggactgagtattaatgatgcgaagacaagtgtctccgttagcggtttagaacctctcgtcgtgcatggcctgaacgtagctaataaacaccccgtactgcctaaggcagaggtgaagaggataaaaagtgtttcacgccagaccattaacgacgcttccgaggaagggagacggacgcatggcttcagacgacgatactaccggtcaatgggcctgattaacaagctgtcacgcgttagaagctccagccacaagagctcattgagtaaactgaaaagcgtgtcccccctccctaattttgcggactacgacatcgcaacagtggtggcatacagactgcgtgatctgtacggcgccaaaaagggcggtcgctggtattggagaaaatttaacgttcttatggcccggctagatctcatcgctgtggagaatcccgggtgggcaaagactttacggaggtacatgcgccggcattaccggccagattataggcgccctgagtga

SEQ ID NO: 10731 - RNA, 1104 nt, synthetic construct
  source 1..1104: mol_type = other RNA
atgcgggatgttgcctctcgggcctcaacgacaaactatagatcagtcgacgcgcccatcaaaagcgacggcctcccaaggcgggtgtataaccctgccagggacgtgcgcctggttcagtctagaatcgccaatcgcttctttaaaaaccctgcagtcatcaagtggcccgcccacatttttgggggtatccacaagaaggccctgcctgctggagatagtcgagatcatgttgcctgcgctgcaaagcactgtggcgctcattcccttctgaaactcgacataaggaactttttcgacaacgttactcacgagatcatagtggagactatgacacgccaacttgcatggtctaggagccccgctgtcctgttggctgatttgtgcacccgcgaaggtgtgctgcctcagggtggcattacctcctcatacctcgcactaatctccatatacgacattgagagcaagctcgtgaggaatctggaatacaagggattggcttacactaggtacgtggatgatattacaatcagtagtaaggtggccagctttgactatgcaccaatcgtgcgcatggtagataatctgctcctgtccaaggggttatcaatcaacgaggccaaaaccagtgctagaataagtgggctggaaccattagtggtgcacggattgaacgtcgcaaatcgcagccccgtattacctaaagcagaggtggctagaattaagcgagtgggccggcaaaccatcctggacgcccaggaggaagggaggcgatctcatggatttcggagacgatattatcgttccatgggccttattaataaactgtcgcgcgtaggctctgcgtctcatgccagctcacttgagaagctcaaggccgtcagcccactgccaagcttcgacgactacaaaatttccaccaatgtcgcacataaacttagagccgattacgatattaagaaatccggggtctggtattggcggaaattcaacgttctaatggctcgtctcgacctgatcggagcggaaaatccgagatgggcgaagacactgagacggtatatgaggcagcactaccggcccgagttcaagcgtccgaaatga

SEQ ID NO: 10732 - RNA, 1110 nt, synthetic construct
  source 1..1110: mol_type = other RNA
atgaatctccttcttgacgtagccgagcgtagcgcagaagagaattataggcctgtgtctgcacattcaaagcttgatggcactgaaagacgtgtattctcaccctcccgggatgtgagactcatacaaaggcggctggtgaataggtttttccggaaacctcaggttgtgagctggcctccgttcctgttcggtgggatcccaaatgacgcattaccccaacgcgatgcccctagggattacgtcgcttgcgcggctcagcactccatcgccaggtctgctttgaagctcgacgtgaggtcgttttttgacaatgtccacagcgacgtggtggagcctatctttagtggcctgctgagatgggatgaggaaccggccgtgttggcaacacgagtgtgtacccgattagactcactgcctcagggcggaattacctccagttaccttgctctgctgtgcctgttcagagaggaagggaacgttgcaaggaccctgcgcaggaaagggctgacttacacccgttatgttgacgatattacgatctcaagcacatctgtgctgcaagaattcgatttcgcgcatgccctggtggagcggatgctcatgaatcacggcttgttcatcaactccagtaaggtcaacctgcagaaggccggatccagccccctcgaggtccacaatctcagagtgggctgcggtccaccacgattaccacagagagaggtgaagcgaatcaaacaggtttgtcggcagactgagctagacgccagcgaaggacgcagatcttactcttaccgccggcgctattttcgcgctgttggcttggtgaacaagctggcgcgagtaggaaacaaccagcataggcacttgatcacgagacttagcacaattcgccccctccccagtcagaaagattacgaactagccacaaatgtcgcccatgacctgagggaacggtacgtcctggggcacgaccggtattggtatagacggcgttttcatatactcatggagcgccttaacctgattggtgtagaggacccagcttgggccgccaacctaagaatttacatgaaagctcactatgctcccacctccgtcgatgcatga

SEQ ID NO: 10733 - RNA, 1203 nt, synthetic construct
  source 1..1203: mol_type = other RNA
atgaaaagcaagccttattcctcaatgcgaggtagtaacggcccaattcgtaatttagatcatctgtgcaccattttggacgttgagcgcagggtcctagacagagtcctggccatgcccggaagccaaaggtatgccctggctcgctctcgggccgctaaatccgacggcagtgcacgcgaagtatttaacccctgccgggaggtacggcggatacagctcaaaattgtgaagcggattctgaaggtgccaggcgctgtcaggtggcacgactttctgtacggatccatgcccaatcagatcgacgcccacggcaatgagttgaaaaaggattacgtgacatgcgctgcacagcactgtgacgcgagaagtgttctgaagatcgacataaaggatttcttcgggaacatccattctgacacaatcatgagaatctggactgagctatttgggtatccgggagatgttgcatttgtgctcactaacctctgtttaaaagatgataaccttcctcaaggcggaatcacgtcttcctacctcgcaatgctttgcttgttcgatctggaagccaagacagtggctacgcttaggcttaaggggctccgatatactaggtatgtggatgacattaccatcagctctcctctgtcaaactacgatttcgagttggcgctggcgctcgttagagcgatgctcatttcacgtgctctccctataaacgagtccaaggtgaagagggtcagtctgagcaccgaagccatcaccgtccacggtctgcgggtcaatttcgaaactccgcgcctacccgctgctgaagtcggaaggatccgggcatctgtgaaaacaattgaactgcttgccgccgatacatcttttagcagcacccccgggttccgcaaaagcttcaataagtgtatggggagagtgaataaattgaaaagagtgggccatagccagcactccaaactgttgaagagattacaggctgtgcgcccactcccatcacgcagagacatcaaaaaagcagtagcctcgattcgaactctgtcagccgagttccatagtaggggcaatacctttggttacaggaagcgatattacattctgatggagcggcttaacctgatcgccagatcgcacaaggagctggcagccatgctgcgtgcccatgtgaagcgaataaagccatcctacgttgactga

SEQ ID NO: 10734 - RNA, 1122 nt, synthetic construct
  source 1..1122: mol_type = other RNA
atggccattacacaggacgagttgttccaggccctgaggttgacggatgatgtcaggtttcagcctattccagagaaacggaagccagatggtacaatccgcgaaatatataatccccacccactcatcaggaagattcaacgcagacttgttacaagactgcttagtgggtctgcggcttttcagtggcctgaccacctgtatggcagcatccctaacgtttcaagccccgatggagaggtccagagtaaggattatgtggcctgcgcaaggcggcattgcggagctaagtccttgctcaagctcgacatcaagaatttctttgggaatgtgcatcatgacaccgtataccggattttccgcgaactcctcggctatggttccagggtcagtaaagtgctcgcctgtctgtgtactcacaaaggatctcttcctcaaggcggtcttacttcttcatacttggccatgctaagccttcatgacttagaaggctacgtggtggaacgcctgagattaaagtccttagtgtacacgagatacgtagacgacattaccattagctcaaaagtactcaactacgacttcggctatgctcttaagattgtggataacatgctggtggagagagggctgcccctgaacctaaagaaaaaccggatagagcgcatctccaccagcccgctgatagtgcacggtctgaggatcgccttcgacaagccccgattgccggcagatgaagtgggaagaatccgtgcctcagttaggtacactgaactgatctacctcgaggcaaattttcggtttacctcttcttacagaaaggcttttaaccgatgcctagggcgagtcaataaactgaaaagagtcggacactcgcagcatggggttctgttaaggcggctgctgagagtccgtccactcgcaagcaaaaaagatcttatccgtgcccacgtgaccgcaagtcgcttggctaatgagtatggccgctataaggagacatatggctaccaccgaaggttctatctgttgcaggaacggctgaacctcattcaacggacttaccccaagatagcgaaatccctgcgcctgaagctgaatatcatccgacctgagttcaactga

SEQ ID NO: 10735 - RNA, 1119 nt, synthetic construct
  source 1..1119: mol_type = other RNA
atggacgtccccattagtgacttcagagcagctctgttgctaagcgaggaagagaggtttcgcctcctccctgataagaagaaagccgacggcactgacagaatcgtgtacaatcctgatccactcatacgcaaaatccagcgaaggttccttactcgcatcctttctagaccttccgcggtcaagtggcccgaatttcttttcgggtcaattcccaaccacagttttaatgggatcgacgtgagcagggactatgtggcctgtgccgctcgacattgcggctctaagtccctgctgaaactcgacatcaagtcctttttcgaaaacgtacactcagacttggtgctcgagattttccgaggggtcttctcctatggagatctggtcagtcgggttctcacaagaatctgcacccacaagggcggattaccgcagggaggtattgtgtcaagctatctggcgatgctttgcttacatgacgttgaggcccgggtggtggagagactgagacagaagagattgacatatacccgctacgtggatgatataaccgtttctagtaagagctctaaccaggacttcgatttctcgaaaaggattattgaagagatgctgctcagcaagaatctgccactgaactacaaaaaggtgttggtgtcccgggtcagtacaaccgccctgacggttcatggtctgcgggtcgggtttaaggaaccaaggctgccggcagatgaggtcaagcggatccgagcatctgtaaaatatctcgagattctttacgttgatggggactacaaatataccagcagctaccgtaagaacttcaataaatgtatgggccgcgtgaataaactgaagcgcgtaggccattcacaacacggtcagctgaaatcaagaatcatccggttaatgcctaaagcttctcggtccgacttggccagggtgtttaaaatatccaaacgtctgcaaagcgattacctcgaaaagaaggatacgtttggattctacaagcgttttcacatccttgccgagaggctgaacctagtggctcgcactcaccccggcatcgcaaggctgattcgaagacggctaagggagataaagccaacatttgaatga

SEQ ID NO: 10736 - RNA, 1056 nt, synthetic construct
  source 1..1056: mol_type = other RNA
atgagacagcccaagctgaatggcagcgacaggatcgtaaacaaccctcattatttaattcggaagatacagagacggctcaataagcgtttctttgcaaatcccgattttattaggtggccacgacacatctttggctgtatcccaaattacgtggacgatgacggcgagttagtcactacagattacgtctcctgcgccagtaaacactgccaatcgaaatccatcctcaaaatggacatttctgatttcttcggaaacgtacatcaggaccacgtctataaggtgtttctcaaccttttgtcatttccagaagatgtgagcaagatcttgacagatctttgtacccttcgcggatcccttcctcaagggggcctgacaagctcttatttggcttcactttgtctgcatgataaggaagggagtgtggtgaggcgactggagaacaagggcctggtgtacacacggctggtcgacgatattaccgtgtcttcccacgtggcgaactataacttctcttatgccaagaaaatcatcacggatatgctaatagagaaagatctccccatcaatgaagacaaaactattgttcagcgtctgagcaccgagcccctgactgttcatggtctgagagtgggattcaaggaacctagactgccggccggtgaggtaaaacgcattcgggccagcgttcagagtatggagcagttggcaagagagcccaattacagagtcagccatgcatatagaagggactacaacaggtgcatggggcgggtcaataaactatccagagtcggacacaagcagcacagtattctggtgaggcgtctgaagtcaatcaggccactgccttcacgagctgacctcgaccgactagaggttatggtttctcgcttagaaaaggaccatgccgaaaagcgggctaccttctggtactggaaaaggtaccaccgcgcgcacgagcgcttgaatgtgctccaactcatctacatagctaaagccaaaaagtttcgcgaacggctgaagaaggtgaaaccgctgtatgactcctga

SEQ ID NO: 10737 - RNA, 1200 nt, synthetic construct
  source 1..1200: mol_type = other RNA
atggatgattttctgtttcataaagtcagtaccgccagcatttcaaacgtgaaaaacctgtgtaccgccctggatataactgaaacagatctggaaaaggctctaagcctcgagcccagtgcgagatacgaagaagtgcaggtaaataagagtgacggaagcctgaggacagcctttaagcctcattatctgatcaggcgcatccagagaagaattaacaaaaggatctttgcacctcagaaaaacgaaccgaatactatccaatggccaaattacatcttcggcagtatcccaaatcagatcatagatggagaggagatccagaaagattacatttcctgcgcgagacggcattgtaaagctaaatctcttctcaagatagacatcaagtctttctttgacaacatccatagcgacctggtgtacgatgtctttaacgagtttttcaagtatcctaagtcagtctgcgaggttttaaccgatatatgttgccatgagaatagggttccacaaggcgggctgacctcctcatacctggccagcctcgtgttgcacgacattgaacccactgtcgtgaaacgattgcttagaaaaggtctgcattacactcgactcgtcgacgatatcaccgtatcctctaagatccacgactatgacttctccttcgccaaaaaaattatcaccgacatgctttatgagaaggacttccctattaacgagcagaagacccgaatagagcgggaggcaagcactcccctctgtgttcacggcctgcgcatttgtttcaacgagccccggcttgcttcccacgaggtgaagaatatccgcgctgccgtgaagaatattgagattgtggccatggaacggcactatagaacaactcacccgtaccgtaaggattacaaccggtgcctgggtagggtaaacaaattagctcgggtgggacataatcagcatgcaaagctcgtgtcgcgcttgaagaaagtggaaccactgccctctgagagagacattaaaaggtgcacgacaatggtcacaaatttagaaatggatcactccacgaaggggagccgttattggtattggaggcgttaccacaaggcccaccagcgcctcaatattttgcaacgaacattcgttcacaccgcaaacgacctacgcgcacggctgaaggtgatcaggccttcatacgaatcttga

SEQ ID NO: 10738 - RNA, 1194 nt, synthetic construct
  source 1..1194: mol_type = other RNA
atggggcagtttcagcctacgaagaatccaaaaggcagtattgccaccatcgatgccctctgtgctgccctgtctatctccattgacgagttgaatcaggcacttgctatgcccatcgacgaaaggtataccctccccaagaaagaactctttaagagcgacggatccccgcgagtcgcatacaaaccccatcatctgatacgaaagatacagcggcggatcaataaacgtatcctgggacaagaaggctacattgattggcctaatcacatcttcggatctgttccgaacaagaaggtgcctgatggcgaggatatagtcaaagactacattaactgcgccagacagcactgccttgcgaaatcgatgctgaaaatggacgtgaaggacttcttcgacaatattcacgtcgacctcgtgttcagcatcttcaactcatttctctccttctcagatgtggtgagtaataccctggccaatatctgctgtcggggcgaatttgtagtacagggcgggctgacttcctcctatttagcatgcctctgtttatttgatgtggaagccgacgtggtggtgcgacttaagaacaagggactaatctatacaaggctaatcgacgacatcacagtgagcagtaaaagatccggttatgattttagcttcgctcgacaaatcatagaggacatgctgttctctagaaatctgcctgtaaacagcaaaaaaaccgctattcactatcatttcagtgcaccactgatggttcatgggcttcgcgtgagctttaacgaaccccggctgcccgcctctgaggtgaagaagattagggctgccgtcaaggatattgaggttttggcaaaggatcacttatacaggattactcatgcctatagacatgacttcaaccgcgttatggggcgggtcaacaagttgtcaaggatcggtcacacacagcacgagaacctgaagaatagactgctgaagtgctaccctttgccatcattcaaggatattactcgcgcgcgtctggctgtcgagcgtgttgaacgggattacgaggagaaatgtgccacatactggtacaagaaacggttttatagagcacacgagcgcctgaaccttctcaaacgctcttttccagacaccgcttctgagctaagggacagattgcgcgatctcaggccagaatacgattga

SEQ ID NO: 10739 - RNA, 1200 nt, synthetic construct
  source 1..1200: mol_type = other RNA
atgtctacaaacaacaacctgtatttccagaaaaacgcatctaattccatcggctctattagcaatctcgccaatgctctgaacttgaccgtaaatgagattgtcagggccgtgaatcttcccaacgaggtgaaatacacagctaatccgcaacagaaagccgatggatctcagcgaatggcttacaatcctcaccgttatctgaggaaggtgcaaaggcggattaacaaacgcatcttcgcagatcctagcgtagtgtcgtggccagattacatcttcggctctgttcctaacaccactcttagccttagcgaagtgatcaagaaggattacgtgtcctgcgccgctcggcattgtcttgccaaatccctcctgcgcttggacatcaaggattttttcccaaatattggcgaacatttagtccgggcagtttttgaagatttttatcactttccgcctgatgtgagtgagatcctagtttcgttgtgtacgaaggatggcggggtcccacagggtgccttgacctctggatacctggcgtgtctctgcctgtttgacgttgagcctgaagtcgtcagaagaatcgaaatgaaggggctgacctatactagatatgtggacgacatagtcgtcagtagcaaggtccacgaccacaactttagtttacaggagaagctaatcagctcaatgctggaagataaagacctccccgtaaacgacactaagacattaattcagcgatccagtactgcccccctgatcgtccatggcctcagggtgtcatttaaagagccacggctgccatccgacgaggtgagaagaatacggtccgccgtgcgaaatctcgagaaacaggcctctgagcccaacttcagaacaacgcgcgtattccggtcagcacataaccgctgcgtgggaaaagttaataagctgaagcgggtggggcacaagcagcattccgaatacctcaggcgcttgaacctgattaagcccctagctcgacgttcagacgttgaaagagtggtgagtatgattcgtcgcctggagaatgaccacggtagcatatcagacacctatgcataccacaagaggtatttcagggcgcacgagaggcttaacatcatccaacgcaattacgagaacatagctttcaaactgcggcagagactgaagtccattcccagcaattacgtgaaatga

SEQ ID NO: 10740 - RNA, 1188 nt, synthetic construct
  source 1..1188: mol_type = other RNA
atgatcatcatgaacaactacaagattaagggcagtgtcatcgcttcaccacagaacctggcgaaggcacttaatctaaccctggaggagataaacgcagccaacgccttaagcaccgaaaagagatacaaagagaagaatctcccaaaggcagacgggaacttcagaaaaatctacaaacccaaccacaggatccgtacgatacagcggcggttgaataaacggatcttctcttccagcaatgtaatcgaatggcccagttatctctacggttctattccgaacacaattggagatgacgaaatcgagatgaagaaggactatgttacctgcgcctccattcactgccaggctaaaagcgtgttgaaaatcgacgtgaaagatttcttcgataacatccatagcgacctcatttttaacatcttcatcaagctcttcaagtatcctcaggaggtagcagagctcctgactgatctgtgcacatataagaataagctcccacaagggggcttaaccagcagttaccttgcttgtctgtctctgtttgacgtcgagcccgacgttgtgaaacggctggaaaataaagacgtgaagtatacaaggttcgtggatgatattaccatttctagccagcatcccaactatgacttctctttcgcgaagaaattggtctttgatatgcttcactccaaggatctcccaatcaacgaagctaagacaactgtccagaggctgtcctcagcccctattctagtgcatggactgcgtatttcctttaaggaaccaagattgccccccgaggaagcccgacaaatacgggccgcggttcgcaatattgagaaactgtcgaagcaccctgattaccggacttcaaacgcatacaagaaggactacaataaatgtattggcagggtcaataaactggcccgagtgaaacacattcagcacaagaaacttatctcacgcttaagaaaagtgaaacctctgccaaatcgccaggctgtgattagggctaggagtatgatccgccagctggagcatatataccctactcacctgcacgactattggtacaagaagaagtactttcaagcccatgagcgccttaatatcatccaacgatcctttccgaatatagccaaaaccctgagatttaaattgaagacgataagacctcagtatgaatga

SEQ ID NO: 10741 - RNA, 1236 nt, synthetic construct
  source 1..1236: mol_type = other RNA
atgtcctgggttgggagagcaacattcatctctaatggcctggtgatcctgctgactaaccccatcaaacattctaagaacagcatttctaaccgtgagaatctgtgcaaagccctccgcgtgagtgacgactttctcggctccgtgctggcattgtctcagtcagagcggtacacaaaaaaagatcacgtcaaaaaggctggaggagggtcccggccaatctataatccccatcgattccttagaaagatacagaatcggatcaacattgccttctttagtaactactacgttattagatggccccactttatatacggaagcgtgcctaaccagaagaacggcgacgggtatgactcaaaagattatgtcagttgcgcgggtcgccactgtggagctaagtccctccttaaggtagacgtctcatcatttttcgacaatatccatcaggatgttgtgttcgcaatatttaacgacttcctcaaatacgatgcagaagtcagctcgattctgaccgatttgtgttgtcaccattcacacttggtgcaaggcgggctgactagcagctacatcgcaagcctatgcctgtacgacgtggagggagcggtggtggacagactcaatcgcaagggcctcacctacacaaggttggtcgatgacattacagtatcttctaaatcccttaacacggacttcacctacgctctgaagattattagcgacatgttaaccggcaaggatctcccaatcaatgagagcaaaacccgagtttttcggacttcgactgaacctctcactgtgcatggtttaagggtcagtttcgacaccccaagactgcctgctgatgaagtgggtaggattcgagccgccgtgcgcaacgtcgaatccctggctgcccagcccgggtatcgcatcagtcacgattataggcatgattataaccggtgcatgggccgtgtgaataagcttctgcgggtcaagcacacacaacacaaggtcttactgcgcaggcttaatgccgtgaagccgctgcctagccgtagggacgtgaatagagccaaggatatggtagcccgattggagatggattttgactccaagaagcacacgcattggtataaatctagatatcaccgggtaatggagcgcctaatcgttctgaatcggatatacgataaaacctcagttcagctgaggtccaaactaagacgactgaggccagtggtggaaaactga

SEQ ID NO: 10742 - RNA, 1194 nt, synthetic construct
  source 1..1194: mol_type = other RNA
atgctgctgaaccctattaaggtgtctaaaaactctgtctcttctcgagaaaacttgtgcaaactgttgcgcgttagcgatgaatttcttacctcagtactggctttgagccaggaggagcgttacacaaagaaggaccacgtcaagaaggctggcggattgagtcggccgatctttaatccacacaggttcctgcggcgaattcagaaacggatcaacatcgccatcttttccaacaattacgttatcaggtggcctcactacatctacggatcaattcccaaccaaaaaaacggcgacggttatgattccaaggactacgtaagctgcgcgggccgacattgtcaggccaagagccttctaaagattgatgtgagtagcttctttgataacatccatgcagatatagtgttctccatcttcaatgattttctgaagtatgatcgcgaagtttcggtgatcctgacagatctctgttgccacaattctcatctagtgcaggggggtctgaccagttcatatatagcttccctctgtctgtatgacgtggagggtgacatagttgagagactgaatcgcaaaggattcacatacacccggcttgtagacgacattacgattagctcgaagagcctcggaaccgattttacttatcctctgaagatcgtgggggacatgctcgtcgctaaagatctccccatcaatgaggggaagactaggatttatcggacctctactgaacccttgacagtccacggattacgtgtgtccttcgactcaccacgacttccggcagacgaagtgggcaggattagggccgccgtcagaaatatagaaagtctggccgcggagccaggctatagaacaacgcacaactacaggcatgactacaatagatgcatgggccgggtaaacaagctgcaccgggtggggcataaccaacatgggccactgctggacagactggacgcagtgaggcccctaccttcccgtcgcgatgtgaatagagccaaagacatggtcgccagactcgagaaagatcacaaaggtaagggccatactcactggtacaaagcaagatactatcgactcatggagcgcttagtggtccttgatagggtgtatgacaagacctgttaccagattcgcctcaaattaaagactctgcggcccgaacgcgaggttgagaaatga

SEQ ID NO: 10743 - RNA, 1206 nt, synthetic construct
  source 1..1206: mol_type = other RNA
atgctagccaatcccctcaaaatctcgaaaaatagcgtttccagccgggagaatctgtgtaagttactccgcgtcaccgacgaatttttggctagcgtaatgaccctgtcacaagaggatagatacacaaagaaggagcacgttaagaaagccggagggattagtcgcccaatctacaatccccataggtttctccggaaactccagaaaagaatcaatatcgcaatcttcagcaaccactacgtaattcgatggccgcactttatttatggctctgtcccaaatcagaagaacaacgatgcgtacgatagtaaggactatgtctcttgtgctggtaggcactgcggcgcaaaaagtctgctgaaggttgatgtgagctccttctttgataacattcatcaggacatcgtgttctcaattttctctaactttctgaagtacgatgaggaagtgtccaggatcttaacaaatctgtgttgccataactcgcatttggttcaggggggcctcactagcagttacatcgcctccctgtgcctttatgatgtcgaaggtgacgtagtggaacgcctgaacaggaaggggttcatctatacgagactggttgatgatattactgtgtcctccaaatcacttaataccgactttacctacgctctgaaaataattagcgacatgctgaccgcaaaggacctcccaatcaacgaatccaaaaccagggtgtttcgcactagcactgagcccttgaccgtgcacggactgagagtctccttcaacacaccgcgactacccgctgatgaggtggggagaatacgggccgcagtcaggaatctcgagtcactagccgaccagcctggctaccgtacaactcacggatatagacacgactataacaggtgcatgggacgggtgaacaagctgctgcgcgtgggccacaatcaacacaaacctctgcttgccagacttaacagtattaagccattgccttctcgtagggacgtgaatcgcgcgaaggacatggtcgctcgattagaaaaagacttcgatgccaaacgccacacacattggtataagtctcgattccatagagtgatggagcggctcatcgtgctgaaccgggtgtacgatataacgtctaagcagctgcgttctaagcttaagcggttgcggcctgaatcagaggacataattgacaaacatgtatga

SEQ ID NO: 10744 - RNA, 1185 nt, synthetic construct
  source 1..1185: mol_type = other RNA
atgctgaccaatcctttgaagttcacaaagaactcaatatcatcaagggagaacctttgcaaagcgctgagaatcccagacgactttcttgcaactgtgttggctctgccccccgacgaccgttacaccaagaaggaccacgtgaagaaagctggggggatttctaggcccatatacaatccacatagatttctgagacgtatccagaagaagatcaacattgctatcttcagtaataactacgtcatccggtggccacatttcatctatggctccgtgccaaatcagaccaacaacgatggctacgacagaaaagactacgtgtcatgcgccggtcggcactgtggagccaaatccctgctcaaggttgacgtttcttcgttcttcgataacattcaccaggacatcgtttttagcatctttaaagacttcctgaactacgagaaggaagtcagcgagatcttaacgaacctgtgttgccataattcccacctggtgcagggagggttgacatcctcctatattgccagtttatgtctctgggatattgaaggcaaagtcgtggaaagactgaataggaaaggcctgacttatacccgacttgtagatgatatcactgtctcaagcaagtccctggaaacagattttacgtacgctctcaagattattagcgatatgctgacaacgaaggacttacctataaatgagtctaagacacgcatctaccgcacctctaccgagcccctaaccgttcatggtctgcgcgtaagttttagcactcccagactccctagcgatgaagtgggccgcattagagccagtgtgaggaacctagaaagcctggcggcagagccgtcgtacaggacatctcatggatatcggcacgattataaccgatgcatggggcgggtgaataagctgcatagggtcgagcacaatcaacacaagcctctcctgatgcgcttgagggccatacgaccattgccttcccgacgggatgtgaatagggccaaggacatggtagcacggctcgagaaagattatgacacccaaagccacactcattggtataagtctcggttccaccgcgtcacagaacgccttatcgtgcttgatagaatttacaccaaaactagtactctactccggtccaaactcaaaaaactgcgtccggtgggagagtga

SEQ ID NO: 10745 - RNA, 1209 nt, synthetic construct
  source 1..1209: mol_type = other RNA
atggtgagactctttccgcagaaagtgtccaccgcaagcatagctaatgtcgactccttgtgccaagccctttctatcccccggtcagtacttgatcaggttctggctctggggctggatgaacgctacaaagaggtaatgcacattaagaaggccgatggaactaaccggcctatctacaatcctcaccatcttctgcgccgcattcagaagaagatcaatgagaggatttttagcgatactaagatcataaagtggccggggttcttatacgggtctattcctaatcagaccggctcctcaggacaggatgtctctaaagactacgtggcctgcgcagctgtccactgtggtgcgaagagccttctgaagattgatgtcgaaagtttcttcgacaacatccaacgggacattgtgctcaacatctttagcaagttcttaaagtaccccgaggatgtggctgacgtgctgaccaacatttgttgctataaaggtcggctggttcagggggccctgactagttcttatatcgcaagcctctgtttgtgggatgttgaagggaacgtcgtgaggcgacttaatctgaaaggcctaaggtataccagactggtagacgacataacagtgagctcagtgggactggctacagacttcagttacgcgaagaagttggtcgaagatatgctcagcgacagggacctccccatcaaagcatcaaagactaaagtctataggatgagtagtgagcccctaacagttcattccctgcgagtgaacttctctagcccccgattacctgccgacgaagtgggccgcattagagccgctgttaaacacgtggaacgcctcgcgtcagagccaaattacatcacgacgcactcctaccgtaaagtttataacagatgcgtgggaagggtgaataagctgtccagagtaggccacaatcaacataaaatcctgctcgcccgcctgaacaaaatcaaaccactcccatcgtttagtgatatacgaagagccaaagccatgctagcacggctgaagtccgactttggctccaagggccatacccattggtaccggtctaggtattacagactggaccagcgtttgaggattttgtcaagacggtatgagcgcaccagcgatcagattcgtgaggagatccgaggtatcaagccatttaagaaacactcttcggagacacactga

SEQ ID NO: 10746 - RNA, 1095 nt, synthetic construct
  source 1..1095: mol_type = other RNA
atgctctcccttcctgacaatattctttacactgagaaggaaatcccgaaagccgggggcaaagttcgcgtggtctacaatccccaccggctgcttagacgcgtgcagaggaagataaacacccagattttctcctcaagcaacatcatcgagtggcctacctacctgtacggatctatacccaatcaggagtacgaggctgagctgaagcatctaaataacaaggattacgtctcctgcgcagctcgtcattgcggtggtagaagcgtcctgaagttagatgtggagtcattttttgacaacgtccatgaagatgtagtccgatccatctttgctgacttcctcaaatgcagtccagaagtgagcgatgtgctgacaagcttgtgttgcaaaggggaacatattgtccaaggagccctgacctcctcttatctggccagtctgtgtttgtacgacgtagagggcacagtagcagaacggctccggaggaagggcttcgtgtatactcgcctggtggacgacatcacggtttcttcaaagaagctcggggttgacttttcatacgccaagagcttaatcgttgatatgttgaaagagaaggacctaccagtaaatgaaggtaagacgaaagtgtatagagcctctaccgctccactgactgttcatggactccgtatcggattcagcaccccccggttgccctctgatgaagtgaggcgaattcgggcggccgtcagaaacgtggagctgttggcgaaggaaaacaattataggacatcgcacgcctatcgccacgactttaatagatgtatgggccgggtgaacaaactcgaaagggtgaaacacaaccaacaccagagtctggtgcgcaggcttaaggatattaagcctctaccaagtattcgtgatataggcagagctaaaaaaatgctggagaggctgcgcaaggactacaaacttcggtcccacacctattggtatcgagcaagatattttaaagtgctcgagagactcaacgtcctgcagcgaacttacgagcacgttgcattcgatttcagggtggagctgaaggggttaaagcctacacagaattga

SEQ ID NO: 10747 - RNA, 1203 nt, synthetic construct
  source 1..1203: mol_type = other RNA
atgaacctcgttggcaataatctagacattcccagaaaaattagcaccggggccatcgcctccctcaattccttgtacaatactcttggctgcaccgaaagcgagatcacgagcgtcctgaatatcccccccgaccaactctacactgagatacgcatctcaaaagcgggcggcaaacagcgggtggtgtacaacccacaccgacttctgcgacgtctccagaagaagataaacgagcagatcttctcaaactcggacgttattagctggccttgctatctctacggatccatcccgaatcagaattatgaagatgggctggagatctattctaggaaagactacgtctcatgtgccgccaggcattgcggggcaagatctctgttgaagctggacgttgaaaacttcttcgataacatccattacgatgtggtgtacgcagtgttttctgactttttaaagtgctcatcagacgtatctgatattttatctcggctgtgctgtaagggggaacacctggtgcagggagctttgacctctagttatctggctagcctgtgtctgtacgacctggaaggagccgtggcagagagattgcgccggaaaggtttcgtgtacacacgtctggttgatgatgtcaccgtgtcctccaaaaagctgaacgtcgactttacctttgctcggaacaccgtggtcagtatgcttgaaggcaaggatcttcctgtgaacgaatcgaaaactaaagtccaccgcgtctctactgtaccactcagcgtacatggcttgcgaattggattttcaactccaagactgcccgcggatgaggtacgccgtattcgcgctgccgtccggaatatagagagtctggcaacagagagcaactacaggacaacacatgcctatcggcacgagtttaaccggtgtatgggaagagtgaataagcttctaagggttgagcattcccagcatcccagccttgctagtaggttagaaaggattaggcctctaccatccttccgcgacatcgcccgagctaagggtatgattgacagattgcgaagtgatcacacatcccgcgcacacacacactggtataagaccagataccacaaggttctggaaagactcatcgtgctccaacggacgtataaacacgtgagctatgagttcagggtggagctcaagggtctgaagcctatatga

SEQ ID NO: 10748 - RNA, 1215 nt, synthetic construct
  source 1..1215: mol_type = other RNA
atgatcgacgcgcggtttgtgaacccaatcaaactttcagctgattctatatcctccgtgagttccctctgcgacgtcctggatatctcccagaaagaattgggggaggtactggctctaagcggcgaggagcgatattctagtaaggaaatcagtaaggccgggggcaagtccaggatcgtccataacccccataagctggtgagaaagatccagagacggattaataaccgcatattcaccgccgagaactacatacaatggcctagctatctttacggctccgtttcaaatcaggagtacgatgtggaggacgatcagacatacctgaacggtaaggattatgtcagttgtgctgctagacactgccaggccagctcgattctgaaactggacgtgcaggatttctttgataacatccacatcgggctagtggaacaggtcttcaaggattttttgtgttttccggagcctgtggctaaagtcctcgccaatttgtgctctcgaaatgaacatctgttacagggagcactgacgagctcttatctcgcctcactgtgcctatgggacgtggaaggcaaggtagcggaaaggctggggagaaagggattagtttacacaagactcgtcgacgacattactgtctcaagcaaatccattaaaaccgatttcacatatgcaaagaacattatcatcggtatgcttgagagtaaagacctgccagtcaatgaagcaaagacacaggtgcacagagctagcactaaaccgctgaccgtccatggtcttcgggttggcttttctactccacgcttgcctgctgatgaagtgaggcgtattcgggccgcagttcgcaacgtggagtcattggcagaggaacccaattatagggtgaagcacgcatacagaaaagactttaatgtatgtatgggaagggtgaataaacttcaaagggtgggacattcgcagtacgacgccctcgtgtctcgcttagagaaggttcaacccctcccatccaaacgcgatattggaagggtaagaagcatgatagaacgactccgcagcgactaccccaaacgagcccacacctattggtacagggtgcgtttctataaggttcacgagcgtctgaacatcctgaagcggacctaccggcacgaggccctggacttccggattgagctcaaggccctgaaacctcccaagtctggccaatga

SEQ ID NO: 10749 - RNA, 1191 nt, synthetic construct
  source 1..1191: mol_type = other RNA
atggccgtcttggttccttacaaaaaaactaacacatccatagggtcgatagagagcctctgtggcaccctgggcataacccaggaggagctagcccgtgctatcgctatgcccctggtgatgagatacactacagtagaagcgcaacccaaagctgacgggtccgtccgcagcgtttcaaaccctcatttccttattaggaagatccagagacgtctgaacaaacgcatattcagcaacggtgcactgattggctggcccgattacatttttggatcaatcccgaatcaattcgacgctctcggggtggaggccgacaaggattatattgcctgtgcagcccgccattgcggcgctaaaagtatcctccacctggacgtccagagcttctttgataatatccatcgcactcaggtacttgcaattttcgaagattttctgaagtactccgaggccgtctctgatcagctggcggacatctgctgtaatggagagaacctcgtccaaggtgctctaaccagttcatacttggcaactctgtgcctttgggatgtcgaaggtgaaatggtgaaccggctgaaccggaagtcgttgacatacacgcggtttgtcgacgatatcacaatttcctccaaggtggccagttatgactttagctatgcccagggaatcgtgcaggacatgctcgcctcaaaagacctccccatcaattctggaaagacgagagtgcggaggatctcttctgaagccctgaccgtgcacggccttcgcgtgaattttagccagccaagattaccaagtgatgaggtgagaaggattaggtctagtgttcaaaatgtggaaaagttggcagtagaatccaactatcgccagtctcattcctataggaaggacttcaatcggtgcatgggccgagttaataaattaaaacgagtgggacacaaacagcacgctgaccttctgaagcgcctccgagagatcttaccactgcctagcttcaaggacattgagcgtgcacacctcatggttgcgaggctgaaggattcataccaggctaagggggattctttttggtaccggcgaagattctatgcaacccacgaaaggttgaccattctggatagatccttccatgccatagccgtgaagctgcggggggagcttaggctgatcagacctagctatgactga

SEQ ID NO: 10750 - RNA, 1227 nt, synthetic construct
  source 1..1227: mol_type = other RNA
atgtcatacaaatatgatttcggcaaacgctcgaaaaggtccattggctctattgcaaagctaatcgccgtactggatattactcaaaaggagttggatatcgtgaacctcctgaccgaaacacagaaatacaagaagaaagaaactgtgaagagcgacggtaccgtcagagtggtgtacaacccggacaagactctccggaagattcagcgccggattaacaaacgaatctttaaccagcgcggaaataagggagggcttatatcctggcccaactatatctacgggtccatcccaaatacgccacaatacaactctaatcagaaaaacctggatttctctaaggactacgtggcctgcgcggccaatcattgcggctctaagtctttgctgaagatggatatatcagacttcttcgacaatatacacagtgtccatgtgaagtccgtctttacagacctcttaaagatccccgacgacgtcagtgacttgttgaccgctctgtgttgcttgaaaggaaacgttgtgcagggggcgcttaccagctcgtatatcgctagtgcagtgctgtttgatgtggagggtgacgttgtgcgtcggctccacttcaaaggccttacatatacacggttagtggatgatatcacggtatcttcccagaagcttaattatgagtttacatttgcccaaaacctgatagccgacatgctgtcaaaaaaggatctccctatcaacctgaataaaaccatcattagcaactgtagcactgaagagctgatcgttcacggtctgagagttaatttcaaggagccacgactcccctcttccgaggtcagtaggattcgagcaagcgtgaagcacctcgagctgctaagccaggactcaatttaccgtgtaagtagggattataggaagtcctatgatagatgcttgggcagggtcaataaactggggagattaggccacaaacagcatgccactttactgaccagggttctgagaatctggcctcttcctaacaagaaagatattaatctcgcaagcaacctgataaagaagctcgagggatggcacctgaccaccaaagctgacgaatactggtactaccgcctgtgtaataaggcccattcagaactaaatatcctccagcggagctatagcaaaacagctctttccctgcggaagagacttaaaaacattactcccaatcgcgaagactacctgtga

SEQ ID NO: 10751 - RNA, 1014 nt, synthetic construct
  source 1..1014: mol_type = other RNA
atgagttataaatacgattttgggaagcgctcaaagagaagtatcggctcaatcgcaaagctactcgacgtcctggatattaagcaagaagaactcgatctggttaactcactgacggaagaccagaagtacaaaaaaaacgaaatccccaaaagcgatggtactgttagggtggtgtacaacccacataagacccttcgaaaggtccaacgccggattaataagaggatctttaatcagcggcacaataaaggaggcctgatctcttggcctagctacctatacggaagtatccccaatactccacagcagaacagcacaacaaaaactttcgatctcagcaaggactatgtggcttgtgccgcaaatcactgcggttcgaaatctctgttgaaaatggacatcagcaatttcttcgacaacattcacgaaacccatgtaaagaacatcttctccaatttgctcaagtttcctgaggacgtgagtaatacccttacttccctgtgttgcctgaaaggcaatgtcgttcagggagccctgacatccagctatatagccagcgccgtgctctttgatgtagaggcgcaagtggtcaggcgactacacttcaagtccttaacttacacccgtttagtcgatgatattaccgtgtcctctcagaaacttaactacgactttacattcgctcagcggcttatagcagacatgctgcagtccaaggacctgcccatcaacctctccaaaaccattatatttacgtgttctaccgaggagttaattgtgcatgggcttagagttaactatagtgagccacggttgccttcttctgaggtcgccagaatcagagctagcgtgaagcacctggagctgttggctcaagattcagtgtacagggtatcacgcgactataggaagtcgtatgaccgttgcctcggccgcgtgaacaaactgggcagactggggcataaacagcactccattctgttggagcggacagtgaagataaagccgtga

SEQ ID NO: 10752 - RNA, 1203 nt, synthetic construct
  source 1..1203: mol_type = other RNA
atggcctttagatacgatttcataaagcggaatcgtaatagcatatcctccatcccaaatctgctggatgctctgggaattgagcaagtgcagttcgaacagttccaaaacttacgcgacctggataaatacaaagccagtagcgtgccgaagtccgatgggaagatccgcacagtttataatcctgcccagctgattcggttgtttcagagacgaatcaacacaaggatatttcaccctaaacattctcaggggggtcttattacctggcccagttatctatttgggtccatcccaaataacccccaatcacccgagtctagtagccgtaactatatcacctgcgctggaatgcattgcggcgcaaaatctatcctgaagatggacatctctgacttctttgacaatatccaccatagagaggtcatcaacattttcgaaaagttgctgaagttcccaaacgatgtcagccgcacgctggcggacatctgttgccacaagggtaacgtagtgcaaggtgctttaacatcctcatacatagcgtctgccgtattgtttgacgtggagccaaatgtggtacggcggatgcacgagaaacacttggtctatactcgccttgttgacgatattaccatttcatcgaagatctacgattatgatttcagctacgccaagaacattgtcattgatatgctcaggaaaaaggggctccctaccaacgaaaataaaaccattgtgatcaactcttccacaaaggaaggcttagtgcacggcctccgtgtgtgttttaaagagcctcggcttcctgctgatgaagtgggaaaaatcagggcatcagtccagcacgtcgaacgcttcgcaagggacgccgagtacaggactagtagggagtatcgaaggatctataacagatgcctgggccgagttaatcgcctcaaacagctgggccataatcagtatcagaacctcaaggacagacttataaagattgaaccgaagccctgtaaggctgacatcaaaaaagccagaaacctggtgagaaaggtgaagactctccataaagactacggatccggctaccgatatcgccggctgtactacaaggcccaatacgagctgaatattctacagcggactttcagcgttacggcagacagcctgcggaaacagctcagaagggtgaagcccacctacgagcagtga

SEQ ID NO: 10753 - RNA, 1227 nt, synthetic construct
  source 1..1227: mol_type = other RNA
atggagaatacactcaactatcgaaagcggtatacgagcagtatcgggagcgttagcaacctcctctcatgccttgacatcacgcagcaagagtacgacgctttttgcgctctggcttcagaggagaagtacaaatcttttaaactgcccaaacctgacggaacaagcagagaagtgcatgctccacacaaattggtgcgcaagattcagcggcggattgtccgacgaatattcggctccccgaacagaaatcagtgggataagaagaggcctaaagggggagccatcatctggccggagtatatctatggttccgtacccaacgattactataacaacaccccaatctccaaagattatgtggcttgtgcctctaatcattgcggatgcaagtcaatattaaagatggacctgaaggatttcttcgataacatcacccctgatctagtcttcaatgtgttcaacaatctcctgaaatatcctcgcccagtcagcaatgccttagtgaaaatctgttgtcacaacggcaagctgattcagggcgccctgacatctagttacatagctagtgcagtcctgtttgacgccgagcctaaactggttaagcgtttgaaatcgaagaatctgatttacactcggcttgtagatgatattaccgtgagcagccttaaccaagattacgacttctcttatgcaaccgagttgattcgtcaggtgctgtacgaaaagaatctaccactgaacgagtctaaaacaattgttttgagggtcagcacttccgacatcctcattcacggccttagggtgagtttttccaaaccacgcctgcccgccgatgaagtatcgcgtatccgcgcgtccgttaagaatttagaatcccttgcaaagattgccgactacagggtgtcccgcgactacagaagaagtttcaatcgatgcctgggtagggtgaataaattgaagagacttggccacaaccaatacaaagcactccagcgcagggtgatcaaaatcctgcccatgcccagcagaatggacataactcggttggactcttttgtctacaagctggaagggtggtatcagaatcactctgattcatactggtacaagaggctgtatcatcgggcatactatgatctcaatattctcaacaggacctttaaggcgtcagccgaaaagctaaaggcccggctcagactgatcaagcccaactgtgacgactga

SEQ ID NO: 10754 - RNA, 1227 nt, synthetic construct
  source 1..1227: mol_type = other RNA
atggagaataccttgaattataggcgtagatacaagaactccatttccaccgtgtcaaatcttctgtcttgcctggatgtatcgagttcagagtacgaggactttaaagctctggcccacagcgatcgatacaaggaattctatgttcctaaagcagacgggacttccagacatgtccatgccccgcacaagttagtgcgaaagatccagcgcaggatcgtccgccggatttttggtagcccaaaacggaatccttgggataagcatcgcaagaagggcggcgcaatcatatggccagaatatatctacggcagcgtgccaaacgattgctacaacaatacaatgatctccaaagactatgtcgcttgtgctagcaagcactgtggatcccagtccgtgcttaaaatcgacataaaggactttttcgacaatatcactccagagctggtattcaacgtttttaacaagctgctgaagtaccctagagcagtggctaatgcactagttgacatctgctgtcataataacatgctgatccagggggccctaacttcctcatatattgcgtctgccgtcctgttcgacgttgagccggccatcgtgcaaaggctgaagtctaaagggcttagctacacaaggttggtggatgatattaccattagcagtagaaaccccgaatacgatttttctttctctctggagcttgtgcgccagatgttatatggcaaaaatttgcccctgaacgaaaccaagacaaacattattcggagctccacaattgatatactcatacatggcctgagagtgagttttaaggagccccgcctccctagtgacgaagtgtcccgaattcgagctagtgtcaaaaacctcgagtcgctggccaaaatcgccgactatcgcgtctcaagggattacagacgttcattcaataggtgcctcggtagggtaaacaaattgaagcgtctaggacataaacagtatatctcactccagacccgggtgctgaacattctgcccttacccagcaaaatggacatcacgcgcctcgactcttttatccacaaacttgaaggatggtacgccaaccacaaggaggaatattggtatcggcggctctaccaccaagcgcactacgatctgaatatattgaacaggacgttcgagcacagttctcggcggttcagaagcagactcaatgatattaagcctatgtgtgacgattga

SEQ ID NO: 10755 - RNA, 1224 nt, synthetic construct
  source 1..1224: mol_type = other RNA
atgacatccaaatacgagtaccacgtcaggaaaagaaccaaccggtccatcccatccataaagagtctgaagcgcgctctgtcaatctctgatacagagatcgacagtttttacgagctcattaaagaaggcaaagcctataagagggtcctgggacatttgaagtcttctggggatgagcgtctcgtctatgatccccacccactcgtccgcaagatccagagattgatcaattcacgagtgttcaatcctcgtaaacctaaggagggcctaatagtgtggcccccttacctctacggcagtgttcccaataccgtgaaagtaattaaaggaaaggtggaagttacgtctcgagactacattagctgtgctaagaaccattgcctgaccaaatcgatccttaaaatcgacattaaggacttctacgagaacattcacaagagcgacgtgttcgacatttttagcaaggtgctaaaatacccagatgacgtttcaacacttttggcagacttttgcacttataaggataaaattccccaggggggtctgactagttcctttatcgcaagtgctgtgctgcacgatgttgaacctaagctggtacagcggctccacaaaaagaagttgatctatactcggttagccgatgatatcaccgtgtcctcatttacaaacaactacgacttcaatctttgcatctcattgatcaaagagatgctcattagcaaggacctcccaataaacgaagataagcttgtcataagcaatcactccaattctgcgactttagtgcacggtctgcgggtaaatttcaaggagcctcgactgccggaagacgaaatctccaaaatccgggctagcgtgaggtctttggaaaagctggcccaggacagtaagtaccgcacctcaagagattataggaggagccactctatttgtatggggcgcgtgaacagaatgcaatcgataggacataacaaagcaagacaactgatggttagggtcctgaagatcttacccctcccgtcctaccaggatattattacgagccataaactcgtgtataagcttgaaaaatccttcaaaaaggacaagtgtgagtacttttataagcggctgtataacctggcccagtatgagctgaatattctgcagaggagcttctctcgcgaggcccatgagctacgcaacagactgaagagagtgaaaccaaatgaagtctga

SEQ ID NO: 10756 - RNA, 1224 nt, synthetic construct
  source 1..1224: mol_type = other RNA
atgaagacccacttccaataccacataaagaaacggactaataggtcaataccctccatcggtgttctcaagcgcactctttcaattaccgatgaggagttcgattctttttacaccttgatagcgaacgacgacgcgtataagaaagtgagtggtcattttaaatcgtctggggacgagcggttggtgtataacccccaccccttggtgcgcaagatccaacgaatgatcaattcacgtattttcaaccccaaaaaacctaaggaaggcgtcgtgatctggccaaaatacttgtacggctctgttccgaatactcttaaatgggtggacggaaagctggaagtgttccatagagactatatatcttgcgcaaaaaatcattgtctgacgaagagcatcctgaaggtcgacatttctgacttttacgagaacattcattggcaggatgtatacgagattttcaataaggtcttcaagtatgcagatgatgtctcaaaggccctggcagatttttgtacatacgataataaggtacctcaaggagggctcacaagcagctttatcgccagcgctgttctacacgatgtggagcctaaacttgtccagcgcctccataagaaaaagctcatctacacaaggttagttgatgacatcaccgtcagtagttataccaagaactacgattttactctggccgtaggactgatcaaggagatgctgctgtccaaagatctgccgattaacgaagagaaactggtgattagcaaccactccaacagttcaaccctggtccacggcctgcgggtgaacttcaaacagccacggctcccagaggacgaagtgtccaagatccgcgctagtgtgagaagcttggagaatctcgctaaagactccaagtatcgcacctctcgggactatagaaagtcccatgccatgtgcatgggcagagtgaaccgaatgcagtccatcgggcataaccaggccaagcagttacttaacagggttttaaagattctgcccctcccatcctaccaggacataattacggctcacaagctggtatataggctggagaaaaactttgaaaatgacaaaggcacatactcgtacaaaaggatctataatcttgcccactatgaactaaatctgcttcagcgttctttcagcagccacgccaaaggactcaggctaagactgaaggaagtgcgacctaatgaagtgtga

SEQ ID NO: 10757 - RNA, 1161 nt, synthetic construct
  source 1..1161: mol_type = other RNA
atgaagcacttagaaaaagtgccatctgccaaatctataggctctctgaacaagctctcccacgctcttggaatcgaaaaaagcattctgatcgatgtcgcagagtccatcggaggataccggaagtcggagcgcacaaaagataatgggaaaattagagtggtctactcaccatctagaatagtacggaagatccaaagcgccattaatgaacggatttttacagatcccaggatcatttcctggggcgagtatctgtacggtagtattccgaatgatgagtatgtcacccgcgactatatctcatgcgcggcccggcacggcatgtgcaaaagcattttgaagatggacattagcgactattttgataacatccatgaagacgctgtgttcgatgtgtttaacggcttcctcaaatatcccaatgacgtgagcaccatcctcgctggcatatgtacccacgagggcagggttcctcagggaggactgacgagtagttacctagccaacttagtcctctacgacgtggaggagatcgtgatcaacaagttagagaagaagaagcttacctacacgaggtatgtggatgatatcacagtctcatccctgtcttacgggtatgacttcacttacgcccaggaccttattaagaacatgctgcatgggaaaggttttccagtaaatgaagaaaagtgtgtcatcgaaagaagcgggactattggactgagtgtgcatgggctgcgcgttggttacgaccgccctagactgccaagggaggagatgagaagaattcgtgccaacgtgcagaaagtggagatcatctctaaagagcctgggtaccgaacaacccattcctataggcgagactttaatcggtgtatgggcagagttaataagttggttcggctcaagcacgatcagggcgctaaattcataaagcggttgaacgcaattaagcccttgccttccatcaaagacatcaatcgttgccgcaagatggtatggttcctcgcaaaagattacgagaacaaaaagaggcgtctgtcgtatgaacgacgattttacatatgccacgaacgcctgaacatactgaagaggtcattctatcaggaggaacaatacctacgctccaatcttaggactattagacccgtgagctga

SEQ ID NO: 10758 - RNA, 1269 nt, synthetic construct
  source 1..1269: mol_type = other RNA
atggataaggtcttccttgacagcagctatagtatgggccgcccctcgttgttggtcaggtcagaaaacatggaactcatcgattactatgacaaggacagcgggaactcaatcagctctataaagaacctctgtctagccttggacatcaatgagtctgagttagatgagatttctcagctgggagatgaccggtacgtgaaatccgaggttccaaagtcctcaggaggagtgcggatagtgtataaccctcacagaaccctgcggaaagtacaaaggcgtatcaacaacagaattttcaacccgaaaagtggggcgatcattcgctggccaagttttatctatggttccatcccaaaccagcaccttttgcatggagagctcgagcacaaagattatgtggcttgcgtgaaaaatcactgtctgaggtcttctattctcaaggttgatgtgcaagacttcttcaataacatccatatagaccacgtcgtggaaatttttacatcgttcttcaagtaccccgatgatgtaagcaactgcctggcagagctctgttgttataaggactttgtggtccagggggccctgacctcctcctacatcgcatctctgtgcttgttcgacgtggagccagatgtggtccgtagagtgaagaggaagggcctggtgtacaccagactcgtggacgatatcaccatttcatccatggatagggactacgactttagctatgttaaatccctggtcatagatatgctgcatgaaaaagaccttcctgtgaacgttgagaagacaaacgtatttagagtcagtgaaggccctcttctggttcatggtctgcggattagctttcaggagcctcgtctgcccgccgatgagataagtcgcattagagcaagcgtcaaaaatgttgaacgactagcttcagaacccaagttccgcacgactcacgcttaccgacaggactacaacagatgcatgggccgagtaaataagctaaaacgcgtgggccacaatcagcacaaaaagctcacagaacgcctgctcaaagtccatcccaagccctcaaagaaagacctgaaacggattaaggtgatgatctctactttagaacgagattatgagaagaagggggacaattattggttttacaaacggttctatcgcgcccaggagaggcttaatctgatcgccaagagctacccaaattacgtgaataaactgaggcctcggttaaagaaggtttttccgaattacgacaaatcctga

SEQ ID NO: 10759 - RNA, 1200 nt, synthetic construct
  source 1..1200: mol_type = other RNA
atggaggttatcgactacttcgcgaaagacagcgacaacagcatttctagcatcaagaatttgtgccgtgccctagatctgaccgaatcagaaatcaacgaagttcgcgccctgggcagtgactcttatatacagagtgagattcccaaatccagtgggggcctgagacgcgtctataaccctcactacaaacttcgaaaggtgcagcgccgtataaacaacagaattttcaaccccaaatccggagccattgtccactggcccagtttcatctatggaagcatacctaatcagaatctgcttgatggggacattgatcataaagactacgtggcttgcgtctcaaatcattgtctgagcagaagcttgctgaagattgacgtgcaggacttttttaacaatatccacattgaccatgtgaccgacatctttaagaatttcttcaagtacagcgatgacgtttcggaatgcctcgcagagatctgctgttataacggatttgtggtgcagggggctctgacttcatcctacatcgcttctctgtgcctattcgacatagaaccagaggttgtcaaaagggttagaagaaagggcctgcgctacacgcgcttggtggatgacataacagtctcttccttggaaagggactataactacagctatgtgaagaacttgatcattgatatgctccatcagaaagacctgcctatcaacgaggagaaaacaaatgtgttcagggtgtcagaaggtccgctacttgtgcacggtcttcgagtctcattccgcgagcccagactcccatctgatgaggtgagtcggatccgggcgtctgtgcggaatctcgaaaagctcgcatccgagcctaagtttagaacaacccacgcctaccggaaggattttaaccggtgtatggggagagtaaataagttaaaacgagtcggccacaatcaacacaggaagctgatcactcgcctgctgaaggtatcccccaagccatccaaaaaggatcttaagaggattgaggtaatgctcgagaggctggagcgtgattatgataaaaaggccggcaattattggttctataagcgattttaccgggcccaagaaaggctcaacctgattgcaaaatcgtacccgaacttagctaaaaatttaaggctgcggctcaaatgtgtatttccaatctacgataagcattga

SEQ ID NO: 10760 - RNA, 1200 nt, synthetic construct
  source 1..1200: mol_type = other RNA
atggccacagatgtactgttcaagaaagtttctgctccaatagtgtcgattgagaagctatgcttggcactggacatctcaaaggaggagttgaatgatgcactcaagttaactagctctgagagatacacgaaatcagaagtcccaaagcccaacggaaaggtgcggatcgtccacaatcctcataagctgatccgtaagatacagcggcgaatcaacacaaggttgtttaacccaaagcctacagggaggggtgtggtggaatggccttactatatctttgggagcgtgccgaacgtgaaagatcctattaaacccattgagcgcgattatatcgcctgtgcccggcagcactgtctgtcacagtccatcttgaagattgacatcaccgatttctttgacaacattcacatcgatcacgtctactatatcttcagacatcttcttgactacagtgacgaagtatgcaatgttatctccgatatttgcagcctgaatggagccctgctgcagggcgctctgactagctcctacctggcctgcctctgcctcttcgacgtggaacctaatgttgtgattcggctccagcgtaagggccttcgctacacccgacttgtggacgacataactgttagcagtattaaagacgggtatgacttcaccctggcgaaaaacataattgtcgagatgctggagtccaaagatcttcccgtcaatgatgcaaagactcagattatacacaaatcttccgtgccactcgtagtgcatggcttgagagtaaacttcaaggaaccgaggctgccctcaagcgaagtctctaaaattcgcgcaagtgttaagaatatcgagcaactagctaaagagaggcattacatcacgacacatgcctatagaaaggatttcaatcgatgtatgggccgcgtcaacaaattaaagcgtattggtcacaatcagcaccaatcgctcgtggaaagactcaggaagatactgcccctgccttctaagaaagacattgaacgctgtaaagagatggtgagtggcctcgagagcgattttccaaacaagaagggacatttttggtaccacagacggttctatcgcgcgaacgagaggatcaccatcctagaccggacctttaaatccatcgctaaagaactgaggttaaagatgaaggatatcagacccctgtataaagactga

SEQ ID NO: 10761 - RNA, 1200 nt, synthetic construct
  source 1..1200: mol_type = other RNA
atgttcgacaggtttacctttagcgcagccaaggcgccaatcaccagcatcgacaagctttgtgagactctttccgtctcccgggaagaactttacgatacattggaccttcccgacgaactgaagtatacagaaacccaaatcccgaaatcttttggcaaagttcgaaaagtccataacccacacaaaaagctgaggaaactccaacgccgaatcaatagacgattatttaaccctaagggcaagagtgatagcgttataaactggccggtctatatttacgggtccgtgcccaatcaagagatcgagggagtcacatacaatcgcgactatgtcgcttgcgccaggcagcactgcggaagtcgttctattctgaagctggatatttctgacttcttcgacaacgtccacgaggatcacgttaaaaatgtgttcgctaacctactcaagtacgaggaggaggtggctgaagtcttgacccagctctgttgttttaacggtagtctcgtgcagggcgccctgactagcagcttcctggcatgcctgtgcctctacgacatcgagccaaagctagtgaagaaactctcccgcaagaacctgcggtatacgagacttgtagacgatataacgatcagctcaactcagccacacttcgacttttccatggtaaaagacatagtgctgcggcagctgtacgaaaaggatctccctgtgaacaaggataagatcgtagagttgtattctggcacttcacctatgcttgttcacgggctgagagtgaactacagcgaacctcggctcccatctgaggaagtgtcacggattagggcagcggttaaaagaattgaactgcaggctatcgagcccaattataggacatcccatacatttcgcaaggatttcaaccgtaccttaggaagagtgaacaagctcgcccgtatgggtcataatcagcataagaagttgagtgcacgcctgtcgaatgtgcgacccttaccctcaaaaaaagacatcgagagatgttggtccatgctggccagactgcagcgcgattacaattcacagaagaattcttactggtacaaacggaggtatcacagactgagtgagaggttgattatactgaaaaggaccttccataagactgaagcccggattcgcgaggccctaaagaaaattaaacctgggttcgtggattga

SEQ ID NO: 10762 - RNA, 1278 nt, synthetic construct
  source 1..1278: mol_type = other RNA
atggcaaacgtctatactgacgagatggagctgtgccagttgccactgaacaacaagtacaacttcaagtacataatcaactcaggcccaatcaagtctattcaagatctgtgcgagaaagtgctggacatccccatcagtgaactctacaaggctctttcaatagcggaagaggagcgataccaacgggcctctgtgccgaaaaaagacggcacaatcagagtggtctataaccctcattacctgattcggaagatccagagaaaaattaattcccgcatcttcaatccaaaggtcaagttaggcaagaatccaggtgtgattaagtggcccccctacatttttggatgcattccgactcagtatcaggaggtcgacgaaggggaactgatcaccgacagtagggattatattgcgtgtgccaaaaaacactgtctgtccaagtccattcttaagattgacatatccaacttcttcgacaacgtgcacaagtctatagtagaggacattttcaaagaactcctgaagtatcctgatgacgtggccgaggtgttggccgatatctgctgtaaaggcgagcatctggtccagggaggacttaccagctcatacctagcatccctcgccctctgggacgttgaacccgaggtggttaaacgccttaacaataagggcctcaagtacaccagactgattgatgatataacagtttcgagcaagaaacagaattttcagtttgacttggtgaaggatgtaatcgttaatatgctacacaacaaggacctccctgtaaacaactcaaagacggaagtcagctacgctagtaccaagccactgatagtccacgggctgcgcgttaatttcaaggagcccagactgcccagcgatgaagtgagccgaatccgggctaatgttcacaacgtggaaaaattggcaaaagagcgacactaccgcacgatccacccttatcgcaaagatttcaataggtgcatggggcgtgtgaacaaactaaaaaggctcggacataatgctcataagcctcttttgaagagattacaagctatcttgcccctcccaagtaagctggatatttctaggtgtgaaaaaatgatcactcggctggaggccgattttgacaaaggtaaagggaataccatctggtattggagaaggtataatcgggcaagccagcggctcatcgtattaaagcgtacatttattcatcaggccctggattttcgtgagaggctgaaaaatgtgaagcctacagtggtgtga

SEQ ID NO: 10763 - RNA, 987 nt, synthetic construct
  source 1..987: mol_type = other RNA
atgacctatcgaatgtattttgaaaggaaagtctcagggcctatcgatagccgagctaagctttgccaggccctctctatcggggacgaagagctgacacaagcattggcattgaccgaagccgagcgttacaccgaatcaagtgttcctaaggctgatggaacaacgcgcacaatctataaccctcaccacaagatcagaaaactccagaggcgaatcaatactaggttctttaatccttcgaagaaaatccacggaaatgatagcggcattatccggtggccaagttacatttttggttgtgtgcctaacgatataggcgacgacggcgaaaccgaggtacagaaggactatgtggcatgtgcaagagttcattgtccaagcaagtccattctcaagatggacattagtgacttctataacaatgtccaccgcgacttggtgttagaagtcttcaaggatatgctgggtttcacggacgatgaggtggcgtccttactgactgatatttgctgcaaaggcgattcacttgttcaggggggactgacctccagctacctggcctgcctggccctatacgacgaggagccagaggtggttcggcggctcaaacgtaaaggtttcaggtacactcggctgattgatgacataactatatcctctcccaacgaaaacgtgaactttgactacgtcaaggatttggtggtgaacatgctgcacgctaaggagctccccgtgaaccgcgacaaaacaaaggttcaatacgtatctacagagccgctgctggtacatggccttcgggtgaacttcaaagagccgagactgcccaaaggagaagctgcgagaatcagggccaatgtgcataatgtggagagactcgccaaggagagacactaccgcaccattcatccctataggcgcgattttaataagtgtatgggccgtgtcaataaacttgctcgggtcaaccccccactagccgggtga

SEQ ID NO: 10764 - RNA, 1209 nt, synthetic construct
  source 1..1209: mol_type = other RNA
atgaccaccgcactgatcaatgacaagatcaagaagagcaatagcgccctcatagggaacttcaagaatcttcttcacgcactcgagatctctgatgacgacgtcagcaagttgagggcctttctgccccatgacaggtacaaggaaaaaacaatcaagaagaaggacggatccgaccgtaaggtgtatgcccccatcccagtgctcaagaaaattcagaacagaatcaaaaaccgcatccttgctaatcaggatgttatatcttggccatcctacatcttcggttcaatcaagaaccagaaaattgagggcgggggtatcgatagtcgggactacgtgagctgtgccgccaagcactcaggcgccaagagtctgctgacagttgacattaaagacttcttcgataatgtgcacgaggacatagtggcagctgtgtttgagcgctacgtctcgacagataaagaagtgattaattggttgctcgacgtatgctgctacgagcaacacctggttcaaggagcccctacctcttcttatttggcgaacatgtccctatatgacattgaacctcagctggtccataaactggccagaaagggcctgatctatactcggctggttgatgatatttccgtatccagcaagatctatgactacaactttagctacgcattgaaactgatagaggatgccttatcagaaaaaggactctacctaaaccctgagaagataagtcaaaggtcagtggggtcagcgcctctcaccatgcatggactgagaattgactatcagactgctcggctgcccgcagctgaagtagggcagattcgagcgcacgtgaagaatctagaggatgccgccaaaagttataaatctaggacctcctatgcttaccgccaggattacgctcggtgcatgggcagagtcaacaagctggcacgagtgaagcacaaccagcatagtaaatatctcgctagattaagggctatccagccactgcccagcggcaatgaatccacatactgtctcaagaagttagaggtcctggagaaaacttatcttgaagcaaaggagacgttctcctaccgtaaaaacttttaccgcttgcaagagaaaatcaatattctgtcgcggagctttccgcgctctgcggaagatatgaaaaagcgaatgaagcttattgccccaccgcccaaagatggtaaatga

SEQ ID NO: 10765 - RNA, 1218 nt, synthetic construct
  source 1..1218: mol_type = other RNA
atgagccgaccaaccatccgcaatagtgcacccatcaatacactggaaaccctcctaaaaaccctgagtatatcttccgatcagctggaagaaatccttgcattgtctgccggtgagcggtacactaaacctctcaatgacgttcacaagaaggatggatcaatacggaaaatcaggtgtccacatcattctctgcgagtgattcagcggcgcatcagcaaaaggctgatatacgacaaggtgatctggccagagtatctgtttggcagcattagaacccgggattatgaggacttatcggagagggattacatcagctgcgcggccaagcattgcggggccaagtccttgattaagattgacgtggagaactttttcgataatgtgtcaagagaaacggtggttgggatttttaaagacctgatcagatgctccgacaaaaattccgagctgcttagtgagatttgttgctatgaggacaatctcgttcagggggctattacaagctccgcattagcgatgctcgccctgtgggacattgagggcaaggtcgtcgatagactcgctcggaagggcctagtatatactagattagtcgacgacataactatcagttctaaatcccataacttcaacttcgatcacgccctgaatatcgtgaaacaaatgttgtacgaaaaggatctgcccttcaaccaagccaagaccaagatcgaacgtctgtcctcagaagcattgacggtgcacgggctaagggtcgcttttaaggaacctagactcccgagcagcgaacctcgggtcatacgaagttacgtacagcgactcgaaaaacttgctagcgacggtttccacaggcgtacagccgattaccggaaggattacaacagatgtgtgggcaaggtggtcaaactgcacagggtgaagcacaacaagtaccggcccctgaaagaccgattggatagaatcccaccgcttccttcaaagagggaccttaaggtggttgagaagctgatctgtcgcctggagagggattataattctgagacaaaaggaattggtggaggaaagtatcaggacacttactggtacaaaaagcgttattctcgcattatgtatcgcctgtcaattgtaaaacgctcctacaagaacaaatatgacgagtatatcgagcgccttgacaaggtgaaacccgataccaaaggcctctacaacgattga

SEQ ID NO: 10766 - RNA, 1203 nt, synthetic construct
  source 1..1203: mol_type = other RNA
atgatcgacccacgctttcctctattcccagagaagaccaccgagaaaagcataagcacactccagtcactggccgacgctttcagcatccctctggccgacctggaaaaagcccgccagctgagccccatcgagcgctatcgagcgaaagaaatacccaaggccggtggaggaattaggcaagtctacaatcctagctacctgattaggctcatccagtctagggttaacaaaaggatttttctggacctggtgcgctggccgggctatttgtacgggtcattacccaatacttatatcgacgatgagcctgtgtatcgggactacattgcatgcgctaaaaatcactgcctctccaagagtctgcttaagattgacatctcgaactttttcgacaacattcacagagatcatgtttaccggatcttcaacggcctgctgaagtttcctccaccagtaagcgagtatctaacggatatatgctgttatgaggattttctcgtgcagggtgctctgacatccagttatctggcaaccctctgtttttggaattgtgaaggagatgtggtgaaacgtttgtcaagaaaaggactggtttacacaagacttgtcgatgacattaccgttagtagtcggagacatggcttcaatttcgactacgctgagcaccatatcaagatgatgcttatcgacctggacttacctgcgaacgacagaaaaaagcagatactcagggatgggattgaaccccttcacgtgcatgggcttcgggtgaattaccagactccccggcttccagccgatgaagtgcgacggatcagatcagccgtgcataatgtcgtaaagatggccaagatcaataactacagaacatcttcctcctatcgctcattgcacgaccggtgtgttggtcgggtgaacaaattggcacgcgtaggccacaacaaacacaagatctttaaggaccaactgttaggcgtgctccccctaccgtctcgaagggatgtcgagaaagccgagggcgctatttctttcctggaatccctcgatagaagccgaatcaaggagaggagatacactaggaagtaccacctcgtgcgttacagggtcagtataattgcacgtacctatgaaaaggaggcacgctctttcgaatcccgattgtacgccctgtctgattgcgtcgggtcctatgattggtga

SEQ ID NO: 10767 - RNA, 1203 nt, synthetic construct
  source 1..1203: mol_type = other RNA
atgattgacccacgatttccactgttcccggagaagacctcaaaacaagccatttcttctctggaaagtttagccgaagcactgtctgtgacagttaaggatctcgaggaagttcgctcccttgaaagcgacaagtgttataggttgaaggagatcccgaagaatggcggcggactcaggaaagtctatgacccccaccctctgattcgccgtctgcagtcaagaatcaacaaaaggatctttctcgacctgatacaatggcccggataccttttcggttccctgcccaatatcaatattgacggacagctcgtaagtcgcgattacattgcttgcgcacagaaacactgcaaagctaaatctctcttgaaggtagacgtaaataactttttcgacaacatacaccgagatcatgtcttcgacatctttcgcatgtttctgaagttttctgatgaggtgtccaattgcctcgctgacatatgctgttataacggtttccttgtgcaaggcgcgcttacgtcgagctacatagctacactctgtttttggcagaatgaagggtacgtggtgaaacggttatcccggaaaggtctgatctacacacgactggtcgatgatatcactgtgagctctaagcgccacgatttcaacttcgaatatgcagaacaccacattaaaatgatgttggtggacttggatctccctgccaataagcggaagcgtgaaatcctacgcgatggaatcgagccactgcaggtccatggcctaagggtgaactacgccagtcctaggctgccagccgatgaggtcagacgtatcagggccgccgtgaagaacgtggtccggatgtccaaaattaacaactaccggaccagcctatcatatcgagctatgcacgatcggtgtatggggcgggtaaataaattagcgagggtggggcataacaagcatggggacttcaagagagagcttgttgacgtgatccccctgcccagtgttagagacttagagaaggctgagagctccattagcttcctggagaaattggaccctgagcgcctcaaactgcggaagtacaccagaagataccatctggcaaagtacagagtgagcattgtggccaggacttattgccaggaggcagatgacctgtcgtttagactgcagaagttgtcagttttcgtcggcgattatgaactttga

SEQ ID NO: 10768 - RNA, 1197 nt, synthetic construct
  source 1..1197: mol_type = other RNA
atgaatacaatgataagctctctctatccccagaaatcaagtacaagcagcattagtaacctggagaatttggcagaatcattgagcttggataaaaacctgctcgagtattctcagaaactgacacaggaagaacgatacaagaagattaaaatacccaagtccaataactcctacagaactgtgcatgatcctatcgacatcattcgtaagattcagaatagaatcaacacccgcatattcacccaacttgtggactggccagattatctctttggtagtattccaaatgacatcattgacagcagagattatatttcatgtgcccgtaaacattgtctggccaagtctatcttcaaacttgacatttccaacttctatgataacattcatcgcgacttcgtgtacgacatcttcaacaactttttcaaattcccgacggaggtgtccgattttctcaccgatatctgttgctacgacgattacctacctcagggggccttgacaagtagctacatcgcaaccctgtgcttttggaatgtcgaaggcgatctggttaagagattccaacgaaagaatctcgtttatactaggttggtagacgacatcacggtgtcttccaaaaaacacgattacgactttgagtacgtggagaagcacattaagaacatgctcctgcactttgacttcccagtgaataattctaagaccaaaatcatgcgggatggccttgaacctctaaacgttcacgggttacgcgtaaattatccagagccgagactgcccagtgctgaggtgaacaaaattagagctgctgtgcataatgtcgtcaaaatgtcgaagatcaataactacaggacttcaaagtcctaccggaacctttacgatagggcactgggaagggttaataagctggcgcgggtcggacacaataagcactctgaactgataaataagcttaagaaggtcacccctctgcccagcaaacgggacctgaactatatcaagaacaacatccggactctcaagaaccttaatgagctggactgcaaaaaactacgccagctcaaatataagcgcaaataccatctgatcaattataggatatccatcttgaaccgaacctttcccaacaaggcctcaacattaaggaacgagttaaaactgctgaaggataagattctcgacaagcagtga

SEQ ID NO: 10769 - RNA, 1107 nt, synthetic construct
  source 1..1107: mol_type = other RNA
gtagcagagctcgaagcgatcagaggcattcctttgtctgaaaggtacagggagaagcctcttcaaaaaggccatggaaagatccgcttggtgtataacccctctttcaaaatccgtttaatccagaacctgatcaacacacgcctgtttaaagatctcatctggtggccagaatttctgtttgggtcgctgcctaattcactgcacgaagagcgactgatcgagagggactacatagcttgcgcttccgtccattgtggggctaaaagcatatataagatcgacatcagcgatttctttgactcgatacacaaagacttcgtgtatgagatattctccaagctcttctcatacccccacgaagtggccgaatacctgaccgatgtttgttgctatgaaaataagatcccccagggtggactgaccagcagttatattgctactgcatgcttctgggatcttgagggtgaggttgtgaaaaaactcagtaggaaggggttgaaatacaccaggctcgtcgacgatattacagtgagcactacggtttcaaactacgatttctcctacgtggaccgccatgtccgcgacatgctgattgctaaggacttgccagtgaacgagagtaagacactagccctgtattctggcatggcccccctgtttgtgcatggattacgggtcgattttaaacagcctcgcctgccagctaaggagatcgccaacgtcagagccagcgtgcacaatgtttgttcttgggctaaggtagacagctacagaacttccgtgacatatcgggccgcgtttgataggtgcttgggccgggtgaataagctggctagagtgggccacgaaaagcacgcagtatacgtggccaagcttcgtaaagtcgcaccgctaccctcccagtttgacattgatagtgccgaggcctcaatctctcgacttgaaaaaataagcaccgccaagctcgtgtctgtaaaatacaaacggcatttcgcactggtcaggtatcggattaccattattaagcggagattcccatccattgcggagaagttcaagttacgactcagagcccttgaggttcgcagaaatgcagcactgtga

SEQ ID NO: 10770 - RNA, 1278 nt, synthetic construct
  source 1..1278: mol_type = other RNA
atgactgtgacaccatgttatagcgccttggactatgggggggtaggccacgacattaagctgccccggatggctgtggaaatgacagacctgaggcctgagaagatcactaaatcctcaatcggtagcattagcaaattgtcagttgtcttaagtatcccagagtctgacctgtcagcaattctcaagatactgccagaaaatcggtataagaagatcacaatacccaagggggtgggcggcgaaaggatcgtctatagtgccacacccctactcaggaaaattcagcacaggatcaatacgcggatcttcaaaaagctgattaagtggccgccttacctgtacggctctttgcctaatgataaagaactggttggaggtcagacgaagaccaccgtccagcgggactatatagcctgtgcccaaaaccattgcggggccaagtctattctgaaactcgatatcgccaatttctttgagaacattcatcgtgatacagtgaaaaagatctttcgcaaattcttccactatcccgagaatgtgtcggactatctgaccgaagtgtgctgttacggcgacaccctcgtgcagggcgctcttacctccagctacctggcttctttgtgcatgtgggatactgagtacaaagtgatacagaagcttagccgccgtaatctagtgtacaccagactggtcgacgatattacaatttcctctaagcacaggggatatgacttcagaaatgcagagtcacatgttagagccatgatgctcaaaaaggattttcctctgaacctgtccaaaaccaaaattatgcgagcgggatccagcccattgctggtccatggattgatagtaaactttcgcacccccaggctgccttcttcagagatcagccgcatcaaggctagtgtaaacaatctagtgaaggcaagtgccactgataactaccgaacaacttactcttttcgtgcacaatacttcaggtgcttaggtcgagtcaatagactggcgcgcgtgaaccacaacaagcacgaatacctcattaacaagcttaaaaagatccggccaaagccgtgtaaaaccgatatcgagagagttgagaacgctatcgaccggctcaagtccctcaaagataagacgactgactcgtaccgcaggatttacaacatcgcaagatatcggatcgggatagttagtcgaagctttgacagaaaatccatgattttactttccgaactgaaaaagcttgagaagcccgtgagcaaaatcgattga

SEQ ID NO: 10771 - RNA, 1230 nt, synthetic construct
  source 1..1230: mol_type = other RNA
atgatccacacttatttttccggcgctgcaatgttgccgggtaaaggagttcagaaaattgcgaggcattcgattggcagcgtgagatcactctgccgcacgctgagcatagaggagtccgaactggacgaattactgacttggccagcagacgcaagatttaaaaagaagaagatcgagaagagctctggtgggcaccgtacggtgttcgttcctaattggaaatttagacgcatccagaggaagattaataagcgaatcctgggaaacaccaagataatccgctggcccaaatatatatttggctccgtgccctccagtagcgcggatgcagaagaggttgtcggacgtgattacatcgcttgtgccgctgtccacgcagggtcaaaaagtatcctgaaggttgacatcagtgatttctttgataacgtggaacacgacgtagtctccgatgtgttcgagaagttcctgaaatatcccccagaggtagttgaagctctctgtaacgtgtgttgccttaaaggccggcttccccaaggcgctccaacctcatcttacctagctaaccttgcattctgggacgtggaacacaggctcgtgcgtcgtttgcatcaaaaaggcttgagatacacacggtatgtcgatgatattaccatttcctctagaaaacacgcccaggactttagcctggccctgcgactggtagacggtatgctcattgataagaacctttcccgcaatgagaaaaaaactctcaccctgcggtctggaatcaacccattagtggtgcatggcctagccgtcgaacatagcgtcccccggatgcctgcccaggaatacaagcggattagggcgtctgtgcgggccttggaaaatttcgtgacagaccctggattcaggacttacaacgcttatagaaggatgtttaacacatgccaggggcgcgtcaataaactgtctcggctcaagcgcgttgcccacgccagttacgtgaataggctgaggaggattcgccctctgccttcgcaccgagacttagcctggtgcaagaaggtggccgagcgactccttgcacggttcaaggtaccgggggctaccgatgggtatttctttaagagagacttgttcagactacgcgagaggctgaatctgctgagaagaacatacctccatgaggccgccgagcttaagaatcggatctcacacatacgaatctttagccatgagtga

SEQ ID NO: 10772 - RNA, 1200 nt, synthetic construct
  source 1..1200: mol_type = other RNA
atgtcgctcaagagccacgtcacgaaggtcagtcgacatagcattggatccgtgagaagcctgtgcaggaccctgagcatcgatgagccagaattacaagcacttttgtcctgggtgcctgagtcaaggtttaagaagaaggccgtgacaaagtcatcaggtggaagtcgtacagtgtacgtgccgcattggcgttaccgcaagatcctgcggaagatcaacaaaagaatcctgggaaataccaaaatcatacggtggcccgactacgtttttggctctgtccccagttccgatgctgatgacgcgcggctgattggcagagactacatcgcatgtgccgccgtccacagctcttccaagagcatactcaaagttgatatttgcgacttctttgacaatgtagaacagccactggtccgcaacatctatactgacttcctcaaatatcccccagctgtggccgaaacactttgtaatctgtgctgtatacatggcaaaatacctcaaggggctcctacatcatcttatcttgctaacctggtgttctgggatctggaggctaatctggtggccaggctaaagcagaaaggcctcacctacacccgctacgttgatgacatcacaatttcgagtcgtaaatacagccaggacttttcactcgcactgaaactggttgaccagatgctgatggataaagacctcacccggtctgaggtgaaaactcaggtactcaggtctgggaccaaacccctgctcgtacactccctgagagtggaacacgccactcctagaattccaagtccagaatatagaaggatcagatccgccgtgcgcacgctggagaattttgcagcagatgccgggttccggacttatgatgcctaccggcgaatgtttaacgtctgtttgggtcgggtcaacaagcttagcaggttgcgcaagaagtcccatactgcttacatcacccgcctcaatcgagtggggccgctaccttctcatagggatttacgatggtgccaaaggaccgcgagggaggtgcttaagagattcgcgattcccggcgagtctgagcgctttttcttccggaggaaacttttccgcttacgtgaacggctgaacctattgcagagaacatatgttcacgaagcatccgccatccgagacagcttggctcagattaagatttattcacacgagtga

SEQ ID NO: 10773 - RNA, 1167 nt, synthetic construct
  source 1..1167: mol_type = other RNA
atgactaaactcatcgaggatttcaccaagcgagttgctgggtcaatctcttcgattccaacactggctaatgccctcgatatcaatcttagcgaaatagagaacttgctgaataccccagccgatcagaggtacaaggaaaaattcatcgaaaagaagcatggcggtgtccggaaagtttacaaccccagcgccctggtccggaaaatccaacagagaattattaatcgcatcttcaagccactggtagactggcctttttttgtgtacggatcaatccctaagagcaacggccagccggcaaaagactatgttgcggcagccaatgtccacgctggcgctggatctctgcttaagatggatattaaggacttctttgacaatatccaacgcgaggtggtctttgacgtgtttttcgacttctttaagtacccgtatcccgtgagtgagattctaacagacatctgttgtcgcgatgataggctgtgtcaaggcgcgttgacgagttcatacctcgccgcattatgcatttttgacgtggaggcaaagatggttaaaagaattgagaagaaaggggtcacttatactagatatgtcgatgatatcaccatcagttccaagaacaggtcctacgatttttcctacgtggagaaggttgtggaggaggtgctgatgagcaaagacctgcccgtaaataaaggcaagacctcagttataaacctgactagtaagcctctcctggtgcacggtttacgggtgaacaccagcaatgccagactgcccattgcagaagtaaaacgaataagggccgctgtgcagcaccttgaagtggcctccagggagcccaactatatcacactgccaacctatcgtgaagaattcaacaaatgcatgggacgcgtcaataaactcgctcgcgtagggcatattcagcattccgctctggtgaatagacttaagagaattcggcctaagtctacgcgctctgacctatacgtggccattcagatgttgaaaatcatacggcgtacatctcagcaacggagacagcactatttcttcaaaaaacagtgcgcccaggccaagactctcttgacattgatcaagaagaacaacaaatacagccgaagggcagcgatactcctgaactacttaaggaagatctga

SEQ ID NO: 10774 - RNA, 1188 nt, synthetic construct
  source 1..1188: mol_type = other RNA
atgctaacagaccttcccatcaaccgcagttcatcaggaataagcactcttatttccctgagcaagacgcttggatttagcctcgaggagttggaagacatccgaaatatccctctcgataaacgttacttcaaactcgagaaaccaaagatcgatggcactaagagagttgtctaccgggtgcatcacaaactcaaaaggctgcaaagacgaattaattcacgcattttccgggagctcgtgatctggcctgagtttctgttcgggtccatccctaatgacaatgatgaagtgtcgctgaaacgggattatatttcctgcgctagtagacattgttcagcaaagagcatactgaagatcgacataaagaactttttcgacaatatccacagagacttagtctctgacatattctctgacttcttcagaattaagagcgaagctaacgagtacatcgtcgacatttgctgtttagaaaacttcatcgtgcagggcgcgctgactagtagttatatcgcctctttatgcctgcatgatcttgaaaccaatgtgtaccgcagggccaagcgcaaaggacttatctatacgaggctggttgacgatattacagtgtccaccaaggtaaacgatttcgactttacccagataaagaaacacatcgagacaatgctcgccgagaaggatttgcctattaactatgagaaatccggtgtttttcagattagcacaaaaccactgctggtgcacggcctgcgtgtcgactattccaaaccgaggctgcccagcgatgaggtaaagaagatccgcgcatcactgcataatctcattgggaatgcagtaaagaacaataataagaccactatcgcttatcggacagagtataatcgctgtatgggcagaatttccaaactggggaggctaggccacgaaaaacacaaggttttcatgggaaagattaaatgtatcagacccatgccatcctacctcgatgtgaaaaattgcaagaaaaagctgaaggggttggaatctctatactcgaggggttttaaccgttctaacaaatactctcgggaatttaacgtggtcagccattacatcaccttgatcaagaggagtaactcttttatgaagattgccaacgagtttcgggagcgattgaacaagataaagcccaacgtggaaaaatga

SEQ ID NO: 10775 - RNA, 1191 nt, synthetic construct
  source 1..1191: mol_type = other RNA
atgtccaatgacctccccagtaacaagtctaacagcggaatttctacactcacgagcctctctaaagcattggggtttagtatcgacgagttagtggaaattagatctattcctcttgataggcgctaccataagctggaaaaacccaaaagtgatggaagcatgcgcatcgtgtatcgcccacaccacaagctgaagcgcttgcagagacgtatcaataacagaatttttcgggagctggttatctggcccaattttctgtttggcagcgtgccaaacgacaatgatggggaggattctctgaatcgggactacatcacttgcgccaatcagcattgtggggccaaaaccctactgaaggtagacataaagaacttcttcgacaatattcacaaggagctggtcagtgacatcttctccgatttcttctatatcaacgccgaggccaacgattacataaccgatatatgttgcgctggcgaattcatcgtgcaaggcgccttaacgtcctcctacattgcttcgctgtgcttgcacgatgtcgaaactaccgtctatcgcagagctaagaggaagggccttgtttatactaggctggtggatgatatcacagtatcgagcaaggtttatgactacgacttctcacagattaagaaacatatagaggatatgctagcagagaaagaccttccgataaacatcgttaaaagcggcgtgtttcaggtttctaccaagcctttgttagtccacgggctgcgcgtcgatcataataagcccaggctcccttcatacgaggtgcggaaaatccgggcgtcactgaacaatcttatcggtaactccatcaaaaacaataacaagacatccctggcctatagagtggagtacaaccgatgtatgggaagaataaataagctcgggcgactgggccacgaaaaacatgctgtgttcatgggtcgtattaaaaaggtaaggccaatgccaagtttccaggacgtgcgtgaatgcaagaagaaaattaaatggcttgagattcagtacagcaaaggatttaacaagagcgacaagtattttcgggtctttcaaatcactggtcacgtcatttccctcatcaatcggtcagacgcgttctcaaccattgcaaaggaactcaggacacgactgaataaggtgaaacctgacgtggaaaaatga

SEQ ID NO: 10776 - RNA, 1191 nt, synthetic construct
  source 1..1191: mol_type = other RNA
atgccaagcgatattccaatcaataaatccaactccggtattagcacactcaacgccttgtctaagacattggggttctcactactggaactcgacgagattaggaatatcccgttggataagcgatatgtgaaactggaaaagccaaaggccgacggaagtgtgcgggtagtttaccggccccatcacaaacttaaaaggctgcagcgcaggataaattctcgcatctttcgcgagctcgtggtgtggcctgattttttattcggctcagtgcctaatgacaatgatgaggagcagtcattaaagagagactatatcacttgtgctgggcaacactgctccgcaaagagcatcctgaaaatcgacataaggaattttttcgacaacattcaccgcgacctagtttctaacattttcaacgatttcctgtgcattaagtcggaggccaatgagtatatagtggatatctgttgcgcgggcgacttcatcgtgcagggagctctgacatcgtcatatattgcaagtctgtgtctgcatgatgtcgaaaccaaagtgtgccggagagcccgtcggaaaggtcttacttacacccgtctcgtcgacgacatcaccgtgtcttccaaggtctatgatttcgacttcagtcaaatccgaaaacacattgaggatatgctggccgaaaaagacctccccattaattccgataaatcaggggttcaccagatcagtaccaagcccctccttgttcatggcctgagaatagatcacagcaaaccaaggctgcctagcgacgaggtcaaaagaattcgagcttctcttcataacctcatcaataactctagcaagaacaataacaagacgtccctagcataccgggtggagtacaataggtgtatgggcaggataaacaagttgggacgactgggtcacgaaaagcacactgtctttatgggcaagatcagaaaagtgcgccctatgccgagctatcgggacgtacgcgaatgcaagaagaaattaaagagagtcgagtacctttactcaaagggactcaacaagagcgagaagtactttcggaactttcagctggttgggcataacatctccttgattaatagatccagcagtttttctgtcctggctaaggaattccgtgtaaggctgaacaaggtgaaacccgatgtggaaaaatga

SEQ ID NO: 10777 - RNA, 1191 nt, synthetic construct
  source 1..1191: mol_type = other RNA
atgagtagcgaactgcccattaaaaaaagcaattcagggatcagtaccttagattctctatcaaaaaccctgggatttagcttggaagagctcgaagagatccggtccattcccttggagaaacggtattttaaactggagaagccaaagacagacggtacaatgcggacagtttacagaccgcaccataagctgaagcgattgcaaagacgcataaataaacgcatctttagagaactggttatttggccagattttctcttcggcagcgtccccaatgacaacgacgatgaagacagtatcaaaagagactacatcacttgtgccagccttcactgcagcgcgaaatccatcctcaagattgacattaagaacttcttcgacaacattcacaaggaccttgtaggtgatattttcgaagggtttctgtgcataaagtcagaggctaaagagtacatgattgatgtgtgttgcgccggagaattcatcgtgcagggcgccctgacctcctcttacattgcttccctgtgtctgtatgacgttgagactcaagtctacaggcgcgcaaagcgcaagggcctgacatacactaggctcgtggatgatatcactgtgtcctcaaagatctatgatttcgacttcacgcagattaggaagcatatagaggacatgctggcagaaaaggacctgccaatcaatttcgacaagtctggggtgtttcagatttctaccaagcctctcttggtgcacggtcttcgaatagatcataataagcctagactgccatctaatgaggtgcggcgaattcgtgctagcctacataacctcatcaacaacgccacgaaaaacaattcgaaaaccagcctcccgtatcgcatcgaatataacagatgtatgggacgcataaataagttaggccggctagggcacgaaaaacacgccgtctttatggagaagatcaaaagggtcagacctatgccttccttctccgatgtaaaggagtgcaaaaagaaacttaagaagttggaggagctccacgcaaaaggatttaataaaagtgagcgttaccttaggaactttcagttagtgggccattccatctcgctgatcaaacggtctgattcattcagtatcctggctaaggagctgcgtatgaggctgaacaggataaagcccaacgtcgaaaagtga

SEQ ID NO: 10778 - RNA, 1191 nt, synthetic construct
  source 1..1191: mol_type = other RNA
atgagccccgatctgccgaccaaaaagagttcctcagggtttagtaccctgacttccctgagtaaaactctgggcttttccctggaggagctgaatgagattcgtgacatctcaatcgataaaaggtatgtgaagttagagaaaccaaagacagacgggtccatgcgaatcgtctatcggccccatcacaagctaaaaaggctgcagagacgcattaacaagaggatcttccgtgaacttatcgtgtggccaagctttctgttcggaagcgttcctaatgacaacgatgaggaggacgctctcaagagggattatattacgtgtgcttcacagcattgttcggcaaagtctatcctcaaaatcgacattaagaacttctttgacaacatacatcgagacttggttggagacatcttcgagaatttcctgtgtattaaatcagaagccaaggaatatatggtagatgtttgctgcgcaggcgactttatagtgcaaggcgctctgacaagctcttatattgcctccttatgcttgtacgatgtggagactacagtgtatagaagggctaagcggaaagggctcacctacacaagattggtcgacgatatcactgtttctagcaaagtgtacgattttgatttcacgcagataaggaaacatattgaagacatgctggccggaaaagatcttcctcttaaccacgacaagagcggtgtctttaagattagtactaagcccttactagtgcacggtttgagaatagaccatgataagccacgcatcccttccgacgaagtgaaacgtattcgcgcctctctgtacaacctgacatccaactcgaaaaagaataataacaagacctcagcggcataccgagtagaatacaatagatgcatgggacggatcaacaagctcggccgactcaaacacgagaagcacgtcattttcatggagaaaataaaacgcatccgcccaatgcccagttttcgggatgtaaaggagtgtaaaaaacggatcttgtggcttgaaaagctgtatagcaagggcctcaacaagaccgagcggtacttccgcgtgtaccaggtgaccgggcacaacatttctctcatcaataggagcgcctccttctctgacatcgccaaggaacaccggttcagacttaataaggtcaagcctaatgtggaaagatga

SEQ ID NO: 10779 - RNA, 1194 nt, synthetic construct
  source 1..1194: mol_type = other RNA
atgcttagtgaccttcccaggaataaatctatttctggaatttccaccctcctgagtctggccagagctctgggtctgcctcgcgaatacctcgaggaaattaaaaatatgcctctggagacaagatatagcaagttggagaaaccaaagatcgacggcagcatgagagtggtgtataggccacaccacaagctgaaaaagctccagcggcgaatcaataaccgtatattccgggaactgatcatctggccagaattcctttttgggagtatccctaatgacaacgactcagacgatgacgccctaaaaagggactacatcacctgtgctggccagcattgctccgcgaaaagcatcctgaagatggatatcaagaacttcttcgacaatatacaccgagatctggttgatgatatttttgagaactttctccacatctcactggaggcaaaagaatacttagtcgacttctgctgtagcggcgattttatcgtccaaggcgctcttacttcctcctacattgcctccttatgcctctacgatatagagactaaagtctaccgtagagcaaagagaaaggggttggtgtatactagatttgtggatgacataaccgtttcctcagagatctataacttcgacttttcacagattcgaaaacatatcgaggacatgcttgccgacaaggacctccctattaatctggagaagacaggtgtctatcaggtatctacaaagcccttgctggtgcatggactaaggattgatcattctacaccccggctgccaagttatgaagtccggaacattcgcgcatccctacacaatctcatgaagaattcgacgaagaacaacaataaaaccagtttggcctatagggttgagtacaaccgctgcatggggaagattaataaactgggacgcttagggcacgagaagcacgacgtgttcatgaaaaaaatcaagaagattcgccccatgccctcttacaaggatgtgaaacattgtaaggagatgctgaaaaagcttgaagatctctacgaaaagggctttaacaaaagcaacaagtattaccgtgaataccaaatagtaggacacaacatcagcctgatcaaaaggtctaattcattcttggtggtgagcgaagatctgcggaagcggcataacaagattaaaccgaatttcgagaagtga

SEQ ID NO: 10780 - RNA, 1188 nt, synthetic construct
  source 1..1188: mol_type = other RNA
atgagctcagataggccaataaaaacaactgccagtgccattcctagcctgaagaaactgagccagaccctggggttcagtatcgaagagcttgaagagattcgggccatccccctggagaaaaggtatgttaagctggaaaaacccaagattgacggcaccatgaggaccgtgtacaggccacatttcaagctgaagcgcttgcagcggcgtattaactctcggatttttagacctttggtcatctggcccgtttacctgtatggctctgttccatgtgacaatgacgatgaatcaatcaaacgcgactacatcacgtgcgcaagtcagcattgcgccgcaaagacaatcctcaagattgacatcaaaaacttcttcgataacatccaccaggacatcgtccgcgatgtgtttgacaaagtgctcaatattaaggacgatgctttagactacattgtggacgtatgttgtgcaggagactttattgtgcaaggggcgctgacatcctcctacattgcttctctttgtctacatgatgtggaggctgatatttacgctcgcgctaagagaaagaaactcgtgtacactaggctggttgatgacatcaccgtgtcctcaaagatccacgatttcgacttttcccaaatccgcaaacacatcgaagacatgctagccaaaaaagacctgcccataaatgtggaaaagtctggcgtctttatcacaagtacgaagccgcttgtcgtgcatggactgagaatcgaccactctaaacctaggttaccttcagatgaggtcaagaagataagagcgtcattgcacaatcttatcgccaacgcatcgaagaacaacaataaaacttccttggcctatcgaatcgagttcaatagatgcatgggcaggataaacaaacttggtcgggtcggtcacgagaagcacctggtgttcatgagcaagataaaattgatacgaccgatgccatcctataaggatattgtagattgcaagggaaaactagtaaaactcgagaagctgcatgccaaagggtataataccagcgatatctactttcggagatatcagctggtcagtcacctgttaagcctcattaatcgctctagctccttccatgaggttgtgaaggatctcagaaagcgtctcaaccgaattaagcccaacgtgcagcggtga

SEQ ID NO: 10781 - RNA, 1188 nt, synthetic construct
  source 1..1188: mol_type = other RNA
atgcccagtgatatagctatcaataagtctgactcaggcatttcaacactgcagtcgttggccaagacgctgggtttttccctgcaggagctgcaggagatccaatccattcctctcgacaaacgctatcagaagctggaaaagcccaaagtggacgggaccaaaaggatcgtttacaaacctcatcacaaacttaagcgcctgcagagaagaatcaattcccgtatctttcgggagttggtggtatggccagatttcctctacggaagcattcctggcgataatgacgaagatgacctaataaagagagactacgtcaattgcgccagccagcattgtgctgcaaaaagtatactgaaggtggacataaagaacttctttgacaatatccacaaggacctcgtgcggtctatttttgagaatttcctccacattaacagtgatgctctcgattatcttgtggatgtgtgttgcatgggggatttcattgttcaaggagcacttacctcatcttatatagcctccttgtgtctatacgatgtggagactaaagttgtgcgacgagcccggagaaagaagctagtttacactaggttggtggatgatatcacagttagctccaaaatctacgacttcgacttcagccagatcaagaagcatattgaagatatgctggcggacaaggacttaccactgaatcaggagaagaccggtgtcttccaaaccagcacaaagcccctgacggtccacggccttagggtggaccacagtaaaccccgcctcccttcggacgaagtaaaaaaaatcaggagctctttacacaaccttgtcatcaacagcaaaaaaaacaacaacaagactacagctgcgtaccgtgtggagtataatcggtgcatgggcaaaattaataagctcgggagagtaggccacgagaaacacgagcaatttatgttgaaaatcaagtccatccgcccaatgccgagcaagcgagatatcatagaatgcaacaagaagattaccactctggagaaactgttcaaggccggactgtcctctcatgaaagttacaaacgcaagttttatctggtgtcacatcagatttcaatcgtcaaaaggtctaatgcatataagaacattgccgacgaactgcgggagaggttatccaaggtcaaaattaacgaaaactga

SEQ ID NO: 10782 - RNA, 1191 nt, synthetic construct
  source 1..1191: mol_type = other RNA
atgaccacggacgtgcccattaaaaaatcgtcaagcggtatcagcagtctggagagcttgtccaagacattagggatttctttgctcgagttgagcgagatacgcggcatccctactaataaacggtatgagaaaattctggtgcccaaagctgacggatctcaacgcatagtctataagccacattacaagatcaagaaaatccagcgtagaattaacagcaggatttttagggaattggtcatctggccagatttcttatttggatccattccaaacgataacgacactgaggaatctattaaacgggactatgtttcctgttcaagcctgcactgcggcgctaagtctatcctgaagattgatatcaagaacttcttcgacaacattcacaaggatctggtgagtgacatcttttgcaactttttctgtatcaagggcgacgccttaaactttctggtcgatatttgcgtaaaagacgactttattgtacagggagcactgacctcctcttacatagcctctctttgtcttcacgacgtggagagtaaaatcgtgcgaagagcacgcaggaagaatctggtttacacacggctcgtcgatgacatagttatcagctccaaggtcttcgattttgacttcagtcagatccgaaagcatgtggaggacatgctcgcagacaaagatctgcccctcaaccatgaaaaatccggcatcttctacaattcgactaagccactcacagttcatgggctgcgagtggaccatcacaaacctagactgccgagtgatgaggtgaagagaatcagggcctctgtgcacaatctagttaccctatcccggaaaaacaatgcgaggacgagtctcgctttccggaaagaatacaaccgttgtatgggtcgcataaataagcttaccagagtaaagcacgagaaggacaaggtcttcaagaaaatggtggaattcatttaccctatgccttcatacggcgatatcatatcatgcaaaaaggatatcagctcacttgaaacctcatttaaaaatgggttcaacaagacagaatggtattaccgtaagtataatctcgtgtcctataagatctccatcattaaaaggtctagcgcctttattaatctggccgatgaactgcgcgatcggataaagaaggtgaaacccaatgaggatagatga

SEQ ID NO: 10783 - RNA, 1188 nt, synthetic construct
  source 1..1188: mol_type = other RNA
atgtcatcggaccttcccaaaaatacttcctccaaggggattagcagcctgagtctgctttcaaaaaccttaggaatagctgtggaagaactgcgagagattagagctatccccctggacaaaagatacgagaagattctcgttccaaaatccgacgggacaaaccgtatcgtatacaagccacattacaagatcaagaaggtccaaagaaaaatcaattctcggatcttccgcaagctcgttgtctggccagattttttgtttgggagcgtgcctaatgacaatgatgacgaggactccatcaaaagggactatgtgacctgtgcctcactccattgcggtgcaaaatcaattctgaagattgatatccggaacttctttgataacatacacagggagctagtttccgatattttcagcaccttttttaagtgcaagtctacggccttggactatctcgtcgacttttgcacaaagggcgatttcattgtgcagggcgctcttacttcttcatatattgcctcgctgtgtctgtatgataaggagacgcacgtggtccgtagggcaaggcgaaagggcctgacatacacccgcctggttgacgatataacaatctctagcaccgtgtttgatttcgacttcaaccagattcggaaacatgtggaggacatgctggcagataaggatttacccttgaattacgagaaatctggagtgttccataacagtactacaccactcatggtgcacggtctgcggatagatcatttgactccgcgactcccctctgacgaagttaaaagaattagggcttccctaaacaacctgattaatctgagcgagaagaacaactctcgtaccagtcttgcattcagaaaagaatacaatcgctgtttaggaagagtgaacaagcttggccgcgtggggcacgaaaagcaccctatctttctgaagaagatcaaggtcatctaccctatgccttcatataaggatgtcatctcctgcaaaaaagccattgcgagtctcgaaaccagttacgtaaatggctttagcgacaaagactggtattcccgcaagttcaatctggcgagccacaaaataagcatcatcaatcggagtctcgccttccagttgatcgccaaacagctacgggtaaggctgaacaaagtgaagccggacgaagagtga

SEQ ID NO: 10784 - RNA, 1221 nt, synthetic construct
  source 1..1221: mol_type = other RNA
atgggccggccctatgtcaccctcttcggcgaaattatggacaagttcaagccatattctaagtccaaagctcctatctcaacactccaaaagttggcccaaactctgtctattagcatcgatgaacttaacgaaattagtgcattaccagaggatgaaaagtacgagcggaaggagctgcctaaagccgatgggtctaaaagagtcgtttacagcctgcatccaaagatgcgcttactgcagagcaggattaacaagcggattttcaaagagctggtcatcttcccgccttttctatttggctccgtgcctggcaagaatgacggcgccaatagtaatattaagcgcgattatgtctcctgcgccaaagcccattgcggtgccaaaaccgttcttaaagttgacataagcaacttcttcgataatatacacaaggaccttgtgagagacgtgtttaataatgtcttgaacatcagggacgaagcgttggaatatgtgacaaacctatgttgtaaaggggacttcgtggtccagggcgccctgacatcatcttacattgccacactgtgtctctacgagcaggagggaaacgtttaccagcgggcaatccgaaagaacctggtctacactaggctcgtagatgacatcacggtgtcctcaaaaatcaatggttacgatttcacccagatcctgagccatatcgagaatatgttgtcaactcacgaccttccagtgaacaaacgcaagacaaaaatattccactgtagtagtgagcccattaaaatacacgggctcagggtggattacaactctccccgactcccttcagatgaggtaaaaaggatccgggctagcctccataacctgaagaaattagcggtgaagaacaatactaagacgtccatggcttatagaaaagagtttaaccgttgcatgggacgcatcaataaactggggagagtaggacacgacaaatacgagctgtttaaggaacagttgctggcaattaagccgatgccatccccccgagatatcactatagttgaatcggctgtgacctccctggaaatcagctgctctaaaggaaatgggaataagcactggtataagcgtaagtataaccttaccctgtacaagctgatcattctcacccgcagtaaggcatttgacggtattgtggacacctttaaggagagactaaagaaggtgaaacccgcttga

SEQ ID NO: 10785 - RNA, 1185 nt, synthetic construct
  source 1..1185: mol_type = other RNA
atggacaagtttaagccctttagtaagtctaacgctcccatttctacattactaaaacttagccagaccttgtccatctctgttgacgagctgcgcgagatagaagcattaccagatgacgagaaatatacacgcaaagacctcccaaaggcagatggatcaaatcgggtcgtgtacagcctgcatcccaagatgcgtctggtccagtcaagaattaacaagcgcatattcaaggagctgctggtttttcctcctttcctgttcgggagtgttccatccaaaaatgatggtgtggattccaatgtcaagagagactacgtgtcgtgcgccaaagcgcactgtggggctaagacggtactgaaagtggacatcagtaacttcttcgataatatccacaaggacctagtgcgagacgtgtttagcaatgtgatcaacattcaagacgaagcccttgattatgtaaccaagatctgctgtaaaggcgacttcgtagtgcagggcgcactgacttcatcgtatatagccaccctctgcctttacgaacaggaaggagttatttaccaaagggcattacggaagaatctggtgtacactaggctggtagatgacataacggtgagctcaaagattaacaactacgactttacccagattcttggccacattgaggatatgctggccgagcacgacctgcccatcaacaaaagaaaaaccaaaatcctccactgtagctccgaaccaatcaaaattcacgggctgcgggtcgattataagtctccgagacttccgtcagatgaggtcaagaggatccgcgcctccctgcataacctcaaaaagctcgccgtgaagaataacaccaagacaagcgtggcttatcgtaaggaattcaaccgatgcatgggtcggatcaataagttgggccgggtgggccatgaaaaatacaaagtcttcaaggagcagttgctggagatcaagcctatgccctccctgcgcgatagtaaaataattgatgccgcgatcaatagcctggagttgtcctattctaaaggaaactctaataagcattggtacaaaaggaagcatgacctcacactctataagcttatcattctcacaagaagccagagttttgacaagactgtttctttgtttcgagctaggctaaaaaaagtctcccctacttga

SEQ ID NO: 10786 - RNA, 1185 nt, synthetic construct
  source 1..1185: mol_type = other RNA
atggacaagtttaaaccttacagcaaatctaatgcgcccattacaaccctcgagaagttgtctaaagccctcagtatcagcgtggaggaacttaaagctatcgcagaattaagcctggatgaaaagtacacactcaaagagatccctaaaatcgatgggtcgaaacggattgtatactcactgcatccaaagatgagactgttgcagtcccgaattaataaacggattttcaaggagttggtcgttttcccaagcttcctgttcggatcagtgcctagtaaaaacgacgtgcttaactctaatgtcaaaagggattacgtgtcctgtgccaaggctcactgtggagcgaagacggtactgaaagtagacatcagcaacttctttgacaacattcaccgtgatctcgtgaggagtgtgttcgaggaaatcctgcatatcaaggacgaagcccttgagtatctagtggacatctgtaccaaggatgacttcgttgtgcagggggctctgacttctagctatatagcaacactctgcttatttgccgtcgagggcgacgtcgttagacgcgctcagcgtaagggcctggtgtacacacgcctggtagatgatataactgtcagctccaagatctcaaactacgattttagccaaatgcagtcgcacatagagcggatgctgtccgaacatgacctgcccatcaataagcataagaccaaaattttccactgcagttcagagcccatcaaagtgcacggcttgagggtggattatgattcccctcgcctaccgtcagatgaggttaagagaattcgcgcatccatccacaatttgaaactgctggctgccaagaacaacactaaaacgagtgtggcctatcgaaaggaattcaataggtgcatgggtcgggtcaataagcttggaagagtggggcatgaaaaatacgagtcctttaagaaacagctgcaagccatcaagccaatgcccagtaagagggacgttgccgtcattgacgcagctataaagtctctcgaactttcatattccaagggtaatcagaacaaacactggtataaacgaaagtacgacctaacccgctataaaatgattattctgaccagatccgaaagctttaaggagaagctggagtgctttaagtctcggttagcatctctcaagcccctctga

SEQ ID NO: 10787 - RNA, 1194 nt, synthetic construct
  source 1..1194: mol_type = other RNA
atgttcaaaccctccttgaagaacacaaatcagggctacatcagtagtttagagtcactcagccggaccctgagcataccgatcgacaaactgattgaaatatccaatatccctgtggatgataagtaccttttgaaagaaattcccaaggcagatggttctactaggcatgtatataagttgcacccagacctcagactcctgcagtccaggattaattcccgaattttcagagagctgatcgtgtggcccgactttctcttcggctcgattccaaatgataatgacccttcttctgaagacgtgaagagagattatatcagctgtgccggccttcattgccaagccaaaacgattctgaaggttgatatcaaggactttttcgataacatccacgaagacctagtgaaagacattttttctaacgtccttaacatcaaagacaaatccctcgaatacctaacacaggcctgttgccggaatggatttatcgtgcagggcgcactgacaagctcttacatagcatccctttgtctcttcgacatggaagggaagatcgtgagtcgagcgcggaagaagaatctagtatacaccaggttagtggatgacatcactgtgagctccaaaatcagcaattatgacttctcacagattcgtcagcatattgagtcgatgctggccgaaaaggatcttcccatcaacaacaaaaagaccaaggtgttttatagctccacccaaccactgtacgtgcacgggctgatagtcgattattcaaaaccacgactgccgtcagatgaagttagaaagataagggcttctctgaacaatattagcaagctggccgtgaaaaacaatagtcgtaccagtgttgcgtacaggaaggagtataataggtgcttcgggaagattggcaagctgaaaagagtcggacacaacaagtacgaggtctttctgggaaagatcaaaaagataaagcccatgccttctttacgggacgtcaagatggcaaaagccacagtaaaaagcctggaggtttcacacgctaaaggtaacaacaacaaatactggttcaagcgcaagtacgatctcgctcgctataagatcgtgattttgaaccgcactaaagagttcgagttgctggtcgctgagctccgggagcgcatgaaaaatgttaaacctaactttgagcgctga

SEQ ID NO: 10788 - RNA, 1215 nt, synthetic construct
  source 1..1215: mol_type = other RNA
atgctgaataatgagaattattgtccccacaccccatacagcatcgccaaaaagcggatcacgtctctgaaaatactgagcgacactctttccattagcgagagtgaactcattcggatcaatagcttgtccgaccatgaaaagtacaccgagcttaaagtgcccaagattgatggcaccgacaggatcgtctactccttaaactcagacctgagaaaggtgcagtatcgaatcaacaaacgcatatttcgtgagctcattaaatggccgaatcatctatttgggtcggtgcccagtaacaacgactccaataaggaccaaattaagcgggattacgtcgcatgcgcatcgttacattgcggcgcgaagagtattctgaagatcgacatcaacaacttcttcgataatatccacaaggatattgtgaccgacatcttctcaaacgtcttgaagattgaaggatacgccctagaaattataacagacctgtgttgtaaaggaaacttcatcgtccagggtgctctaacctcaagttacatcgctagcctgtgtctccatgacttagaggccgatattatcaaacgtgcagagagaaaaaatctggtttatactcgcctggtggatgatatcaccgtgtccagcaaactttccaatttcgatttctcccagattaaaagccacatagaaaacatgctggccaataaggatctgcctgtgaataaaaacaagtccaagattctcaaggaatcaatacagcccctcgtagtacacggactccgagttgactttgagcagcctcgcatacctagtgacgaggtgaaaaagattagagcttctcttcataacctctgcaatttggcgaaaaagaataacatgaggacgtcctctacatataggaaagaatataatcggtgcctgggccgaatcaatcgcctcgggagactgaatcacaacaagcactctagctttataaagatcatcgagaagatcaaaccactgccttcatggcgcgatgtccaaaaaacaaaggccgcccttaactcattgaaggctagctattctaaggggaacaacaacaagtcttggtatatcaggaaataccacttgacttactacagaacatctattctgaacaggagtactgagtttcacgatatggttatttacctgcgggaaaagctgaaaaagatcaagccaaaagacaaaaggggttga

SEQ ID NO: 10789 - RNA, 1188 nt, synthetic construct
  source 1..1188: mol_type = other RNA
atgacgagcaataagccaataagcaagagtaaaaagccaatcctaaacttggacgtcttgagcgcaaccttgtcaatagataaggtggaactcttaagagtggactcacttccgtctgatgagaagtataaacaaatcactctggccaaaatcgacggctctaagcgaatcgtctacagtctcagcgccgatctgaggaaaatacagtcaagaatcaataagcgcatctttcgtgagctaataatttggcctgattacctgtttggttccgtccccaacgaaaatgataatgacgactctattagaagagactacgtggcttgcgcagagcttcattgtggggcaaagtccattctgaaggttgacatcaaagattttttcgaccatattcacagggatctcgtcaagcagatcttcgagaacgttctgaatatccacaacgatgccttggaactgatcacaaacctctgctgtaaagatgacttcattgtccagggcgccctgactagctcctatattgcaaccttgtgtcttttcgaccaagaacatgagattgttaccaggacgaggcgcaatggactggtgtataccaggttggtggatgacattactgtaagcagtaaactgagtaactttgactttagtcacatccagatgcatatagacaatatgttagcttccaaagatcttcctatcaacaagtctaaatccaaagttaccaaagtgtctatggaaccactgaccgtgcacgggctgcgggtggattttatcagccccagagtcccatccgacgaggtgaaacggatccgggcctccttacataacctgaatatgcttgtgaagaaatctaacagccggactagtgccgcttaccgaaaggagtacaaccggtgccttggacgcatcaatcggctcggcagactggggcacaataagtaccccattttcctggagtcgatcaagaaaattattcccctcccgtcttggcgtgatgtgctcaaaacaaaggcggctctgaaaagcctggagtcatcgtactcaaagggtaacaagaataagtcatggtacattcgtaagtatgacctgacatatcaccgaacagcgatactcaaccgctcccctgtattcaataagctagtaatctatatccgcaacaaactcaacggaattaagcctgacgaaaggtga

SEQ ID NO: 10790 - RNA, 1185 nt, synthetic construct
  source 1..1185: mol_type = other RNA
atgagcattgatatccccacccgcaagcagaatatcaaaagtctgcgatccatgcactcactttcaagttgcctggatatttctttgggcgacctgaacgaggcacgggctctgacgagcgaattaagatacaagaagaaggaggtgaagaagatcaatggagacaccagagacgtgtatgatcctcatcaactaatcaggagaatccaaaagaggatcaacaatcggatctttaagcccctcataatctggcccaattatatttatggcagtgtgccatcaaacaaagaagagaagaaactgggtatcgaacgccactacatagcttgcgcgaagcagcactgcaaagctaaaacaatcctgaaagtggacattaaaagcttcttcgataacatccataaggatattgtgcgcgatatttttaaccgcgtcttcaagttcaagggcgatgcgctggagtaccttactgatatttgttgctacgagcataggatcgttcagggcgcattaacttcatcgtatattgcatcattgtgtctgttcgaccttgaagcagacgtcgttaatagaacccggagaaaacaactcacttatactaggctcgtcgatgacatcacagtatcctccccactggtcaatttcgatatgtcccagatattggaacacattaaaaacatgctggcccagaaggacctgcctgtgaacgagtctaaaacccaggtgtataacatctccacggagtctctcaaagtgcatggtttacggatctccttcaatgagccacgcctgccttctgatgaagtagggaggatacgtgctagcgtgcacaatctcgaggggctagccaaaaaaaataattctttgaccagcgtcgcctacagggtagaatttaacagatgtgttgggcgagttaacaagctgggacgtgtgaagcacaagaagtacaagacactcagcgacaaactacgcctgatacagccgaaagctgccaagagggacctgtccaaaattgaacgagccatatgttttctcgagaatagttatctgggcggaaacagcaagaagcattactacaagaaaaagtacgaccttgctctctttaacttgatcattcttagacggacagcagcctacatttctttcgccgacgggtttaaggcccggctgagtaaaattaaatattga

SEQ ID NO: 10791 - RNA, 1185 nt, synthetic construct
  source 1..1185: mol_type = other RNA
atgattactgatataccgatcaaaaagccaaatacgaattctctgcgcagtctccacagtctaagcagctgtctgaacatcagtttaagcgacctcaatgaagcacgggagatgccaagccatctcagatacaagaaaaagcaggtcaaaaagatcaacggcgactcgcgtgatgtatatgacccccatcctctcatccgcaggatccagaagagaattaacaaccgtatcttcaaagagctgataatttggcccggatttatctatgggtctgtgcccaccaataaggaggaaaaaaaggcaggtatcgaaaggcattatatagcctgtgccaaacaacactgcaacgcaaaaaccattcttaaggtggacatcaagaactttttcgacaatattcaccgagacgtggtctacagcattttccagagagtgttcaaattcaagggagaagtcttgaactatcttacagacatctgctgttttgatcacaaaattgtgcagggcgccttgacatcatcctacatagcttctctatgcctgttcgatttagagcacaatgtggtgaaccgggcgcgccgaaagcagctggtttacacaagactggttgacgacatcaccgtaagctccaaacttgtgggatacaacatgaaccagattctggagcacatcaaatcaatgctagatgaaaaggatctgccactcaatgaggacaaaactcaagttcacaatatttcaactgagtcgctgaaggtacatggcttgcggatctcttttaatgaacctagacttccctcagatgaggtcgggcggatacgggcttctgttcacaatttggagcagctggctaagaaaaacaactccatcacctccattgcttacaggctcgaatacaatcgctgcgtcggccgagtgaacaagcttggaagggtgaaacatgggaaatataagatcctgagtgccaagctgaaactcattcagcctaaagcagctaagagagacatagacaagattgagagggccgtgcaattcctggaaaactcctataaggggggtaatagccagaaggattattacaagaagaagtacgatttggccttctttaatctgatcatcttacgcaggacagcgggctttgtgtccattgccgatggttttaaaaaacggctggagaaggtcaagtactga

SEQ ID NO: 10792 - RNA, 1185 nt, synthetic construct
  source 1..1185: mol_type = other RNA
atggtcgcgagaaatcccataaaaaagccaggggcccagagcttgaggagcctccaatccctctcatcttgcctggatattacactcgctgatctgaaaactgccattgcaatgccaagtcaccagcggtacaagaaaaagcaagtcaagaagattaacggagagctccgagacgtctacgatccccaccagctgatccggcgtatccagaagcgcattaacaacagaatcttcaaggagctgattctttggccagattatatttacggttcagtgccgacaaataaggacgaaaaaaagaaaggcatcgagagacattatattgcctgtgcccgcaagcattgtaacgcaaaaacgatcttaaaagtggacatcaagaactttttcgacaatatccatcgcgacatcgtgtattccatattctctaaagtactcaagttcaaaggggaggctctggaatacctgaccgacatatgctgctatgatgacactatagttcagggcgccctcaccagttcgtacattgcatccttgtgtttatttgatgtcgagtctgacattgtaaaccgggccgagcgcaaaaagttggtttataccagactggttgatgacatcaccgtgtctagtaagctggtcaattataatatgaaccagattctggaccacatcaaagacatgttggctggaaaagatctccccatcaacgaagataaaacacaggtgcacaatatcagcactgagagcctgaaggtccacggattacgcattagttttaatgaacctcggcttccttctgacgaagtgggcaggataagggcgtcagtgcacaacctggaaaaactggccaaaaagaacaattccattacatcagtggcctaccgtatcgaatataatagatgcgtgggcagggtgaataaactgggtagattgaaccataataagtacaaagtgctaagcctgcgtctgaaggatatccaacctaaggctgctaagagggatattgtaaaaatcgaccgggcaataaagttcctagagaattcctacaaggggggaaacagcaagaaggattactataagaagaaatacgaccttaccctgtataacctaatcatcctccgacggacgcccgggtttcttcttatcgagaaaggctttcgagacaggctgcagaaggttaaatactga

SEQ ID NO: 10793 - RNA, 1143 nt, synthetic construct
  source 1..1143: mol_type = other RNA
atgagaagtttgcagtctttatccagcgcgctggatatctcattgcaggagctggaaatggcaaaaaacatgccttgtaacatccgatacaagaagattgagctgaagaaggtgaatggcgatatccgggacgtctataatccacactcactgattcggaagattcagaagagaataaacaatcgcattttcaagaccctcataatttggcccgactatctgtttggatctgtgcccagtaataaggaggaaaaaaaacaggggattgaacggcactatattgcctgcgcaaaaaagcattgtcaagccaaaactattcttaaggtcgacatcaagtctttctttgataacatccatcgcgacgtcgtgtattccatctttaagaaggttttcaagtacaaaggcgatgcactggagtatctcgtggacatctgctgctacgagtcaaatgtagttcaaggggccttaacatcttcatatattgccagcctgtgtctgtttgacgtcgaatacgaagtattccgccgggccgagaggaaagaactggtgtataccagactggttgatgacataacagtgagttccaagacggtgggatacaatatgtcccagattctcgaccacattcgaaacatgctgatggagaaggatctacctcttaatgaagagaagactcaagtccacaatatctctaccgagagcttaaaagtgcacggactgagggtgagttttgatacaccgaggcttccagctgatgaagtgggccgcatccgggcctcggtgcataacctcgagcagctcagtaaaaagaacaattcgttgactagcgctgcttacaggctggagtataaccgttgcataggtagagtaaataaactgaagagacttgggaacaacaaacatccaatgctgcgagacaaacttaaagctatactgcccaaagcggccaagcgtgacatcgacaagttgaaaagggcagtcagctacttggagtcttcctttgcatccgttaacagcggcaagttctactacaaaaagaaatacgatctgaccatccacggtctaatcatcctccggcgcacacctgccttcagcagcatcgaagcttccctcagacagaggctctcactagtgaaatactga

SEQ ID NO: 10794 - RNA, 1074 nt, synthetic construct
  source 1..1074: mol_type = other RNA
atgccgtaccacgagcggtataaggagatcgaactcaagaagtcatccggagatgtgcggatagtatataatcccgctcacttgataagaaagatccagaaacggatcaacaatcggattttcaaaccactcattctctggcctaactacctctttggctcaatccctaaaaatgagcttgataagaaggaaggtattgaccgacattacattgcctgcgcaaggaagcactgtgaggccaagacaatcctgaaagtggacattaagaacttctttgacaacatacacagagacattgtgtacgacgtttttaagaaggtcctgaaatataagggggaggctttggaataccttgtggatatatgctgctttggagataagatcgtacagggtgccctgacctcttcttacatagcaagtctttgtctattcgatctggaatttgatatcgtcaaacgcgccgcgaggaaacagctggtgtacactaggctagtggacgacattactgtgtcctccaaaattgtcaatttcgatatgagccagatgctaaatcacatcaagaacatgctgctgaacaaggacttaccaatcaatgagaagaaaacgcaagtccacaacatctcaaccgaatctctgaccgtgcatgggcttaggatctctttcgcaacaccccgcttgcccgcccacgaagttggcagaatccgcgctagcatccataatctggagcaactgtcgaaaaaaaataacagtctcacctccgttgcttaccgtctggaatataaccgatgtgttggccgagtgaacaagttggtccggttaaaccataataagaaggacgagttcaaaagaagattaaaagccatactccctaaggcgagtaaaaaagatattaaggagatcacaaggtcaattaactttctcgagagcagctatgcactggggaattccaataaggcttactacaaaaagaagtacgacctgacaatctataggcttatcattctgaaacgcactccaagctatcatgagatggaggccgaattccgtaaccgcctgttgaatattaaatattga

SEQ ID NO: 10795 - RNA, 1146 nt, synthetic construct
  source 1..1146: mol_type = other RNA
ctgcggtccctgcagtcgctgagcaacgccctagatatctctatctctgatctgaatgctgccattaatatacccgttgagaagaggtaccacaggcttgagttgagtaaagtcaacggagagaaaagaattgtcttcgatccagatcatagagttaggaaaattcaacgcaggattaacaagcgcatctttaaggaactcattctatggcccgagtacctttttggctctatcccaactaaccaatcggacaaagagaacaagatagaacgacactatatagcctgcgctgcaaagcattgcaaagcgaagaccattctcaaactggacatcaagaacttctttgagaacattcatagggatatcgtcgtaagcatcttcagcgatgtcttccagtacaaaggagaggccttgaaatacctcgtggacatctgttgttacaatgagtacatcgtgcagggggctcttacctcatcctacatcgcatctttgtgcctgttcgatgtggaatatgacgtctttcgacgggctgaacggaagggcctggtgtacactcgcctggtagacgacatcacaatttcctcaagggttgtggactatgatatggcacagatcaagtctcatgtcgaaaatatgctgaacgaaaaagatctccccatcaatcagaagaagacggaggtgcacaatatcagcacagaagccttaaccgtacatgggctgcgcgtatctttcaacgagccgagactcgccagtaacgaggttaaaagaattaaagcctcagtccacaacatagtgaatctgagtcagaagaataatagcaagacttcagaagcttatcgcatcgagtataatcggtgtatgggtagagtgaataagttagggcgggtgggccacaataagtataaactgctactggacacacttaagaaaattaagcctaaggcgagtctgctcgacttgcagtccgtgcacaaactcgtgggagagctcgaaaagctgcacgtgaaaggtagctacaacgaatttgaatttaagcgtaagtacaacttggcagttttcaaacttattgtgataaaccgaaccgactcctataaacctttcagcgactggattaaatcccgtttagagaagataaagccttgctga

SEQ ID NO: 10796 - RNA, 978 nt, synthetic construct
  source 1..978: mol_type = other RNA
atgagtgtgaattttccggtgaagaagcctggagccaagtccctgcggagcttgcagagtctaagcgatgcccttgacatttccatctctgacctgcaagcagctaaaaaactcacaaaggaggaacgatacaaacgcatagaaatcccaaaggtcaatggtgacgtaagagtcgtgtacaggcccgaccaccgcattaggaggatccagagaaggatcaacaagcgcatttttaaggaactaattttgtggccttcttatctctttgggagtattccctctacgaaacctgagaagcgcgagggcatcgagcggcattacatcgcatgcgcccaaaaacattgtaacgcgaaaatcatccttaaattggatattcggaacttcttcgaaaacatacacaaggacattgtcgaggatatcttctctaaagttctcaaatacaagggagatgcgcttaattatctggtggacctgtgttgctttgatgataatatcgtccagggggctctgacatcatcatacatcgcttccctgtgtctgcatgatctggaatacgacgtttatcgaagagccgagcgtaagaaactggcttacacccgacttgtcgatgatatcactgtgtcaagcaaaaccgtaaattatgacatgggacagattcgcggccacattgaggaaatgctgaacaagaaggacttacccatcaacataaataagtcagaagtgcacgacgtgtccactgagcccttaaccgtgcacggcttacgggtttccttcgacaagccaagactggccagcgatgaggtacgtaggatcaaagccagcgtgtataacataactcagctggccatgaagaacaattcgaagaccacagtggcatataggattgagtacaatagatgcatggggagagttaataagctgggtcgggtgaagcacaacaaacatctcgtcttgctcaacatactcaaagcaatttga

SEQ ID NO: 10797 - RNA, 1197 nt, synthetic construct
  source 1..1197: mol_type = other RNA
atgtctattatcagacctgagaaacttaaagacagcggaagtctcaaaaagctcgagtccctgagccgagccctagggctgtcagtaaacgagttgaaagaagtgaaatccctcccactgtcgaagcgctatacagaagtgaaggttcccaaaatcgatggcacctttcgtatcgtttacaagcctgattaccgcctgcgaaaggttcagagacggattaataaccgcattttcaaggaattggtgagctggccgtattatctttttggttcagtgcctagcagtccagatgataaaaagaatgggataaagcgggattacgtcaattgtgcaaagaaacattgcaacgccaagaccattcttaaggtcgacatcaagaacttctttgacaacatccatagggacctggtggaggacatcttcaagaactttttcaagtataagggcgaggctctggaatacctggtggatctttgctgtaacggcggatatattgtgcaaggggcgcttaccagttcttacattgccacactctgtctctacgacattgaatttgatatcgtcaagagggcagagaggaagaatctcgtgtacacccggttggtggacgatatcactatctccagcaaagtgtcgaattttgacttcagtcagattaagatgcatgtcgagaagatgatgttggaaaaggacctgcccctgaatctcgagaaaactaagattcaccacatttcaacagaacccctgagcgttcatggactccgtgtaagcttcgatacgccgcgtctagcttccgacgaggtaaagagaataagagcatctctctctaacttaatcgcgctgtcaaagaaaaacaactccataacttccgccacatatcggaaagaatatgatcgatgcatgggcaaagtgaacaaactgggtcgcgtggaacacaataagcaccctatctttctgaacaagctgaaaaatatccgcccccttccatctgagaaagacgcttgtcgggccttggctaatatacacaggttagaggtcatgtacaaaaatggcaattccgccaaatattcttacatccggtccttccacctagcctcatacagactgatcattttaagcagaaccgcatgcttctctaggctggtcaacagtttgcgcgttaggctgaagaaaatagagccaaaactgcagaattga

SEQ ID NO: 10798 - RNA, 1200 nt, synthetic construct
  source 1..1200: mol_type = other RNA
atgtatatcaagaaaccccagatcaccacactgaatgccatcgctaatgtgtctaacctgtgctccgttttagacatttctgaggaggagctcaatcaggcactagcattaagtgattacgatagatatgttcaggccaaaaccgagaaaaatgatgggtcatttcgcaccattcacaagcctcattacttgttgcgaaaggttcagcgcaggataaatacccgaatctttcagaagattgtgaggtggccatcttacatctttggaagcgtccctaatacaaaggatgaagggaacaacgtggtggaaaacaaggattatgtgtcatgcgccgctcaacattgcggtgctaagtccctcttaaaactggacataaaggatttcttcgataacatcgatatcttccacgtgaagaagattttcacaggcctgttcaagtacaattgtgacgttagcaacgtcctgtcagacatctgttgctataggggggttgttgtacaaggagcactgacttcgtcctacatcgcttccctgtgtttgtgggacgaggaatacaaaattatagagcgtcttcagagaaaaggacttgtctacacccggcttgtggatgacataacagtatccagcaggattagcaattttcagttcgaccatgcccaaagtatcatcagtaagatgttgcaagacaaagacctccccattaacaacaacaaaaccaaggtctttcatgcaagcattgaaccacttatggtgcacggcatgcgcgtcaatttcaaagagccccggtatccgagtgatgaggtgaggagactacgcgctgccgtgcagaatattgaaaagctgtcatccgaggtgggttaccggactacgtttgcgtatcggaaagactttaaccgatgcatgggccgcgtcaacaagctcaaaagagtaaaacacgaaaagcaccaggtgctcatcaataagcttaataaaatcctgccactccccagcaaaactgacctccgtcgttgtaagctggcggtgaagcggctggagaacgatttcaacaacaaaaaggagtcttattggtacaaaaagcgctattacatggcccaggacaggctgaacgtgctgcagagaacgtactacaagactgccttgaaactgagatctcggctgaatgtcattaagcctgaatatgacaacgtagaaaatgcctga

SEQ ID NO: 10799 - RNA, 1197 nt, synthetic construct
  source 1..1197: mol_type = other RNA
atgcaaaaagataagccatatatcacgaccacaaatgtcatttcttctatccctaacctctgcaaaagtcttaatataaccgaggacgaactgtctcaggccctgtctcttggaagcgacatgtacgtgagagacagagtcgaaaaatcagacgggagctaccgggtgatccacaagcctcactatctcctccggaagattcagagacgcattaacaagaggatatttcagaagcttgtgggctggccaagttacatattcggtagcgttcctaataccgtaaattataagggcgaggtcgtcgaacccaaagactatgtgagctgcgctgctcagcactgcggagctaagtccttattgaagctggatattaaagacttcttcgataacatccacatttatcatgtggaacgcattttttcggggttctttcattacaacgaggaggtgtctaagactctatcccagatttgtacttacaataacgtggtcgtgcaaggggctttgacaagttcctacatcgcatcattatgtctgtgggacaaagaacttgaggtggtcgagaggctgaaaaggaagaacctcgtatacacacggttggtggacgatatcactgtttcctcaaaggtgtccaattaccagttcgacaacgcatccgccttaatcgtggagatgctgcgaagcaaagatctgccagtgaataacaacaaaacaaaggtgttccatgccactatcgagcccttgatggtccacggtatgcgagttaactttaaagagcctcgctatccgtctgatgaagtgaggcgtctgagagccgcggtgcgaaacgttgaaatgctggcctcagagccaggatatcgcacaacctttgcataccgaaaagatttcaaccgttgtatgggcagggtgagcaaacttaagcgggtaaagcacgaaaaacataaacatctggtagagagactgaataaggtcctgccgctgccctcgagaaccgacctcagacgctgcaagctcagcgtcaggaggctggaaaacgactataataaaaagcgcgagagttactggtacaagaagcggttttacatggttcacgatcgcctgaatgttttgcaacggacctacttcaagacggcctatcagctcagagagcggctaaaaaagatccgtccctggtatgatcacgttgagaatgaatga

SEQ ID NO: 10800 - RNA, 1188 nt, synthetic construct
  source 1..1188: mol_type = other RNA
atggataggctgatccctgaaaagagcacgtttcagtcaatctctaatatcaagaacctgtgcgccgctctggacatttcggagaaagatttgtcatccgctctatccctgcgcgacaatgagaaatacgtcatagaccatgttgagaaaagcgatggtaccctccgaaaaatccataagccgcattatgaaatccgaaagattcagaggcggatcaataagcgcatcttcaaaaagattgtgctgtggcccgactatatctacggctgcatccccaacgaaatctcgtccgatggcaagctcattaaagccagagactatgtaagttgcgcaagccagcactgttccacaaagagtctgctcaagatcgacataaaagacttcttcgacaatatttctgcccatctcgtgttcgagatgttttcacgctttttcaagtacaacgatgaaataagccaaacactgactaaactctgctgtttcaagggaactctgatacaaggcgcccttaccagcagctacattgcagcactctgtttgtgggacctggaacacaaagtcgtttcccgcctgaaacggaaacagttgacctatacgcgcttagtggatgacattactatttcttcaaagaccagtaacttccagtttgattacgctcttactctagtcagcaacatgctattagaaaaggagctgcctataaacctccataagaccaagtcttcttccagcagcattcttccactggtcgttcacggaatgagggtgaactttgaagagcccagataccctagtaacgaagtgaaaaaacttagggccgcagtgcacaatatcgagaaactcgcgtccgagcccggttacaggatcacacatgcctaccgacgggactttaacagatgtatggggcgggtaaacaaattaaagcgtgtggggcacaattctcactctaaactggttgagaagctgttgagggtcctcccattgcctgcgaaggtggatctgaaacggagtcataccattgtggctagactggagaaggattttaaggaaaagcacacatcatattggtatcacaagagattctacaaggcccacgatcgtcttaatatcctgcagcggacatactccaagaccgctcaggagctgagattgaaacttaaggccattaaaccaaagtatgagaattga

SEQ ID NO: 10801 - RNA, 1194 nt, synthetic construct
  source 1..1194: mol_type = other RNA
atggaacgactctctccgatcaaaagttctagtaagagcatatccaacaagttgaatttatgcaagacactggacatcaccattgatgaactcgattcagctctgacattgcccaacaatcagaaatatatcactgcatacatcgacaagcccaatggcgagcagagaaaaatacataagcctcactacaagataaggaagatccagagaaggatcaacaaccggatattcaaacgattggttctgtggccatcgtacatttatgggtgcattccaaacgaaaaggatgagacaaccaatatcactattcaagcgcgcgactacgtgtcatgtgctgccgagcattgtacaagcacttctttactgaagattgacatcaaggatttcttcgacaacattagcttctacctcgttaacgacatgtttctgaatttcttcaagtatcccactgaagtaagtaaaattctgtctgagatctgctgttacaaaggcaacttgattcagggcgcactgacgtcttcatacatcgcagccctctgcctatgggactgcgaggagaagttagttgctagactgaaaagaaaagggctccgctatacccgtctggtggatgatataaccatcagctccacaatcagcaattaccagtttgactacgccattagctgtgtaaccaatactctcaatgagaaagagcttccaattaatcctgagaaaacctccatttcatacgagagtattacgccgctaatggtccatggtatgaggatcaactttccagaaccaagatatcccgcgaacgaagtgaaaaagcttcgggccgccgtgcacaacatagaaaggcttgcatccgagcctggatatcgcatcaccttcgcctatcggaaagatttttccaggtgtatgggacgcatcaacaagctgaagcgggtgaaacatagctctcacggtaagctggtgagccgtctgcaaaaaattctgcctcttcctgctaaggtggatatcaaacgggccaagatcatggtcgacaggctggtcaaggattttgatgaaaagaaggacacctattggtaccaccggcgattttatcgcgctcacgacagacttaatgtcttgcagcgtacctataataaaacatccaagatcctgcgcgagaagctcaaggggaaatcccccacttacgacaacaaatga

SEQ ID NO: 10802 - RNA, 1200 nt, synthetic construct
  source 1..1200: mol_type = other RNA
atgtgtaatctgtcaccgaagaagaccacagaacatagcattagtagtatagccaacctttgcgacgcactggacatcacaccaaacgatcttgatgagctgtccctgctttctgatcaagaccgctacacgcgggacacagtggagaagtccaatggcactctgaggactatttacaaaccccattttctcctgcggaaaattcagagaaggatcaatcgacgcatttttacaaggatcgtggagtggcctgattacatatttggaagcgtcccaaataccaagggcccagacaagaaagtgattcagcggaaggactacgtcagttgcgccgcacaacattgtgaaagcaaaagcttgctgaagatcgacatcaaggatttcttcgacaatatacacatctaccacgtgaagaagatcttcttagacttcttcaagtatcccgaagacgtgagtgagctgttagcggatatttgctgtttcgagcagcgagtagttcagggggcactcacctccagctatatagcctcactgtgcctgtgggataccgagccccagctcgtcaaaaggttgcagcgtaacaacctgacttataccagattagttgacgacattactgtttcctctaaagtgtctaactttcagttcgaaatggctatgtcccagattacccggatcctagaggacaaggatctgcccatcaactacagcaagacaaaagtatcttacgtctcaatctctcccttgatggtacacggtatgagagtcaatttctccgaacctagatatccatcagatgagctgcggaaactacgagcgtctgtgcacaatattgaaaagttggcttcccagactggctatcgcactaccttcgcctacaggaaagattttaaccgatgtatggggagggttaacaaactcaaacgcgtgaaacataataaacacgctgtgctgttgaaaaagttgaagaaaatccttcctctcccttcgaaaacagatctcaagagaatcagcctgagcgtgaagcggctggagtcagactatctcgacaagaaggaaacgtattggtatcgcaagcgtttttacatggcccaagataggcttaacattctcaatcggacctttaaccagagtgctgcccaatacagagagcgtctaaatagaatcaagccgctgtacgatcgcgtggaaaacggatga

SEQ ID NO: 10803 - RNA, 1101 nt, synthetic construct
  source 1..1101: mol_type = other RNA
atgaactctttatctcctcagaagaacactactgaatccattgctagcatcacaaatctttgcaccgcccttagtatctcaatcgacgagcttaatactgtactgcagatggagccaagtgagtggtatgtcaaggattatgtgcccaagtccgatgggagtgaacgtgtgatttacaagccccatcacttactgagaagaatccagcgccgcattaataagagaatcctatctcggatcatcaagtggcctgaattcatttacggaagtgtgccaaacgagaaggtagacgccaacaccataattagaaaagactacgtgtcctgcgctgcaaaacattgcggtgcaaagagcattctgaaagtggatataaaagacttcttcgacaatatccagcagtatcacgttctcaacattttcagaggatttttcaactactccgatgaagtttctaagacattggccaatttgtgttgctataatgagagggtggtccagggcgccctgacaagttcctacattgcatctctatgtctgtgggatgtggaaaccgaagtcgtcaaacgattgatgcgacatcgcctggtttacacgcgacttgtggatgacatcaccgtgagctccacagtaagcaactttcaatttgactcagctctgtcatacattcggtctatgctggaagggaaagacctcccactgaacatggccaagacaaaaagcctgtatgtctccgttgagcctctgctggtgcacggcatgcgggttaattttcctgagccccggtacccgtcagacgagatcaggaaactccgcgctagcgtccacaacctggagagactggcgtcacaagtcggttatcgcaccacatacgcgtataggactgatttcaataggtgtatgggccgagtgaataagttgaagcgggtgggacataacaagcacgccgtactcctcaaaaagctcaaaaagatacttcccttgccatcgaagaccgatttaaaaaggatcaacgtgactataagccggctcgagagcgattttgaccgcaagcgtacgaggaccgggatcaggaaagacatcctgagacgtatgattggctga

SEQ ID NO: 10804 - RNA, 1188 nt, synthetic construct
  source 1..1188: mol_type = other RNA
atgtatcaactggagccaatcaaaaagacaaagcaggtgattgcatccatcccaaatctgtgctccgccctagatatcactatagacgaactgaataaagctttatcgctatcaagtgaggagaggtacgtccaggggaaggttagtaaatccgacggctcttacagggacgtgtacaacccccacaatctgattaggaagattcagcgccgcattaaccgaagaattttcatcaagctggtgggttggccctcatacatctttggatccatcccaaacaacatagacaagaacggcaaagtgctggaagctaaggattacgtgaattgtgccgcccagcactgcctggcaaaatcgctgctgaaaatggacttaaaggatttcttcaacaacatccacatagaccatgtgaaggagatgttcgagaaattctttaactaccccaaggacgtctctgaggcactgtccaatatatgttgtcgaggcgattccttggtacagggagccttgacaagcagttatattgccagtctctgtttatgggacctggaacctcatctggtaaaaagactcaagcgaaagcaactgatttacacccggctggtcgatgatatcaccgtttcttcaaagatctctaattttcagttcgacatgaccattgaacacattactagcatgttgcacgaaatggacctcccaattaataatagcaagaccaaagtcgcatacacaagcatcgaaccgctcacggtccacgggatgagggttaactttaaagagcctagatatcctagcgatgaagtacggagactcagagcggcggtgcataatatcgagtctcttgctagcgagccaggatacagagtgacttttgcctatcgtaaggattttaacaggtgcatgggtcgggtcaataaacttaaacgggtggagcatgagaaacaccagacgctagttaacaaactccttaagatccttcctcttccctcagaaaaagatcttaagaggtgcaaagctagcatcttgcggttggaaacagacttcccgctgaagggggacacctattggtatcgcaagagattctacatcgtgcatgaccgcctgaatgtgctccaaaggacctataagcgcactgccctcaagctgcgtaaccggatgaagcccatacgccctgagtatgatgattga

SEQ ID NO: 10805 - RNA, 1188 nt, synthetic construct
  source 1..1188: mol_type = other RNA
atgtaccagcttgagcctattaagaaaacggacgagtccattgcctctatagagaatctctgtaataccctcgatatcagcctcaaggagattaacgaagccttgagcttgagccctgacgagaggtacgtgtataggaaaatcccaaaatccgacggcagttacagagaagtgtataaccctcacaatctcatccgtaaaatccagcgcaggatcaacagaaggatctttattaaacttgtcaagtggccttcctatatcttcgggtcgattcccaataacgtagattcagtggggcaggtcttagaagctaaagactacgtaagttgcgccttccaacactgtcagtcgaagtctcttctgaaaatggatctgaaggatttctttaacaacgtccacatcgatcatgtgcatgatatctttgaggggtttttcaactacccctctgaggtgagtcgggtgctgtcagacctgtgttgcagagaggactccttagtacaaggagctctaacatcatcttacatagcgtccctgtgcctgtggcgtttcgagccgctgcttgtcaagcggctgaagagaaaaaatctcgtgtatactcgcttagttgatgatattaccgtcagctctaagatatcaaatttccagttcgacatgacgatcgaacatatcaaaaatatgctgtacgaaatggatcttccactcaacaatgagaagactaaggtcatttatacaagcatagaaccactcacagttcatggtatgagagtgaattttaaggagcccagatatagttcagacgaagtgcgaaaattgcgttccgcagtgcataacatcgagtgcctggcatccgagcccggttaccgggttacttttgcatatcggcgagacttcaaccgctgtatgggacggattaacaagctaaagcgcgtgggccacgagaagcacaaaaccctggtgagtaagctgttgaaaattttgccactgcctagcgaaaaggacctaaagagatgcaaggctagcatcctgcgactggaagccgattatccgctgaagggcgactcttactggtacaggaaaaggttttatatactgcacgaccggcttaacgttctccagaggacctacaataaaaccgccgacagcattcgcgaccgcatgaaggaaatcacacccaaatacgatgattga

SEQ ID NO: 10806 - RNA, 1203 nt, synthetic construct
  source 1..1203: mol_type = other RNA
atgtacgcattccaatttcaccccattaagaagtcaactagtgtcattgccaatttcaagaagctgtgcgaggctctgaatatcagtgaggtggagatgaagaaagcgctcagtctcccacccgaggagcgatatgtggcctcctccgtgaaaaaagccgatggaagtactcgggccattttcaagcctcacaacttgatccggaagattcagcggagaataaatcgaaggatttttaaaacgctcgtgatctggcctagctatttatacggctctattcctaacactattgaccctaccacgaagaaagtaattgaacacaaagactatgtcaactgtgccgcgcagcattgtagcagcaagtctctgctgaagatggatataaaggatttcttcgacaatatccatcgcgactatgtcagcgacatattcacagtgtttttcaaatttccaccagatgtgtccgaggcactgacatcgatttgttgtcgtgaaaatactttggtgcaaggggctcttacatcctcctacctcgctaatctggtgttatgggatatcgaaggtgacctggtaaaaaagcttaaccgcaaaaacctaacctataccagactggtggacgacatcacagtttcatccaaggtatctaatttccaattcgatcttgccatatccctgatcagctctgctctgatctctaaagagctgcccatcaacaccagcaaaacacaggtttcttacgtctcaagtaatccgctaaccgttcacgggatgcgggtcaattttcccgaacctagatacccgagcgatgaggtgaggaagctgagggcatcggtccataacctgcagtgccttgcatcacaaccaggctaccgacagtcacattcctatcgtaaagactatgcttgctgtatgggaagggtgaacaagctgaagagggttaaacatgaaaaacacgccgtccttatcaagaagctgaacaaaatcaagcccctaccaagcgaagtggaccagagacgctgcaagcagatgctcagacgcttgcagaacgactacaagaataagcacttggattactggtactgcaaacggttttatcggttgcacgatagactcaacgttctccagcgcaaatcttgctttcgtgatttagccgaaaagatccgcgaggagatgaggctcataaaacccacctacgaccagtga

SEQ ID NO: 10807 - RNA, 1203 nt, synthetic construct
  source 1..1203: mol_type = other RNA
atgcggaacatccgacctgcccttacaacctctaagccgatcaagtcactggcaagtctcgaatccaccctggggctttctagcaagcaactctctgagattcttgacattccagagtgtcagaaatatgtcgagaaggctgttccgaagccagatggttccctgaggactgtataccgacctcatcctttgatcaggaaagctcagcgccgcattaacaataatatcttcaaggagatcgtgatctggccctcatacgtttttggctcactgcctaacagtgtcatcaatcaggatgaaattgagcgtaaagactatatttcctgcgctgcccagcattgtggagccaagagcctcctgaaaatggacatcaaaagcttcttcgacaacattcacattgactacgtgaaccacatgttttgcaatttcttcgattattccagtgacgtcgccgatatcctcagccggctttgctgtcgaggcgatttcatagtgcaggggggcctcacaagctcttatgtggcttcacttattctgtgggagtttgaacccaagctagtaaagagactaaccagaaagaagctgatatacactcgcctagtggacgatattagtataagcagtaagatctccaactttgacttctctatgacaaagtccttagtgacgaatactctccacgagctggacttgcccgtaaacgagaggaaaaccaaagtttcatatgtcagcacagaaccattgtccgtgcatggcattcgagttaattttaaagaacctcggctgccctcgaatgaagtccgctgcatcagggcagcagtgcacaatctgacggtgctggcgagccagcctggatatcgtaccactcatgactacaggagtgattttagccgctgtatgggcagggtgaacaagttaaagcgggtcgagcatgagaaacacaaggactttctggaaatcttgcagaacatcaagccccttccatcaccaaaagatctgaagagagcccgtgagatgctcggaagactggagcgggattacacaacccaatccggttctagagggtaccggaccaggttcttcagattacaagagagactgaacgtgctgtcgaggaagaaagaatacctgaatgacgcgaaaaagatacgccacaaactcaaatctttgaaacccgatgaaactgcccggtccaacttttga

SEQ ID NO: 10808 - RNA, 1194 nt, synthetic construct
  source 1..1194: mol_type = other RNA
atgaggaatctcaatcctactctcactaccgtcaagcccatcacaacattggagaggactctcggcttggatagtaatgagatttctaccatcctggctatccccgagaatcagaaatacgttgaaaaaacagttccaaaagccgatggctcgctccggaccgtatacaggccccatccgctgattcggaaagctcagcgaaagatcaacaacaacattttcaaggagatcgtgatttggcccagctatgtcttcggctcactgccaaatagtgtcatcgacaaaaacgagattgagaggaaggattacatatcctgcgccgcaaagcattgcggggccaagtccctgctcaagatggacatcaagaactttttcgacaacatccacattgaccatgtagtctctatgttcataaatttcttcggatgtaaggcggaaattgctaatacactgtcacgcttgtgttgtaaaggtgagtttattgttcaagggggcctgacaagtagctacgtggcctcgctcattctgtggcaactggagccggagcttgtccggcgactgtctcggaaaaaactgacatacacccgcctagtggatgatatcagcatcagcagtaaaacctcccactttgacttcagtatggtgatatcactcgtgaccaacatgttacatgaattagacttgccagtgaatgagactaaaacgaaggtttcccacctgagcacggaacctctgtctgtgcacggaatccggattaattttaagcagccacgactgccttccaacgaggtgcgccgcatacgtgcatcagtgcataatctaactgtgctggcatctcagcctggttacagaactacgcacgattataggggcgattttgctcggtgcatgggaagagtcaacaaacttaaaagagtggaacacgagaaacactccgagtttttatcaatcctgcagaagattaagccactgccctcccctaaagatcttacccgtgcgagggaaatgcttagcaggctagaaagagactatagcgacaagaacgagacaagagggtatcggacccgatattttcgtcttcaggaacgcctcaacgtattgtatagaaagaaggactacatctgcgaagccaagagcataagaaagaagctgaaatctatcaagcccaacgaaaatgcccgcaacaatttctga

SEQ ID NO: 10809 - RNA, 1203 nt, synthetic construct
  source 1..1203: mol_type = other RNA
atgtatctttctcaaccctccttaaacactaaaaatgccatcaactctatggccgccttggagaaaacccttggacttactgctaaagaaatccaaagcatcattagcttgcccgaatcacagaaatacttcgagaagaaggtgccaaaaagcgatggatccatacgactcgtgtactgtcctcacccacaggtgaggcgagcccagaggaagatcaacaacaacatcttcaagaaactggtgaagtggcccagctacatctttgggtccatacctaacacaaaaattagtaaggagcagatagagaagaaggactatatttcttgcgctggacaacattgtggcgcgaagagcctcctcaagatggacatcaagtccttcttcgacaacattcattttgaccacgtcttggatatgttcgtgaatttcttccattacgacaaagatgtgtcttttactttagcgaagctgtgctgcaaatctaactatattgtgcaaggtggcctgacctccagctacgtcgcctccctgattctctggaggcatgagcccgagctagtaaagcgtttgcagcggaaaaacctgacctacaccagactggtggacgacattagtatcagctcgcatgtcagtaatttcgatttttccatggttcagcagctagtcacaaacatgctgtatgaaatagacctgccggtgaataacgataagactaaggtataccatctcagtacagaacctctgacgatccacggcatccgcgttaacttcaatgaaccacgcctgcctgctaacgaggttcggaagatacgtgcagctgtgcacaatctcacgattctggcatctcagccggggtataggacacttcactcatatagagaggactacgcaagatgcatgggtcgggtcaataagctaaagagggttcagcacgagaagcacagtgaatttctgaaaaccctgcagaatatcagacctttgccatcagaaaaagatttaaagcgagcacgcgtggtctaccaccggctcatgaggaattactcagaaaagaaagatacaagagggtatagaacctcattctttaaacttcaagagcggctcaatgtactgtgtcggaaaaagtgttttcgtgaggaggcccagaaaattcgccgcaagctgaaagaaatcgcccccagcaagcaggccaaagagaatttttga

SEQ ID NO: 10810 - RNA, 1203 nt, synthetic construct
  source 1..1203: mol_type = other RNA
atgacgattatcgagcccagccttaatactcctaatgtgatcgcttctataagggcgctcgagaagaccctcggattgactcagcaggacataactactgcgttagagattccggaatctaagaaataccacgtgaaacaggtcccaaagcagaatggggagttacgttcggtgtatcgacctcatccactgattcggagggcacagagacgaatcaacaacaacatctttaagaagatcgtgctttggcctagctatatctttggcagtcttccgaataccattaacaagaacaatgaagtggagagaaaggattacatctcatgcgctgctcaacactgcggcgccaagagcctcctgaaaatggatatcaaggacttcttcgacaatatccacatcgatcatgttcgctcaatgttcatacactttttcaagtgtggggatgatgtagcagatattctggccaaactgtgctgtaaagagaaccacgtggttcagggtggactgacaagttcatatattgcctgtctaattctgtggaacatagagcacaaattggtgaatcggctcgcccgtaaaaacttgacttatacaagactgatggacgacattacagtgagctccaagatttctaattttgacttcagcatgaccactaatctcatcgccaacatgcttcaagaactggatctccctatcaacacctctaaaacaaaagtgtgccatttgtccaccgaacccctgaccgtccatggtgtgagagtaaattttaaagagccacgcttccccagcaacgaagttaaacgaatacgggcctccgtacacaatctgacaatcctggcatcccagcccggctatagactgacacatgactataggagtgattacgcacgctgtatggggagggtcaataagttgaagcgggtgaatcatgagaagcacaaggaattcttagtcatcctccagaaaattctgcctctaccaagtgtcagggataagaaacgcgctaaacaaatgttcataaggctaatcaaggactaccgcattaagtataaaaccaaaggatacagaaccaggtactttcggctccaggaacgcctgaacgttctttccagaaagaaagactacctgaacttcacgaaatacatccggaagaagctgaagaacattaagcccgacgagcactcaaagacggacttttga

SEQ ID NO: 10811 - RNA, 1206 nt, synthetic construct
  source 1..1206: mol_type = other RNA
atgactataatcaaaccccagaagatccatcctacaaccattgcctcaaagtctgcactgtgtgtaaccctgggatttactctgctggagctgaatgaagtactaagtgtgcctagctctgaacgatataaaagaaaggagatcgacaaaccagatgggtccaagagggtagtgtataacccacatcccctcattcgacgtgcccagcgacgcatcaataccaacattttcaagaagcttgtgagctggccatattatctctacggcagcattcctaataccgtgataaaggagtcaggtttacctaagattatcatccgcaaagactacgtcacgtgcgcgagcaaacattgtggcgctaagtccctgttgaagatggacattaagaatttcttcgacaacatccacgaaaaccatgtcaggaacttattccttaggtttttccactttagccccgaggtggctcacattcttacaaatatctgctgtcacgaatctaatgtggtgcagggtagtcccacctcttcgtatattgccagtctcatactttgggatgttgagcacctggcagttaagaagatctccagaaaaaacctggtttacacgcggctggtcgacgatatttccgtgagctccaaatcatccaaatacgattttagcatgatcgaagacatcatcactcagatgctgacctcccgcgacttacccgtcaacaagaaaaaaaccaagcattgctatctatccacagagccgctaactgttcacggaatacgcattaattacaaagaaccccggtttccttcagatgaaatacggagactccggtcatacgtgcacaacctccagactttggctaagcaacctggctataggacaacacattcttaccggactgactatgcaatttgtatgggaaaggtgaacaaacttaaacgggtgaatcacaacaaacacttcatttttttggagcagttgcgtgccatcagaccactgccaagtgaggacgatctggataggtgccgctacgtcatcgcacgcttggatgcttataatacaatccatgggaacgagtctttcagctacaggaagcggttctacaggctgcaagagcgactcaatgtcctgcagagactctcgaagtacaaaaccgccgccaaggaaatgagagcgcgtctgaagagtctcagaccgccaaacgaggtttga

SEQ ID NO: 10812 - RNA, 1227 nt, synthetic construct
  source 1..1227: mol_type = other RNA
atggctaagcctcttttgtttaacctgaagacaatgtaccagatcctaaaaccagagaagattaactcgaaatccattagttcattggacaatttatgcgaggctctgaatatctctgttgacgagttaaacgaggccctcaacctcccggagagtgaaaagtatactgaaaaaaccgtcccaaagtctaatggcgcaattcgacacgttttcaaaccccatcacctgctgaggaaaattcagcggcggatcaataaaagaatatttaccaagctggtgaagtggccatcctacctgtacggcaccctgcccaacgatctggatggaaacggtgacattatactcaaccgagactacataaattgtgccagacaacattgccagtccaaatctctgctgaaggtggacattaaggatttcttcgacaacatccacgaggattacgttttcgaaattttccacgtttttctcaagtatcctgatgatgtatctaaagcactgacaaagatctgctgccacaataaaaacgtggtgcagggggcacttacgtcgagctatatctcatgtctctctctttggaatatggagcacaagatcgtgaagagactgcaacgtaagaatttgatatatactcggttggtcgacgatatcaccgtgagctccaaggtgtccaactataactttgatgcggccctctcacacataaaaaacatgctgtatgagcgtgacttgcccctgaacattgaaaaaacacgcccctactatatcagcatggagcctcttacagtacatgggctgcgggtgaattttgacactcccaggctcccaagcgatgaagtcagaaaaatccgagcggccgtccataatatttccaaattatccagcgaacctggttacagaaccaccttcgcttatcggaaggactacaatcgctgtattgggcgggtgaataagttgaagcgcatcggacatgaaaagcacgaggccctgctgaaaaagcttatcgagattccacctctacccagcaggaaggatatcgaacgtactagggcatcaatcgagaggcttgagagagacttccagtctaaaggcagcagttattggtactacaaacgcttctaccgagctcatgaccgcctgaacgtgctccagaggaggtttgatgtcatcgccagtgaattacgcgatagactcaaggaaattaagccgctatacgacaaaaattga

SEQ ID NO: 10813 - RNA, 1266 nt, synthetic construct
  source 1..1266: mol_type = other RNA
atgagcatcttgcaatacatgaatgagaatcagccaatccaggctcctatcaagcccactttaaagaccagtaaaaagatctcttctcccgaaaatctgctggtggcccttgggctgagcgcatccgagctgaattgcgctctgtatatgacctccgccgaaagatatactgcgaagaaggtccccaagtcgtcaggcggtgaaaggattgtccacattcctcacccgttgatcaaaaagattcagcggaggattaataacagagtgttgtcgaagattgttgtatggccatactacttattcggcagcgtgccttccgagatcgatgttctgtacgaagacgccatcctgaaacgcgattatatatcctgtgcccagcaacactgcaaagcaaagtctatcttgaagtatgacatcgagaactttttcgataacatccattacgatctggtgaacgacatcttcatcaacttctttaagttcgactgcgataccgctagaattctgagtgacctctgttgtattgactcagaagacgggtcacatattgtgcagggggccccaacttctagctatctcgcctgcctctgcctgtgggatatagaacatgacatagtgcagcgacttaagaggaaaaaccttatctatacacggctcgtggacgacattacggtcagtagcaagatatatgactacaactttgagaacgcaaaaaaatcaatcgaggacatgattcatgagaaggacttccccattaacaaagcaaaatccagagctctgtctacctctagtgaacctctgctcgtgcatggcttacgtgttaattttcacacacccagactaccatctgatgaagtaggacggattcgtgcctccgtgaaaaacgtggagctgcgagcggcaactaataattttcggacctcaaaagcttaccgcaaggcgttcgagcgatgtcttggacgtgtccacaagctcgctcgggttggccacaacgcccacacaaagcttcgcgataggctccttaagattcagccactaccgtcccaaagggatatagatagagtaaaacacaatgtgacgaggctggagatcttggcagccaatggctgtgatgacctgcgctactcccggagctattacatcagcatgtacatcctgaatatcattaacagaacagaacgctacaaacctctagtcagcgagctgcgcgccaggctccatgctatagcccccagtaaagaggtcggtggaacctattttgattga

SEQ ID NO: 10814 - RNA, 1227 nt, synthetic construct
  source 1..1227: mol_type = other RNA
atggctccattgcagcctacactgaaaacaaccaagaagattgcatcttccgccaatctgttgaccgccctcgggcttgatgagagcgagctgagttctgccctcgcaatgacaccggcggaaagatacacagccaagaaggtgcccaagtcatctgggggcgagaggactgttcatatcccccatcctctcatcaaaaaaatccagcggcggattaacaaccgcatcctgagtaagatcgtgatctggccctattatttgtttggctctgtgcccagtgagattgatgtcctgtacgaagacgagatcttgaagagagactacataagctgcgctcagcaacattgtagggccaagtccattcttaagtacgatatagagaacttcttcgaccacattcactacgacctggtgtatgagattttcactaacttcttcaactacaatgacgagacttccaagactctctcaaatctttgttgtatggagtccgatgatggacatcacattgtccagggcgcacccaccagcagctacctagcatgcctgtgcctgtgggatatagagcataaagtcgtgacaagactggaacggaacaatctcgtgtatacccggctggtagacgacatcaccataagctcaaagattcacgactataactttgagaatgccaagaaatcgatcgaggacatgattcacggaaaggattttcctatcaataaagcgaaatcacgcacattctctattagcaatgaaccattactagtgcacggcctgagggtgaactttaacaccccgcgcttaccaagtgacgaagtgggaagaataagggctgccgtgaaaaacatcgaactccgagcggccaaaaataatttccgcacctccaaggcttatagaaaagcttttgaaaaatgcctgggtcgggtccataaattagccagggtaggtcacaattcgcacattaagttgcgagatagactgctaaagatcaaaccactgcctagtatgcgcgatataaacatggtcaagaggtatatcgatagactcgaagttcaggctaagtccggggttgacgacattaagtactcacgttcctatcacatcaccatgtactaccttaatatcatcaaccggactgaacgataccaaagcctggttagcgaactgcgtgcaaggctccatcttattacgccttctaaagaggatcgcggcacgtattttgactga

SEQ ID NO: 10815 - RNA, 1227 nt, synthetic construct
  source 1..1227: mol_type = other RNA
atggcgccccaaaaaccaacgttgaagacagataagaagatcgcctccttagcaaatctcctgaccgctctgggcctggatgaatctgagctcctgtctgccctgagcatgacttacctcgagagatacacccccaaaaaggtcccgaaaagttccggtggggagcggaccgtgcacattcctcatccactcattaagaagatccagagacgtatcaataacagaatcttcagcaagatcgttatctggccctattatctgtttgggtcagtacctagtgagatcgatgtgctgtatgaaaatgagttgttgaaacgcgactacatatcctgtgctcagcagcattgcaaagccaagagcattctcaagtacgatattgaaaacttcttcgaccacattcattatgaccttgtgtacgagatcttcactaagtttttcaaatacgaccacgaagtctctaggattctttctgatttgtgctgcattgacggcgaagaggggaatcacatagtgcagggcgctcccacatcgtcctatctagcatgtctatgtctttgggatgttgagtgtaacatcatcaaaagactggaacggaaaaaccttgtgtatacaaggctagtcgatgatattactgtcagctccaagatccatgactacaacttcgaaaatgcgaaaaagactatagaggacatgattcatggaaaggactttcccatcaacaaggaaaagtctcgaacctttaacatttcgaacgagccgctctccgtccacgggttacgggtgaattttaatacacctcggctgccttcagacgaggtaggcaggataagggccagcgtgaagaacattgaattgcgcgcagctacgaacaactttagaacctcaaaagcatatcgcaaagccttcgagcgatgcctgggtcgtgtgcacaaactggcccgggttggacatgaggcccacatcaagctcaaagagcgtttacgaaagattaaacctctgccaagcccaaaggacgtaaataaagtgaagcactatgtggatagactcgaagttatcgctaaaacaggatgcgacaatatcaagtacagtcgctcttaccacataaccatgtactatctgaatatcgtgtacaggactgaaaagtatcgcccactggtcagtgagctgcggtcaaggcttcatgcaatagcccccagcaaggaagagaaaggcacctacttcgattga

SEQ ID NO: 10816 - RNA, 1269 nt, synthetic construct
  source 1..1269: mol_type = other RNA
atgtctatcctcaagaatgttactaatagcagcgtgtctgtcgcccccaataaacctacgctcaagaccaccaagactattgctagcctggccaacctgtgtacagctttaggtattgatagcagcgaattggatgccgcacgctccatgacgtcctcgcagagatatgtcgagaagaaggttccaaagagctctggaggagaacgcaccgttttcatcccacacccgctcattaagaaaattcagaggaggatcaataaccgggtgttctctcgaatagtggtatggccctactatttgtttgggagcgttcctagtgaaattgaggttactcaccataacgatattctaaagcgggactatatatcatgcgcgaatcagcattgcaagtccaaaagtatcttgaagtacgacatcgaaaatttcttcgacaacatccattacgacctggtgtatgaactgttcacagatttcttccactattctgatgacgttgccgaggtgctttcagatctctgttgcatcaatggcgtaaacggatacgtggtgcaaggggctcccacctcctcctatctggcctcactgtgcctgtgggacgtcgagtacaaggtggtcaagaggttagagcggaaaaatctggtgtatacacgactcgtggacgacattaccgtcagcagtaagatacacgactacaattttgaaaacgcacgtcaggctattgaagagatgatcctgaacaaggatctccccatcaacaaatccaagtcgaagagttttagtatttcatctgagcctctctccgtgcatggcctgcgggtgaactttaacaccccgagattgccaagtgacgaggtggggagaatcagagcatccgtgaaaaacatagagcttcgtgcctctactaataatttccgaacaagcaaagcttatcgcaaagcttttgagaggtcattgggccgggtccacaagcttgcccgtgtaggccacgaagcacatcggaagcttaaagacagactactgaagattcagccacttccttccaaaagagatgtccagcgagtgaaacgcgcagtcgatctgctggagcaaaaatctaaaggctgtgtggacgaaatcaggtatgccaggagctaccacatcgcgatgtactacttaaacatagtgaaccgcactgataggtacaagcctttggtcgagtcactgcgcacaagactccacctgatcgcccccgataaagagaaacatggtgactactttgaggaagtatga

SEQ ID NO: 10817 - RNA, 1173 nt, synthetic construct
  source 1..1173: mol_type = other RNA
atgcccaaattgatctcaaaaaacaagatctcttccgtggataacctctgtcgggctctggatatcagtagatgcgaactggatgccatctacgccttaaatgatgatgaaaaatactcagagccttctaagctggcgttcaaaaaggacgggaagaaacgcgtcattaaatgcccgattcctattataaggaaagtgcagaacaggatcaactcacgcatctttaaaactctggtgaagtggccagaatttctctttggcagtataccaaatgatgagttcgaggacattgaattaaagaaggactacgttacatgcgcaagcctgcattgcgaagctaaatctttactcaaaatcgacatcagcgattttttctccaacatacatgaagacttcgtccgagaacttttccttgacttcttcaattatgatgaggacctggttgactatctcattaagatctgttgttacaaaggtaccctggtgcagggagctcttaccagttcctatattgcatccttgattctatggaatgaggagagatatgtggtgagaaagctggagcgctggggcctagtgtatactcgtctggtcgatgacataactgtcagctctaagcgaagtaagtataattttagcatcgccgaacaccatatatacgagatgctattcaaaaaagacctgcccgtaaacaaggaaaagtccaagaccttctttagctcaagctccccactcacagtgcatgggctgagagtgtcatttaagacccctaggttgccttctgacgaagtacgcaggattcgagcagccgtccagtgtctggagaatctctactccgagcccaattataatacgagctattcgtatcggaaggactttcaacggtgtgtgggaagagttaataaactggctcgcgtacaccacgagaagcacaagccattgatgaacaggctgaggaaaatccgtccgaaaccctcggaaattgaccttaagatttccaagaagatcctgagcaaacttaagatggagtacgacgacaaaaaggataaatactggtacaagaagcagtactggcaattggtggatcgggttaacctcatctctagtacataccacaaagaggcctgctacttccggaacgagctcaagaacatcaagcccgagtttgattga

SEQ ID NO: 10818 - RNA, 1173 nt, synthetic construct
  source 1..1173: mol_type = other RNA
atgccgaggctgatctccaagaataagatttcttccgtggataacttttgtcacgctcttgacatcccaagacaggagcttgatttgatttacagtctgacagacgaagacaagtatacagagcctgctaaattggcctttaaaaaggacggaaaaaaacgcgtcatcaaatgccccactccgtcaattaggaaggtccagagcagaataaacagccgaatctttaaaaagctcatcaagtggcctgaatttatctttggaagtataccaaacgacgactttgaggagcacgagctgaagaaagattatgtgacctgcgcctccctgcattgtgaagccaagtccttactgaagatagacatcagcgattttttctctaacatccatcaggatttcgtggaggaactgttcaaaaacttctttaagtacgacgaagagctggtaaagtacttggtccacatttgctgctataaaggcaccctcgtccagggcgcactaacatcttcctatattgcttccttgattctgtgggatgaagagaggaaagtcgtgaagaaacttgatcggtggggtctggtttacacccggctcgttgatgacataactgtgagctcaaagacttcgcgatacaatttctcagtggtggagcaccacatatacgagatgctgttcaaaaaagaccttcctgtaaacaaggagaagtcaaaaatcttcttcagcagttctagtccactcacagtgcacgggctgcgggtaagtttcaagactccaaggcttccctcggatgaggtgagaaaaattcgcgccgcagttcagtctctagaagtgctgtatagcgaacccaattataatacgagcttcagctacagaaaagattttcaacggtgtgtcgggcgcgttaataagctcgcacgtgtgtctcatgaaaaacataagcccctgatgaatcgtctccgcaaaattaagcccaagccttccgaggtggacatcaaaatcgcgtataaagtgttagccaagttaaagaaagactacaccaacaagaaagacaagttttggtacaagaagcaatattggcagctcgtcgatagagttaatctgatctcaaccaccttttacttcgaagctgcctccattaggaaggatttgatcaacattaagcctgaattcgagtga

SEQ ID NO: 10819 - RNA, 1170 nt, synthetic construct
  source 1..1170: mol_type = other RNA
atgcctaagatcatccccaagaataagatctctaaagtcgataacttctgccaggtgctcgatatatctagagaagaactagaggccattattcagctcaacgatgaggataagtacctcgaaccgaaaaccctggctttcaaaaagaatggtaagaaaaggctcgtgaaatgtccaatacaacctctcaggaagattcagaaacgtatcaataatcggattttcaaggagatcatccaatggccagagtttgttttcggctcagtgcccaatgatgatgagctagaaattcagaaagactatgtcacctgtgctagcctgcactgcgaggccaaatccctgctgaaggtggacataagcgattttttcttgaacattcatgaggactttgtgcgagacttattcaagcggttctttaattacgacgaggaattgtgtgattatctcgtagcattatgctgctacaatggcaccctggtgcagggagccctgacatcatcatatcttgccagccttatcctgtgggacctggagcggagcgtcgtcaacaagctcaaacgctggaagctgacttacactagactggtggatgatatcactgtctcgtcgaagatttccaaattcaactttgagattgcggaacatcacatcaagaatatgctcatgcttaaggacctgcccgttaattccaacaagtctaaggtcatctactcttcatcttccccactgatggtgcacgggctgcgcgttagctttaaaacaccgaggctacccagtgacgaggtgagaagaattcgggcagccgtgcagtccttagaacggttgtataatgagcctaactacaacaccagtttttcctacagaaaggaccaccaaaggtgtacagggagggttaacaagctggcacgcgtgaaacatgaaaaacacaaggctctgatgcgacgtcttaaaaaaatacgccctaacccaagcattgtagacgtaaaaatcgccgagaagattttggtgaagcttaagaaagactaccccacaaagcatagtaaatattggtatgcgagacagtattggaagctgatcgaccgcatcaacattatcaaccagagcttcataatcgatgccaaaaggttgcgagctgaagcaagtaaaatcaagcccgaaaatacgatatga

SEQ ID NO: 10820 - RNA, 1176 nt, synthetic construct
  source 1..1176: mol_type = other RNA
atgccgaagataaccacgactaagaaaatctctaacatcgacaactttgcaaaggcaataggagttagcaaagagtacatcgattcagtgatctctctgtctgatgatgataagtatacagacccaaagaagaaggcctttaagaaggacggaaaaatccgaatagtgaagtgcccctctagcaagctgcggaagattcaatctagaattaacacccggatcttcaaggatttgataaaatggccggactttctgtatggctccatccctaatgatgacgacggtgaaatcgagattaagaaggactacattagttgtgcaagccgccattgtgaggcccgctcgttacttaagatcgacatcagtgacttcttccttaatattcacgagtccttcgtctatgacctgttcaacaagtttttcaaatacgatgatgagctttgccggtgtctagtaagtctgtgctgttacaaaggtaccctcgtgcaaggcgctctcacgtcatcgtacattgctagcttgattctctgggatgtcgaaagtaatttggtgaggcggctggaacgttggcagctggtctacacacggctggtggatgatattactgtgagttccaaagtggaaaaatataacttcgacatagccaagtatcacattaaggaaatgctcttttccaaagacctgcccatcaatgaaaaaaaaaccagcgtgagctacaattcatctacacctctgatggtacacgggctaagagttagctttaaaacccccaggcttccctcatatgaagttaagaggattcgcagctctgtgcagtccttagagttactgtttaaggagcccgggtataatacttccttcggctatcgaaaagattatcagaaatgcatggggcgagtcaataaactcgcgagagttcagcataacaagtttcctattctgatgaatcgcctgaagaagatcagacctaaatgctccaaattggatgtcaagatatcaaggcgtatcctcagaaaactccaggaggactacccacagaagaaagacatgttctggtacaagaaacagtactacaaacttattgacaggatcaactttatctcaaacacattcaagagcgaggcccatgaaattcgcctggacgctaagaaaatctccccaccagaggatgactga

SEQ ID NO: 10821 - RNA, 1188 nt, synthetic construct
  source 1..1188: mol_type = other RNA
atgatccaacccaagtataagttcggaccaatcaaagatttgaaccagttggccgccagtctctcctacacactaaaagagctgaacacactgctgtctaccccagacgataaaaaatattccgaccccagccagcctgcgtataagaaggacggctccatccgtaaaataaagaacccctctgatgattttagacgggtacaaggccgcattaaccacaggatattcaaacaggggattgagtggcctagttatctgtttggatccatccctaaggaatcagcaggtagagagactgattatatcgagtgtgcacgtagacatgtggaggccaaaagtatttgtaagatcgacataaccaacttctttgacaacattcacgagatcttcgtgtacgaaatgtttctggaactgtttaggtttcccgaacctgtcgctaaagcactgacgaatctatgctgctataacaaatcattggtccagggtgcaaggacctctagttacattgctacactgatcctctggaaggaagaagggcgcatcttcgagcggctctcgcggaaaaatctggtgtacactcggcttattgatgatataacggtgtcttcaaagatcgctaactacaacttcgatgttcccaaaaagcacatcgagaacatgctcctggagattgacttgcctgtgaatgaagacaagtttaagatccagtacaccagcatgaccccccttgaggtacacggcgtgcgcgtgacttattctaagcctagcttcagcaagtccgagatgatgaatattaaagctgccgttcaccatctcgaggtcctagtcaaaactccaaatacacgaaccgagatgtggtaccgaaaggactacaataggtgcatggggcgggttaataagttagccagggtgaagtcccccaggcataagaagcttgtcaaaaagcttaaggtgattagaccactgccgtctttaaaagacctgaactacagcaaaatacgcttgaagaacctgaaagaagacagcaaaaacagcaagaaaatcgcgtcgtattcatactacaagagatacttcttactcatgaatcgcacaaatctcatcaagctgacttatccagataaggccaaagcccttcgaaatgaactgtacaaaattaagccgaagtataatccaaaggacttcaaatga

SEQ ID NO: 10822 - RNA, 1173 nt, synthetic construct
  source 1..1173: mol_type = other RNA
atggacatcccaaaatataatcaccctccattcgtcgaattggacaagctatgcaagatgctcagaatctctcgaacagagctggaaaatatactgagttccccctccgatgtgcggtacaaggacccaaagactactgcttataaaaaggatggctccattaggaaaattaaatgtccgctgaaagaacttcgctctattcaggagaagatcaacaataacatcttcaagaccgggttttattggcctaagtacttatttggctcaattcctaagaaagcagcactctctaatagggattatgtgagctgtgttagcttgcattgccgcgccaaatcaatctgcaagattgatattagcaacttctttgacaacgtgcacatctctctagtcaaatccgtgttcaagaatctgtgccacttttcggatgaggttacagatgtgctggctgatctgtgttgttacaatgatttcctggttcaaggagcgctgacaagctcatatctcgccaccttgattctgtgggacaaggaacccgaactggtggagaatctcaaaaaaaaggggctcgtctacactcggctcgtggacgacataacgatcagtagcagaatttccaactacaactttgatatcgccaccaagcgggtggaagtgatgctgctggagaaagaccttcccatcaacaagtctaagtacgagtataactacctctccatagagcccttaaccgtacacggcctcagagtctcatttgacaaaccgaaactgcccaaacacgagagcagcaacatccgggcatctgtgaaaaacttggagaatcttgcccagctggacagtgcccgtaccaaaatgtggttcaggacagactacaatcgatgcatgggtagggtaaataagctggctagagtcaagaaccagaagcatcaggcgttagtagaacgtttgaaggttatagaaccacttccctcaataaacgacattaagtatgccagactgaggctcaagaatctggaagctgattactccaccaaaaagaaaacgttcaattacaagaagcgctactataaactaaaccaacggatccatcttatcagtaagacttatcctgatgtcgcaaaaaagattcgcgagagccttaaagaggtgcccccagacgagaagcctatctga

SEQ ID NO: 10823 - RNA, 1176 nt, synthetic construct
  source 1..1176: mol_type = other RNA
atggactctaatctttatcgagacaatcctatcaatagcatccgcaatctccttgccgctttggatatttccgagtcggaatatgaaaagtttctgatcaccaaggaagaggatcgctaccatcggccacatgcagaggcctttaagaaggatggatctgttcgcaaggtgtactgcccatgtaagctcaccagaaaattccaaaggagactgaacaacaggattttcaagaagagtatagtgtggccaccgtacgtctttgggagcattcccatagatgtgaagacacatgagtcgaaagattatatcaagtgtgctgctatgcactgcaagtccaaaagtcttctcaaactggatatcagcgatttcttcgacaacattgatcagtaccacgtggtgaaaatctttactgaggctttttcataccaccaggaagtggcagacttcatttccaaaatctgctgtttcaaaggccatctcgtgcagggcgcattgacgtctagttatgtcgcaaatctcattttctacgacttggaacctgagctggtcaaaagtttgtcccggaaaaacctaacatatactaggttcatagacgacatcaccgtatcttctaaggtgagccactataacttttcctccacaaagagactgatcgaggacatgctgttaaaaaaaaacctccccctgaatgagcaaaaagtggaagtactctactcatcaaccaagcctctgatggtccacgggctgcgggttgacttcagcgagccgagactaccaagtaaggaggttgccaacattcgagcggagctgaataacctgaagcggaaggccaaagaaaaaaagtaccgtaagtctcggtcctaccgtaaatcatacgacaaatgtctgggaagggtgaataaactggcgagggtcaagcacagcgcccatgccaagtttaagcctcagctcaaagaaatacagccattaccctcagccgttgatatcaaactgtgccacgtaatacttaaaaagttggctagctttcccgatgacaagagagagtcttattggtataagaagcgcttcaaccagttagtctaccttaacggtattatcaagcgcctgtaccctaagagctattccatcattaaagagaaatccaaggaactagaacccaagagccgagtgtattga

SEQ ID NO: 10824 - RNA, 1185 nt, synthetic construct
  source 1..1185: mol_type = other RNA
atggaaattaagtattaccgcggcgacccaatcaagaagctcgagaattttatctcctttttagatctggaggatgattacgaggcattcatatcttccaattccagcagtcggtaccgtgagccggttaagtctgcctataaatctgatggctcaaaacgcagggtcctatgcccaaacaaactgacaaggaaattccagagaaggatcaacaatcggttctttaagccgaaaattatctggccagagttcgtgtacggctccattcccaagcttataaatgggatagaagactctagggaccatattaagtgtgctgaaaagcattgtggtgccaagtcactgctgaaaatggatatctcggacttcttcgacaatatacacaaggaacacattaaggacatactcgtgaatacgcttgacctgagcaacgaagtagccgactttatttgcgatgtttgttgcttcgagaataccttagtgcagggggcccttaccagcagctatgtcgcaaacctgatttttttcgacctcgaacatttgttggttaagaggcttgagagaaaaggactgacttatacacgctttatcgacgatatctcagtgagctctactgcttcaaactttaactttaacacagccaagaagcttatcgaggacatgctgctccaaaaagacctgcctattaatgagcaaaaggaggaagtaagttacagcagtataaaacctctgatggtgcacggactgcgagtcgagttcgatcagccccgcctgcccgctaaggagatcgctaagatccgggcagaagtgcacgcattgaccaaaaaagcccaggaaaacaattttagaaagtcacgaagttaccggagatcctttgatcggtgtctcggacgcatccacaaattggccagagtcaagcatcccaagcacgggtactttaaaaacgcgctgtctgatattcagcccttaccttccgcggtggacatcaaacattgcttcttcattatcaagaagctagagacttatcctgatagctatagggagaaatactggtataagaaacggttcaacctcgtcgtgtacatgaacggcattatcaagcgactgtataaagataagtacaccgagatctccgagagactcaaagaaattgaaccaaaggaccgtaaatacgacatcggctga

SEQ ID NO: 10825 - RNA, 1164 nt, synthetic construct
  source 1..1164: mol_type = other RNA
atggactactgtaaatatcccaaagcccctatcctctcaatcaaaaaactgtgcttgcatctcggcgtggccgagagcaatctcaagaaggcacttttgattccccataacttgcgatacaaagatccatcaagtccggcttataagaaggatgggtctagaaggctcatcaagagtccaaaagatcctattcgcacaattcagagaaagttaaacagtaggctattctctcacgttaagtgggcctcctacctgtacggcagcatacctaaggggaaaaatggagacatcaaggattacattggtgctgccaaggtgcactgccaggcgaagagcatctgcaaattggatatcagcgacttttttaacaacatagcagagccccacgtcatcgagatgttcaggctgttcttccggtttagcgagacagtgtcaaaggatttagctaatgtggtcacttataaaggcaatctggtacagggggcactgacgtcctcttacctggccatgctgctcttctgggacctggaacctcaacttgtgtcgagactgaaaagcaagggtgtaaaatataccaggctggttgacgacataacactgtcctctgaagtgcacaattttgactttaagctctctatccgtctggttgaagaaatgttagcaaaaaaggaccttcacctaaatgaagtgaaggtcaaaagctcctatatttcaaccgagcttcttctggtccatggcctcaacattaacaatgacaccccctgccttccaaagggagagctgcgcaaagtacgggccgcggtgcataacctctgttcagaggctgatgaggagattcggaaggaatactggtatcgcaaggaatttgagaagtgtttgggccgagtccataagctgaagtcttttgggaaaactcggagcttcaacaatctcatgaacaagttgaatcgagttaagccactggcctccaaacaagacctgaaatacgctatgaagagagtggcctcgctgaagcgcgattacaagaaccgtaggaaacggagttccttcacctacagaaaaaggtatttcatcgcacagtataaggtgggattcctgaaggacgattacagtctagaacacaacctcttacgctccgagctgaaaagagtgaaaccgaaatga

SEQ ID NO: 10826 - RNA, 1113 nt, synthetic construct
  source 1..1113: mol_type = other RNA
atgagtctgcacctgggtgttcagacgagtgacattaataaagcgctgcttattcccgctgattctaggtataaggatcctagcagcccggcatacaagaaggatgggaccaagcgcttgatcaaaagccctcgggatcccattaggaccctacagcgtaagatcaacacaacccttttctgtcatcttaaatgggccaactacctctatggcagtattcctaagggcaaagagggcgatgtgaaagactatataaacgccgctgcaattcattgtcagagaaagtccatatgtaaactggacatagctgactacttcaataacatcacagagcaccacgtgaacaatctgtttaacgacttctttcgcttttcagaagacgttagtaaagtcctgaccgatattgtctcgtataaatctaatcttgtgcaaggagccctgacttcctcctatcttgcaatgctgttgttctgggacctcgagccacaactcgtcactagattgaaatacaaaggcataaagtacacacgattggtggacgatatcactttatcttccaatgttcatgacttcgatttctccttagccatcaagctggtggaggatatgctcaaggagaaggatctgcacttgaatcaggtgaagattcagtcttcatctatctctacacagctgctactggtgcacggcctcaatatcaataataagctgccatgcctcccaaagggagagttaaagaggatccgggctgccgtccattccatctcctgcgtgaccgacgaaaagatgagacgggaaaactggtttaggaaggattatgaaaagtgcttggggagggtctacaagctcaaatcattcggtaagaacaagagcttcaacaacctcatcaacaaactaaataaggtacggcctctggcctcaagcaaggacctgaagtatgctaaaaaaagagtgcagagcctgaagtcagactataaacgcggaaaaaaaaaggagagctttgcctaccgcaaacgttactttttcgcacaatacaagatcgggttcctcaaggtagaatttccccaggcgtactttattctgcgaagtgagcttaaaaaagtgaaaccctga

SEQ ID NO: 10827 - RNA, 1182 nt, synthetic construct
  source 1..1182: mol_type = other RNA
atggacagatgttcctacattaattcaccaatcagctctttgtcctctctgtctaagaccctgggagaggatatctcgcaaatcgtggcagttgcagacgcccccgcgtcagagaagtacaataaacccaagacaccggtgttcaaaaaagataaaaccgagcgcattgtcaggtccccagttagggctcttcggagtttacagtatcgcattaacaagcaaatcatggtgaagggcgtgagctggccttcttatctatttggctccattcccaaaggacacaatggtgaagtctcacaggactatatcgccgccgctaaagtccactgtggggcaaagtctctctgctgccttgatattagcgacttctttgataacattcacgcttgtgatgtgtttgccgtctttaacgaactgtttcactttagcactgaagtcagtaccatcctcaccaagctggtaactttcgatgagcgacttgttcagggggcgctcactagttcatacctggccatgttggtactatggaagactgaacctggccttgtggaggctctcggacggaagaatatcaactactctagactggtggacgacattacactcagcaccaaaaagtacaattataacttctcgtacgaggtgtcactgatagaaaagacactgcatgaaaaggggctcttcttcaacgaggagaaagccaaggtttatagtgtctccagcgagctaatgttagttcatgggttgaacgtgatgggaaaaaatccagcaatgccaaggtatgaagctcgtagaatacgggccgccgtaagacagttggagaaactggcagaacaggagggcgccaggtgcgagatgtggtacaggcgagaatacaatcgctgccagggtagggtgtataagctggagcggtttggcaaaagcaactccttccgtaacctgctcaatcggctgcagaagatcacgcctttacccagtaaaaaggacataacgtacgccaaactgagagtcaaaaagcttgaaagcgacttcaacaatgtgaagaagcgcgagacatataactatatgcgacgcttttccatagcgtcccatagagtggcattcctgaaaggttactacgatgaagagtggaagaagctgaggacccgtttgaaggctatcttccctgactaccggaaatga

SEQ ID NO: 10828 - RNA, 1206 nt, synthetic construct
  source 1..1206: mol_type = other RNA
atgaccactcctgacatccccttgtttaaggctggtccaattaagtcaaaggcccatctggcaaaagttctcaacattgacattagcgacattgacgatgtcttgaatatgcctttagataagcggtatagacctcccaaaaacccaatcctgaaatcagacggaacgatcagaaaaatttttaaccctcaccgcaaggtgcgctttctacagcgacgtatcaataatcggataaacaagcagtgtatcagatggcccagctacatatatggatccatcccgaagtctattgaaaatgggaacagggactatgtagaatgcgcccacaaacattgcggcgctaaatcgattcttaaggtggacatcagcaatttcttcgataacatccaggagttccacgtcaagaatatgtttaagaatctcttccgctacagcgatgaggtgagtgagattatcacaaatatatgctgttacggggatcgtgtggtgcagggggcccttacctcttcatacattgcctctttgatcctgtgggacgttgagctctatctcgtaaggaagctaaagcggctgaacctgacatatactaggctggtggatgacatcaccgtcagcagtacatctcataactttgatttcaatggaacctcaaagctgattgaggagatgctgaatgagaagggtctgcctcagaacatagataagactcgggtgtatcgtctgagtagtgagcccctcaaggtgcacgggctcgtggtttccttcccgaatccaatttactccaaagacgaagtgaagaatatccgcgctgccgtacatcagttgaaacatagagctgaaaaacaggaagatcagaaaagcaaatcttatagaaacgactaccaaaggatccttggccgagttaacaagctgtccagagtcaagaacgacaaacacgcaaagcttatcaagattttacggtccgatggcctccgaccaaagccatcccagtctgacaaaataagcgcagagaaaaggttcgataaaatagtcatcgactatagtcggaagaagtcacaatacaacttctacaaaaggtaccactacttaaagcacctgctgttctttatcaaaggagaaggcggcagcgattacaaaaaatttgcgcaagacaagcttgacaaactgtcccgctatgaacccgagtttaaaattaaggattactga

SEQ ID NO: 10829 - RNA, 1026 nt, synthetic construct
  source 1..1026: mol_type = other RNA
atggacaacattaagccgatctttcaggcaggccccatcaagtctatttcccggctggtgacagctctcggaatcaccttaagcgaactggaacacgtgctgcatctttccccaaatgagcgatattccgacctaaagaatccaatctacaagaaagatggaagcgtcagggtaattaagaaccccaatagagatatcaggaaaattcagttcagattgaaccaacggattagtaaagcttgtgtgagatggcctgattatctgttcggatcaattcctaaaaccgatcagtctggcaaccgggactacgttgcctgcgcgcaggttcattgcggcgctaaatcgatcctaaagctagacgtcagtagttttttcgacagcatacacaaggatcacgtctacagcctgtttcacggtctgttcaggtactcagaagaggtgtctctgtgcctcgccaatatctgttgttacgaggaccatctcgtgcagggagcactcacgagttcctacatcgcgactctgattttgtgggacgtcgagcaggaattggtgcgcaagcttagacgagcaggcctgaaatacactcgacttgtggatgacataaccatatcatctacgtgccatggttatgatttctcaatggctgagaagctcgtttttgacatgctggccgccaagtcgctgagccttaacgtgaaaaagagtgtcgtatataggactgggaccgagtctttgaaggttcacgggcttgaggtgagcttctctaagcccaatctgccaaagtccgaggtgaagaaaatccgtgccgcagtccatcaaattagcctgctcgccaaaaacaaaagcgtgcgcaggacctacaagtatcgggctaattatcaccggacactcgggcgtgtgaataaactcgccaggttagaaaacgacaagcgcgaccgctttttaaaagtactgttgtccacatccgttagacccctgcctagtggccgcgatactgggagagattcaacactgtgtataatctga

SEQ ID NO: 10830 - RNA, 1176 nt, synthetic construct
  source 1..1176: mol_type = other RNA
atgaataccaaattcgaatttctgggaagccctatcaaagatatcgatcacttggctaaaattctggatgtggacattgaggacatactctatgcggtacagattgaggacgaggataaatattcttctcgaaccatcgctaaaaaagacggcagagaaaggaccgtgtacaatcccaaaccaattttcagaaagattcagagacgcattaagaatagaatattctcccagatcagttggcccgattttgtcttcggctcaattccagcggacgacaacagccacgatttcatcgaatgtgcacaacaacactgtctagcccagtctatactgaagcttgacatagaggactttttcgataatatctctcaggagctggtagaaagcatctttaaaaagttctttcggtaccctgatccagtctccgagatactggccactttatgctgcgtggacctcaaggtcccgcagggtggaattacatcaagttacctggcatcaattgcacttcatagcttagaagaaaaccttttccttcggatgaagtcaaaaaagttaacctatacacgctatgtcgacgatatcactatctcctccaagaacagagactttaacttcgaggctatcataaacattgttgagtccttgctcaacaatctgaatctgcccctgaacaagaagaaaatcgagattaataggttctcctcgatccccctgactgttcacaatatacgtgtggattttaagtcgccaaggtacgacaaaacagaagttaagaacattcgggctgccattcatcgcttgtctgaactagccaagaagcctaatcatcgaacacactactattatcggatcgactttaataggtgccagggcctcatcagcaaactgcaacgggtgaaccatcagagttatacgaagctccaaaacaagctgaataaaatctatcctttgcccaacgacagcgacatcaaatacatcgagaagagtattaaggagctgaaagtgttctttccgaagcagattggggaagggaactacatttacaacaagaagttcttcaagatccagcataggatcggttttctcaaatctcaccctaaaaagatctacgatagcaaagcctttgatctgaacgccgagctccagctttaccgtatccgcaataaggtgtga

SEQ ID NO: 10831 - RNA, 1173 nt, synthetic construct
  source 1..1173: mol_type = other RNA
atgaacactaagttcgaatttttgggttcacccattaaagatatcgaccatttggcagagatcctcgatctagacattaatgatatactattcgctgcccagctggatgatgcagatagatatacctctcgttcaatagcgaaacccgatgggcgggagcgcattgtctataatccaaagcccattttccggaaaattcagcgaaggattaaaaataggctgttcacacagatctcctggcctgactttgtttttggaagtatcccagcagatgaaaagtctcacgacttcatcgagtgtgcccagcagcactgcctcgcacaatccgtactcaagctggacatcgaagacttcttcgacaatattactatgaggctggtacaggacatctttgaaatattcttccattaccctgaggacgtgagcgaaatactggctcagctgtgctgtgtggatctgaaagtgccacaaggcggaatcacttccagctacctggcctcgattgctctgttttctctggaggaaaagcttttcctgagattgaagtccaagaagttaacatatacgaggtatgtcgatgacatcaccatctcttccaaaaaccgcgactttaactacgacagcatcattaatattgtggagaacctgttaaacagcatcaatttgccactcaacaagaagaagattgaggtgaaccggttcagcagcacacctttgaaggttcacaatatccgcatagactttaaagaaccgaaatacgacaagtccgaggtgaagaatattcgcgcggccatccaccgactttcagagctcgccaaaaagcccaaccatcgaacacactacttttataggattgacttcaatcgttgccaaggtttagtttctaaacttagacgggtgaaccatcccagttatctgaaactccaggataggctcaacaagattgctcctataccaaataacgccgatgtcaaatacatcaagaactcaatcatcgagctgataaagtactttccgcaacagaaaggagaaggcagttacgtctacaacaagagattctttaaaacccagagccggatcgggtttctgaagagtcaccctaagaaaatctacaataatcttgccgtgcagctcaacaccgagcttcagctatatagaatgcgcggcaaatga

SEQ ID NO: 10832 - RNA, 1200 nt, synthetic construct
  source 1..1200: mol_type = other RNA
atgaatgagctcaccaaaattatctacaaggggggtccaatttccaggtctgagctatctactgtgttaggagtggacgaaatcgagttggattttattctcatgctggaagacgaggccaagtacaaaagtagccagctagtgaaaaatgatgggaggttccgaaatattaataatccatcccccattgtcagaaagatccaacgcaagataaagaaccggatcttcagtttgatctcctggccagtctatctgtatggctcgatacccgctgagaatgaaaactcacatgatttcatcgcgtgcgcctcccgacattgtcgggccaagtctctcgtgaaacttgatgttgaggattttttcgacaacatatcacaggagcttgtacaaaagatcttcgagaatgttatgttctttgacaaggatgctgcagataccctagctaaaatttgttgcctggacggcagagtgcctcaagggggaatcacatcaagttacctggcaaccttggccctgtacagcattgaggagagactctattttcggctcaaaaacaagaaactcgtctatacacgctatgtcgacgacattacgatttcaagcaaggaccgtgatttctccttcgacatgattatcaagatcattgaaaaggaactgaactctttagaccttcccttaaacaaagacaaggtggaaatttgtcggtttggtctggaacctttgaaagtccacaacgttcgcgtggattctaaactgcccaggtatgatcaggccgacgtaaaaaggatcaaagctatggtgcaccgattggagctgctggtgaaaaaacctaattaccgcactcactatttttaccggcaggattataatagttgcatgggattcatcaacaaactgggccgcgttgagcatccgtcctactttaaactcaagaacaagctcaagaagatctttccactgccgaataacgcggatgtaacatacgtgaggaatagcatcgacaacttgaaggaacttaagcttaatagcaagaatgcatttgtgtaccagaagaagttctacaagatacagtaccgtatagccctgctcaagaaacaccctaaaggcatctataacgcaaaagccgtcgaactgaacagggagctgcagctgctgagactgaacgacgaacttgagagaaagaccgaaagcggcaactga

SEQ ID NO: 10833 - RNA, 1179 nt, synthetic construct
  source 1..1179: mol_type = other RNA
atgataaagtccaagtacatatacaaaggaagcaagattgactctctagataagctgtcagaagtcttgtctatcgatattgatgagcttactaacgttcttctgctggaagatgaggctaagtataaggccggattcatcaaaaaaagcaatggcaagctgcggaacatttataatcctaatacctctctccggaagatccaaagacgcatcaagaatcgaatatttacccagcaaatcgagtggcccgattatatttttggcagtattccagcagatgaaatttcttcaaacgattacgtggcatcggccgagaaacactgtggcgcacgtgctctgctaaaactcgacattgaggacttctttgacaacatcacacaagagctggttgagaagatcttcaagaacttcttcaagtacaatgacgagctctccaaaatactagctcagctgtgctgcgtcgatggcaaagttccccagggaggcattacctcctcctatatcgccagcctggcgttgttttctattgaagagcgcctctttttccggctcaaaaacaaaaagctgatctatacgagatacattgatgacattaccatcagcagtaaaaattccgagtacaatttcgactccatcattaaaattgtggaagggcagttgaatagcatcgacctgcccttaaacatcgacaaaatcaaagtggaaaggttcagcagtaaggcgctcaaagtacataacatacgtgtggatctgaagacacccaagttcgacaaaatagaagtgaaaaacatcagggccgccattcacagactcgaacagttagtcaaaaagccgaattatcgcactcactacttctacagaattgattttaaccgatgtcaaggtctggtgtctaaattgtccagggtcaatcacgtgtcagtagaaaagttgcagaggaagttaaacgcaatcaagccacttcctaacaaggccgacatcaagtttatcgaggacagtattaagtcacttaaaaagcacttcccactgcagaaggagaatgggagctttatatacaaccgcaagttctttaagatccagcataggatcgggtttctcaaatcacatcctaagggtatctatactgaaaaagctatcagccttaatacagagctgcagaaatacagactgatacggtga

SEQ ID NO: 10834 - RNA, 1185 nt, synthetic construct
  source 1..1185: mol_type = other RNA
atgaataacgtcaactttgtgtaccggagcaagaagttccaaaagttcttagatctggctaagagattggatttgagcgcagcggaaattctgaagataagcaagattccagattctgagaaatacgaaacagatgagatagaaaagtcagatgggcgcattaggaaaattcataagccttgcgctgacatccggaagatacagagacggatcaataagaggatttttaatgccgtgatctggcccaactacatttatggtagcatccctgcaaacaaactgaacaacgaaaacaaagactatgtggagtgcgcaagcatgcattgtcaagcaagaacgatcctgaagctcgatattgaagatttcttcgacaatgtgtctgaggatctcgtgtacaggatctttaataagctctttggtttttcagagaaggtcagtctcgttctagcccgaatctgcaccgtcgacggagcattacctcagggaggcctgaccagcagttatctcgcttcactcgccctttttgaaatcgagtccaatatatactcccggctgaagaacaagaaactgacatacacaagatatgtggatgatatcaccatttccagcaagaaagacaattttaacttccagtctaccatcaacatactagaagttgccttaaactccattgacttgcctctcaatcaggctaagattaacgtttcaaacttctcctccgagcttctgcgcgtccacaatattagggtggaccagtctaaacccagactggacaaagccgaagtggtaaagataaaggacaatgtaagtaggcttaaagagattgcctttgacaaaaaacagcccaatatccgcacttactacttctacagagaggattttaatcgctgtctgggccttattaataaattggggagggtgaatcacccctcgtatgagaagctcaacaaggccctgatgaaaatatacccaatcccaaacctgtctgacatccagtacgtccgtgacagtatcaacaaactgaaaaacttgtatccggcgtacatgaattcgtacatctatcgaaaacttttcttccggatccaacatcgcattggcttcatcaaaaagcacaagatctatgagaagactgctcgtaacctgaatctagaactgcagaagtatcgagccatgtatgagaaatga

SEQ ID NO: 10835 - RNA, 1197 nt, synthetic construct
  source 1..1197: mol_type = other RNA
atgacaatacctgacaagtacctgttcaagttaaataccacgaataagatctcgtctctcaataatctagcctccgcactgggagtgactttgagtgatctgaagtatgccgcaaacctccccgacaataaaaagtacgagcacttctttatcaagaagtccgatgggagggagaggttgatccacaaaccttgcaaggaaatcaggaatatacagcgcaggatcaaccaccgaatctttaaaccactggtgatttggcctgtgtatctgtttggctctgtccccagtgaaaaacatgagcccgcacatgactatattaactgcgccaagaggcattgtctcagtaagtctgtactgaaactggatattaaggacttcttcgataatatcgacgaaagcctagtcaaaaaaatcttccgcgagttcttcaaatacagtgaatctgtcgttaatatcctcacaaagatttgttgcgtgaacgggcatgttcctcagggtgcgcttacctcatcttatattgcttcactgtgcctcttttcgatcgagccactgttagcccagcggctgaacaataagaatctccggtacaccagatacgtggacgacataaccatttccactacgaaacacaaatttgatttcaacgctaccatcaatatcgtggagaacctcctgaattcagtggacctgccgcttaacatcgagaagattaagaccgaatacttttcaacagagccattaaaagtgcataaccttaggatcgactttaacaaaccaagatacgacaaaagcgaaacaaagaacctgcgggctgccattaaccgtctttccatacaaaagaagattcccaattaccgcagccactatttttatcgtagcgattataaccgatgtgtaggattgatcaacaaaatcagccgggttaataatccctgttccaaccgcttcttcaagaagatcaaaaaaattaagcccctgcctaacccaaacgatcttgagtacgtcagaaagagcattttcgaactgattcgggattccctgactcacaaaaatacataccggtacagaaaaaagttctttagaactcagcagcgactgatctttattagaagccacccgcaatatatatatgagggctctgccaatgctttgaacatactcctacagaagtatcgcttgaactacgaggaaaagtga

SEQ ID NO: 10836 - RNA, 1197 nt, synthetic construct
  source 1..1197: mol_type = other RNA
atgtctttaccagaaaactacctgtttcggttgaacacagctaataagatttcctccctgaacaatttggccaaggccctcggtgtgcaagtcagctacctacgcaagattgctgatttgcccgatgagaagaagtacgaggtattctccataaagaaaaatgacggcagagagcggctgatccataagccctgcaaagaaattcggaacattcaacgcaggattaaccacagaatatttaagcccctcattatctggccgacctttctgtatgggtctattcctgccgagaaggaggagccagtgaacgattacattaattgtgccaaaaaacactgcctgagtaagagtgttctgaagcttgacatcaaggacttttttgataacatcgatgaggcgctggtgaaaaacatcttccgagactttttcaagtacagcgaggccgtctctaatctgctcaccaaaatctgctgtgtcaatggacacgtcccacagggcgcattaacatcaagttatattgctagcctttgtctttattccatagaaccaattctagcacagagactgaacaacaagaagcttaaatacacgcgctatgttgatgacatcactatctctaccaagaaaaacaattacgacttcaatgccaccattaatatagttgaaggggctctcaatagcattgatttgcctctgaacatcgagaagatcaaagtggaatatttcagtactaagcccatcaaagtgcacaatctgaggattgacttcaaaacacctcgatacgataaagacgaagcacggaagataagatccgcgatcgataggctggtgaaacagaaggaaatccctaactatcggtcacattatttctatcgtgccgattataatcgctgcatcggattgataaacaaaatcaatcggctaaagcaccccagcagcaaaaactttctcaagaagatccttagaatcaaaccattaccgaatcctaatgacctggactatgtaaggcgctccatctttgagctctcgagagactacgctattatgaagaacagctatcagtaccgcaagaaattcttcaggatccagcaacgtctcattttcataaggtcacatcctcagatgatctacgaaaactctgcacaggtgctgaattcaattctccagaaataccgacccctgtacgaggagaaatga

SEQ ID NO: 10837 - RNA, 1176 nt, synthetic construct
  source 1..1176: mol_type = other RNA
atggatgagctcaaggtgcgccttaaggatggcgtcgacccaatccagtcagtggacaatctgtgtagtgccctggacattcctagatccgaattagacgaggtgttggctctctcagacgatgaaaggtatattgagatctccctgccaaagtctaacggttctcgccgcctcgtgtatgaccctcaccccagactgagacgtatacaacggaggatcaaaagccggcttctggtgagtcagattctgtacccccgatatttatatggcagtctttctgacagtgaatacccgcgggactacattagatgtgcatccattcactgcggggctaaagtcctgcttaaggcggatatcaaaaattttttcgacaacatcagccgtcgacttgtccttgagatatttgagagggtgttccattatccggaggaggtttccgacgtactaagcgatctatgcaccagggcaggcgtggttccccaaggagccagcacttccagctttttggccaacctgtgtctcttgaacgagtggtgcttcgtccgcgatatccagtacgaaaagttgcgctataccaggttagtggatgatatcacaatctcttcaaccacaaccggaaaggacctgtctagatgcatgcgaacactcactgcaatgatagagtcagctgggttcgagctgaatgagaataaaaccggaatcgagcatgtgacaacgaaggcctttagcgttcacggcctcagaattaacaaaccatcgccttgcctgcccagagaagaagtacggcgcatacgggccgacgttcacaacctgaaacggaaagctagtgtgccaaacgcaagagtatctttcgagtatcgtaaactatacgaaagcatctccgggcgtgtgaataagctgaaaaggctgaatcacggccgctacaatgaacttcggaggcagatgaacgccatcctccccttacctagcaccaaggacattaagcgatgtcagattatgctcgccactctggagagggactacgatctgcaccgggactcatacctgtacaagttgcgatattccagactgatccataggctcggtattttgaagcgcatttacctgcatgaagcggctgcaatccgggatgccctccaggatctgaagcctgaatttgtcaatgaagctgattga

SEQ ID NO: 10838 - RNA, 1173 nt, synthetic construct
  source 1..1173: mol_type = other RNA
atggaagagctgaaagccagaaccaaagatggaattgacccgatccaaaacctcgacaatctgtgtgatgccctgggcatcagccgggaggaattggacacagctttatctctgacggacgaagacaggtacgttgagatcaagcttaggaagaaaaacggatccacccgtatagtctacaaccctcacccaaaactgcgtcgcatccagaggagaataaagaacagaatcctatcgtcacagatcatttacccccactatctgtatgggagcctttccgataaggagaatcctcgagactacattcggtgcgccgcagtgcattgcggcgccaaaaccgtgctcaaggtggacatcagaaactttttcgacaatatatcgcgcgatctggtgtttgaagtcttcaagaccattttacattaccccccagaagtctctgacacactcgccaacttgtgcacacgctgtggagtagtgccacagggcgccagtactagcagttttattgctaacttgtgtctgcttgacgagcatgacctggtgaggaaactttcttacgacagtctgcgctatacccggctaattgatgatattactatcagctccaagactcccaacaaggacttagagaagtggatgagggtgctcaagcgaatgatcgaagactctgattttgaactcaatgaggaaaagtctggtatcgagcacgtggcgttgaaagcattcagtgtgcacggcctgcgcataaatcggagcactccagggctcacaagagaggaggtgaggaagatccgttctgatgtccataacctcaagaataaagcaagcgaacctaatgctagggtatcattcgagtatagacgactgtttgagtccgtttccggcaaagtgaataagttgaaacgcgttaaccaccccaggtacaatatcctgcgcaaacaaatgagagatattctgcctcttccctcaaagaaggatattaaacgatgccagatcatgctcgctacgctggtccgggatcatgccaatcacaacagctcatatttgtacaaggttagacatgcccggctgaggcaccggcttggtattctccggcgcatatatcaccacgaagcagcggctatgagacagaccctacgagggctggagccgaacttctccgacgatacatga

SEQ ID NO: 10839 - RNA, 1173 nt, synthetic construct
  source 1..1173: mol_type = other RNA
atggatgaattttctcctcatgccaagcctaatattgctcctattcagagtattgccaacctctgcaatgccctcagcttaaccagagaagaatttgattatgcaagctctctcgccactccaaacgggtacatcccgatcgagttaactaagaaggatggcagcaaaaggaccgtttttgatccacaccccgcccttaggcgagttcagcgaagaatcaagaaccgtattttggcgactaatgtggtgtaccctaagttcctatacggcagcctctcagaccctgatcacccgcgggactacgtgaggtgcgcagctatccactgtggagccaaaacaatcgcgaagatagacattagtaatttcttcgacaacatcgattacgaccttacatttcgaatctttgcagacatactgcattatccccgggaggtatctctggcactggcaaacatatgcacccgcgaaggcaccatcccacaaggagccgctacttcttcttttatcgccaatctgtgtctgttcgaggagggtggcttggtggaggggttcacgcgcgagaatctgagatatactaggctggtggatgacattacactatcctccacatcgacacagaaaaacctaacccgccacttttccaaactcgagaagatgctgcaagatgctggatttactctgaacgtcgataaatcagggatcgaacatatcagtaccaaagcattctcccttcatggacttcgcataagccaggcttccccccaactccctagagaagagataagaaagatcagagctgacgttcacaacctgaagcaggaggccgccaaagccaatgctagggtatccttcaattatcgacggcttttcgagtcagtgtcaggcaaggtcaacaaactgaaacgtctggagcacccccgctatcaaacgctgcgggcgcagctcaccgacattaggcccttgcccagcaaaagggatattcgccggtgtcaggtcatgttggcaacactgaaacgggacttcccagaccacagtgaaagctacttatacaagaagcggtatttccgcctcagacatcgagtgggtatcctgagacgtatttacgagagggaggctcagaagattacccaggaactgaaggatttgaagccacggcacgtcgacgaacattga

SEQ ID NO: 10840 - RNA, 1179 nt, synthetic construct
  source 1..1179: mol_type = other RNA
atggacgagtacgcccctcagaagacaacatctgagtctatctttagcattgataacctgttagccgccctcggactcagcgaagcagaatacaagagtatccaggacttggaggagaagaatcgctacacccctcttcaccttaagaaaaagaatggcgatgaccgcgtggtctttgatcctcaccccctagtgcggaagttccagagaagaatcaagaacagactgtttaaccagatcagatatccaacatatctttatggctcaatttccgatccagaacatccgcgggattacatctcctgtgcacagcgccattgtaaagccaagaccatcctgaagatcgacattacttccttcttcgattttatcgactatgacctcgtctacaaaatcttcaacgagctgttcttctacagcgacgagattagcgaagctctggctaatatatgcacaagggagggggttgtgccccaaggagcgcctacctcctcctttattgctaacctctgtttttttgataccgagggacgtatcgtgaaagggctggaacgacagcaacttagctatacgaggctcacagatgatataactgtgtctagtgccattcaggacaaagatctgaacaaagcgaagtcaacgatagtctcaatgattgagcatgctggcttcaaagttaatgaggctaaaacatctatcgaatctatctccaccaccgcattcaaagtgcacggtttgagggtgaacaaggaaactccgcaactgcccagggatgagatccgcgcaattagggccgccgtgaacaatctaaagattctgagccgagagcctaatgcccgcacatcgttcgactacagaaaaagatacgaatcaattagtggtagagtcaataagttggctaggacggggcatccccggtataagaaacacaggctagaactgaagtccatattgccactgccctcacagaaagacattcggcgatgcctcactatgctttctaccctgatgcgggactatgacgtattttgcagcactccactgtacatgaagcgttaccaccggctccgacaccgtttgatactcttacagcgcgtatataaacatgaggcaaaaaagatctggactgaattaaaggttctgaccccaaccaaaagtaaggccgaacacgagctgtga

SEQ ID NO: 10841 - RNA, 1179 nt, synthetic construct
  source 1..1179: mol_type = other RNA
atggacgaatacgtgccaaaaaagctgactgacgaatccattttcagtgtggacaacctcatatccgcactcgggatctgtgaggccgattttaaaatcatccaatcgctggaaacaaaagaccgctatactgccatcaacttaaagaagaagaatggggatgatagaattgtctacgatcctcatcctctgatcaggaaaatccaacggcggattaaaaaccgtattttcactcagatccgatatcccaagtacctctatggtagcataagcgatccggattgccccagggactacattagctgtgccagccgccattgtaaggccaagaccattctgaagatcgatatcacgtctttcttcgataatatagactacgacctcgtgtacaagatcttcagagagctctttttttacagcgacgaagtgtccgagactctcgctgggatttgcacaagagaaggcgtggttccacagggcgcgcctaccagttcatttatagcgaatctttgctttttcgacattgagggcggaatcgttaaaggcttggagagacagaacttaaattacacccgcctgactgatgatattacagtcagctcaacgacccaggacaaagacctgaataaagccaaggacaaaattatctctatgatacagaacgccggttttagaataaatgaggacaagacctgcattgaaagtatttcaacaaccgccttcaagatccacggactgcggatcaataaaaatacacctcagctgccacgggatgagatcaagcggatacgagctgcagtaaacaacctgaaaatcctatctaaggagccgaacgcccgtacatccttccactaccgcaagctttatgagtcagtgtctggccgcgtcaacaaattggcaaggaccggacatcccaggtatcacaaacacagacaggatctcagggatatcttgccactgcctagtcaaaaggacattaaaagatgcctagtaatgctttctactctgatgcgggaccacgaaaccttgtgttccagccccttatatatgaagaggtatcaccgtcttcgacatcgcctgatcttgctgcagaggacctacaagcatgaagctaacaagatctggaaaacaattaaggacctgacgcccaccaagtccgctgcagagcacgctctgtga

SEQ ID NO: 10842 - RNA, 1170 nt, synthetic construct
  source 1..1170: mol_type = other RNA
atggacgagttttcctttagcaaaactaccaatcagtctatctcgaacatagcaaatctggcttacgccttggacgtgtcagaagaactgattgatgaagccttagccctcccaagcgatcagcggtatactccccatcggccagggaacggaaatcggctggtgtacaggcctcatccactgatacggaagattcagcgcaagataaaaaacagaatcctggtcgacctggttaggtacccccgatacctctatgggtcattgcgagatgtgggattcccacgtgactacataagttgtgcgcaggtccactgtctctccaagagcgtcctgaagatcgatatcaccaagtttttcgacaatatttcggcgaacgtggtggaagacatttattccgacttcttcagctttccttttcctgtggccgatgttctggccaacctgtgcacgcacgaagggtgggttcctcagggagcccccacctctagtcatctggcaaatctatgctttttcagagaggagccctcattggtacgccagctgcatagacagggcttgaggtatactaggttaatcgacgacattaccattagttgcgattcctatggctacgacttcacaaaagacgaagagcgggtccgccgcctaattacagagaagggtttcagtgtcaacgaggctaaaacgggcctccactaccagggcaattctaacatcaagatccacgggctgagaattaatttcccgaaacctcaaatgactcaagaggaaagccgcaatatccgtgtggcagtgcaccaggtcgaacagtgggctgcagagccgaactgccgaacctccatcgcttatcgaaaacttttcgagtccacatctggacgggttaacaagctcaagagactctctcatagcaaatatgatcggtaccgaaagcgcctgcaaaagctcctaccactgcccagcaataaagattatgataggtgtattggcctttataatggcgtagtggcagacgctgccaagggtgtgcactcatttcggtactaccgtagatactgtcttctgcagaacaggcttaacttgatccaacgcaccagatcttatagggccgaggccgtgagaatgagggctgtattaaagggacttaaacccacatacaaaaacgatatctga

SEQ ID NO: 10843 - RNA, 1149 nt, synthetic construct
  source 1..1149: mol_type = other RNA
atggaccagttaaccttcacaaaaaagaccgatcaaagtattggcccctccgccgaaaacctcgctaacgccctgggcatctccccagaagagttggatgaagctttgcagatccccagcgcacagcgctacattccctttacagtctccggcggtactcgcgtcgtatataggacccattctcgtataaagtttatccagcagaagatcaagaaccggattcttgcagactgcattaattatccgaaatacgtgttcggcagcataaaggatcctgattttaaaagagactacgtgaactgtgctgcacaacactgcggggcccgatccctgctcaaggttgacatcgagaagttcttcgataatatttcaatcggaaacgtgaggagaatcttcagggatctgctgcattaccctgatcccgtttgtagcatgttatgcgacctgaccacgcataatgggtatctaccacagggggcaccaaccagctctcacttggctaccctatgttttttcaaggaagagccggacattgtggaacaggcgcaagctcagggattagtgtacacaagacttatggatgatatcacagtatcttcaaagagttatgactatgactttcaccggctcgaacgcctgatccggaatatgattgaaaccaaggacctgaccgtcaacgaaggaaaatccgagacttttcctacggtcagtagcactactctggtgcacggcctgaaaattaataccgagactctgcgcgtttctgataaaacactctccaacattcgagccgccataaaccagcttgagaaggacgcaaagcagcctaacaagagaacgttgagcaattataggaaacggtacgaaagaacaagcgggtcgctgtcagtgctacatagactcggtcaccctaagtacgaaaaataccgccgaaaactccggaggcttaggccacttccctctccctattttctcaataaaacatgggagctgatggagtcaatcgagaacatccaagacatgcgtgagagtgcgatataccgcaagaggttctacatgctgcatcacaagctgaatctggcccagagaactttcaaggccgaggccaaaactatgcgggagcgtttgaaggagatcaaaccaaaatga

SEQ ID NO: 10844 - RNA, 1083 nt, synthetic construct
  source 1..1083: mol_type = other RNA
atggcccacctgcaggatcttgcccttccttttgacgggcgttacttcgaactgagcaaacccaagcggaacgggggcacgaggatagtgtatgatccacaccctgatctgaaggcaattcagaagaagattaactctcggatcttccgcgctgtgttttaccccagatacctgtatggtgggattcgcgacacgctggatagccgggattatattaaatgcgcgaccgtgcattgcccatctggagtagtcgcacaactggacatcgacggtttcttcgataatatcttgtttcaccagatctatgaggtgttcactgggttcttccattatagcccggacgtcagcaacttgttagctaggatttgtgccaaagacgagtttaacctgccccaaggtgcccccacaagtgttgctctgtccaacctcgtgttctttaacgacgagcctaatctggttcgccatatcctcgactccggagcccgttacactagattcatcgatgatattaccatcagccacccagactcaaagtttcctatcgagaaatacgcgaaagccacaatacgcatcattgaaaggaatggctttaggatcaacgaatctaaatcaggcacactccgagacacaggcctgatagacgtgttcggaattagagttaatggagccattccgaggactccccagaattacagtaagaatctgcggagaaagatctaccagttggaggagctcgcaaaaatcccaaatgagcgaaagcaggaggggtatcgtacctcatggaactccacatccggcagactcgccaaacttaagcggaccagtagtggcaagtatcgaacttaccggaaaaggctgaacaagatcaagcctcttacccatgaaagagaagccaggcgggtgaaggcaaaaacccgacgcatgttggtcgattcacaaaagatacagaatcccgaggcttttaaaaaacgctaccagaagctaatgcacgagattggaagcttaaagtccacttacccagctctaaacacctcgctcaagtctttaatggctcaggtaagagaaaatatggcagaagaatga

SEQ ID NO: 10845 - RNA, 1083 nt, synthetic construct
  source 1..1083: mol_type = other RNA
atggaacatttggaagcgttggcccagccctttgagggccgttacttcgagatccagaaaccaaaaaagaacggtggaatacgagtggtgtatgatccccacccacacctcaaggctgtgcagaaaaaaattaacagcaggatctttcgaaccgtaacctaccctcgctacctgtatggaggaatcagagatactgccgactcaagagattacatcaagtgcgccacagtccactgtccttctagtgtggtcgtcaagctcgacatagacagctttttcgactccgttctgagccaccaggtgctggatatctttagcgacttcttcaattattctcccgcagtagccgagctcctaactaggctgtgcacaaaagacgattttaaccttccgcagggcgcaccaacctcagtcgccctttcaaatttagtttttttccgggaggaacccgggctcgcaagaggaatcgagggcagcggtgcacgatatacacgattcattgacgatatcaccatcagtcactcggattctaagttcccagttgagaagtacctgaaggctgcgaggcgggtcattaccgagaagggctttgacattaatgaagataagacgcaaactgtgcgggacactgggctgatcgatgtgttcgggattcgggtgaatggagctacacctaaaacccctaagaaatactccaaagagcttagacagaaaatataccgcctggaagaattggccaggatcccgaatgaacggaagcaggaaggttatagagcttcttggcattcaacatccggcagactggctaaactcaagaggaccaacagtgggaaatatcggacgtaccgtcgcaggttagacaagattaagcctctgacacacgagagagaggccagccgtattaaagccaagacccgccgcctgctcaacgactcccaacaaatacataacaaggatgctttccgcaaacggtaccaaaagattatgcatgagatcggccttctaaagtccacttatcccgccctgaatactagtctgaaatctttgatgaagcaggtgagggagaacatggacgcacagtga

SEQ ID NO: 10846 - RNA, 1149 nt, synthetic construct
  source 1..1149: mol_type = other RNA
atgccactgaacatctcgtactcagcaccgcatcggatagcatcaaagaggaatttggccaaagccctcaacatcggcgacgaagagctggagtatctgattgctcagaaaaaccaccattaccgccagaagagactccctaaaaagtccggtggaactcgaactgtttatgctcccgagagaaatctgaaggcactacagaggaaaatcgtcgcccgcattttccacttggttagattccccccatacctccagggctccatctctgatcccgagaaccaaagggactacattaagtgcgcaacacagcactgtggtgctgtggctgtgagccatatcgacataaagaactttttcgatgggatcgaattcgacagagtggttgacatctttgaaggagtatttctattccgttccgaagtcagcttactgttagcggaactttgcacgctcgatgggtatgtaccacaaggggcccctacaagctcatatatcgcaaacatgatctttttcaaggatgaacccaaaatcgtgaatctggccaataaatctggtattacatacactcgccttgtcgatgacataacaatcagtaccgacgtgaagaatacctgtctgagaaccttgacaaagaaggtgatccgcatgattgagagttacgacttggagattaacgctgataagactaaatccatgatccgggggtctgtgccattgaccgtgcatggaatacgggtagtcgagaaaaaacccaaaattagtcgcgacgaatataggaatattcgtgatgccgtgcacagagtcgttcttgcgtcgagcacccctaactaccggaccaaatttgagtatttcaaactctaccacagggtgtccggccggctgtctaagcttaagaggttagagcatcctggctacactcgacttcgtaataagctgaaaccactgctgccgctccccagcaagggatttaaggctaaggtcaccgaaaagattgagaaactcgagcggaattactctctgagctccagccacgagtggtataagaaagaatggaacgtgacaagttacaagctgggcatagtgggccgaacgtataaaaaggaatcctctgagctgcgcgccaggatcaaggccattagaccttcatga

SEQ ID NO: 10847 - RNA, 1149 nt, synthetic construct
  source 1..1149: mol_type = other RNA
atgaaaatctccacctacaaacccattaatgtgatagggaatccagctaacctagctgccgccctggatagcagcctggaagagcttggctccttgattgaaaacaaagccaagctgtaccaaaagaaaatcatacccaagaagaacggaaaatctcgtaccgtgtattctgtggaccgtgaactgaagaagatccagaataagatcaacaaccggatctttagcgaagttgagtttgcgtcttacctcttcgggagtataagtgaccctgacctgcccagggattatctcctgtgcgccgaatcacattgtcccagcgctatcattgcaactattgacatcaaggatttcttcgatcacattaccgacgagaaagtggaaaagatcttcagtggcttctttaattttcctgacgacgtcgcagaattgcttacagagctatgtacgtttcaggggagagttccccaaggcgccccgacatcgagctatctcgccaacctgatgtttggaactcaggagaaacgcatcgccaaagctgccaatgaatgcggtgccagatattccagattgttggatgacatcattatttcatcccctcagaagaatttcagtatagataccctgtatcagcgcgtggagcagatgattgtgaatagcggctttcaaataaacgagacaaaatccaaggtagacatccttgggcccaaacctctcgaggtacatggaattgttgtcacaggcaactcccctaaggtgtctaaacttaagtaccaggagatcaggaggctggtgcaccaggtgtcggatctttcaaagaccgataatagaagaacgactcaccgctactataagaagtaccatcgggcatacggcctgttatcaatcttgaaacgagtcaaccatccggcgcacaagaagttaaagagcaagctcacatctgcaccaccactcccttccaacaggttccgcaatagtattttccgccggctctccaaactggagtcaaaacaccaaatccatcagcagcggaaatggttcgcaaaggactggaatcggattagccacgagttaggtattctgcgaaggtcttatccagaggatgctaccaatgctaggaaccgactgaacctgatcactccatacgtctga

SEQ ID NO: 10848 - RNA, 1182 nt, synthetic construct
  source 1..1182: mol_type = other RNA
atggctaaggacttttcctttaaaaacacgtttacccccattcagaaaaaggaatcattgctggccctgttggggatcagcgacatcgataaatttgagaagctgataagcgatggggtggagaaagcctactatataaagccccctatcgaaaagaagaacggcggacataggatcgtatacgctcctaatcgaatgcttaagtccatactgcggaagattaataacaagatcttctctcagatcaacttcccggattacctgtatgggtccattcctgacaaagaaaacccaagggactatatcttatgtgcccagcaacactgtaaatctaagatcctggtcaaaatggacattgagaactttttcccaacaatgaaatcgaagttcgtgtatcaaatcttcaaggaactcttccgcttttctgatgaagtctcaaatattcttaccacactgactacctacgagggattcgtgccacagggtgcccctactagcacttacctcgcgaacttgtacttttacgattgcgaaccctccaaagttagctatttgcgcaagcttggctttcggtacaccaggctcattgatgacattacaatctctagactgaataaggaagaggactggaagttcgtagagagcgttatatccaacttcattaagcagaaagagctcaccgtcaacaatgagaaaaccaaactattatccgctaaatctccccagagtttcaaggtccacggcctgtgcatcgaggatgaggcacctcgttttagtaagaccgagcgtactaatataaaaacgcaggtccaccaggttgtgagaacagcctatggccgcgatcaaatcagaatgcagcctagtttccacaagaagtacttttcagtgaaaggaaagatcacaaaactcaaaagggtagactgtcccgactatccagtgcttaaaaatctcctgaagaaacattgcgatccgctgccagagcacaaggaaattaaaaggattaaccgggtgatttcaaatctaagcaaggaccatgtgagcatcggacatactgagcgatacaagagtcgctatttccaggtggtgtttagactggacatcctcaagaagttataccccgttgaagcaaatgaattccgggcaagactgcggcaaattggtccaacaaaaaacgagaattga

SEQ ID NO: 10849 - RNA, 987 nt, synthetic construct
  source 1..987: mol_type = other RNA
atgctcaagagcatactgcggaagattaacaacaagatcttctcccaggtgaatttccctgactacctgtatggctctatccccgataaagaatctcctagggactatattctgtgcgcacagcaacactgtaagtcgaagattttgataaagcttgacatcgagaacttcttccccaccatgaaggataggtttgtatacaaaatcttcaaggagctgttcagatttagcgacgaggtcagttccatattgacaaagctcactacatatgagggctttgtgccgcagggcgccccaacttccacataccttgcgaatctgtacttctacgactgcgagccttcaaaagtccggtacttgcgtgggctaggattcagatacacccgcctgatcgacgatatcactatatcaaggatcaaaaaggaaggggactggaaatttgtcgaaagcattatctccgagtttatcaacaaaaaggagctgaccgttaatgaagagaagacgaaacttcttagtgctgactcaccacaatcctttaaggtgcatggtctgtgtattgaggacaccacccccaggtttaccaagatcgaacgaagcaacatacggacgcaggtttaccaagttgtcaaaactggatatggacacgataaaattcgcatgcagttaagttaccacaagaagtatttctctgtgaaagggaagatcacaaaactcaaaagagtgaactgcccagattatccgttgctgaagaaactcctgaagaaacattgtgatccattacctgaacacaaggaaattaaacggattaatcgcgtgatttcaaatctcagcaaggatcacacaaattttggccataccgagagatataagagcaggtatttccaggtggtattcagactggatattctcaaaaagctgtaccccatcgaggcctctgagtttcgctcccgactacgtcagatcggtcccatcaaaaacgaaaattga

SEQ ID NO: 10850 - RNA, 1182 nt, synthetic construct
  source 1..1182: mol_type = other RNA
atgccgaagggcttcagctttaaggatactttcacacccatccagcgcaaagagtctctgattgggctactcgggattaaagacatcgaaaaatttgagtcgttgttgagggatggtgtagaaaatgcttactacatcaaaccgccaattaagaaaaaaaacggtggcgaaaggatcgtttatgcacctaatcgtatgctgaagagcatactgcgcaagatcaacaatcgcatcttcaaccagatcaatttccccgactatctttacggatcaattccagataaggagaatccacgagactatatcctgtgcgctcaccagcactgtaaggctaaaatcctgatcaagctggacattgagaatttctttccaaccatgaagacgaagtttgttttcaatatcttcaaggacctcttcaaattctccgacgaggtgtctaacattctcactaaactcactacctatgacggatttgtgcctcagggagcccctaccagcacataccttgcgaatttatacttctatgattgcgagcctaataaagtcaattatctgcgtagtcttggatttcgctatacccggctgattgatgacattactgtgagtcggctgaaaaaagagggggattggaaattcgttgaaaccattatatccgagtttattacccagaaggagttaagcgtgaacaaggataagacgcaactgctatccgcaaactctccccaatcctttaaggtgcatggcttatgcatcgaggaaacaacccccaggttcaccaagaacgagcgaataaatatcaaaacacaggtgaaacgggtggtcaaaacaggctacaacagagacaacataagaatgcagaagaactatcatgacgtctacttctcagtcaagggcaagatcacaaaactgaagagggtaaactgtccagattaccctttgctgaagaaactcttggcaaaacactgtgatccactccctgaacacaaagagataaagcggattaatagagtcatcagtaacttgagcaaagaccatgccacttttgggtcaactgaaagatacaggtccagatactttcaagtgattttccggctggaaatcctgaagaagctttaccccgtggaggccaacgaatttaaggcccgactcaagcttatttctcccataaagaacgaaaattga

SEQ ID NO: 10851 - RNA, 1182 nt, synthetic construct
  source 1..1182: mol_type = other RNA
atgcccaaggattttagtttcaaggacacttttacccctatccaaaaaaaagaatcactgattgcacttctggggatcaaagacgtggagaaatttaacaacttagtgcgggatggtgtagaacgtagctactatgtaaaaccccccattaagaagaagaatgggggcgagcgtattgtgtatgctcctaataggatgctgaaaaccatattgcggaagataaacaataagatcttcaaccagatcaactacccaaactacttatacggctctattcccgataaagagaacccgcgcgattatattctctgtgcccaacagcattgcaaagccaaaatactcatcaagattgacatcgaaaacttctttccaacaatgaaggcgaaattcgttttcaaactcttcaaagaggtgttcaagttctccgacgaggtgtcggatattcttactaagctcacgacctacgacggatttgtcccacagggagctcctactagtacatatctggccaatctgtattttcacgattgcgaaccaaataaggtgtcttacttacgcagcctgggctttagatacacgagactgatagacgacattacaatctctagattggaaaaggagggcgattggaaatttgtggaggggatcattagcgacttcatcaagcagaaggagctgaccatcaatgacaaaaaaaccaagttgctctccacacactctacacagtcattcaaggtacacggcttgtgtattgaagaaagcagtcccaggtttactaaaaacgagcggctagtcattaagacccaggtgaacagaattgtgaagactggttacgggaatgataaaatcaggatggacaagaactatcataactcctattttagcgtcaagggaaagaccacaaaactgaagagggttaattgccccgactaccctgtcctgaagaagctcctctcacgccactgtgatccgcttcctgaacataaggaaatcaaacgaattaatcgggttatatccaatctgtcaaaggattacgccgtttgcggaaataccgagcgctatctaaggcggtattttcaggtgatcttccgaatcgagatactgaaaaaactttaccctgtcgaggcaaacgaattcaagctgagacttaaactgatctccccaatcaagaacgagaattga

SEQ ID NO: 10852 - RNA, 1173 nt, synthetic construct
  source 1..1173: mol_type = other RNA
atggcctcctcctttagcttcaaggaaacctttacaccaattcagtccgtgcagagtctgataaatctacttggtgtgaaagacaccgagaagtttgaggatctcatcagaaacggcgccgagacatcgtattacatcaaaccccctataaagaaaaagaacgggggggagaggatcgtgtacgcgcctaataaaatgctcaagtcccttctccgtaaagtcaaccagaaaattttcacccagatcaattacccagattatctcttcggatctataccggataaggaaaatcctcgtgactatatactgtgcgcagagcagcattgcaaagctaaggtgctcattaagatcgacatcgagaatttcttccctaccatgcgggaagagtacgtctataagatcttcaacaagcttctgaagtgcagcgaagaggttgcccagattttgacaaaattaactacctttgacgggtacgttccccagggagctcctacatcaacctatctggccaacctgtatttcttcgatagtgagcccaagaaggtacaacacctaagaaataacggctttcggtacacccgcctgattgatgacattacggtatctagggcaactaaagaaggctcctggaaatacgtggaatctttcatcggggagtttattactcaaaaacacctcagtatcaacaaagataagacgatatcacgctcttccagcagtcctcaacagtttaaagtgcactctctgagtattgagggagaaaagccgaagtttccacggattgagagactgaaaatcaaagaccatgtgcacagggtcgtcaagacaggttacggaaaggacaacgaaaggatgaaaaagagcttccattacctgtattttagcgttagaggcaaaatcactaaattaaagcgcgtggactgttccgattatcccattttcaagaagatgctgaagcgacactgtgatcccctcccagaccataaagaaatcatccgccttaatcgggtgatcagcaacttgtcacgagactttaattctttgggcgagagcgagcggtataagaataggtacttcaaggtcatgttcagattatcgattctgaaaaaactgtacccaaaggaaactaacgaatttaagaagcgattgaagctgatctcacccaaaaagtga

SEQ ID NO: 10853 - RNA, 1191 nt, synthetic construct
  source 1..1191: mol_type = other RNA
atgcagtccaacaacttcgtcatcaataagaagaacctgccacccatcaaaaacgtcgattccctgattaaacttctgggcgttgacgccggatatctggatttcttgattgagcacggggtggagaagaactactaccggaaagatccgattcccaaaaagaatggaggagaaagaatcgtgtatgctcccaacaagaaactaaagagcctgctgaaaaggatcaacaacaagattttctcccagatctcttttcctcactatttatacggaagcattagtgactctgaacaccccagagactacattcgttgcgcaagtgtgcactgcaaagctaagatcctgataaagatcgacattcaggacttctttccatccatggacagcgttggtgtcaattcgatcttcagcaaattcttcaatttcagcgacgaaatctctcaaatcctgactaaactgacaacctatcatggcatcgtgccccaggggtcacctacatctacctttcttgcgaatctgtatttctacgacgtggagcctagcatcgtctcacacttggagagcgagggttttcgctatacccgactgattgacgacataaccatctccaagagtgagaggggggaatcatacaagtacataaagcctaggatcataaagatgattaccaacaagggcctggtgataaatgagaagaaatgtagcgagcagtcactgaaaagttcccagtcctttaaggtgcacggtttatgcattgaagaagagactccgaagttctctaaaccagagattctgaagattagaggccaagtatttaacatcctcagggttggctattgtaatgataaaatgaggatgtctcgggactttcataagttttacttctccgtaaaggggaaaacaacgaaactcaagcgtgtcaatagcccagaatacacagagttgaagaaactgctcaaaagaaattgtgatcccttgcctgatcatctcgagatcaaacggttgaaccgagttataagtaacctatcgaaggattatgtgcttctccataatagcaagcggtataagtctcgcttttttcatgtgtacttcagactcgtgattttatccaagctttacaaagaggaagccgatgaatttaaaactcggcttaagcgcatccgcccatcatcagatatgtctagtctctga

SEQ ID NO: 10854 - RNA, 1065 nt, synthetic construct
  source 1..1065: mol_type = other RNA
atgctgacccgcggggtggctagcttctatacagagaaggaaatcaataagaagagtggtggaaagaggttgctgcacgctcctaatcggaaaattaaattcatcctccgcaaggtgaacaacaagatctttaacaaggttctgttcccacactacttatttgggagtattagcgacaaagagaatcctagagattacatcagatgcgccgaggtacactgcaaagcgaagattctgatcaaggtggacatcagtaactttttccccagcattaatacatactccgtgcgagatatctacaaggtgttctttaacttctcggacgaggtcagcgatgttcttactgaattaaccacagtgaatggcacggtcccccaaggagcacctacttctacatttctctccaacctctatttctacaacatagagccacagttggtgaaatatcttgagtctctgggctttcgctacacccggctgatagatgatattaccatctccaagttggacaaaaataacttccggttcgcggacgatcgtgtcaaagccatgatcacgcagaaagggctaactatcaacgaaggaaaatcatccatccagtctaccgtggcagccaaagggtataaggtgcatggcgtctgcatagacgaagacaagccccgctttactaagtccgaatgtatgaagattactgacgaggtgtatcagattgcccgcgtaggttataatagaagcgatgttaggatgaggcagtcttaccacaaagcttattactcagtcaagggcaaaattaccaagctaaaacgtgtgggatatgtgaaatacaatgacctgaggaaggttctcaacaaacactgtgaaccactgccggaccatgatgaaatcaagcggctcaatagagtaatttcaaacattcagagagactataccggcaagcctgcaacagataactataagaggaggtactaccaagcccatttcagactgagcgttcttcggcgcatatacaaggaggaggccaaacagtttcgagctcgactgatctcagtccggcccaatcgttga

SEQ ID NO: 10855 - RNA, 1170 nt, synthetic construct
  source 1..1170: mol_type = other RNA
atgaataacaggccaacatatcatggcggggtaatttctaatccactgaccctggctagagtgctcgggattgagctggcagatcttctggctatgtcagtggatacagtatcacactacaaggccaaagagatcaacaagaagactgtgggagctggcaagcgcgtcatccatatgccagacgagtccatcaagcggctgctccgaagagtaaacagccgtatttttaacggagtgacctttccggggtatttgtatggttccatttccgatcaggagaatcctagggattatatcaagtgtgccgagttacattgcagagccagtgtgctgatcaaagtggacatcagtaatttcttcagccagataactacagaacacgtgtacaagatctttctcaaattcttcaacttcagtcacgaagtctccgaaatcttatctaaaattaccactgtgacaggctttgttccccagggcgcacccacatcaaccttcatcgctaatttgtgtttttttgaaaccgaagcgtccctggttacgtacctgcacggagctggtttccgctactctagacttattgatgatattacggtcagtaccctcaacaataaattaccttggcagtatgttgaggaccggattgtgaggtttctagacaaagaggggttctctatcaacgccgacaaaaccgaaagcatatctactcctagtgcgcaatcgtttaaggttcatggcctctgcataggcgacgagaaacctagattctccaagaaacatattgatgagatcaagaagagcgtcaattgcgtgcttaagaaagcactctttagcgacaagaatcgaaaagaaaagtcataccacaagctattctattccacacaaggaaagacgactaaactgaagagagtcaagcacaacagctacccaagcctcaaaaaggcccttgggaggtatgcattgcccctgcccgatgaacgtgagtcttaccgcctgaatatagccgtcaagaatttggagcgcgattacccgacattgtcgtcaaagctggcctatcgcaaccggtactacaaagcaaaattccgggtgggtatcctaagcaggatttatcgacgggacgccaccctgctgaacaacaggctgaaagacatccttcccacttacgaggactga

SEQ ID NO: 10856 - RNA, 1188 nt, synthetic construct
  source 1..1188: mol_type = other RNA
atggataaaccacactacccttgtcggcccatcggaagtgtggacgtcctggccaacactctcggagtccatattcgtagattgaggaatatagcttctaaggtcgattcatcgtacacatcttatgagctgaagccccacccagtgaccaataaagttagaactgtggttgaacccaaacacgagcttaaaaaaatccagaagaagatcaactccaggatttttctgcatgttaactttcccgagtatctgcagggaggcattagagccaccagtcagagcaagcgcgattatatcgagaacgcatcgcgacatggccgcagccagaccctcatcaatttagacgtgaagaacttctacccaaacatcaaagcggacgtggtcagggacatctttaagtacttcttcaagttctccgacgatgtcgtggatatcctgacaactttaacgacttacagggggagtatcccgcaaggagggtgtacctcaagttacctagctaatctggtatttttcaacgacgaataccggattgtgagctcattgagagggcggaaccttcggtatacgcgcttgttggacgatattacaatctcctcagtaaccaccatagacaacaagaccagcgaaaaaattattaaagacatcgccggcatgctgcggaagcggaatctgtctctgaagtcacccaagactaaagtaactgacagatctgaaatgcataaggactttgaggtgacaggtctgtgcgtgcgcgcaagcgaacctaaagtgagaaagaaagatcgacgcctaattcgtctcagcgtctttcaatgcgagtctcaggccaagaccgataggacaagcgatgattaccacaagaattggaataaaacctccgggctggttgctaagcttaagcgactcaatcacagtcaggccaaagattatcgtaagagactggcagagattctcccattgtatgacgagtatcgcgaaagcaaaattgtgaagagggcgtatgctgccctcaaagtgcctgtctcctctcacgagaaaatcggcacaataaggtcctacaacaacctgatataccagctcggtatattaagccgaacaaacaaaaaggtggcaaaaggcctttccaagtccctgaaggaccattactcatctgttcctacgatcgagaatttctgggaaaattga

SEQ ID NO: 10857 - RNA, 1188 nt, synthetic construct
  source 1..1188: mol_type = other RNA
atggataaaccccactacccatgtcagcctattgggagcattgacgtcctggctaacacacttggcgtgcataagcgtaagctaatctccatcgcttcaaaagtgaatacttcctactctagctatgaacttcctgcacaccctattaccaaaaaggtccgaaccgttgttgaagctaaacacgagctgaaaaagatccagaagcggattaattctcgcatatttctgcacgtgaagtttccagaatacctgcagggtggtattcgggccacagacaaggtaaaacgtgactatatagaaaacgccaccaaacacggcagatcacaaaccctgatcaacttagacgtgaaaaatttctaccccaatatcaaaagcgaagtggtaagggacatctttaagtatttcttcaagttctccgacgaggtcgtcgacatactcaccaccctgacaacctatcggggctgtgttccgcagggaggatgtacgagttcatacctcgccaatttggtgttctttaacgatgagtaccgcttggtcagtagcctccgcggacgccagctacgctatactagactgctggacgacatcactatctcgtctgtgaagaaaatagaccaaaagctgagcgagaagatcattaaggaggttgcgggtatgctgagaaaaaggagcctcagcctgaagtcacctaaaactaaagtttctgataggtccgagatgcacaaagatttcgaggtgacggggttgtgcgtgcgagactcggagcccaaggtgcgcaaaaaagatagaaggcacatcagacagctagtctttaactgcgagcttaaggccgtgaacgatcggacatccgatgagtatcatgctctctggaacaagaccagtggattggtggccaagctgaagcggcttaaacattctcaggcatccgactaccgaaaacgtctcgcggtgattctgccactttacgatcagtaccaggaagggaagattgtgaagagggccaatgcagccttaaaagtacccgttgatctgcattctaagttcggggtgatgcggaggtttaactccctcatctatcaactgggcatcttatcaagaacaaataagtccgtcgcaaagggcctgtcttgcttgctcaagaagcattacagtagcgtaccaagtattaatgatttctgggaaacttga

SEQ ID NO: 10858 - RNA, 1188 nt, synthetic construct
  source 1..1188: mol_type = other RNA
atggataagcctctgtatccttgcaaaagcataggttccattcaggtcctcgctcagactttgggcgtacatccgaagaaactcgtgagcttggctcggaaggccaatgcgtcttatacttcatacgaactgccaccccatccaaccactcaaaaaattagagtagtcgttgagcccaaacacgagctgaaaaagctgcagaaaaggataaacagccgtattttcatcaatgtcaagttcccaaactacctgcagggtggcttgaaggccacctctaccgtgaagcgagactacatcgcgaatgcctttctccacggcaagagcaaaactttaattaacctggacgtgaagaacttctacccgaacataaagcagaagaacattgtggacatattcaagtacttctttaagttctctgacgaggtggtagacatcctgaccgccctgacaacatataatgggagtcttcctcagggaggctgtacttcaagttaccttgccaaccttgtttttttcaacgaggaatataagcttgtctctagctttcgggggcagaagctgcgctacacaagactattggatgatataacgatctcatccgagaaaactatcatcgacaaagacaaagagaagattatcaaaagggttgccgccatgctgaaaaagcacgggctctcgctcaaaagttcgaaaaccaaagtgactgatcgcagcgagatgcacaaagattttgaagttaccggattatgtgtgagagcaacaacccccaaggcgtctaaaaaagatcggcgctatgtgcgacaactagtccacaattgcgaactgatggcagtgaaggagaagaccagcaatgagtaccacgcactctggaacaagacctccggattagtggcccggctcacacagttgaagcataatgaggctaaagggtttagagagcggctgtccgaaatcctacctgaatacgaccaataccagaaagataaagtcatcaagagggctagagctgcacttaaggtgcccagtacagctcactctgagtggggcacaatccgcaggtataaccgaattatctatcatctgggaattctggcccgcacggacaagaaacaagcacaccgtattaagctcacgctgaagaagcattactcctcaaggccaaccatcaatgaatattgggaatcctga

SEQ ID NO: 10859 - RNA, 1188 nt, synthetic construct
  source 1..1188: mol_type = other RNA
atggacaagcctttatacccctgtagctccatcggaactttagacgttctgagcaagaccctcggggttcatcctaagaagctgaagagcattgcaagcaaagtgaacgactcttactcaaagtatgaacttccagctcatcctacgacgggcaaagtgcgggaggtgtttgaacctaagcacgaactcaaaaaaatccagaagcgcattaacagccgaatctttgaacacatcatctttcccgaatatcttcaaggcgggatcaaggcaacccccgagattgcccgtgattatatcgccaatgccacaattcacggcaggagtaagactctgattaacctcgatgtccggaacttttatcccaatataaaggagaacgtggtgagcgatatattcaagtacttcttcaagttctcagatgaggtggtagaaattctgacgaagatcaccacttacaatgggtccctgccacagggaggatgcacatccagttaccttgctaacctcgttttttacaacgatgaataccgcttgttctctagtctcaagggaagaggtctaaggtacacccgattgctggacgacattacaatttcatcgccccagttgatcgacaaagagctgtctgtccaactgatcaaagatgtggccgcattactgaggaaaaggaacctgaaccttaagagcaataaaaccaagatcacaaacagaagtgagatacacaaggacttcgaggtcaccggtttgtgtgtcagagcggccaagccgcgcacacggaaaaaagaccgcatgtatgtgagacaactagttttcaattgcgagaagatggcggtcgagtctaaatctagtgaggagtttcataaactgtggaataagaccagcggcctgattgcaaagctggacaggctgaagaaatcacacgctaaagattaccggaaaagactatccgtgatcctgccgatttacgatcagtatcaggagaataagattatcaaacgttccaagcgagctctcaaggtaccaatcacttcccattcgcagtggggtactatacagcagtataataacctcatctaccagctcggcattcttgggcggaccaagaaaggccttgccaaaaatttgcgcaaatctctgaaactgcactattcctcagtgccaacaataaataaattctgggaacaatga

SEQ ID NO: 10860 - RNA, 1188 nt, synthetic construct
  source 1..1188: mol_type = other RNA
atggataagcctctttatccctgcaaacccattgggagtatcgaagtgctcgccaagactctcggcattcacacatcgaaactgcagtctattagtaagaagatagaggaaagctatacgcctcataccttgaagccaaatagctcaacaggtaaagtacgatcagtgttcgatccaaaatttgagctcaagaagttacagaagcgcataaattcccggatcttcgaaaacattaagttccctgagtacctgcagggcggactgaaggccacggcttcctgcaaaagagactatgtggagaatgccgaaattcacggtcggagtaaaaccctgatcaacctcgatgttaaagatttctaccccaatatcaaggttgacaccgtgcgtgatatcttcaagaacttttttcgcttctctgacgacgtcgtagacatactgactgtaatcaccacctatagaggatgccttccgcaggggggatgtacctcttcatatctggctaatctggtgttttacaacaacgaatacaggcttttcagctctctgaggggccgaggtttgcggtacacgagactgctagacgatattaccataagcagcaagactgctattgacaacaaagtccgcgaaaaggctatcaaagacgtcgcagccatgctgaagaagaagaatcttcgcttaaagtcctccaaaaccaagattacagatagaacagagatgcacaaagatttcgaggtgactggcctctgtgtgcgtagtaggctgccaaacatcccgaagaaggaaagaaagtatatccggcaattggtgtttaattgtgaaaaaatcggacgcaatgacaagacaagcaaagagtaccattctctgtggaacaaaactagtgggttagtgactcggctggggcggcttggaaatacacaagcctctgattataggtcaaggctctccgaggtcctacctgaatacgacgagtatgaagaggcaaagctggtgaagaggtcaaacgcggccctgaaagttccccagtccgagcacctcaaatggggcgtgattaagcgatacaacatcattatctaccacctgggcatcttgacaagaactaaaaccctgttggcacgtaatctacgcaacaaattgaaggagcattacagcctcgtcccatccgttaaagacttttgggagaaatga

SEQ ID NO: 10861 - RNA, 1188 nt, synthetic construct
  source 1..1188: mol_type = other RNA
atggacaaaccactctatccttgcaagcccatcggtagcattcatgtgttggccaatactctcggcgtacaccccttgaaactgaaatcaatcgccaataaagccgaatccagttacacctcctacaatcttaagcagcacccgaccaccggaaaggttaggacagtgtgtgatcctaaacatgagttgaagaagatccagaaaaggttaaactccaggattttcgctaaagtggaatttcccccatatgtgcagggggggatcaaggccactattgactctaaacgtgactatatcgaaaacgccaccattcatggacgatctcagacacttataaacctggacgtcaaaaatttctatcccaatgtgaaggccgatgccgtcaagaatatcttcaagtactttttccggttctctgatgacgtcgtggatttacttaccaaactcaccacataccgcggctctctgcctcagggaggttgtgcatcatcatacctcgcgaacctagtttttttcaatgatgagtaccggctcgttagcagcctgcgcgggaaacaaattcgctacactagacttctggatgacgtcactattagcagccagaagccactggacggcaacaccagcgaaaaaattatcaagcaggtcgcagcaatgctgaggaagcataacctatcactgaaatcaccaaaaaccaaggtgtccgaccgaaaagagctgcacaaagagtttgaagttacaggactgtgcgtaagggctagctttcctaaggttcgcaagcaagatcggcgctatgtcaggcaattagtgttcaattgcgagcagttggcagctcagactagaacttcggaggactatcactccctgtggaacaagacatccggcttggtggctaagctggtgagactccagcacagtgaaggcaagtcctatagaaagcgactcacgaagatactacctctgtacgatcagtatcaggagaataagatctgtaagagatactatgcggcccttaaggtaccccgggagcaacacgtgcagtggggtaccataaacaagtacaacaaactcatgtactctctggggatcctgagtcggacgaacaaaaagcgtgctcaacacttcagaaaaaagctggcaacacattacagttctgtgccggtcatagaagacttttgggagagttga

SEQ ID NO: 10862 - RNA, 1185 nt, synthetic construct
  source 1..1185: mol_type = other RNA
atggataaaccacgatatccatgtaagcccattgggtcgattgatgttctcgccacaacgttgggcgtgcacaaaaagaaactcatcgacattgccagcaaagtgaactctagttacacttctcacgagctgccgaaacaccctatcaccgggaagatccgcaaggtggtggatccaaagcatgagttaaagaagattcagaagcgcatcaatagtcgaatcttcgagcttgtcatcttccctccatacctgcatggaggcatcaaagccacgagctcaattaaaagggattatgtggaaaatgccagccagcacgggcacagccaaacactaataaacctggacgtgaagaacttctaccccaacatcaaaacaaacgcggtgtccggcatcttcaaatatttctttcggttttccgatgacgtcgtggagatactcaccactctcaccacttataatggaagcttgccccaggggggctgcacttcctcatatctggcgaatttagtcttttttaacaccgagtacaagctggttagttcgtttagaggtaaggcaattcgttataccaggctgttggacgacattacgatcagctcaaagaataaaattgactctaagagcaccactaaaattatccaaaaagtatccgctatgctgcggaaaaatgaactttctctcaagagcaataagacaaaaatcagcgatagaagcgagatacacaaagaattcgaagtgaccggtctgtgggtccagcctgtaaatccgcagatgcggaagaaggacgtcagacatgtgcgtcagcttgtgttcgaatgcgaaaagctggcctcaaagtctaagacatcagaggactttcatatcttgtggaataaaacctcaggactggtagcaaaactatccaggcttaaccactctcaagccatatcccaccgcgagcgcttatctaacatgctgcccgagtacgatcaggaagcacaggacaagttggttagaagtacaaatgctgctctgaaggtgcctgtctcctctcattccaagtggggcgtcctgaaaaagtacaacctgatcatctataacctcggtattctggctcggactaacaagattctctccaaaaagcttagggtttcactaaaaaagcattactccagtgttaccacaataagtgagtactggggatga

SEQ ID NO: 10863 - RNA, 1188 nt, synthetic construct
  source 1..1188: mol_type = other RNA
atggacaagcctctgtatccctgcaaaccaatcggatccatcgacgttctggctaagactctgggggtgcatcctaccaaactgatcgacattgccagtcaagtgaacaattcttatacctcctatcagctgcccgctcatcctgtgacaggtaaggagaggacggtcttggaacccaagtacgagcttaagaagattcagaagcggattaactcccgaatctttgaacaggtccagtttccgagctatttacaagggggattaaaagcctcacactcaattaagagggattatgttcagaacgccactatccactcgcatagtcaaactctcatcaacttggatgtcaagaacttctatcccaatattaagacagaagcggtaagcaacatcttcaagtacttcttcaatttctcagatgacgtagtgtcaatcctcattaaactgaccacctaccacgggtctataccgcagggcggctgcacaagctcatatctggcaaacctggtgctctttaacagtgaatacaagctggtgagtagcctacggggcaagaatgtccgctactctcgcctcctagacgatattacgatctctagcaagacaaaacttgatcctaaattcatcgagaagacaataaaagacgtggccgcacttctgaaaaagcagaaactgagcctgaggtcccagaagacgaagattacagacagggccgagattcataaggagtttgaagtaaccggcctgtgggttagaccatcccaacctcaggtgcggaaaaaagatagaaggtacatccgccaattggtcttcaattgtgaacaaaagtccaaaaccgataagacaagtgacgagtttcataaactgtggaatcagacttctggccaggtgaccatacttgagcgacttaaacactcccaggctagcgattaccgccagagattggcgaaaatttacccagaatatgaccagtatcaggagaacaagttgatccggaaaattaaagctgccctcaaagttcccataagcgagcaccaccagctgggtaccatcaaaagatacaacgggctcatataccagctaggaatcttatcgagaaccaaaaagactctgtccaagaatttccgtcgtaccctcaaggcacactactctactgtgccaactctcaataatttttggaacaagtga

SEQ ID NO: 10864 - RNA, 1194 nt, synthetic construct
  source 1..1194: mol_type = other RNA
atggataaaccacagtatccctgcaaatccattgcaagcgtggaagtcttggcaaaaactcttggggtgcaccttaagctgctcaataatatcgcttcgaaagtcgaggaatcctattcttcctatgtattgccagctcacaaggtgagtggaaagatacggaccgtctttgagcccaagcatgagttgaagaagatccagaaacggattaactctcgcatttttgagcgtgttatcttccctgaatatctcatcggcggcattaaggccactcctacaatccccagggactacgttcaaaatgccaggatacattccaaaagcaagacattgatcaacctggacgtaagaaacttctacccaacaatcaaagcacaggaggtgaagaagatctacaagtacttctttaagttcagtgacgaggttgttgaactacttaccctgctgaccacctataaaggcgccgtccctcagggtggctgtactagcagttacctcgccaacctcattttttttaatagcgagtatcagatcgtgagcagcctgcggggacaaaacattcgctattccagactactggatgacattacgatcagttcaacatccgagatctcaagcaaaaaaatcacggtaatcattaagtcagtctcagctatgctcaagaaacacaatctgtctctgaaggggaagaaaacaaagataagcgatcgagatgaatgccacaaggatttcgaggtgaccggtctgtgggtgaaggaggctgaaccaaaactgcggaaagaggaagtgaggcgaataagacagctggtctatcattgtcagcttgaatctatcaatggcatggactcagacgagtaccataaaatctggaataatgtgtctgggctggtgactaagttaacccgcctgaaacactctcagggaaaaaagtacagggatatcttgactctcattttaccgatatacaacgactacgagattaacaagctcaagaagaagattaacttcgcccttaagatccctaaagaagatcactataggataggggtgattaagaagtacaaccaactgaactacaagttaggcatcctaggacgcacccacaaaggtatggccaaagatgcgagaaaacgtctgaagtgccattacagtacaattcccaaaatggacaattattgggaaatggactcctga

SEQ ID NO: 10865 - RNA, 1188 nt, synthetic construct
  source 1..1188: mol_type = other RNA
atggataaaccctattacggttgcgcaagtatcggatccgtggacgttctggcgaagacgctgggcgtcaacgttaaaatcctggagagcatagtaagcaaagtggacgattcatatacttcttacgatctggcccctcaccctgtaacaggcaaagtccggaccgtggtggaacccaagcacgatctgaagaaacttcaaaagcgtattaactccaggattttttgcggagtgaaattcccatcatatctccagggcgggatcgcctcaactgaagatgtggaccgcagctacattaagaatgcggaaatccactgttcatcccggaccctcattaatctcgacatcaagaacttctacacgaacattaagtatgacgttgtattcgacatctacaagaattttttccgctttagcatcccggtttgcgacgtcttgaccaaactgactacctataagaagcaggtgccccagggtgcttgcaccagcagctatttagctaacctggtcttctataacaatgagtacctgctcgtgagctttctgcggggaaaggggttttcctactctcgcttgttggacgatataacaatttccgccaagagtgagtgttcagagatccttacatccgacatcattaagcgagtcgcatctatgctgaggaagaaggacctgaagatcaacaataagaagacaaagatcacagataagagagaagagcataaggaatacaaagtgactggactttgggtgaagcacgccacccccaaactcagaaaagacgagaggcggtatattagaatgctagtgtacgtctgtgagtgcaaagctcaggaaagcaggtccacagatgaatatcatgcattctggaacaagaccagtgggttggtggccaaactgaagcagctgtcacatagccaagcagatagttatcgcaaaagattatcgtctattctgccaatctgttctgaagagaaagtgtacagtataaatcggcgtgtcaaaaatgctctaaaaatccctgttgccgatcacgggtcggtgtccgtaattaggcgatataacaaacttatgtaccagttaggcatcctctctcgaactgagcctgagcttgccaaatccctcagaaagaaaatgttgcaccattacccatctataaagaccataaatgagtactggcatggctga

SEQ ID NO: 10866 - RNA, 1188 nt, synthetic construct
  source 1..1188: mol_type = other RNA
atggataagccgtactatccatgtgattccattggttccgttgaggtactggcaaagacactggggctgcaccccttgcatctccaaaatatcgcggacaaagccgaagagtcatatacaacttttctcctaagtcctaaccctaaaacaggcaaggaacgcgaggtgcgggaagccaagttcgagctgaagagaatccagaaaaggatcaacagcaggattttcgaacacgtcatttttcccgcatatttacagggcgggttaaaggctaccgaagaccaaggcagggattacgttgagaatgcgtcaatccatagccggtgccgaactttaattaacctggacgtgcgtaatttctatccaaacataaaggctcgctctgtcaaggacgtgtttaagcagttctttcgtttctccgatgaggtcgtggatctccttgtgaagctgaccaccttccaaggcgcaatcccccagggcgggtgtactagcagttaccttgccaacctagtctttttcaataacgaataccacctggtaagcaaactcaggggacagggtttcgcatacagcagattgcttgacgatattaccatatcctctgacaaagaactgagtcaggccaaggcctcagaagtgatacgcatggtggctgctatgcttactaagcagaagctgcggttgaacggggacaaaacctcaatatcttacagaaatgaactctccgctaagtttgaggttacagggctgtggattaaacacaaacagcctaaagtccgcaaacaggagcgccggtacatcagacagctcgtttataattgcgagctgaaatctaaacaggacaagaccacagattcttatcataccctttggaataagacctcgggactggtgacgaaactagagagactgaatcactctcaggcgggcagctatagaaaacggctggcagtaattcttcccgaatacagtccaatgcaaacggaccagttgctcaagaaagtttcggccgctatgaaggtccctgcctcagagcaccgaaagttgggagtgatcaagcgatacaaccagatcaagtaccagctgggaatcctgagtcggacacaaaaaggtgtggcaaggaaggctaggaaggccctcgtggcccattatagctccgcctccactaaactggaggtgtgggagagctga

SEQ ID NO: 10867 - RNA, 1188 nt, synthetic construct
  source 1..1188: mol_type = other RNA
atggacaaacctctgtatacctgcaaacccatcgcctcaatcggactgctggccaaaacgctgggcgtgcaccctgaccatctggtggatgtggcgaataagattgacacaagctatacttctttcgaactagcacctcacccaaagacaggcaaggtgcgaactgttcttgaggccaagaagaatctcaagcgtattcagaagcgtataaactcccgaatattctccaacgtcaaatttccggcttacctccaaggtggactcaaaagtgacgagagcacccaacgcgattatattgagaacgcgagactacacagtcattgtagaacactgatccagcttgatgtgcggaacttttatcccaacattaaaccaatctacgtcgagccagtctttaaacagctgtttaggttcaatgacgaggtgtctcagatcttgacgcagctgactacctacaagaattctgtccctcagggtgggtgcacttcatcatacatcgccaatctcctgttcttcaattccgagtaccatttagtctcaaaattgaggggacaaggtctgcagtacagcagattgctcgatgatatcacaatcagttcgcaggaggagcttagtaagcagaagtgtgaggaggtgataaaactcgtcgcaggcatgttgacaaagtatggccttaagttgaaagggtccaagacccagaccgagtaccggtctaaccgcaatgctaacttagaagtgactggggtgtgggttaaacatagggccccgaaggtgcgcaaagaagaaagacggtacgttagacaactggtgtacgtatgcgaacagaaagcaaaggtatccaagaccacccaggaataccacgaacactggaacaggacctcaggactcgttgccaagttagagaggctggaacatggccaagctaaaaaatatcgtgagagactgagggcaattcttcccatatattctgaatccactgccaaccaggtactaaagagtgtgaatacagctctcaaggttcccaagaccagccacaaggagctggggcgcgtcaaccggttgaataagatctactaccaactgagcattctgagccggacgaaacggtatgaagctaagaaagcccgacgccagctgaagcagtattatagctcttccccaacaaaacaggagatttgggaaatctga

SEQ ID NO: 10868 - RNA, 1167 nt, synthetic construct
  source 1..1167: mol_type = other RNA
atggataaaccatattacccctttaatgcaattgccagtatagaagccttggctcggacccttgggatccatccaaagttactttgtagcatcgctgacaaggtcgagtcttcctactccacatatgatctagcgaacaagaacaggacagtattcgaacctaagtacgagctaaagaagatccaaaagaggattaacagccgcatctttgagaaggtggaatatcctctgtatctgcagggaggcataaaaagcgaagttaaacgcgactacgtggagaacgccaaaattcattcacatgcagagacactgatttctctggacatcaagaagttctacactaacatcaaagccgataaagtgttttccgtgtttaagtacttctttaagttcccagacgacgtgtccacgattctgaccacactgactacctacagaggtagggtaccgcagggaggttgtacatcttcgtatctggcaaacctggtctttttcaattctgaatactcattggtgtctgccttccggggcaaggacgttaaatacagtagactattggacgacgttaccctcagctcagaaaaaaacttagatagcatcaagtgcacgaatcttattaagaacgtcgtggctatgtttcgatcctacgagctgcggctgaacactaagaagactaaaatcgagtacagaggcaaggctaataaaggattcgaggtcaccggcctttgggttgaacacaagaaacctaaagtaagacgaaaagaacaacggtacatccgccaactcgtctataactgcgagctgcagtataatgatcggaagacaaatagtgagtatcatgagctgtggaacaagactagtggcaaagtggcgaaactcgtccgtctggaccacagccaggccaaaaatttgcgagaaaggttgcgcctcgtgctgccccagtacgataataataccgcttataagcttaagaagctcaccaataaatcactccaggtgcccaaagaacaccaccagaaaatagggagaattcgtgattataaccgcttaatcttcaaacttgggattctcaagaggtcccaccctgccctggcaaaagtgctgataaagaagatgaagagccactatctcaacgtgcccaccaataaagagtactggctggagtga

SEQ ID NO: 10869 - RNA, 1167 nt, synthetic construct
  source 1..1167: mol_type = other RNA
atggacaaaccatactatccacatgacgccatcgcctccgtcgagaaacttgctctgaccctcgggattcaccctaaccgcctcctttccatagctgaccgcgccgacgagtcatacactgagtatgaactggtggataaagacaggaccgtttttgagcccaagtacgagttgaagaagatccagaagcggataaattccagaatattcgagttggtggagtttcctctgtatctacagggaggaatccgggctaatgttaagagagattacgtcgaaaatgccaaaatccacgctaacgcaacgaccctaatttctctggacatcaagaagttctacacaaatatcaaggcagacaaagtctcagctatttacaagtacttcttcaaattccccgatgaagtcgtagacattctgacgaagttaaccacctataaagggaaggttccacaaggaggctgcacctccagctacctggccaatctggtcttttttaacagtgagtataggcttgtcagtgcctttcgcggtaaaggcatttcctatagccgcctgctggacgatgtgactctctcatcagcgagcaacctcgatagctctggctgcactgaagctattaggaaggtggtgggcatgtttacagcacacgacctgaagttgaactctaagaagactaagatcgaatatcgaggcaaggccgccaaggggttcgaagtgacaggtctttgggtggagcacaaaaaaccaaagctccgtagaaaagaaaggaggtacgtgcggcagctggtatataactgtgagctcaagtacgaatctgataagacaacacccgaatatcacgagctctggaacaaaacaagcgggaaagttgcaaagttaacccgtcttgaacatagccaggcgaaggccctgagaaagaggttacggaatgtgctccccgaatacgatgattacaccgcaaataagctgaaacatctggcctatcgagctctgcaagtgcctaaagagcaccatcagaaaattggacgagttaacgatttcaatcggctaatcttcaaattgggtgtgctgagacgcagtcacccttcgctggcaaaggtattgatcaagaaactcaaagtccattacaaaaacgtgccgactaagaaagagtattggcttgagtga

SEQ ID NO: 10870 - RNA, 1188 nt, synthetic construct
  source 1..1188: mol_type = other RNA
atggacaagcctcactacccgtttgagcccattgggagcatcgataagttagccagaacactgggggtgtctccagccgttatggaggcaatctcaaaccggattgacgaatcttattcggagtatgagcttcccccacatccaaaaacaggtaaggtgcgaaccgtgttcgaagcgaagcacgaactcaaacggatacagaaacgcatcaacagtcgcatctttgagctgatagaataccccacctatctgcaggggggcattaaggctactcctaaaagggattatgtggagaacgctaatatgcacgtgggagccaactccttgatttcccttgatatcaagaacttctaccctaatatcaaggcttctcaggtcttcaacatcttcaaacagctgttcaatttccccgatgcgctcgcaaaaatcctgactaagctaactacctacaaaggtaccgtgccccaggggggctgtacgtctacctatctggcaaacctcgtgttcttcaattccgagtatcacttggtcagtgcatttcgagggcaaggaattgtttattcaaggcttttggacgacgtggtgctgtcctctccaaaagtattgtcgaacagcgaatgcactgatgccatccaaaaggttgctggcatgtttaagaaatacgaatttcgtctgaacagctcaaaaacaaaagtggagttccgcggcaacagcaatagtgagttcaatgtaacgggcctgtggatcgaacacagtaagcctaaaattaggaagaaggaaagacgatacattaggcaactggtctttaattgcgaactgaagtacatccagagcaagcatagcgatgactaccacattttttggaataagacaagcggtctggttgccaaactcgagcgcctgaaacatccgcaggctaagaagtatcgggacaggctgaaacaggtacttcctatatatgacgacgtcaacattcggaagatcataaagttaaccaacaaagcactaaaggtcccaaaagaggaacattccagatacggcagaatccagaattgtaatcgtatactctaccggctcggcatcttaggacgctcagaggccaagctcgccaaaaatctgagaaggaagcttaaatctcattactccaccattcccactaagaaggagtactggtttggaacagcctga

SEQ ID NO: 10871 - RNA, 1179 nt, synthetic construct
  source 1..1179: mol_type = other RNA
atggacaagccatactacccatatcaagccattggtagcatcgaattgctggcccgcacactaggcattagctctaagaggctgatcagcatagcctcacgcgtggacaatagttatgcagagtttgagttacatccccacccaaaaacaaataaaatcaggaccgtgtttgatcccaagtatgaactcaagaagttacagaagagaattaactcccggatcttcgaaaaagtgcaataccctaaataccttcaaggcggaattaaagcacccgactccagggactatgtcgagaatgcgaagattcatagtaaatccaatacgctgatctccctcgacattaaaaacttttaccccaacatcaaagagaaatacgtgtatgacatattcaagcagtttctgaacttcccggatgaagtgtcaaagatattgacaactcttactacgtacaaaggatttgttcctcagggggcagtgacatcaagctatatagccaaccttatattcttcaatagcgagtatagcatcgtttctgccctgcgaaccaaaggcgtaatttattccagactcttagacgatgtctctattagttctgagaagcgtcttaatgagactgaaatcaccaagaacattaagttcgttgtttcaatgttcactaagtatgacctcaagcttaacaccaagaagaccaagaaagagtataagaacaagaagaacccgtacgaagtgactggtttgtgggtcgggcacgctaagcctaaagcaagaaaactggaacggaggtatattagacagctcgtgtacaattgcgagctgaaatacccttctatgaaagattccagcgattatcatgagctgtggaataagtccagtggcctggtcgccaaactggaaagattgggccattctcaggctaaacgactgcgggctcgcatgtcaagcgtattgccttgttacgatgatattgaaatcatcaagaccaagaaactcattcggaaggcgctaaaagtgccacgggagtaccatcagaagcacggacacatcaagatctttaacaaactgatctaccgttgcgggatcctgagtcgcacccacaaaaagctctcgaagcacctgaggcaacagctgcaggctcactaccagaatgtccccacaatccgagagtactggcacggatga

SEQ ID NO: 10872 - RNA, 1191 nt, synthetic construct
  source 1..1191: mol_type = other RNA
atggacaagcccgaatacccccataaggccataggctccgtcgacgcgttagcccaatcactgggtacgaaccctagcgccctgaaaaacttggtgagtaaagtcgataattcttacactcccatcttgattagcactaacaatgggacaaaggagcgccaggtctatgagccgaaatactacttaaaaaagatccagaaacgcatcaatcgagagatatttgagaaagtgaaattcccaacctacctgcaaggctccatccgggatgttaaaaacacccgagactttgtgaagaacgctggagttcacagtggagccaatgacttgatcagtctagatataaccggattttatgaccacattaaggaggaatatgtgtctgatatcttcactaaactcttttccttccctcccgacgtgtccgaaattctgactaaactcgttacctacaaggggattgtaccacagggcgcttgtacctcttcatacgttgctaacctggtattcttcaatagcgaatatcgagtctattcaagactgaagaaccgccacaatgtcaagtatactcggctcctggatgatgtgacactgtcctcagagcggcgcctgacggacaaggagcttaccatttgcattgacgaggttaaaagcctctttcgtaagtacgatcttaagagtaatgactcgaaaaagaaggtacagacccgtaaattccacggtcatctggattttcaggtcaccgggttgtgggtaggccataaaactccaagactgcggaagaaggagaggagatatatcaggcaactggtgtattcctgcgagcgcgaatatgaacgggatagtacaaagacagaataccacgagttatggaacagaactagcggcaaggtggctaagatggccaggctaaatcattcacagtctagggcgcttagagaacgtctcaaaaaggtgctgcctacctacaatcaggaccaagccgagacgcttatctacaacatcaaaaggttcgtcgacaaagtgaaaaagaacaagataaagagcgaccctgcaaagacaaaaaacttcaacacattggtgtaccaggtgaatatcctgacccggacaaataaaagccttgcaaattccctcagactacagctcatgtctattaggaagagcgtgaacctgaagtctgcactctgggattga

SEQ ID NO: 10873 - RNA, 1167 nt, synthetic construct
  source 1..1167: mol_type = other RNA
atggataagccctactatccccataaacccattggatcagtggctatcttggccaatactctcgggatcacggagctgaaattaagggcgattgcatctgacagcgacaacagttacactgaatttctgatctctgatggtaagcgaaccgtttgtgaacctaaattcgagctgaaaaaactccagaagcggataaacaggcggattttcgagaaggtgcagtatccagagtatcttcagggagggatcaagagtacgagcaagagggactacgtgcaaaacgcacttatacactccaaggccactaccctgataagcttagacatccgccgctttttcgataatgtgaaagagtcgtacgtttacgatgtctataagtaccttttcaagtttccagacgaagtagcagagttgctagcgcgagttacaacctataggggaaccctccctcagggtgcctgcacctctacgtacctggccaacctcattttctttaactccgaatatcgggtcgtgtccattttgagagggcgaggcattagctatagtagactgctggatgatgtcacactctcaagtggcgagaacctgaaaaaggaagaagtaacaaactccataaaggaggtgattgatctcttcaaaaagtacgacctccggcagaacaataagaaactgaaagtcgagtacagagacactccaaatggcgatttctgcgtgacagggctctgggtcgagcactcaacccctaaactgaagaagaaggaaaggaagtatatccgtcagttagtgtacgagactgaaaaactgtataggacagaccgtaccagcgaaaagtaccacgaactgtggggcaaagcttctggtaaagtggccaagttgaatcggctgggccataaacagtccgatagcctgcggcaaagactttctaacatcctaccggagtttgacaagtatactaccaagaaaatcgtgactatccactaccgcttgctgtccatccccaagatcaaacataagagaattgacgttgctaaacagtacaataaacaacttcacaagctcggaattttgtcaagaaccaataagaccctagccaaaaagctgcgcatggctctgaagcagcactttaatcaagtaacaacaatcgagcgctattggcatgactga

SEQ ID NO: 10874 - RNA, 1179 nt, synthetic construct
  source 1..1179: mol_type = other RNA
atggacaagccgtattatcccttccgccctatttctagcattgccattctggcgaaaaccttaggtattcacgagaaaatgttgcttaacctcgcaaataaggtggatgatagttacacagaattcctgataaacgtgaaagggaaagatcggacagtttatgagcctaagcacgatctgaaaaaactgcaaaagcgcatcaaccacaggatattcgagaaggtgcagtacccagtgtatttgcaggggggcattaaagatccaagtaacaaaagagactacgttgaaaatgcaaagatacactgcgagagggatcccaatatcattatctccattgacatcaagagtttctacgacaatatcaaaagcgactacgtgtttaacgtgtataagaacttcttcatcttccctgacgaagtaagtgagattcttacaaagctgactacatttaagaacaaggtccctcagggagcctgcaccagctcatacctagctaacctgatttttttcaacaccgaatactccctcgtctccaaatttcggagcacgggaatttgctatactagattactggacgacgttactctgagttccaataagtttttgtcagaggaaaagatctccagctctatcaaagatgtggtagcaatgtttagaaagtacaagctcaagcacaataataagaagactaaggtcgagtgtcagaagaatgctaagaattcctttaagatcacaggcctgtgggtggggcatagcaaacccaaaaccacccggcacgatcgcaggtacataaggctgttagtcaagatctgcgaaaacaagtttaaagacgacaagtattcactcgagtatcataccttttggaataagacgtcgggactcgtagccaaactgtcgcgtctggaacagtctaatcatgtcagcctgcgtgaaagaatgagcatgatccttccattgtacgacgataaggagaaagataagataatccgggagtgtaaggccatcctcaaattcaacaataaagtggctttcaccatcggccaagtggagactattaacaaggttatcggcaaacttggtattctcgcccgaaacaacaaatcactatctaaaatatggcgctccaggatccgaaaacattgtcagtcactgccctctaaaagatctatgtggctttga

SEQ ID NO: 10875 - RNA, 1179 nt, synthetic construct
  source 1..1179: mol_type = other RNA
atggacaaaccctattacccctttcgtccgatctcctccacatcaatcctggccaaaaccctggggatccacgagaaaatgctgttaaacttggccaacaaggtggatgattcctacacggaattcctgattaatgtgaagggtaaggatagaactgtgtatgaaccaaaacatgatcttaaacggctgcagaagagaatcaaccataggatatttgagaaagtccaatacccttcatacttgcaggggggaataaaggacaatagcaacaagagggactatgttgagaatgccaagatccactgtgacaataatcctaacctcataatctctctggacatcaaatcgttctatgatagtatcaagtccgactacatcctaaatgtgtacaagaacttcttccactttccagatgaggtgagtctcatccttaccaaattaaccacttataggaacaaggtcccccagggagcgtgtacaagtagctacttagctaaccttgtgtttttcaatagcgagtattcgctcgttagcaaatttcgaagtaaaggcatttgctatactagactgctagatgacgtcaccctgagcacaaataaaaagatttccgaggagtacatttccgcatctatacgcgacgttgtcgccatgttccgcaaatacaatctgaagcacaacaacaagaaaaccaaagtggagttccagaaaagcgcaaaggactcttttaaaattacaggattgtgggtaggccacgctacccctaagactactcgccacgaccggcgatatatacggcttctcgtgaagatttgtgagaacaaattcaaggacagcaaatacgacttggaatatcacgcattttggaataaaacatcaggcatggtagccaagcttgcccgtctggatcagtccaatcatgtcaagctcagagaacggatgtctcaaatcctgccccattacgatgtgcgcgaaaaggaaaagatcattcgcgaatgcaaaatggttctgaagttcaacaacaagattagctttacgatcggtcagattgatgctattaacaagctcatcgggaagttgggcatcctctcaaggaataacaaggctctgtctagagtgtggaggaatcggattcataagcactgcaaaagtaagccatctaaacgatcaatgtggctgtga

SEQ ID NO: 10876 - RNA, 1179 nt, synthetic construct
  source 1..1179: mol_type = other RNA
atggataagccctattacccttttagacctatctctagcatcccaacattagcaaaaaccctgggtatccatgaggtcctgctggtgaatttgagtaacaagatagatgactcatacaccgaattcttgattaatgtgaaaggtaaagaccgaactgtgtatgaaccaaaacacgagttgaaacgcctgcaaaaaaggatcaaccaccgaatctttgagaaggttcagtatccgggatatctccaagggggcatcaaggataacaataacaagcgggactatgtggaaaatgctaatatccattgtgagcacaaacccaacattataatctcaattgacatccggtccttttacgataatataaagtccaacttcgtcttccttatctacaagaacttctttcatttccctgacgaggtggctaatatactgactaaactcacgacatttagaaataaggttccccagggcgcctgcacctctagctacttggccaaccttattttctttaactctgaatactccctggtatcctctttcaggaacaatagtatcacatatacacgcctcctagacgatgtgactctctcgtccagcaaggctctgtccgaatcccagatcactgcttctataaaggaggtcatcggcatgtttaataagtacaacctcaagcataacaacaagaaaacgaaagttgaaacccagaagaacagcaaagactcattcaaaattaccgggttatgggtgggacacagcaagcctaaggcgactagaaaagaacggcgttacatcagactgctggtaaagatttgcgaaaacaaagccaataccgatatttattctgaggagtaccacgcattttggaataagactagcggccttgtcgccaaattaacccgcctggaccagagcaaccacaaggatctgcgtgagaggctgaacgcaattctacccctttatgatgacaagagtaagaacaaggtgatacgggagtgtaagatcatcctcaggtacaataataaggtttcactcagtatcggacaggtcgacacagtgaataaactgattggcaaacttgggattctgtcaaggaataaccgcgccttgagtaagatttggagaaccaagattcggaaacatttcaaatgcatgccaacaaaaaaggagatttggcagtga

SEQ ID NO: 10877 - RNA, 1242 nt, synthetic construct
  source 1..1242: mol_type = other RNA
atggtcgattttgatgccaattacttgctaacaagctttactccccttaaacattggtgcgctatggacaaaccatactatcctcacaatcccatctccagtgtagctattctcgctaagaccctcgggattaggaaggaccttttggtgaacttagtgaacaaagttgattctagctacacagagtttctcattacggtcaagaacaaggaccgtacagtttatgagcctaagttcgagctgaagaaattacagaagcgcatcaattctagaatctttgagaaggtccaatatcccacgtacctgcagggtgggatcaaagatgattctaacaagcgtgattatgtcgaaaatgcggcacttcactgcaagaataagcctgagacaattatctccatagacatcaaaagcttctacgataacattcggagtagctatatcaacgacatctacaagaacttctttaatttccccgacgaagtggccgataccctgaccaaactgacgacctacaggaataaagtgccgcagggcgcgtgtacttctagttatctcgcaaacctcatattctacaacagtgaatatactctcgtgtcaaagttccgcaataagaacattacctataccaggctgctggatgacgtgaccttaactagcagggacaacataagcgaagagaaaatctctgaacacatcaaatcggtcgttggcatgtttcggaagtacaacctgaagcacaacaacaaaaagactaaagtggagactcaaaagaatgccaaaaactccttcaaaatcaccggtctttgggttggacatgccaagccaaagatcacacgacatgacagaagatacattcgcctgcttgtgaagatttgtgagaataagttcaaagacgacaaatactccgaggagtatcatgccttttggaatcggacctcaggaatggtagccaagctgactagactggatcagtcaaaccacattgaattgcgcaaacggatggcaacaatcctgcctttgtacgatgacaacgagaaagataagattattcgagagtgcagacgggtgctcaggttcaataataaaatcgacctatcaatcggccagttggacatcataaataagctaatcggaaagctcgggatactggctcgaaataacaatgcactgtccaaaatttggaggaacaagataaagaatcactttccactgctgccaacaaaacgcgaaatttgggaatga

SEQ ID NO: 10878 - RNA, 1188 nt, synthetic construct
  source 1..1188: mol_type = other RNA
atgctcatggataagccctattacccgcacaaggcgatcagtagtgtgaacgtacttgccaagacactcggaattagggagagcctgcttattgaactgagcatcaaatcagatacttcctaccatgagtttacagtttgcaccaaaaaagggaaggacagaacggtctatgaacctaagccattgctcaaaaggcttcagaagaaaataaactcgcggattttcgagaaagttaagtacccaatttacctgcaagggggaattaaagacgagatttccaagagagattatgtcgagaatgctcgcctgcatagtaaatctaagccttctcacctaattggcttggatatcaagagcttctacgacaatataaagacccccaaggtccatgacatctacaagtatttcttcaagtttccagacccagtttgcgacgtgctcacgaaactgaccacccacaagggcaaactcccgcaaggagcttgtacaagcagctatctcgctaacctggtttttttcaattcggaatacagtctagtctcatactttcgcaaaatgggcgtgacatacaccagactgttagacgatgtgactctgtcatcacctgtgcagctgtcagagcaccaggtcggagaagcaatcaaaaaagtcgtgggtctgttcaaaaagtataacctgaagcataacaacaagaaaacctccatcgagaacaataagaacattaagaatggcttccaggtgaccggtttgtgggtgggccacagcgaacccaaaactacaagggatgagcggcgttatatccgaatcctggtaaagacttgcgaacagaagcataagtctgacccctacagtcaagagtttcacgaattgtggaataagtcctccgggcttgtagccaaattaaaacggctaggtcagcctagccacgattctctccgcgcacgactttcagtggtgctgccattatatgaccagaaaatggcctctaaactgatcatggaatgtaagagccttctgactataaagaataagatccagtacagcgccggcgaggtgtccaacattaacaagacactgtataaactcgggatactctcccggaataatcctatatctagttccatctggagaaagcgtatcagggcaaactttaaaaatctgccctctaagaaagagttgtgggagtga

SEQ ID NO: 10879 - RNA, 1182 nt, synthetic construct
  source 1..1182: mol_type = other RNA
atggacaagccgtattacccttacaaggctatttcctccatcgagacactggcaaaaacattggggattcgggtgaatctgttaagcctgttagtggagaaatcagatagctcttatcacgagttcattgtttgtactaagaagggaaaggacagaaccgtttatgagccaaaacccctccttaaaagacttcagaagaagatcaacagcagaattttcgaaaaggtcaaatacccagtgtacctgcaaggtggcataaaggacgagataaataagcgcgattatgtagagaatgcgctgctgcacagtaagaacaagccgaaacagttgattggcttggacatcaaatctttctacgacaatatcaagtctgataaagtgttcgatatctacaagtacttcttcaagtttccagaccctgtgtccgatgccctcacaaaactcacaacttttaagggaaaacttccccagggggcctgtacatccagttaccttgctaacttggtctttttcaattccgagtataacctggtgagttactttaggaacatgaatatcacctatactcgactgctagatgacgtgacgctgtcaagccctgttaagctgtccgagaaacagatcggggaatcaattaagaaggttgttgctatgttcaggaagtacaatctcaagcacaataataagaagaccagtatagagtgcaataggaaccttaaaaatggatttcaggtaactggcttgtgggtcggccatgcaaccccaaaaactacgcgagacgaacggcgctatgtgcgtctactggtaaaaacctgcgagcagaaatataaaaacaacccctacactgaggaatatcatgaactctggaataaaacatcgggattagtggccaaactcaagaggctcaatcaaccctctcacgataccctgagaaaccggctgtcattagtcctgcctctctatgacgcagtgatggtgagcaagcttatgatggagtgcaaatctctattgcgggtcaagaacaagattgaatacagcgtctcggaagtgaaccatataaacaaaaccctgtacaagctgggtattctgagccgtaataaccccggcagggcctctatctggcgcaagaagatcatcgccaactttaaaaacctccctaccaaacgcgaactgtgggaatga

SEQ ID NO: 10880 - RNA, 1179 nt, synthetic construct
  source 1..1179: mol_type = other RNA
atggacaaaccaaactacccacacaaacctatttctgaggtttctgtgttagccaaaactctcggcatcagtgaagttatgctgaagtccatagctagcaaggtagataccagttataccgaatttgacattgagtcaaacgggaaggataggcatgtctacgagcccaaattcaatctcaagaagcttcagaagaggattaactcccgcatctttgagcacgtcaatttcccttcatatttacacggggggatccgggatgtgaacatccgccgagactacgtggagaatgctagactccactctaagactaaggtcaacagcttgatcaacctggacatcaggagcttttatgacaacattaagatcgacaaagtctacaagatctacaagtacttcttcaaattcaccgatccggtgtgcgagatcctcacaactctaacaacctataagaataaggtgccacaaggcgcctgtacgtcatcatacctggccaacctcgtcttctacaattccgagtatcaggtggtttccgcactgcgctgcaagggcatcacttacacccgtcttttagacgacgtaacactaagttccaagaagactctgagtgagacaacaatttctaatagcatcaaaagcgtcataggaatgtttaccaaacatggactgaaacagaacaagaagaagatgaaaatagagagcattcagaacaagaaagatggctttcaggtgactggtttgtgggtgggtcatgcggagcccaaaacccgccgggatgaacgtcggtatattagacttatggtgtatgtatgcgaaaaggaataccctaattcaatgagcaccgagtcttaccatgagctctggaataaaacgtccggactggtggcaaaactgaacaggctcaatcagtcgaattataaatccctgcgagaaagactgggcgccgtgctgcccttgtataacgattcagaaagagacaagatcattcgcgaatgtaaatctctgctaaagctggacagctctaaacctgttagttatgggcaattggattccatcaacaaaatatactcgaggttgggaattctggctcgaaacaatacaaatctcagcagatcctggcggaaaaagcttcggagtcactttaggaaactgcccacgaagaaggaaatttggctttga

SEQ ID NO: 10881 - RNA, 1179 nt, synthetic construct
  source 1..1179: mol_type = other RNA
atggacaaaccttattatccacacaagcctatctccagcgtggaagtccttgctaagaccttgggagtctctgaaccggccttaaggtcaatagccaataaggcggggaactcatataccgagtttctgattgagagtaaaggcaaggacagaactgtctacgaccccaagtttgagctcaagaagattcagaaaaggattaactctagactctttgagaacgtgatttttcccagttacctgcaaggcggaatacatgacaaggaaaatcgccgggattacgtcgaaaatgccaaaatccattctaccgagaaaatcaagtccctgatcaacctggatatcaagtcattctatgacaacatcaagaaagctaaggtgaacgacatttttaagtacttcttcaagttccccgatccagtgtgcgatatcctgacaagcctgacaacttataagaataaagtgccacagggagcatgcaccagcagttaccttgcaaacctagtttttttcaattcggagtaccttgaagtgtctaagttgcgcggcaagggtgttacttacacacgactcctggacgatgttacgttatcatcatccaagcagctgaatgacgaagagatcgagatttacattaaaagcattcatggcatgttcaagaaacacggcctcaaattcaacaacaagaaaaccaaaatcgagcatattaagagcaagaaagaagggtttcggataactgggctctgggtggggcaccagctgcctaaaaccactcggaacgagcgcaggtatatacgtttactggtcagaatttgtgagaacgagtatagcaaatctatgtattccgaaggctatcatgaactatggaacaaaacatctgggctcgtagccaagctgaaccgcctcaatcaaagtaatcacgagagccttcggacccgactgggtctgattctacctttgtacgatgatgctgaacgggataagatccttagggaatgtcgcaatctcttgaagataaaggccacaatcgagctgaagtacggccacgtggacagtatcaataaagcatacggaaaacttggtatcctctccaggaataataaactggtatcccgaatgtggagaaaaaagctgaagtcccacttcagaaaactgcccacgaaacgtgacatctggttgtga

SEQ ID NO: 10882 - RNA, 1173 nt, synthetic construct
  source 1..1173: mol_type = other RNA
atggataagccatactacccgcatcagccaatcagtacaatagagtccttggcgcgttgtctaggcgtcaccaccattaccctgaacagcatttcctcagccatcgattccagctacacagagtttgtgattagctcgaagaacaaggagcgaactgtatacgagcccaaatttgagctgaaaagaatccagaaaaggataaataaccggatttttgagaaggtggaattcccccgatatctgcacggaggcattaagtccctcgaacataaaagagactacgtcgaaaatgccaagatgcactccaatacttcagtagaaaccataattgggctcgacgtgaagaatttctatgacaacatcaagaaagagcgcgtgtatatcatttacagccagttctttaacttccctcatgaggtgtccgagctgttgactcaattgactacatacaagaacaaagtgccccagggggcctgcacctctagctatcttgctaacctcatcttcttcaattcagagtatggactggtttctaagcttagggggaagaaaatcacatatacgagactgctggatgatgtaaccatctccgccgccaaaaaaatttctgacgaggaaatcacaaaggtcattagagacgtgagcgcactctttaccaagcacggtctgaagttaaattcaggaaaaacgcgcgttcaccatgacaagtatgctgctgactcattcgaagtgacaggcctttgggtcggcaacattgcccctaaaacccggcggcaggaacgcagatacattcggagcctcgtgcacgcatgcgaaaatgagtacttggttgataagtacagttcggattatcatgccttatggaacaagactagtggcctagttgccaagctctatcgcctagagcaatctaatcacaaggctcttcgggaaaggctggggaaaatactgccactgtttgacgacgtggcaaaacgtaagatcatcatcgattgtaaaagcatgctgaaaatcgcaccctgctctctgaactatggtaaactgaagaggctgaatttgatctacagtaagcttggaatactctctcgaaactacaagtgtgaggcgaagttatggaggaaaaagctcaaagctcacttcgtgaagcaccctaaaaaaagtgaagtctggtga

SEQ ID NO: 10883 - RNA, 1173 nt, synthetic construct
  source 1..1173: mol_type = other RNA
atggacaagcctaattatcctcattgcccgatagcttctatagatgctctggccaggtgtctcggagtggcctcgacaaagctgttgagcattagccgtgatatcgataacagttacagtgagttcatcatcgaaagtaagggcaaggatcgcaccgtgtacgaacccaagttcgagctcaaacgtgtgcaaaagcgcatcaatcagcggattttcgaaaaagtgaagtatcctatctacctccacggcggaatccgggatccagacaataaaagggactacgttgaaaatgcaagaattcacagcgcgaacagttgcaaaaccattattgggctagacgttcgcaatttctacgataatattcgcgccgacaaagtgacaccgatcttcaagctcctcttcaaatttccaaacgacgtctccgaactactgacaaaactgactacataccgaggcaaggtacctcagggtgcctgcacctcttcatacatcgcaaacctggtgttttttaactctgaatacacggtcgtatcacgcctgagaagcctgggaatctcatatactcggctccttgatgacgtgacattgagcagccccaaggagctttccccagaaaggatcagcgagtgtatcagatcagtggtcgcactctttaaaaagcacggtttagagcacaacaaaaaaaagacccgaatagaaaacaagaacaataacgcccagtcctttattgtgaccgggctgtgggtcggccacaaaaccccaaaagttacgcgacatgagcggagatacattcgcaccatggtgcatgcctgtgagcgactctacttggatgacaactctactgatgcgtatcataatatctggaataagacttccgggctcgttgccaagttaaacagacttgagcaaagtaaccacaagggcctgagggagcgtttgaataaggtgctgcccgtctatgacgaggctgctcggaggaagataatactggactgcaaaagcttgctgaaactgaacgctacatcacttacctatgggcagcttactagactgaacctggtctattccaaacttggaattctgtccagatctttcttattcgagtccaggctatggcggaggcggctgaatgcacattttaagaataagcccaagaaatctgaggtatggtga

SEQ ID NO: 10884 - RNA, 1179 nt, synthetic construct
  source 1..1179: mol_type = other RNA
atggataagccctattatccacacaatccaatctcagacgtttcaaccctcgcgaaaactctggggattaatgaggtcatgctgaatgtcatagtgtccaacgtcgatacctcttacaccaaatttgacatacctagcaaaaacaagacacggacggtgtatgagcccaagcttaaccttaaaaagatacagaagcgcattaactcccgcatctttgaggccatccagttccctatctacctacaaggaggcatcaaggattctgttgacaaaagggactacgttgaaaacgccagaacccattctgtcaactcccctagcactctgattaatctcgacatcaagagcttctacgacaacattaagtacgacaaagtgttcgacatcttcaagtacttcttcaaatttcctgatgacgtatcaaaggtgctgactgatttgacgaccttcaaaaacaaggtgccccagggcgcttgtacatctagttatctggcaaaccttgtcttttttaataccgagtactcaattgtgtcatctctgaggggcaaagaaatttattatacaaggctcctggacgatgtcactatgagcgcttgctgcgtgttaccggaagaaatcatttcggaatccattaagaaggttgtggggatgtttaagcagtatgggttcaaatcgaacaataagaagaagaagatcgagtacaacaagaatatgaaaggtggctttcaagtgactggtttatggataggccatacgaatcccaagaccacaaaaaaggaacggcggtttataagactgctggtgcacacctgtttcaaaaagtacaacgagagtatgacaaacgagtcctatcacgagctgtggaataaagctagtggacttgtagcaaaacttaagaggctggatcagagcaatcacaaggccctgcgtgagaagctcgccagtattttgccgctgtacgatgacagcgagcgcaagaaaatcgtgcatgagtgcaataggttgttaaaaattccaagcagcaaaactctcacatatggagaaatcgatcgtatcaatcgcgtattttacaagctaggaatcctctcccggagtgaaaagaatttgtccagaatgtggagacgaaaactcaaacagcacttcaaaaacatcccaaaaaagcgagcatcttggctgtga

SEQ ID NO: 10885 - RNA, 1176 nt, synthetic construct
  source 1..1176: mol_type = other RNA
atggataaaccctattacccccattcaccaatttcagacctcccgacactcgctaaaacattaggagtgaacctggtcatgctgaacgtgatcgtaaacaaagttgatgactcctacaccgagttccaaattccaagtaagaacaggtttcgcaccgtgtatgaacctaaattgaatctgaagcgcatccaaaaaagaataaacagccggatttttgagttcattcagttccccttttatctgcagggaggcgtaaaagatagcatagacaaaagggactacgtggagaatgccaagatgcattcctctaacaaccctgaaacgctgatctccctcgatatcaagagcttttacgacaacattaagtctgataaggtcttcgacattttcaagtacttcttcaagtttcccgacgacgtctccaatactcttaccaagctgactacctttaaaaataaggtgccacagggggcctgtaccagtagctacctggccaatttggtgttcttcaactcagaatacacgatcgtgtcaaatctgaggggtaaaggcatatgttattcacgtctgctagatgacgttaccatgtctgcaaattatagtctttctgaggaggttgtctctgagtccatcaaaaaggtggtcgggatgtttaaacagtacggactcaaaagtaacaataagaagaagaggatcgaaaacaacaaaaatctcaagggagggttccaggtgacagggttgtgggtcggccacaaaaacccaaagactacaaagctggaacggagatttatcagactactggtacacacatgcttcaaaaaatataacgagagcatgacttcggattcctaccacgagttgtggaataagaccagcggtctggtggcgaaattaaaaagacttgatcagagcaaccataaggcattacgggagaaactcgctaggattctgccgctctatgatgagaacgagaagaagaaaatcatacaggagtgcaatcgcgtgctacggattgccccttccaagactttgacatatggcgaaattgaccgtatcaataagcttttctacaaactgggcgtgctgtctagaaatgaaaagcaacttagtcgaatgtggcgcaagaagctcaagtttcactttaagaatatccctcggaaacgagaagtttggtga

SEQ ID NO: 10886 - RNA, 1197 nt, synthetic construct
  source 1..1197: mol_type = other RNA
atgaccagacttcaggtgtttatggataagccatattacccgtattcccctatcgcatcaatcgatagcttgtccctcaccctaggagtggtgccgaaagtgctgctggacattgccaagaactccagcaattcttacactgaatttattgtcccaagcaagaacaaagaccgtctggtctacgaacccaagtacgagttgaaaaaaatccagaaacgcatcaacgcgaggctgttcgagaaggtgcagtacccactgtatcttcagggagggataaaggataaccttgtaaaacgcgattatgtcgagaatgcaaagctgcatgttaagtctaagcacctgattaatttagacatcaaggccttctacgataatattaaaccccatcacgtgttctcagtgtacaaatacctcttcaagtttcctgatgacgtctgcgacgtgctgactcagctgaccacatataaaaatcgagtcccccaaggcgcctgtacttcgtcctatattgcgaatctaattttcttcaacgacgagtatacactggttagttcttttaggcagcagggcatctcttacagtaggctgttagacgacgtaacactgagttctaacaaggaactgagctcagaagacgtcacaaacgctatcaaaaaagtggccgccctttttaagaagtacgacttgagactgaagaacagcaaaacgaagatagaggttaagagtaacaaggaggccgaatataaggtgacgggattgtggatcggtaatggggagcctaaggttcgcaaagacgaacggcgatacatacgccagctcgtgtatatatgtggcctcaagtatgcaaaatcttccagctgccaagagtaccacgaattttggaacaaaatcagcggcatggtagcaaaactcactcgcttaaatcatccagaggctgctaaactgcgtgtgaagctcagtaacattcttcccactttctcagtagaagtgaagagaaaagttatccacgatatcaaaaagctcatgagaaagcctgctacccaaggctcctacaccttgggggagattgctcgggtcaataattcaatgtacctgcttggtattctggggcggaccgatttcaacctcgcccggaatctaagaagggatctcaagaggaaatacaagaacttgcccacatataatcagatctggtcctga

SEQ ID NO: 10887 - RNA, 1176 nt, synthetic construct
  source 1..1176: mol_type = other RNA
atggataagccctattacccccactcgtcaattgcgagcattgatagtctgagttctaccttgggcgtggttccacaacgtctcctggatatagcaaaaaactcctgcaattcctataccgagtttgttgtgccatcaaaaaataaggacagactggtgtatgaaccgaaatacgagctgaagattattcagaaacgaatcaacgcacggatctttgaaaaggttgaatatcctgaatacctgcagggaggtatcaaggacctggctaaaaagcgggattatgtggagaattcaaaaatacacgtgaattccaagcatctgattaacctggatattaagtccttctacgacaatatcaaaccattacacgtacataacgtctacaagaacctcttcaagtttagcgacgaggtgtgcgacgtactgaccctgctaactgtgtacaaaaaccgggtaccccagggggcctgtacatcaagctacatcgctaacttaattttcttcaattccgagtacacacttgtgagctcctttcggcagcagtctataatctatagtcgtctgctggacgatgtgacgctttcctctaataaagaacttccccaagacaccgtcacgaaagccatcaaaagcgtggccgcggtgtttaagaagtatgatctgcgacttaagaattctaaaactaaagtcgaggtcaagtcagataagaagagcgaatacaaagtcacaggcctatggattggcaacggagaacctcgcgctcgcaaaagtgagaggagatatattaggcagctcgtttacatctgtgggctcaaacaccacactagcagttcttcgcaggagtaccatgatttctggaacaaggtcagcggaatggttgccaagctgactcgcctcaaccatcctgagagtgcatctctcagactgaagatgtctgacatcttgccaaccttctcaaaggagatgaaggccaagatcatcttagacatcaagaaactcctaaggaaaccgtccgctcagtgcagctatacacaaggtgagatagcaagagtgaacaaagccttttacttgttggggatcctgggcaggacagacaagattctcgccaagaatctgcgctgtgacttgaagcgaaaatataagaaccttcctacctacaatgaagtctggaggtga

SEQ ID NO: 10888 - RNA, 1176 nt, synthetic construct
  source 1..1176: mol_type = other RNA
atggataaaccttactacccttacagccctatagccagtatagacgccctatctttaaccctgggcgttattccagaagcactggttgatatcgcacggaaatccagctccagctatacagagtttgtggtgccttcaaaaaacaaggaccgccttgtgtatgaaccgaagcacgatctgaaacggatccagaagagaatcaatacaaggatattcgaaaaggttgagtatccacggtacctacaggggggtatcaaagatgcactgatcaaacgcgattacgtcgagaatgccagtctgcatacaacttccaagcatctcattaaccttgatatcaagtccttctacgacaacatcaaggcttgccatgtctttgccgtatacaaatactttttcaagttccccgacgatgtgtgtgaaattttaactctgcttacaacctacaagaataaggtgccccaaggggcttgcacctcaagctatattgccaacctgatttttttcaactccgagtactctctcgtctcgtctttccgccagcggggcgtcacatacactagattgttggacgacgtgactctgagtagcaataaagagctggccgaagaggaaatcaccaaggccattaaagacgttagtgccctctttaagaagtatgatctccgtctgaagaacaacaaaacaaagatcgaactgaaggcgaataaggacgctgactacaaagtgacgggactgtggataggcaatggcgcacccagagtaagaaagcatgagcgacgatatatcaggcagctggtgtatgtgtgctctctgaaatataaagagtccagttcatcaaaggagtatcacgatctctggaacaaagtatcaggaatggtcgctaagttgaccaggctcaagcacagcgacgcttctggattgagatctaaactgaccgaaatgttaccaacctttggtgacgatgtgaagaggaagatcattcacgacattaaaaagctgatgaggaaaccagatccccaatgttcctatacgcacggcgagattgcgcgcgtgaataaggccatctacctacttgggatcttgagccgtaccgatcgcaacctcgcaaataacctccgacgggaccttaaaaggaagtacaaaaacctgccgacttataatgacatttggagctga

SEQ ID NO: 10889 - RNA, 1176 nt, synthetic construct
  source 1..1176: mol_type = other RNA
atggataagccttattatcctcacaaacccataggatcacttgacgctctggccaaaactctgggggtgcaccccaaactgctgttagatttcgccgagaaggcaaatagcagctacacatctttcaatattgtctccaagtcggggaagattcgtactgtgtatgaaccaaagtacgagctcaaaaagattcagaagagaataaatgaccgtatattcgaagccgtcagatttccactgtacctgcagggaggcatcagtgatgatcagtcaaaaagggattacgttgaaaacgctaaaattcacgccaactctcagtgcctcatcgttctcgacatcaaaaatttttacgggaacatcaagagcgactatgtcttcgacgtcttcaaatacctgtttaagttccccgacgaggtgagcatgctgctcacgaaactggtatgcctgagaggtagggtaccgcagggggcatgtacctcttcttacgtggctaacctagtgttccacaatagtgagtatcatgttgtgtcctattttcgacaacggggggttgtttatagtcgcctgttggatgacgtgaccctaagtacgaatgatcgccccagcgctgagagcactcaggaatacattgagagagtgattgcgctctttaaaaagtacgatttaaagcccaggtcggataagatcaaagtctatattaagggttcacacgcctacacctacgacgtgaccggactttgggtcggtcacgcaaaacctaaattgcggaaaagtgagcggcggtacatcaggcaactggtgtttgaatgcgagaaaaagtatcaggcttcttcctgtgacccatcatatcataagttctggaattacgtaagcggccaggtggcaaagatgacacggctcggccaccatcaatccaaggagttgaggcgacgcctgggcttaatcctgccgacaatcgatgctcttgaggaacagaagatcgccgcagacgtgcaaaaaattgccaagctccgccgcaatcatacctacaaatccggcgacatctcacggataaacaagctctactataagttgggacttctgtccagaacaaacaagggcaggtccaaggccttgcgatctatgctaaaaagcgcgcatccaaacgtccctaacaagagagaatattggctttga

SEQ ID NO: 10890 - RNA, 1176 nt, synthetic construct
  source 1..1176: mol_type = other RNA
atggataagccatattatccccacctgcctatcagtactaatgaaaccctcgccaaaaccctcggcgtgcatccaaagcttctacaggacttttgcgctaggagtaactcatcctatacatcattttctgttactagcaaatcggggaagcagcggattgtctttgagcccaaatatgagctgaagaagttacagaagagaattaaccaccgtatctttgagaaggtgagatttcccatatacctgcaagggggcatcaaagactatgagaaaaagcgtgactatgtcgagaatgcaaagatccatgctaactccaagacactgatctctctcgacattaagaacttctatgataacattggtgaggcctacgtgtacagagtattcaagtacttctttaacttcccagacgaagtatcaaagacccttacagccttggttaccctcaatgggagagttcctcaaggtgcctgcacttcttcttacatcgccaatctgatctttttcaattccgagtataggatcgtcgcaaatctgcggggacagggagtgaaatacacccgcttactggatgatattaccttgagcattgagagtgagatctctgaagagcatactagccagctgataaaggatgtgatagccctattcaaaaaacatgacctcaaggtgcagaacaagaagacaaagatttccgtcaaacactcgcatgctcagccatatgacgtgacaggcctttggatcggacattctaagcctaaattgcgaaaatccgagcgcaggtacatccgccagctggtgttcgaatgtgaaaagaagcactcacagggtagtgcggagatagactaccacaaattctggaatcacgtgagcggccaggtcgcaaaaatgcaccggctgggacactcccaaagcgctgacttgaggtcaaggctggcaatgatcctgcctacgctcgatgatctgtccgaacgcaaacttgaaatcgacctaaacaagctcataaacagcaaaaagcaaaccagcttaaagtacggcgatattacgcggattaacaaagtgttctacactctggggatcctcagtcgaaccaagagaaataagagccgcaaattgcgacggaaactgaaaaatgcgtacccgaaaattcccacaaaggttgaatactggctttga

SEQ ID NO: 10891 - RNA, 1176 nt, synthetic construct
  source 1..1176: mol_type = other RNA
atggataagccttactacccgtttaagccaattgggagtttggatgcactggctacaacactcggtgtacatcctaaactgcttacggacttttccaacaaggcaaatgatagttacgtgaagttcgaaatcgtgtccaagtcaaacaagaggagaacagtctatgagcccaagttcgaactgaaacgactgcagaagaggatcaattctcgcattttcgaaaaagtggagtacccagtctatcttcacggcggaatctccgatgaaattaacaaaagagactatgtggagaacgctaagttgcatgcaaaatcaaacactttgatttgcctagacatcaaagacttctacgggtcgatcctcctggaccacgtattcgacgtcttcaagaatttcttccactttcccccagacgttagcagcctcttaacgaagcttgtgaccttaaatgggaatgtcccccagggagcctgcacctctagctacctagcaaatctcgttttcttcaactccgagtataatcttgtgtcgcgctttagaggacgcggcgttacctattctagactgctggacgacgtcactttatcttcaaatgataaactgtccgatacactggttcagaaatatattgaggaggtgtctaagctctttgccaaatactccctccacataaaaaacaagaagaccagggtccacatcaaatcagatcattccaaaccttacgatgttaccggactgtgggtgggccacagctctcctcgcctacgaaagtcagatcgtcgcaatatcaggcatgaagtctttctgtgtgaaaaggagtttgaatttgactccaccagcgagaagtatcataagcagtggaaccgggtgtctggcctcgtggccaaaatgcagaggctgcagcacagccaagccaagatcttgcggcaaaggctgagcaaagtgctgcccacttacagtgacgccgacgctgctgccgtgatccgtgatgccaataagatattgaacgctaaaaagaaggagaatatgaaaatcggcgagcttaatcggattaaccgggtgctgtatagtctgggtatactgggaagaactaacagtggcaaggcgaaaagcctcgggaagaacattcgagccaagtacaacaaccttccaggtaaacgggcgttttgggtatga

SEQ ID NO: 10892 - RNA, 1182 nt, synthetic construct
  source 1..1182: mol_type = other RNA
atggccaaagataagccttactacccccacggtccaattggaagcttagcgatcctggccaaaaccctgggcgtcccacccaaattgctgagcgatctggccaagaaagctagtagttcatatactccttttgtcatagagacaaaggggggaaaacagcgtgacgtatacgaaccaaaatacgagctgaagagactgcagaagaggattaacagccgcctctttgagaagatcgagtaccccacctacctacagggaggagtgaaggacgaagctcagccacgggattacattgaaaatagcaagattcatgccgggagcaaattcttgatctcgctcgatatccggaacttctatgacaatatccatatcgattccgtcctcagcatttttaagcacctatttaagttcccagaggacgtctcaactctgctcacgtctctggttaccagagaaggtaaagtgccccaaggcgcctgcacatcctcttacattgctaatctgattttccataactcagagtactcctatgtgaaaaagttgcgtgataacgggttttattattcgagactgctggacgatgtgaccatttctgctgatcgcctagtcccgcaggaagaggtaaccaagactattaaatatgtggctggactcttcagtgagcacgggctccggctgaggggtagtaagacaaagatagagagagccgacgacctgaaatctgcttatgcggtgacaggtgtttgggttggccacggcatccctaagatccgccgaacggagcgcgacatgatccgacattctgtgtacatatgtgaacaggaatatgcaaagaattgcttctccgacgaataccacgccctttggaacaaagtgagcgggcaagtggcaaagctcacacgacttaatcatgcacaggcacctaagctgagacaccgcatgaggtccatcttgccgctttatgacagcaaggccaccgcaagtatctggcgggagactgataaaatgcttaagcggcctaaaaaatcccacactaagattggggttataaacgcgtatcgccgtttaatctaccagctcggcatcttggctaggaccgacaagggcttatctagagccctgaggcggcaactgcagtccaggttttcaggcgtgccctcaaaagcccttatgtgggagtga

SEQ ID NO: 10893 - RNA, 1182 nt, synthetic construct
  source 1..1182: mol_type = other RNA
atggcaaaggacaaaccctattacccgcatcagccaattggcagccttgcgacgctggccaaaacactcggattgccgcctaagctgctatccgacctgtccagaaaggctgatgtcagttacaccccattcaatatcattaccaaaggcggaaagtctagggacgtattcgagcccaagtatgaactgaaaagactgcaaaaacggataaactcgcgactcttcgagtgtgtggaataccctttctatctacaggggggaatcaaggacgatgcgaaaccccgggactatattgagaactcacgaattcacagcgggagccagtttttgatttctctggacatccgggatttttatggcaacatacagcttgagagcgtaagatcagtcttcaagcacctcttcaaatttccagatgatgtgtctgagacgttagttaagcttgtaacccgagaaggccgtgtgccacaaggtgcctgcacaagctcttacgtcgccaacctgatctttcataatagcgagtactcctacgtcaagaaactgagggataagggcttttcctactcccgcttgcttgacgatgttaccatctcctgcaatagattaatccctcaggaagaggctactgagatcatcaagtatgtttcaggcctattcagggaacatggtctgcggctcaggactaataagaccaagctggaacggagtgacgatctgaaagcatcttacagtgtgacaggagtgtgggtgggacatggggtgcctaaaatacgaagagccgaacgcgacatgatccgtcatagtgtgtacatatgtgagcgggagtgcgtgaaagataggtatagcgacgcctaccacgacctctggaataaggtcagcggccaggttgcaaagcttactagattgaaccacgttcaggctccagccctgagagatcgcatgcgggacattctgcccttgtatgattcaaaagccgtggcttccgtgaggcgtgaagtcgacaagatgttaaaacgccctgtggctcaccactctaaagtacccgtgattgatgcataccgccagctggtgaataagctgggtatcctcgggaggacaaacaagaccctggcaaaagccctccgcagacaactcaaggcgaggtttgccggggtccccactaaggctatgatgtgggagtga

SEQ ID NO: 10894 - RNA, 1047 nt, synthetic construct
  source 1..1047: mol_type = other RNA
atggaaacaaaaggagggaaaattagaaacgtctacgaacccaagtacgagctgaagcgcctgcagaagagaatcaatagtcgcctgtttgaagcggtggaatacccaaagtatctccaaggcggcatcaaagatgaggagaatccgagagattacattgagaattcgaggatacacgccgggagccggttcctgatctccctcgatattcgggatttctatgacaacatcccctttgcgagcgtagtgtccgtcttcaagtatttcttcaagttccccgacgacgtctcagaagttctcgccaaactcgtgaccagagagggtagagtgccacagggagcatgtacaagttcttacatcgccaacctgatattccacaactctgaattttcgtacgtcaagcgcctacgcgacaagggcttcagctatagccgactgctagacgatgttactatttcatccgatcgtttggtggctcaggaagaggccacagcgtctataagatacatcgcagggctttttcgtgagcacggtctgcggctgcgacaaagcaaaactaaaatggaaagatcagacgacctgaaagctccttacgccgtaaccggcgtgtgggttggtcacggggttcccaaaatcaggcgagcagagcgcgacaccatcaggcacagtgtccatatctgcgagtgcgagtatgaaaaggataggtttagcgatgagtatcacgccctgtggaacaaggtgtctggacaggtggcaaaactgacgaggttggaacatgcacaggctcctaagcttcgcaagaggatgcggaaaatactccctttatatgattccaaagccattgcttccatcctgcgggagacagataaaatgcttcggcgccctaagtcccatcattctaagatcggagtgattgacgcttaccggaggttaattaataagctcggcattttgagtcgaactgacaggaccctttctcgtgccatgagaaagcagttgaaggccaagttttcagacgtgccaagcaaagctatgatgtgggagtga

SEQ ID NO: 10895 - RNA, 1179 nt, synthetic construct
  source 1..1179: mol_type = other RNA
atggccaaagataaaccttattaccctcacgcttccattgggtctttagctatgttggctaagactctgggcgtgcatccaaaagtgctcacagatttagccagcaaggcctccaactcctatacacacttcctggttagcacaaagggaaaggaccgtgacgtgtatgagccgaagtttgaacttaaaaaactgcagaaacgcattaactccaggctcttcgagaaggtgcagttccccaactatctgcagggcggcattaaggacgagagcaatccccgcgactacattgaaaatagtaggatccacgccggtagcaagtttctcatctcattggatatccgaaatttttacgactctataccacttgaaagtgttatttccgtgttcaaacactttttcaagtttccagatgacgtttcagatgtccttgcccggatcgttactagggacggacgggtcccccaaggtggatgcaccagtagctatgtggccaatctcatttttcacaactcggagtattcatacgtgaaaaagttacgtgacgagggattttcttatagtagactactagatgacgtcaccatctcctcgcctaggctgattagccaggacgaggcaacccagcgtatcagatacctcaccggcctgttcaaggagcatggattgcggctgagacaatctaagacaaagctcgaaagaagcgacgatcttaacgcagcttacaaggtgaccggcgtgtgggtagggcatgggatacccaagctgcggcggtccgagagagatatgatccggcattcagtatacatctgtgagaaggaatacgcaaaaaaccctttcagcgacgagtaccacgttatgtggaacagggtcagcggccaggtggctaaactaactcgcctggatcatagtcaggctccaaaactgcgagacaggatgggtgaaattctgcctctgtacgattcaaaagcggtggcatccatctggcgagaagccgatagaatgttgcgccgcccattgtcttctcacaagcgcatcgcagtcatacagagttatcgcaggcttgtgaataagctggggataatgacgagaacgaatagaccgctcgcgaaaaatctgcgacggcaactgaaagccaggttctcaggggtcccctctaaggtaatgatgtgggaatga

SEQ ID NO: 10896 - RNA, 1182 nt, synthetic construct
  source 1..1182: mol_type = other RNA
atggcaaaggacaagccatactatcctcacgcttccattggatccgtagcaatgctggctaagacactcggggtacaccccaagctgttaaatgatctggccggtagggctactgactcatatacgcatttcgttatccgaaccaaaggggataaggagcgcaacgtgtacgagcctaagtatgagctgaaaaagctccagaagcgcatcaatagtaggctcttcgagaaagtgcactaccccttttatctacagggcggagtgagagacgaagaccacccacgcgactatatagaaaattcacgcatccatgctggctccaagagcctgatatctctggacattcgcaatttttacgataacattccttacgagtcggtcgtctccatcttcaagtatttcttcaacttccccgatgaagtgtctgatctgcttagcaaaattgtcacaagagacgggaaagtgccacagggtgcctgtacatcttcatatgttgcgaatctgatcttccacaacagcgagtacaattttgtgtcccggctcagaaaccagggggtgacctacagccggttgctggacgatgtcaccttgagctccagtcggcttctgagtcaggacgaagtttctggctatataaaatacgtggcaggactcttttcggaacacaagttgagaatcaaaaagtctaagaccaaaatcgaacggtccgacgacctgagcgcagagtatacggtgaccggagtttgggtgggacatggcgtaccgaaaataaggcgggccgagcgtgatctcatcaggcactcagtatacatctgcgagagagaataccaaaaagataggtttagagacgaatatcacgagctgtggaacaaagtgagcggccaggtcgccaagcttactagactggaacattctcaggctttgaagcttagagcccgaatgcgcgatattctgccactatacgatggtaaagcaactgcggccatcattcgtgaggccgacttactcctgaaacgtcctaggactagccatgtcaaggttagtgtcgtgaacgcttaccggcgattgattaatcgactgggcattctcactaggacaaacaaaacattagcccgcgggcttcggaggcaactgaagaccaagttttcagatgtgcccagtaaggtgctaatgtgggagtga

SEQ ID NO: 10897 - RNA, 1182 nt, synthetic construct
  source 1..1182: mol_type = other RNA
atggcaaaggacaaaccatattaccctaatgcccctatcgcatccattgaggtgcttgcaaagtgcctgggagtctctccccgcgtgatgctggacctggctggaaaagtaggatcatcctatacagaattcttggtgtctagtaagtccaaagacagaaccgtgtacgagccgaaattcgagctgaagaagctgcagaagaggataaatagcaggatcttctctgcggtccagtttccgacttacttacaagggggaatcaaagatgccaagtcaccccgcgactacgttagaaacggggagtttcatgccggtagctgtatgctggtgtctctcgatatccgaaacttctatgataacatcaagagggaaagggtagaggatgtgttcaagaacttctttagattcccccctgatgtctgtcaggttctcaccgacctggtaacacttaagggcaaggtcccacaaggcgcttgtactagctcctacattgctaatctagtgtttcacaattctgaatactccatcgtgagctatctacgcagtaaaggcattacgtacacccggctcctggatgacgtgaccttgagttcgaaaaagcctctcagtgacgagagcctgtctgatgtgattggccgaattagtggcatgttcaagaagcatggactccggatccacccaggcaagaagaagatagagttggcctcggactccagatcagactataaggtcactggggtatgggtggggcatggggttcccaaacttcgtcggaaagaaagggattatattcggcatctcgtgtatatctgcgagtgcgaatacaagaaagatccaacacaggactcttatcacgagctgtggtcaaggacttctgcccacgtcgccacaatgacccggcttgagcacagtcagagcgtcgaactcagaaaaagaatgagcaagatacttcccttattttccgaagcccgcaaaaaacaagttatcgtggaagcaggtaagctgctgcggcgcgacttttccaaagctatgagattgggtgttataaagacgtacaacaaaacaatgcactccttaggtatcttgagccgaaccgatcgtgcgaagagcaaaaggctgcgcaaagagctgcgtctgaaattttcaggcattcagtcaatgcagcagtactgggagggctga

SEQ ID NO: 10898 - RNA, 1182 nt, synthetic construct
  source 1..1182: mol_type = other RNA
atggcaaaagataaaccctattacccaaacgcgagcatcgccagcattgatattctcgccaaatgtctgggggttagcccaaaggtgatgcttgacctcgcatccaagactgaaagctcctacactgagtttctggtatcatctaaatccaaggaccgcaccgtgtatgaaccgaagttcgagctgaaaaaactgcagaaacgcataaatgcccggatctttgccgctgtacagttccccggctatctgcagggcggcataaaggattccgattctcctagagattatgtgcgtaacgggaaatgtcatgccggttccaatatgctcgtcagcctggatatcagaaacttctacgacaatataaagcgagagagtgtggaagacatctttaggaacttctttcggttcagccccgaggtatgcagcgtgctgacagacatcgttacactgaagggaaaggtacctcagggtgcctgcacgtcttcgtacattgccaacttggtcttccacaatacagagtacagtgtcgtctcttatttgagatcccgggggatcacctacaccaggttactcgatgatgtgaccctgagttccaaatctgagcttagtgacgaggttctaagtgagatcatctttaaggtgtccggaatgtttaagaagcataaacttcgcattcaccctggaaaaaagaaaatcgaaatcgctaaagacagtcgctccgaatataaggtcactggtgtgtgggttgggcacggcgtcccaaagctccgacggaaggaacgcgactatattcgtcatctagtctacatctgcgagcaagaatacaaaaaggacccctctgtcgacagctatcacgagttatggaatcggacttcagctcatgttgcgacaatgactagaatggagcactcacaggctgtggacctccgggagcgaatgtctaagattttgcctgtttttggcgtggatcgtaagacacaagtgatagtggaagccaacaaacttctgaggcgcgatatttcaaataatgtgagaatcggcgtgataaagacgtacaacaagaccatgcactcgctgggaattttgagcaggaccgacagggcagcatcaaggtactacaagagagctctgagaaggaagttctcaggggtgaaaaccattcagcagttctgggaagagtga

SEQ ID NO: 10899 - RNA, 1179 nt, synthetic construct
  source 1..1179: mol_type = other RNA
atggcaaaggaccggccttattatccaaacgcaagtatctcttcgatcgatgtcttggcaaagtgcctaggagtgtctccaaaggtgatgttatctttggccaaaaatagctctaatagttatacccagttcacagttcccagcaagggcaaggacagggttgtgtacgaaccgaaactgaatctgaaaaaaatacagaagcgcattaacagccgaattttcgagcatgtgcaatttcccccttacctgcagggaggtatcaaagacaacctgagcccacgggactacgtagagaactcaaaatttcacgctgggagtagcgtcttggtgtccctcgacataaggaacttctacgataacatcaaatacgattccgtctacgacgtatttctgtatttcttcaagtttgagccatcagtgtgtaccgtcttaacagacttagtcactctaaacgggaaggtgcctcagggggcctgcacatcttcttacatcgccaatctggttttccataatcacgaatattccctcgtctcctactttcgaagcaagggaattacctatagcagactcctggacgacgtaactctctctagctcaaaagagatccccccccaggagattgaagaggctattagtaaggtggccgagatgtttaagcgacacaagctgcgcattcaccccaaaaaaaaaaaaatcgaagtgtccagtgacaccagatccgagtacaaagtgacgggtgtctgggtgggacatggcgtgcctaagctgcgtagaaaagagagagattatatacgccaactcgtatatatctgtgagttggagtataagaaggaccccacagcggaagattatcacgatctgtggaatagggcttctgcccaggtggccaagatgactcggttggatcactcacaggccagcgctctcaggtcccgtatgagtaagctgctgccgctctactcccctgcgaagcgcaaacaagttattatcaaggcaaaaacccttctttcaagaaataagtccgatgctaaggaacttggcttcattaagatgtacaacaaaacgtaccatagccttggcatactgtcgaggactgataagccaacctcacggtactataaggcagccctggaacggaagttctcagttgaacctatcaaacagttttgggagaattga

SEQ ID NO: 10900 - RNA, 1182 nt, synthetic construct
  source 1..1182: mol_type = other RNA
atggctaaggacaaaccgtactatccccactcaagcatatcaagtattgatacacttgctaagtgcctcggcgtggctcctaaagtcatgctggatctggccagagatacagaaaattcttacactgaattcgttgtgccatctaaggggaaggacaggaccgtttacgatcctaaacataatctcaagaagattcagaaacgtatcaactcacggatatttgaacatgtcttattccctgaatacttgcaagggggaatccgcgatgtcgatagtccccgggaccacgtaaacaatggacgagcccataccgggagctccgtgctggtgtcacttgacattcgaaacttttacgacaatatcaagtacccgtctgttttcgatgtgtttaagaacttcttcaagtttccagacgaggtgtcaaaagtcctggctgacttggtcacgttccgcggcaaggtcccccaaggtgcctgtaccagtagttatgtggccaatctggttttccataacacagaatatagcgtggtgagctacttaaaatcgagaggtattcagtatacacggctgctcgatgacgtggcactgtccagcaacagagtgatctcaaaggccgacctggagggcgccatagagaaagttgccggaatgtttaagcgtcataaactgcgtatccaccccagaaagaagaaaatcgagtactcctccgactccagatcggagtataaagtgactggcgtgtgggttgcgcacggggtacctaagttacggaggaaggaccgagactacatcaggcacctggtccacatctgcgagctagagtttctgaaggatccaaccgctgattcttatcacgagctgtggaatcgcagctctgctcaggtagcgcagatgactaggctcggacacagccaggcagcatccctccggagtcggatgagcgaaattttgcctttgtacggcccctccaggaaaacccagctaaacattgaggtgaaaaaactgctcggtcgcaagcaatctgagtctaatagtctgggcttcatcagaacttaccacaagcttataaacgcacttgggattttgtccaggaccgataggggactcgcccgcagctatagaggcctgcttacggcaaagtttccacatgtgcgctccaaagtaaaatattgggaacagtga

SEQ ID NO: 10901 - RNA, 1182 nt, synthetic construct
  source 1..1182: mol_type = other RNA
atggcaaaagacaaacccttttatccgcatgccccaatcagcacccttgacgtcctggctaaaagcttgggcgtgagcccccaggtaatgtcaaagctgagctctagtgcggatgatagttacacagctttttcagtgagttccaaaaacaaggaccggacggtttatgatccaaagtataacctgaagaaactgcagaaacgtatcaattcaaggatcttcgaacacgtggtgtttccacagtacctccacggggggattagagacgtgtcacattccagagattacataaataactctcgcatccacgcaggttcccgcgtcttggtcagcctggatatcaagaacttctacgacaacattaaacgggactccgtcttcgacatctttaagtctttctttcgattccctgacgaggtgtctacactgctgaccaatgtggtgaccatgcgaggcaaagttccacaagggggatgtaccagttcctatgtggccaatctcattttccataacacagagtactctgtcgtgtcatatctgagatcgtttggaatcgagtacagtcgtttactagacgatgttacactgtccagcagccatccaatacccccggagaagctggaacaagctatctctaaagttgcaggtatgttcaagcgacacgggttgagagtacaccctcacaagaagaaaatcgaaagctcctccgattcccgctctccctacgaggttactggcgtgtgggtcggacacggcgtccctaagatccgcaggaaagatagggattacgccagacagctcgtgtatatttgcactaaggagtatctcaaagactacacttcagatgcgtaccatgccctgtggaataagagttcagcccacgtggcaaggatgacccggttggatcacgcccaggcacgccaacttagagacagattaagcaaaattctccctcagtatagcgcggctcggattaaacagctgtcgttcgaatacaagaagctcataaataggcccgtggctgacgtagccacgcttggctttagtaagagctttcataagctcatacattccatcggtattttaagccggactgacgctcacctagcccggcactataggaagtccctgcgcgccaagttccctagggtactttctaaagccgatcattggggaatttga

SEQ ID NO: 10902 - RNA, 1182 nt, synthetic construct
  source 1..1182: mol_type = other RNA
atggccaaagacaaaccctactatccgctctcaccgatagcaagtatcaacgctctggctaaaaccctgggggtcgtgcctaagctcctggtcgatatagcagccaatgtatcaacaagctacacttctttcgatattgaatctaagaagggaaaactgaggacagtctatgaccccaagtacgagctaaagaggctccagaaacgcattaattcccgtatatttgagaaggtaatctttcccctttatctgcagggcgggattaaggatcaggagaatcccagagattatgttgagaattgcaaattgcatgcagggtcaagctttcttatctcgctggacatcaaaaatttctatgacaacatccggatgtcttccgtgttcgatattttcaagtacttcttcaagttccctgatccagtgtgcgaaatcctgaccagcctcgtgactttggatgggcacgtaccccaaggcgcctgtacctcttcttacattgccaacttagttttccacaattccgaatataagctcgtgtcatgttttagagatcagggactgaactacagtcgccttttagacgatgtcaccgtcagcagcaaaaacttgatttcacaggagaagacaactgacatcatcaggtccgtcgcggctgtgtttaagaagtacgacctacgactgaattccaagaaaaccaaggttgaaaggtctgatgatttgggtgctgactttaaagtcacgggcctgtgggttggccatggtcagccaaaattgaagaaggacgaacggcggtacattaggcaactagtgtatgtgtgcgaaaaagactaccagaataacccttgtagcgagaagtatcatgaactgtggaaccgcgtgagtggaaaagtggccatcctgacacggcttaagcacgtggaggcccagaacctccgagccagactgggttgtgtgctgcctctctatgatgaggacgctaaagccaagatttgctttgagagtaaaaaacttctccgcagacacccatccacccacagcaaagtgggcgttatgactgcgtaccacaagatcatccatagtttgggaatactgacacggacggacagagcacttgctaggtccctgagaaagcaactgcgagcacgctacagcgccctcccattaaagcgtgacatttgggagtga

SEQ ID NO: 10903 - RNA, 1182 nt, synthetic construct
  source 1..1182: mol_type = other RNA
atggctaaggacaaaccgtactatcccctatctccaattgcatccatcgagacactggccaaggcactgggggtggtacctgggctccttaaagacttgggcgaggatgcgtctaatagctacactaagtttgacatagtaacgaaaaacggcaaagaaaggacagtgtacgaccccaagtacgaattgaaacggctccaaaagaggattaatagtcgcctgttcgagaaggttatctaccctggctacctgcagggcggcattaaagatccaaacaacacccgggattacgttgaaaattgcaagttacacgctggaagcaagttcctcatttccctggacatcaaaaatttttacgacaacatccgtgagacatcagttctgtctatattcaagcactttttcaagtttcctgacgacgtaagcgtgttgctcactaagctggtgaccctgaatggtcgcgtgccacagggagcttgtacctcatcctatgtcgctaacttagtctttcataatagcgagtattcgctcgtgagtaaactgaaaagtcggggtcttgtctatacccgactgctagacgatgtgactatttcttccagtactctgctgacccaagatgtggccacggacctgatcaaagatgtggcggccgtgttcaggaaacacaatttgcgacttaacaactccaaaacaaaagtggagagaagcgatgatctcgctgccgagtataaagtcaccggattgtgggtcagccatgggcagcctaaactgaagaaggaggaacgcaggtatatcaggcagctggtctacatctgcgagcaggagcatcagaagagccccttcgaagagtcttatcatgatctttggaatcgcgtgtccggtaaggtggcaattgttacacgcttaaagcacgttgaagccgccgacctgcgtggacggttatcaaaaatacttcccctctatgacagcaccaagaggtcacagatccttttcgaagcccagaagttgctaagaaagcacccatcaacccatactagaatgggcgtgatcaactcttaccacaagataattcacgctatcgggattctgacaagaactgatagagttctcgcaagagccctccgacggcaactgaaggcaaaatttagtgatctcccgctgaagtcccaggtctgggaatga

SEQ ID NO: 10904 - RNA, 1182 nt, synthetic construct
  source 1..1182: mol_type = other RNA
atggctatggacaagccttattacccctacagacctatctctagtatcgatgcattggccaggactctcggcgtcgtgccaaagctgctgtgtgatcttgcagacgaccctgccacttcgtatgtgaaattcaccattttctccaagaatggcaaacagcgggacgtctatgaaccgaagtacgaattaaagcgtctgcagaagaggatcaactcccggatatttgagttggtgatctttccctcctacctgcagggtggaattaaggacgtcgaattccctagagattacattgagaactctaaaatccatgcgggatctggcgcgctcgttagcgtggacatcaaagatttctacaattccatccgagagccctccgttctctccatatttaagaacttcttctcatttccggacgacgttagctgtctgttaacacggctagtgatgttggaaggccgcgtgccacagggagcatgcaccagttcctatgtggccaatctcatttttcacaacagcgaatattcactggtgagtaagtttcgcgccaaaggcctggcttattctcgcctgctagatgatgtgaccgtgtcagctaccaaacccatttcacaggaggaaagtacacttgcgatcaaaagcattgctgccatggctcgcaagcatgacctgagactgaatagcaagaaaacgaaaattgaaaggtcagatgatatcaatgccgattatgcagtgaccggtgtctgggtagggcacggagtccctaaactgcggaaggatgagcgacgacatatccgccacttggtctatatttgcgagaaggagtacgccaaggactgcttctctgtggaataccatagcctgtggaatagggttagcgggcaggtttcaaagttgactcgtctgaagcacgcccaagcaaaatcgctcagagagaggatgggcaacatccttccaaagtacgacttccaagccaaagccaagataatatatgagtgtagcagactcctccggcgccccgtaagctctcacaagaaaatcggggtaataaacaactaccgaaggttaatctactctattgggattctttccagaacagaccggagtacagctaaagcccttcgtagacagctggtggagaggtttgcaggtgtcccatccaaagctgagatgtggagttga

SEQ ID NO: 10905 - RNA, 1182 nt, synthetic construct
  source 1..1182: mol_type = other RNA
atggccaaagataagccttactacccccatcatccgatcggaagtgtggaaagcctggcaaagtgtctcggcctgcctcctagactgttgaaagacctcagcgaagacacctcaaacagctacaccgagttttctattacctctaagtccgggaaagaaaggattgtgtatgacccaaagttcgaactaaagaggctgcagaaacggatcaacagccgcctgtttgagggcgtattctacccctcctatctgcagggagggatccgagatcagaaaaatccccgtgactatatcgtgaacggtacaattcacgctgggtcaaagaatctgataggcatcgatattaaggacttctacaacaacataaaggaggagtcagtcaagcccattttcacgaggttattcaattttccagatgccgttgcttcgattcttacaaagttagttacccgtgatgggcgggtgccacaaggtgcctgtacaagctcctatgtcgccaacctggtgttctttaactcagaatacagcctggtcagtagaatgagggcaagaggtttttcctacactagactcttggacgatgtaacattatccagcaaacggcctatcaccaaggaggaaagtactgaactgatcaaggaggtggcggcgatattcaagaaacacaatttgcgcctaaacaataaaaagaccaagcaggagtctgccggggacgtcaaagctgaatataaagtgacgggagtgtgggtgggccatggcatccccaagctacgaaaggcagagagacggcacatccgccatctggtgtatatctgcgagaaagagtatcttaaatgccgcttcagcgaggaataccacgccctgtggaataggatatctggtcaggttgctaaactcacacgactcgagcacagtcaggctgaagacctgcggcttcgcatgtctggaatcctccccgagtacgataatcaaatgaaagcctccattatctttgaagcagataagcttttgaagaagcctgtagcccaccacgtccgcccaggagttatatcatccctcaataagaccctgtatagtcttggcattctgactcggactgacaaaccactcgctagacattacaaaaaaatgttgaggctgcgttttattaacgcaccgactaagtctgagatgtggggctga

SEQ ID NO: 10906 - RNA, 1173 nt, synthetic construct
  source 1..1173: mol_type = other RNA
atggataagccatactatccgcataatggcatcagtagcatccagagccttgcaaaaaccttaggtattcacccttcacttctcgtggatatcgcttctaaaaccaccgactcttatactgagtttcagattacgagtaagaacggaaagattcgcaccgtatatgatccaaagtatgaactgaagcgaattcagaagaacatcaatcagaagatcctggagaaagtggagtaccccacctacctgcagggcggaataagggatctcgaaaatcgtagatcctatgtggacaatgcggggatacacgctggcagcaaccacatactgtcattggacattaagaacttttacgacaacatccgccctgagaaagtgaaagaaatcttcctgtacttctttaagttctctgatgagacatctgaattgctaactaaattggtcacactggggaataaagtgccccaaggtgcctgcacttctagctatattgccaaccttgtcttctttaattcggaatacaggatctttagcgaactcaagtccaagggaatctcgtacagtcgcctcctggacgacgttaccttatcctctagaaaacacctgagccgggacgaggcctcagagcacatacgccttgtttgctctatctttaagaagaatggcctgaggctgaacaacaagaaaactaagaatgagctaaaggggtccaaccccaatttcaaagtcacaggtttatgggttgagcacaaaaatccaaagattccaaagaaggagaggcatcatacacggcacttggtgtacatctgcgaaaaagagtatgctaaaagccctagctcagaacactatcatcagctgtggaataagacatccggccaggtggccaagctcaaacaactggggcattcacagcacaaacagttgaggactagactgaagaaaatcctgcccatccttgatgagagtagtaagaagaagttgattctcgactgtaaaaaactccttcacctggaacggaacgcaaaagagcgtttcggagtactgaaacggatcaacaagtgtatttacatgttaggcatactgtccagatccgacaagggactgtccagcaacctacgaagacaactgctcaaacatttcggggatctccctacgcataaggattactggatttga

SEQ ID NO: 10907 - RNA, 1191 nt, synthetic construct
  source 1..1191: mol_type = other RNA
atgaaattaaagccacactacccgcataatccaatcgcgtctattgaagcccttgccataactctgggaatccatcccaaactcctgcaagacctggccaataaggccaacgatagctatattaactttacagtgagcagtacaaacaggaagggcgaggacaaagatcgtcacgtttgtgaacccaagcacgaactgaaaaagctccagaagagaatcaatagtcgtattttcgagaaagtggagtatcccaattatctacaaggtggcattaaagatgaggagaaccccagggactacgtcgctaacgccacacggcatgctaacgcaaatcagattatatgcatagacgtcaagcagttctacccttcaattaaatctcagtacgtggtcaaggtgttccaatattttctcaactttcctcctgacgtgagcgagattctgacgaaactcgtgacctatcatggtcgggttccgcagggaggatgcaccagctcctacatcgcaaacctcatattttacgataccgaatacttgctagtgtcagaactgcagaagcacgggatccagtattcccgattgctcgatgacatcacgcttagcacacaaaaaaatttcactaaggagcaggagaatttctacattaagaagattgccgacatcttcaaaaaatacgagctgaagatcaacaataagaagaccagaaatgaacactcatcaaacccagccgtatcctttgaggtcactggcctgtggataggccacaagaagccaaaggctagaaaagaggaacgaaggttcatccgccagctggtgtttatgtgtgagagagagtacacccagtctccctattctgagaaataccatgaaaggtggaacgaagcgagtggcaaagtagcaaagcttcagagattagaacaccttcaggcaacaaagttgcgcgaacggctcggaatcatcctgccattgtatgatgaaaacatgcaatcccagataaatcaggagactaagaaactggtcaagctgtccgctcctcaaaaccagcggctggggaacatcaaacgcgtgaacattctgattcacaaattggggattcttgcacgcaataataagagcctggctaatagtttaaggtcgcagatcaatgaggtttatgccaacaagcctaccatcaaagagatctgggaatga

SEQ ID NO: 10908 - RNA, 1191 nt, synthetic construct
  source 1..1191: mol_type = other RNA
atgaagctcaagccccactacccatataatccgattgcgtcaatcgaggccctggccaccactctgggcattcacccaaagttgctgcaggatttagctaacaaggtggacgattcttacacgaactttatcgtgaaaagcaaaaacaagaagggcgaacagaaagatagggacgtatgtgaaccaaaatatgagctgaagaaactgcaaaagcgaataaactctcggatttttgaaaaagtcgagtatcccttgtatctccaggggggtattcgggacgaagaatcgccacgtgattacttcgccaacgctacctgccatgctaacgcaacccagatcatttgtatcgacatcaagaagttctatcccaacatcaagtctaaatatgtcaccaaagtcttccagtacttttttaagttcccccccgatgtgagtgagctccttactaaactagttacataccatgacagggtaccccaaggcgggtgttcaagcagctacattgcaaacctaattttttacgacacagaatacctgctggtgagtgagctgcagagacattccatccagtactctcggctattagatgacatcaccctgtcatcccagcagaatttcaccaaggaccaggaaacacagtacatccagaagattgcaaagattttcaagaagtacgagcttaagatcaactccaagaaaacgaaaatagagcacagagccaatcctgaggtgggattcgaggtgacaggactctggattggacataagaaacctaaagcacgaaaagaagaaaggcgttttattcgccagttagttttcatgtgcgagagagagtataagcttaacccttgcagcgaaaaataccacgagagatggaacgaggtgtccgggaaggtggctaaattgcagcgcctcgagcacctgcaagccaggaaactgcgggaacgactcagactcatccttccgctgtatgatgagaatgttcaaaatcagatcactcaggaagcgaagaagctgattaaactgcctagccctcaaaatcaacgcttgaataatataaagcgggtcaaccagctgatatataagctgggtatccttgcccgcaataataagactctcgctaacagtctgaggttgcagatcaataaagcctatgccaataaaccaacaataaaagagatctgggagtga

SEQ ID NO: 10909 - RNA, 1179 nt, synthetic construct
  source 1..1179: mol_type = other RNA
atgaagctagctccacactatcccaacaatcccattgcttctgtggaggccctagcaataaccctggggatacaccctaaactgctgctcgacctgtccaataagattgacaacagttacactagtttcttaacccctcaaaaaaacggaaaggaacgcctggttcacgaaccgaagtatgagctgaagaagctgcaaaagagaatcaattcacgaatctttgagaaggtggaatatccggagtaccttcagggtgggatcaaggatgaaaacaatcccagagattacgttgcaaacgcactgcggcattcccacgctaaccagattatatgcattgacattaagcagttctaccctaacattaagtccgaatatgtctccaaaattttccagcacttctttaagttcccagcgcatattgctgaactcctgaccaaaattgttacccttcataacagggtgcctcagggagcatgcacatcaagctacatcgctaacctcctattttatgataccgagtatctccttgtctctgagctgcagaaacacaatatccagtatagtcgattactggatgacatcactttgtcaacccagacaacgttgactaaagaacaggaaacgttttacatcaagaagatcgccgcccttttcaaaaagtacgagctcaagattaatggcagaaaaactcgtatagaacaccgggccaacccagaggcctctttcgaggttacaggactgtggatcgggcacaaaaaaccaaagagccgcaaagaggagagacgatttatcaggcagttggtgtttatgtgtgagcgggagtataaggtaaatcgctgtagcgaaaaataccatgaaaggtggaatgaagtctcgggtaaggtggccaagctgcaacgtctccagcatgtgcaggccaaaaagcttcgggagcggctcagcctcgtgttgcctgtatatgacgagcccatgcagaaacaactgatccaggagacaaaaaaattggtcaaggtgacagcgccccaaaatcagaggatcggcaatatcaagagagtgaactccctgtactaccgcctgggcatactgggccgcaacaataaatctttagccaatagccttaggctccagttgaacaaggtctacggcaacaaacaaactaaaaaggaaatctgggagtga

SEQ ID NO: 10910 - RNA, 1191 nt, synthetic construct
  source 1..1191: mol_type = other RNA
atgaagttaaaaccccactatccacacaatcctattgccagcattgaggctctggcaaccacacttggtatacatccaaagctcctccaggacctggcaaataaagccgacgatagttacaccgactttctaataacctcaaaaaacaggaaaggcgaggtgaaagataggaccgtctgtgaaccaaaatttgagctcaaaaagctccagaagagaattaacagcagaatctttgaaaaggtggagtaccctctgtatttacagggcggaattagggatgaagagagccccagagactatgtggcaaacgcgcagattcatgcgcatgcaaatcagatcatttgtatcgacattaagcagttttacccatctatcaagatcccccacgtcaagaacatcttcaagtacttcttcaaattccctgaagaagtcagtgagatgttggccaagttggttacttacagaggagctgtgccccaaggcggatgcacatcgtcttacattgccaacctgatattctacgatacggaatatttactggtgtcagagctgcgtaagcactccgtcaaatatagccggctgctcgatgacatcaccctgtccgccgagaaggatttcaccaaagagcaggaagaatttttcatccggaaaatctcagccatgtttacgaagtatgggctatccatgcacagcggaaaaaagaggatagagcaccgctccaattccgatgtaagctttgaggtgacagggctctggattggtcataagaaacctaaggctaggaaggaagagcgccgcttcgtacgccaactggtgttcatgtgcgagcgggagtacaaagtgagcccatacactaaagagtatcatgaacggtggaacgaagtctctgggaaagtggctaaactgcagcgtctggagcaccagcaagccaagaaccttcgcaaacggctggggctgatccttccgttgtacgacgagaatatggagaagcaattgactcacgaaacaaagaagctgatcactctttctctgccccagagtaagaggcctggcaacataaagagagttaattcgttgatcaacaagctcggcattctgtcacgaaataacaaagccctggcacgatccctacgactccagctttctacagtttatgctgacaagccgagtaataaggagatctgggaatga

SEQ ID NO: 10911 - RNA, 909 nt, synthetic construct
  source 1..909: mol_type = other RNA
atggacaaaccattctacccatttcccggtatcggctcagtagaagcccttgctaaggctttggatgtgcatcacgatctgcttctggacatagcgaaaaaagtggaccagtcttatacgagctttgacataccgaaaaagaacaactccggctaccggactgtctgcgagcctaagcacgaactgaagcgcctgcaaaagaaaataaactctcggatcctcgagctggtgaaataccctagctacctccagggcgggattaaagataaaagtctctctcgcgactatgttaaaaacgcagccattcatgtgaagcccaccgttctgatctcgctcgacatcaagaatttctaccctaatatccatcgatctcacgtgttaaatgtcttcaagaatttcttgggctttcatcccgatgtggcagaggtgctgacatgcttgaccacactcaatgatagggtacctcaagggggatgttgttccagctatctggctaacctgattttctttggagacgaattcaaactcgttcagaagttgaggaagctgggatggagatactcccgcctgttagatgatattagtatctcatcaacagacgacattaaggacaatatcagccccattaaggagatctcaagcctatgcaagcgttacggtctgaaactgaacaacagtaagaccgatgtctcccacaggagcaatggagtagcttcccttgccgtcactggcgtgtggattgggcactctgaagccaaactacggaaggatgagagaagatatatcagacagcttgtttatgtgtgcgagaagaaatatgccgatgacccatgtgatagtaaataccacgacttttggaacagggtgagcgggaaggtcgcaaagctctcccgaatggaacatgtgtga

SEQ ID NO: 10912 - RNA, 1197 nt, synthetic construct
  source 1..1197: mol_type = other RNA
atgccccagaagtccgccaaaaagcctcactatccgtacaaacccatcggctcagttgaaacccttgcaagaatgcttggcgtgcatccaaaaatcttgacagatattgcaaaccgtaccgacgactcctacactgacttcactatcacgacgcctagtggaaaagagcgcaatgtttctgagcccaagttcaccctcaagaagatccaaaaaaggatcaataggaccatcctcgaaaaggtggagtatcccctttatctgatgggagggatccgcgaccttgaagaaccgcgggattacgtgagcaatgccagtgcgcacgctggcgctagcaccattattaagctggacatcaagaacttctaccctaacatccggagacaaaacgtgtacgatatctttcggtacctcttgcgatttccagagcctgtatctgacctgctaacaacattatgcgtaagacaccatcgtctcccacagggcgcctgcacttcatcttacctggccaacctgatattttttaatgccgagtatcagttggctgctagcttcgaacgccaggccatcgcgtacacacggctgctggatgacataaccatcagcagcccaaagcaattaactcccgccaagacgaccgagatcataaggtcagtcgcagcaatgtgtaagaaacatgggctgaagctgaataataagaagaccagagttgatcgagtgcaccagagggactccgactacattgtgacagggctctgggctaaacacagtgtcccgaaagtcccaagacacgagagacgcgccatccgcaagatggtccacgattgtgagaacaggttcaccacagatcccgcatcgcctgagtatcatagtatgtggaaccaagctagcggaaaaatagccaaactcaaacggctgggtcattcccaggcccagcctttgcgggcacgaatgagaaagattcttccccagattggggatcaggagaaggataatctaattctcgaatgcaaaaagctggcaaacaaatcacggcgaaacacagataggattggtcacattctgagagtgaatcgggccatacataaagtgggcctgttgtctaggactgacaagaggctggctcgctccttacgccgtcaggtggtcgcggcttatcctaacaaaccaactattaaggactattgggaaattaagtga

SEQ ID NO: 10913 - RNA, 1032 nt, synthetic construct
  source 1..1032: mol_type = other RNA
atgtcatataagcaattcaaagtggaaacaggaaagaataagaaggaacgccagattttcgaaccgaaacgaagcctgaagggtatccaaaagaagatcaacaaggaaatctttgagaagattgattacccacattatcttcacggggcactgtcgggcagggattatatttctaatgcagccgtgcacactagaaagagaaccgtgatctgtcttgacataaccaacttctacccctctataagcaagaaagatgtctgcagcatatttaagaacctgatgcgattttctcccgaggtgtcattgtgcctgaccgagcttgtcacccttaatgacaaggtgccacagggcggatgctgtagctcctatattgcgaacttgctgttttttaattcggagtacaacctgtacaacaggttgaaatctatgggactatcatattcccgcctgttggacgatatcacaatcagtagtgacaaagacctctcctccgaagagaaaactaaggtaatcaagctcgtccacggaatggttaatcagtacagactgagtatcaatgagagcaaaacgactattgagcattcaaaggatagctctagcaagctgtccgttacaggcctgtgggtaaagcacggggtgccaaaactgactaaggagaaccggcgttacattcggtacctggtttatatttgcaaaaaacagggcgcttatgagagacataccaaggaatatcatgacttgtggaacaggtgtagtgggaaagtggcccagatgtctcgcttaggtcacgtgcaggctgttgaactccgcgcaatactctccgagatcatgcctgtgtatgacgactacaaaatttccaagctaaagttaatggccaaacactacctcaataaattcacgcctcctctgacagacgaccagattcggaaaatcgatcgtatgttatacgatttcgatatcgtcggcagaaccaataaaaacctcgccaaactgtaccggaggaagcttgtcgctctcctgcccgataggtga

SEQ ID NO: 10914 - RNA, 1140 nt, synthetic construct
  source 1..1140: mol_type = other RNA
atgaataaaccgcgcttcaatgggacacctattgcctcactggacagtctggcagctatgctgggaattgatagaaagagattggattggatggtactgtccgtgtcaaggtcttataaacagtttacggtcgagacagggaagaataaaaaagagaggaagatctttgagcccaagcgctcacttaaaggcattcagaagaaaatcaacaaggagattttcgagaacattgactaccctcactacctgcacggggccattaccggccgcgattacatcagcaatgcttcagtccacactaaaaagaagaccataatctgtctggacattaccaacttttaccccagcattagcaaacgcgatgtgacactcatctttaaaaatcttatgcgtttctccccagacgtgagcattgctttgacagaattggttaccctgaacaaccaggtaccccagggaggatgctgttcttcttatatcgccaacctgctgttcttcaactccgagtataacctatataatcgactccagtctatcggttactcgtatactcgacttttagatgacatcaccatatctagtgatgaggatatctcccttgaggaaaaaactaaggtgatccagctagtgtacaggatggtcagtcagcacagattgtctataaatgaagacaagaccactatcgagcatacaaaggactccagcagtaagctctccgtcacgggcctgtgggtgaaacacggcgtgccaaagttaaccaaagaaaataggcggtatattagatatctcgtgtacatttgccagaagcaagcagcatatgagcggcacactaaggaataccatgacctgtggaacaggtgcagcggcaaagtcgcgcaaatgagccggctgggacatgttcaggccaacgaattacggtgtgtgctctcagatatactgcccatctacgacgattacaagatagggaagctgaagtacgttgctaaacattatcttagcaagtttacacatccattgagtgaagagcaaatcagaaaagttgacaggatgatctacgacttcgatatcgtgggtcggaccaatgagaaactggccaaggactatcgatccaagctacgcgccctcctccctgaacgttga

SEQ ID NO: 10915 - RNA, 996 nt, synthetic construct
  source 1..996: mol_type = other RNA
aaaaagcgaactatcttcgaaccaaaaaaagccctcaaagccctgcaaaagaagattaaccgggagatctttgagaatgtgacatatcctagctatcttcacggaggactgaaggaaaaagactacataagtaattccgcaagtcacacaaagaagaaaacgatcatatgtatggacattcaggatttctatccgagcattagtaagagagatgtccaccaaatttttcaatacctgatgcgtttttcacctgatgttagctccgcgctgactgagcttgtcacactgaacgggaaggtgccacagggtgcatgttgcagcagctatatagctaacctggtgttcttcaataaggagttcaacatcgtgaacaagctctctaggaaaggactgtcatacaccaggctgttggacgatatcaccgtcagttcagataacgacctctctgatgccgaaaaaactgagattattcagctggtaaccggtatggcccgttcctatcggcttaacatcaataaagacaagacttctatcgagcactctaaggattccaatgctaagctccaggtcacagggttgtgggttaaacatggcatccccaagttgacaaaagcagaccgccgctacattaggtaccttgtgtacatttgcaaaaaggactatgatgccaagaaagacagcgtggagtaccatgatctctggaacaaatgctctggcaaagttgctcagatggaacgactcggccattcgcaggccaaggacttaaggcagaccctatcagaaatattgcccatttacgacgagtttcggatcaagaagtgtactatgtttgccaagagatacatcaagacgttttcccccccactgtccgaagagcagatcagcaaggtgaataaactgatttacaaattcgggatcgtagctagaacccagaagaatttagcgaaaacctatagacgcgagctacgggcattactgcctatcgaaaagcaatga

SEQ ID NO: 10916 - RNA, 1143 nt, synthetic construct
  source 1..1143: mol_type = other RNA
atgatgaagcccctattcaatggcacccaactcgcatcccaggactctttagctgcaatgctcggagttacaacagagaggttgaataaaattgtcctgtccatccctaaaagctataagagcttcaacattgaaacggggaagaacaagaaggtccgaacattatttgaaccaaaaaaggggctgaagcatatccagaagaagatcaacaaggagatattcgagaacgttaattaccccaattacctgcacggcggactgaaagagcgggattatgttagtaatgccgggactcacgccgggaaaaagaccataatttccctggacatcgagaacttttacccctcaatatccaaaagggacatcttgaacatcttcaagaacatgatgagattttctccttcaatctccgagactctgaccgagctggtcactctcgatggtaagcttccacaaggcgcctgctgttcaagctacatcgcaaatctcatcttctttaacgatgagcacaacattgtaaggaagatcaataatatgggcatgaactatactcgtcttctggatgacgtgacgatttcgtcagacaagaaactgagcaaggaagaagaaacaaaggccatcaccaccgttgtagggatgattaatcgtcatcgcctgtctttgaatgatgcgaagacagtaattgagaaatcagatcatccaaactctaagcttcatgtcaccggcctgtgggtgaaacacaaaacacccaagataaacaaagagaacagaaggtacattcgatatcttgtctttatatgcgagaaagaatctgccgtggacagaactagcaccgagtatcacaccttgtggaacaaggctagtggtaaagtggctcagatgagcagagtgggccacgagcagagtgtggaactccgggaaaagttaggaaagattttgccgctgtatgacgagttcaaaatccggaaaatcgtgttcctggctaacaattacatcaaaaacttttccctgcctctctctgaagaacaggtgagcaaagtgaataagattatttacgatgtgggtatcgtgggacgctccaataaaaagctaagtaatgaactgcggaagaaactccgcagtattcttcctaaagacgcctga

SEQ ID NO: 10917 - RNA, 1140 nt, synthetic construct
  source 1..1140: mol_type = other RNA
atgaaacctctttttaacggcacccagttaagtagccactcaagtctcgccgccatgttgggcgttactccggaaatcttggataagatcgtgctgtctattccaaagtcctacaaggacttctgcattaaaacgggtaaaaacaaaaaggaacgagctatctttgagcctaaaaagggcctgaagtacattcagaaaaagatcaacgaggaaatcttctgcaaagtgaagtacccagtatatctgcacgggggcctaaagaatagagattatgtgagcaatgctggttttcattcaggtaagaagaccatcatatctttagacatcaccaatttctacccatcaattagcaagaaggatatcctgaacatcttcaagaatatgatgcggtttagcccatcgatcagcgagacactaactaagcttgtgacccttaacgacaaactgccccagggagcctgtacaagctcctatatagcgaacctgatttttttcaatgacgagcacaacattgtctccaaactgaatcgcatgggcatgacatatactcggcttctggacgacatcacgattagttccgacaagaagctctctaaagaagaagagacaaaggctattaccaccgttatcggcatgattaatcgtcatagactctctatcaataacgacaagactgtgattgaaaagtccgatcaccataattccaaactgcatgttactggactctgggtcaaacacaagaaacccaaagtctcaaaagagaatcgcagatacattaggtatctggtgttcatatgtcaaaaggaaagtgtggtggataggacatcgtccgagtatcacaaattgtggaacaaagcatctggaaaagtagcacaaatgcataggctgggacaccctcagtccatagaactgcgggagaaactctcagagatactccccctctatgatgagtacaaaatccgaaagatcgtcttccttagcaacaattacatcaagaactttagtctgcccttgagcgatgagcagattaagaaggtcaacaagatcatctacgaaattgggatagttgggcgcaccaacaagaaattggccaatgagttaagggggaaaatgaagtctatgctgcctaaggtgaaatga

SEQ ID NO: 10918 - RNA, 1155 nt, synthetic construct
  source 1..1155: mol_type = other RNA
atgaataaaccctactataaaaaatcgcccatagcatcagttgagaaattgagcctcacactcaatgtgaccccagaacgtttggccgtgatcgtcgataacatccacaactcttacaaaacgttcactaaggtcactggtcggaacaagaaagagaggtcactgagtgaacctaaaaagggactgaagaagctgcagaagaggattaatcaggagatctttgagaacgtaagttttcctgattacctgcatggaggcttaaaaggaaaggattatttatccaacgctaaggtacacaccaataaaaagcatcttatttccctggacatcgaaaacttctatccctctattagcaagaagaatgtgcttgagatcttcaagtatatgatgcgtttccctgaggacgtgagtaaggtgctgacagaactggtcactctggatgggcacgttccacaggggtcctgttgctctagctatatcgcaaacctcgtgttctttaataccgagtataactacgtcaaccagcttaagaataaaggctaccattacacacggctactggatgacataactatttccagtgataaggagctcgacaaaaaggaaaaaaccttcatcatcaaccagatgcgcgcaatggttgaaaagcatcgcttgaaaataaacgacgagaagaccaaggtggagtcacacacggatcttcgctcttcttttgaggtaactggcctgtggaccaaacataagaatccaaaactcagaaaaccccaaagaagacacattagatacctggtgttcatctgtagcaagcaggccgagtatgaaaggacaagcaatgaataccatgccctgtggaataaggtgagcgggaaggtggcgcagatgcaacggataggtcacactcaggctaaccagctgcgagaacaactgaccaagatccttccgatttacgacgacttcaagatcaagaaggtgatttacctagctgacattctcagcaagacaaagaaagaggaaatcacctttgccaaagttgagcggtatcgcaagataattcacaaactcgacattgtctcgaggtccaataaaaaattagccgacaagcaccgatcagtgttgcacacaatctttaaagattgcaaagtcgaatccgagtga

SEQ ID NO: 10919 - RNA, 1155 nt, synthetic construct
  source 1..1155: mol_type = other RNA
atgaaaaagcctatctacaaaaagagccccattggatctctggaaagtctgagcgccatgttgggcatcaatcaatctcagttggaccacataattaattccattcccaactcctacaaatccttcaagattgagacaggtaagaaactcaagttgagacagctgcacgaacctaaaaaaggcctgaagtctcttcagaagaaattaaacaaggagatcttcgagaacattgaatatccgtattatcttcatggagggatcaaaaaccgggactacctgtccaacgccaggatccattccggatcaaagtccctgatatctctggatattaaggacttttaccccaatattcgtaaaactgacgtcataaacatcttcaagaatcttatgcgctttccagcggatatctcagaggccctcacaaaactcgtgactctgaacggtgaggtgcctcaggggagttgttgcagcagctacatcgccaatttgatctttttcaacaacgagtacaacatcgtcaccaagatcgagaataaagggtttagatacactagacttctggatgatattacaatttcaagcgatcgtgaactgacgaacaacgaaaaaaccttcatcatcaatagcgtaaggtctatgataaagtcacaccggctgaacataaatgaggacaagactaaaatcgagtcttcctcgaatctgaatgacggctttgaagtgacaggcctctgggcaaagcacaaagctccaaaggttagaaaaaatcaccgcgaccacatcaggcatctcgtcttcatttgtaagaagcaagccgaatatgataaagaatcgcccgaataccatgcactatggaataaagcttcaggcaaagtggctcagctgacccgcctaaatcatgccgagagtaatccactacgaataattcttaactccattctgcctgagtacaacgagcacaagatcaaaaagattaccaagatcgctgacaatttaatcaaggagaaaaacaaggtgacgagcaatgatctcatcaacaagatcaacaagctcttgtatgaactgagtattgtttcaaggacccgaaaaagtttagcatatcggtatcggaagaagataaacagctgctttagctctgtactcaaggtgagtatttga

SEQ ID NO: 10920 - RNA, 1104 nt, synthetic construct
  source 1..1104: mol_type = other RNA
atgctgggaatatccaaatctcagctagacaacattatcaatcacgtctccgacagttacaaatcctttattaaagaaacggggaagaataagaagtcaagagagctgtttgaacccaagaaaacactcaagcaaatccagaagaaactgaacaaagagatatttgagggcatcacttatcctaactacttacatggcggtatcaagaacaaagattacatcacaaatgccaaagtgcattcgggagccaaaagcatcatttcactggacatcgagaacttctacccaagtattcggaagaacgatgtgctgaacatcttcaagaacctcatgaagttccctcaggatgtaagcgagtccttgactaagcttgtgacgttaaatggggttgtgccacaaggatcctgttgctcttcatatatcgctaatctcgtctttttcaacagtgagtaccaccttgtgacaaaagtcaagaataagaggtttgagtactcccggttgctcgacgacataaccatctcctccaaaactgagttcaccaacgaggagaagacatttgtcattaataatgtcagagcaatggcaaatcggtaccgactaagcctgaacgaaaacaagaccaagatcgaaaatagtagcgatctcaagtctgatttcgaagttaccgggctgtgggccaaacattctgtgccgaagctgaagaagtgtcaccgccgctatattagatatatcgtgttcatatgcgagaaacaggccctttttgatcgaacctcaatggattaccatgctctgtggaacaaggctagtggtaaagttgcgcagctgaaaagacttaaccacagcgaaagcaatatgctgcgtgacaggctgtctttggtgttgcccgaatatgacgacgataagattcagaagataattaagatcgccgacaacctcctggttaacggccacaagctgaatgctattgacctcaaggacaagatcaatcaccttttctacgaattcggcattgtaagcaggactaaaaaatcattagcatatcggtatcgcaaaaaaattagggccaatttttcttcgatcaccgataaagtgacaattagctga

SEQ ID NO: 10921 - RNA, 1185 nt, synthetic construct
  source 1..1185: mol_type = other RNA
atggctaacgacaagccttactactccaagaaacccattgccagcgtagaggcgttggcacagtgccttggcgtcaccccagaacgactcttgctgattgccaagaattcggaaaagagttacatagagtttacggtttacacaggaaaggacaagactaacctcaaaaagcgggtcctgcatgaaccaaaacccttcttaaagagcatccagaagaagattaaccgggagatcttcgagcatgtcatctatccggagtaccttcacggtggactgaaggagagggattatataacaaacgtgtcactacacgcaggggccaaaaccattatcgcgatggatatccaggacttttacccaagtatccagaggactcatgtccaagacatatttactctgctgtgcaaattcccgcctgccatatcatccctgattactgacttgattaccatcaatggtagagtggctcagggggcctgttgttccagctacatagctaacctgattttcttcaattcagagtacggcagaattagcaaattccgctctcaaggcctcacctatactcggttactggatgatatcacaatcagctctcgcgtggtgcttgaggagaaaaaaatctccaatgctatcgaatctgtggcaagtctgttcaccaaatttggcctcaagttgcatcccagaaagaccaaagtcgaacaatcctcagacacaaaagccaaatttgaagtgacaggcctgtgggccaagcacgggaatcctaagattaggaagaaagatcgccattacgtgaggcacctcgtattcatttgccagaaggaatttgaaaaagacagtaactgtagcaagtatcacgagttatggaacatgacatccggtaaagtggctgttctcaccaggttgaagcacgcacagagcaaagatctgagaaagaagctagggagtgttctgccaacctatgactctgaggcctccgctaagcttcagcgtatcgcgtataaactctgccgcatccccgaaaccgaaacgtcttctcctggaaaactgaagatttaccacaagctgaagtatcactttggaatcgtggctcggacggaccgtcagctggcaaagaaatggaaagaggttcttgatacaaaattcaaggccagcgccatcgcagcccgatcaactaatgagtga

SEQ ID NO: 10922 - RNA, 1158 nt, synthetic construct
  source 1..1158: mol_type = other RNA
atgaagaagcctatatataacggcaagcccatcagtactttggatgccctgtctaaagctctgggcaccaatctctctagactgcgcatttttattgacaccgccgaaaatagctatactacttttaccttggagaagaaagttaatggaattgtggtaaaggaacgcacgctgaatgagcccaagaagaatctgaaagaccttcagaaacgaatcaaccaggcaatatttaacaacgtgagctacccggagtacttgcaggggggaattaaaggcaaagactttatcaccaattccaagaatcacctctctgctaaaagcctgattaatctcgatatcaaggatttctaccctagcatttcaatacatcacgtctatgccatctacaacaaactgttcaaattcccacacacagtgtcagacgccttggtgaagctgacaactaagaatggggtggtcacgcagggagggtgttgcagttcctacattgcgaacctgatctttttcaatagcgagcatgatcttgttcagaagctagaatccaggtccctgacatatacaaggctcattgatgacatcactatctccagcgcaaagccaatgtctaaggacgagattacaaacaccataaatctgacgaacaatcacctaacaaagttcaacttaaacctgaaccgcgacaaaaccaacattgaccatcatcacaacaagtcagataatttcgaagtgaccggtttatgggtcagacacggtaaaccaaaagtcaaatccgcagttagacgacagatacgtcagctggtgtttaagtgcaagatccaatatgagctgtgtcctacagacaagtcttatcatgacttgtggaataagacttctggcaaagtagccattctaaccaggctcggccacgccaacagcaaaatctacagaaaaaagttatccgagatcctccccctgtacgatatcaagaaggaagaaaagatcgagcggatcattaactaccttatcgataccgaatcgaaggagatcaatagtcccaggcggatcaaactctatcacaagatgatttaccattgcggaatacttgggcggagtaacaagtcaaaagcgaaacttctcaaaaacaaactgaaagctaagttcatcgctgtccaagtgtga

SEQ ID NO: 10923 - RNA, 1185 nt, synthetic construct
  source 1..1185: mol_type = other RNA
atggcggataaaccttactacccagggtccagtgtagctcacatcagtacactcgctgccatgttggagattaacagagacttaatcgagaagcatagcaagaatacgtcgagctcatataccacttttctaatctctcctccctctaaaaagagccgagaagtgtctgaacccaaggagtccttgaagaagattcagaagcgcattaatagtcgaatcatgtctgaagtggattaccccaagtatcttatggggggaatcagggataccgcatccaggagagactatgtaaacaactccaaactgcacctgaagccagagactctcattaatctggacatcgagaacttctttcccaatatacacaaagagcacgttaagaacgtctttaagtacctgtttcggttctcagaagatgtgtccgagactctcagctgcctcacaaccctcgaaggtgtcgtgccacagggtggttgcacatcaacataccttgggaatctagtgttctttaattacgagtacggcgttgtgagtaagttgcgcagcaaaggcatcagttattcgcgactgctggacgatattacgctgtcctctaagaagagactgaccgaagaggagaaaacctgggccatctctctcgtggctggaatgatcaaccactacggaatgaatatgcatgacgggaagactcggattgaacatcgtgaatcaagggacgccaaatatgaagtcactggagcatgggtacggcatggcgagcctaaaatcagaaaagacgacaggaagaagattcgctcagcagtgaggaagtgtgagataatgtatgaggaatccccgtacagcagcgagtaccacaaacagtggaataaaacaagcggaagagtggctcaactgggcaggttcaatcataaagccgaggaaaaaaagctgcgggagcggttaaagaccatcttaccactgtatgatgacgtgtattcaaaaacacttagtgttaaggtgaaccaggtcgttcgccgtcggagaaagaaccaaataaacattgatagcgtcggcaccaggaactacatattgaaactgtatcacgagctggggataatggcccgcactaagaaaacccaggccagacgcctcaaacagtctcttcgtgaaaacttcggcaatattatctccaaccctcactactga

SEQ ID NO: 10924 - RNA, 1182 nt, synthetic construct
  source 1..1182: mol_type = other RNA
atggcagacaaaccttactacccactgccccccatcggctcagtctcagtgcttgccgcgatgctcaaaatcaatgagaagcagctgatccatatcgcgaataatgcatctaattcgtacactagctttgaaattactcctgagggaaagaaaccacgcgatgtagtggaacccaaagagcagctcaagtatgtccagaagaagatcaacgctatgatattttccgaggtcaaatacccgatatatctcatgggcgggatttcagacaaggtgcaatctcgggattatatcaataacggaaaacttcacctgaataaaaacaccctaatcaacctggacatcgaaaactttttccctaatattaagcacgtgtacgtgaaaaagatcttcacgcacttgttcaagtttcctgaaagcgtgtccgagatcctgacaaagttaacaaccctcaatgggcgactcccccagggaggttgttctagtacctatatcgccaatttgctgttcttcaactatgaataccacatagttagtcagcttaggaacaaagggattacatactctcgtctgctagatgatatcaccctctccagcaataagaaactgaacaaggaggataaaacgcatgctatttccgccgttgacggtctgattaagcggttcgagctgtcgatcaatacaagtaagacaagaatcgagcacaaggacgatcttagcgctcagtacgaagtgaccggctcctgggtcaggtttggagaattgaaatttccaggcaaagccaggaagaagattagatctgccgtaaaaaagtgcgaattaatgtaccaagagaactgctattcagcagagtaccatagtcagtggaatcgtactagcggtcgcgttgcacagcttaaaagattcgggcatcataagcaggagcgggagtttcggactcgacttggaaaaatattaccgctgtatgacgaacagcaagccattaccttgcgcactaaggtgtaccaactggtcaagaagaggaagctcaataaactgaggttggacaacccaggcctacgcaagcagatactcacactctaccaccagttgggcattctggctagaaacaacacctccagcaaaattctgaagaacgaactgagagagaacttcagcttcctgattaacaatccctattattga

SEQ ID NO: 10925 - RNA, 1182 nt, synthetic construct
  source 1..1182: mol_type = other RNA
atgggagataaaccacactacccatttgagcctattgcatcgtcaaagacactcgcaaaaacgctgggtgttaatctgccactcctgctgaaaacagccagcaacacctctaacagctacacatctttcatcgtgccaactaaatcaaaagaccgaacggtctatgagccgaagacaaccttgaagtatatccagaagaagatcaacaaagagatattatcacgcgtggaattccctagctatctgatgggcggcataaaggacactcagagtcctcgggattacctcgctaattccaggatgcacctaagaaaagagagcctcataaatctggatatcgagaatttctaccactccatcaagaaaccttacgccacccagattttcaagcaactgttcaaattcaacgacgaggtgtccaatcttctgacagaacttgttacccttgacgggcaggtaccccaaggggcctgcacttcctcttacattgccaacctcgtattctttaactcggagtataccgtggtcaataacctgagagccaagaagatagcatacacccggttgctagatgatattacactgtctgctgaccgtaagctgactaatatagagaaggaatggttaatcagccaggttactggaatgattgtctcccatgaacttaagatcaaagatgccaagacacggatcgagaatagggatcacccaagatcccgctacgaagtgaccggggcttgggtgaaatatggggagcccaaactgagaaagaaggaaaggaataaaatccggcatgatgtgtatatttgtgagctctttcacgaaaaggaccccaccaccgaagaatatcaccgtctgtggaaccgcacatcaggcttggtgagtaaattgggaaggttcaaccataaaaatgaggcggacaagctcagaaagaggttgagttttattctgcccaagtactctgacatccaggctaaaactctgcaaaccaaaatttaccagatcgtcaaccgcaagaagaagaacaatatcgacatcaacaatcctggcctcagcaagcagatcctgcgattttatcacaacctaggcattctgtctcggacgcatccgcatcttagcaaacccttaaagaatcagcttcgcagtgaatttggtactatgattaggaacgagtactattga

SEQ ID NO: 10926 - RNA, 1176 nt, synthetic construct
  source 1..1176: mol_type = other RNA
atggcagacaaaccatactacccccatgcccctatcagcaacatcgacacattagcgaaaatgctgggcgtcaggtcctccctgctgattttgatcgccaacaaggccaattcgtcgtacgtgagtttcgaagtagagacaaagaacaagcagcgcatggtgaacgagcctaagacgattctcaaatacatccagaagaagataaactcccaaatcttcaatagcgttgagtttccggcttatctcatgggaggtatccgtgaccccaaaacaccaagggattacattagcaatgcagccatacacgcgaaagcaaaaaccctgatatctctggatgtgaaagacttttttcccaccacccaggaagttcatatcaagtccgtgtttaagaacttattcaatttccccgaagacgtaagcaacactttgacaaagcttgtctctctgaatggcagactgcctcagggagggtgcacctcttcatatgtggccaaccttatattccacaactcagagtataaggtggtgagtcagttgcgccagaagggaattaggtacactcgtctcctcgatgacattacacttagcgccaacagaccactgtctaagaacgagtgtgagaagtatattcgcctcgtggctggcatgatcaccaagcatgacttaaccattaattcaggcaagaccaaagtcgagtattcaaaaaacatcgctagcccatatgaggttaccggggcatgggtccgacatggtaaacctaaattgcggaaaaaggaaagaaatgagatcagacacatagtacacattgtcgaaaagaagtacgctgaaaacccctacgataaagagtaccacgacctatggaataaagcctctggcctggtggctaagctgaaacggtttgaacacatcaatgagagtaagggactgcgcaagaagctgaaagccacacttcctctttacgatgaccaaaaagccgagactctgcgggttcaagcaaataagctcctgaggcgacaggctagaaacactttgaattataatagtgggaccaaaaagtctatcgataaactagtgtatgacctgggcattctctccaggactcggccagaaatcagcaagccgctaaaaaagaaaattaaggattccttcacggggatcgattttgatggtatttga

SEQ ID NO: 10927 - RNA, 1188 nt, synthetic construct
  source 1..1188: mol_type = other RNA
atgaattctgtccgccgcgacaagccctattacccaagctcgcctattagttcggtgtcccgcctgtccgatgttctggaggtaagagaaaacgtgctccgggatctgatccaaaacaaaagcacacattaccactcttttagcatcgaaaccacatcctcagatggcaagaagaaaaatcggagcatacatgagccaaaatttttgctcaagaaactgcaaaagaggatcaatagtaggatattgtccaaggtggagtatccccactaccttcagggtggtatttatgacgaggataacccccgagactactactctaacgctgccattcacagtaaagctaactgcgtaatgtctgtcgatatcaaaaacttctacccttccatcaaaaccgagcaggtgaccagaatctttaagttcttcttcaaattcccacaagacgtgtcagagttgctcgctgaactggtcacttatgagggatttgtcccgcagggggccgtgacctcatcatatatagccaatctgctgttctttgaagacgagtacaaggtcgtggcgcacttagcaggcaaaaagctactctattctcggctcttagacgatatcaccatctccggcaagtctataagcaaccaggactttggaaagattaaaacccaaatcgttgggatgtttaagaagagaggggtgaggattaataggaagaaaacagcccttgtgtatagcggcatccgatcagtgacgggcctgagggttgagcactccactcctcggtgtgatagaaaggaaaaacggaggatacgagcagcggtgaagcactgcgagatccagtaccagattgaccgtacatccgacgaatatcatagtttgtggaatagtacctcagggaaagttgccaaactggagcgcgtcggacacagccaggcaaagaagctgagaacgagactccagcagatttacccgactctttctacaggtcaggtacacgctctgaagattgccatcaaaaagctggagaaggttccaagttccaaacgtatgaaaattggatacctgaagcaggtgaataagctaattcatcgcactagcctggtgttccggacagacaaacccctcgcacattctttaactgaacgtcttatcaccatcaagcctgtcaagacttacagcgatttctgggaaaaatga

SEQ ID NO: 10928 - RNA, 1233 nt, synthetic construct
  source 1..1233: mol_type = other RNA
atgaacaagtttaatttcgataaaccctactacacccaaagaccgatttctagcattaaggcccttgccaatgcactaggggcagaccagcaggcgctcattcaactcgccaacaataaaacgaactaccactattataccaagcatgtcaagtcaggaagtaaaactaagcagcgttccatttttgatgccaaacacagcttgaagaagattcagaaacgcataatatcccgaattttctgtcacatagaattccctcaatatctccatggcggcataaaggatctgaaccagccccgagactacttttccaatgcaaccgtccactgcaattcgaaaaatatcatcagtcttgacatcaagaacttttacgactcagtgcgggacgacaaggtcctcatcatcttcctcaatttcttcaagtttccaaaagatgtagcccagatattgactcagctggttactgtgcagtggtccgattacgacaaggatatctctcaatccgccagacacctgcctcaaggggcacctactagttcctacttagcaaacctgatctttttcgataatgagtacaaactgttcaaccacttcaaaaggcagaaaatctcttatacaaggctgctggatgacattacgatctcttctttgagcgaatttacaaaggcccagaagactaaaatcatcacacgggtggctggaatggtaagagagagcgacctgaagctcaacaacaagaaaaccatttgcacaagctttcgcgaaccaggcaagaagatgattgtgaccgggttgtgggttaatcattcaattcccaaactgcagaaacatagccttaaaaagatcctagagggagtgaaatcgtgcgagtatatccattccagatgtccattttcctttgaataccacaaggaatggaatacttactctggtaaggttgctaatatggctcggagttatccaaatcttgccaagagactaagggtgaggttaagcacgatcctgcccattttcagtcctaaacagaccctggtgcttgagcggcagatcgataccttactcaatagcaaaaccacacagaccaacaagctgactaacataaagcgcttcaacaaggcttactatgcgatcggtatcatttcacggacagacaagcgcctggctaggaaactgcgatcacgcctgttgacccgtatgccgaacattacatataaagactattgggagaactga

SEQ ID NO: 10929 - RNA, 1170 nt, synthetic construct
  source 1..1170: mol_type = other RNA
atgcgcccacagtacctcaaaaagcccatcgggactgtcgcaactcttagtgccgccctcagagtttcagaaccggtcctgcggcacgcggagagtaaccttgacgcccactatacgccttacgaaatcccaaagcgggacggtagagtccgttctattgtgatcccgtcactgcatctcaaaaccatccagaagcggatcaacagagaaatttttgcacatgtcgaatacccttcctatttatacggaggggtgaatggccaggactacgtcagaaatgccagcgctcaccgcggagcacaagtactcattgctctggatgtgaaagacttttacccatccatatcacgcaaacgggtcgccaacatctttcagcatttcttgcacttcggagctgaggtgagcgacttgctcgccgggctgacaacctatcaaaataaggttcctcaaggggcttgcacctctagccacctggctaacctggtacttcacgatgttgaatattctattgcccagtattgtcacaatgcaggcctggtgtacacaaggcttctggatgacattacaatatccagtcgaaagcacgtgtctggagagaagataaccaagattattgcgatggtgtcgagaatgctgaaatccaagggcctgaaaatcaagagacagaagacgaagatcacctcaaaaagcaaccctgaggaccttatggaggtaactggcttatggctgaataggggcgccccccgcgcaaactcattcgctaggcgagcaattagggtggaggtgtataagtgttcccagagcgccaaaaaagacaaggccagttccaactaccataaagatcacgccagcgccagcggaaaggtggccatgttaaattacctgggccatggtgaggcaggtcggctgagaaaaatgttggcggacatcctccccatatacgatgagcgagaattgactaagacagaaaaaatggttcggatgttgcggaggagtagcgagaaggacagggaaaagtacgcttataacgtgcgtttccataaagtgatgcagcgcctgaatatcgtggcaaggaccgataaagttctagccgatcgtctacgacaggagctgtgcgcttctcgcccagtcaagtcctctaatgcggctctctatgatgagcccatctga

SEQ ID NO: 10930 - RNA, 1011 nt, synthetic construct
  source 1..1011: mol_type = other RNA
atgataccatccttgcacctgaaaaccatccagaagagaatcaatcgcgagattttcagccatgtaacgtatcccgaatacctgtacgggggcgtgccaggaaaagattatgtgcggaatgccaaacggcacgaactggcacacgttgtcatcgcactggacgttaagaacttttatccatccatcagcaaactgagggtttctaatatctaccagcacctcttcaagttcggggcggacgtgtccgactttctcgctgccttgaccacttacgagaataaagttcctcaaggtgcctgtacttctagccacctagctaacctagtgctccatgatgtggagagttccgtcgtcaaatattgcaacgattcgggactggtgtacacacgattactggacgatataactatttcttccactagacgcctccctgagaagaaggtagagaaaatcgtcggcatggtggctacgatgctgaaaggcaaagggcttaaactgaagcacaacaaaaccagggtttcaacaaaggctaaccccgaggaacttatggaagttacaggattatggctgaatagaggagcaccccgagtccattcagtgagcagacggctggtgcgtgtggaggtgtataagtgcaaagaagcagcgaaagtggaacgagtgtcagaatcctatcataaggcttttgccagggcttctggccgcgtggcaatgctctgctacctcggccacgccgaaagtgggaggttaagaaagagcttgagtgagatgcttcctctttatgacgtaagggaggtcaccaagaccaagaagatcgtcaagatgctgggtcggacatctgagaaggatcggagtaagtacagctacaatgtaagctacttcaagaccatgcagcgcattaacattgtgtcacgcacagaccccctgttggcccgtactctcaggcatcagttgctgatgtgtaagcctaagaacaaatcggacgccgccctttacgatgagccgatttga

SEQ ID NO: 10931 - RNA, 1170 nt, synthetic construct
  source 1..1170: mol_type = other RNA
atgaggccatattatacaaaaaaccggattggatctgtggcggccttatccgctgcgcttcgggtttccgagccaattctgaaacacaccgcagataatctcgagaggcactacacgccctacgagataccgaaatcaaacggaaaacccagactgattgtgatcccctcgctccacctcaaaaccattcaaaagcggatcaaccgcgagatcttttcgcatgtggcctatccacactatctgtatggtggtgtgagcgggaaagattatgtgcggaatgccgaagcccaccagaatgcacatgttgtcattgccctggatgtgaaggacttctacccctccatcagctttgcacgagtagtaggcatttaccagcacttcctgaagtttaatcctgaggtagccgaactgctggccagtctgaccacatttaagaacaaagtgccccagggggcctgtacatcctcccacttggctaatctggtcttgcatgatgtcgagtatagtatcgctcaatactgtgagaacttcggcctgatttatactagactccttgacgacattacagtgtctagcacgaaggctttaagcccacagaaaataaagaagatcatcgacatgatcagcaaaatgctccgagacaaaggcctgagggttaagcatcagaaaacccgcgtgtctagcaaagcaaaccctgagaacctgatggaagttactgggctgtggttgaacagaggagctcctcgtgccaatagttttgacagacgcttagtcagggtagaagtgtacaagtgcaaacaggcggccgcagtcgatcgcacaagacctgagtaccataaggcgcatgcaagtgtctcagggaaggttgcaatgcttaattacctaggccacgctgaagccggacgtttcaggactacactagctgaaatactgcctttgtactctgtgggcgagatcaccaaaaccgaaaagatcgtggccatgctctgcaagtcatccctcaaggatagaggtaagtatacctacaacctgaattactacaagactatgcagcgacttaacatcgtggcacggagcgacttcgctttggctaaaaggcttcgcgtcaagctgctcggctacaagccgactaagctgtcatctgacgccctatatgatgaaccaatatga

SEQ ID NO: 10932 - RNA, 1191 nt, synthetic construct
  source 1..1191: mol_type = other RNA
atgtccacgtttttctccgtcatgcgtccatactatacaaaaaaaccgatcgggactacagctgcgctggcctctgctttgcgggtgagcgaacctgtgctgaaacacgccgccaacaatcttgaccggcactataccccatatctcatccctaagggtgacgggaagcaacgtgcgattgttatacccagtttgcacctgaaaactatccagaagcggatcaatcgcgaaattttctcgcacattgaatacccacactacctgtacggcggaatcgacggcaaggactatgtaaggaatgcaggcgcgcataaggacagacatactataatagctcttgatgtcaaagacttctatcctagtattacattcgagcgggtgttaggagtgtaccagcacttcctgaagtttagccccgaggttgccgagcttttggccaagctcaccacatttaacaagagggtgcctcaaggtgcatgtacttcttcccacctggccaatctagtgctgcatgatgtcgagtatcatgtggtgcagtactgtgagaatgcaggactaacctatacacggctgctggatgatattaccgtcagcagccccaagcccctgcctgtacagagagtgtctaagatcatcgagatgattagtaaaatgctcaaggggaaagggctcaggctgaaaaaaccaaagacccgcgttagttcaaagtcaaacccagagtctttgatggaagtgacaggtctgtggctgaaccggggagctccccgagtcaatagcgcgacgagacgagcaatcagggtcgaagtgtaccagtgcaaacaggctgccgctacctccagaacttccttagactaccataaaaagcatgcatcggcctcaggcaaggtcgccatgctgaactatcttatgcacgcagaagcaggcaggctcagaaaagcacttgccgacatactgccgctctacgatgtttctgagatgacgaagacccgtaagattgtggagatgctctctagagcttccgttgccgataggggcaagtacagttttagcctctcctattttaagaccatgcagcgcctaaacatcgtggcccgaagcgatgccgctttggcccactcactgcgccgcaaacttctggtatgcaaaccaacaaaacctagctcagctactttatacgacgaacccatctga

SEQ ID NO: 10933 - RNA, 1089 nt, synthetic construct
  source 1..1089: mol_type = other RNA
atgcatactgctcgaaatatcgaaaagcactacacgccatacgaaataccaaaggcggacggaaaagttcgcgctattgtgatccctagcctgcatctgaagacattgcagaaaaggatcaaccgagaaatctttagcaacatcgtgtatccaccctatctttacggaggtattgagggtaaagactacgttcggaacgcttccgcgcatcgttccgctcatgtcgtgattgcccttgacgtcaaagatttttaccctagtatcagctttcacagagtcctcaacatattccagtacttcttcaaattctccccggaagtgtccgagctcctagcaaagcttaccacttttcagaataagctgccgcaaggcgctgctacctcctcacacttggccaacctggtgctgcatgataccgagtatcacttagcacagtattgtgaaaatgccggattgatttacactcgtttacttgacgacatcaccattagttcaaccaagcccctctcggaacagaggatttctaagctcatcgacatggtcgcgagaatgcttagggagaaggggttgaaactgaagaacaagaagacaaggatctcgtctcgcagcaatcctaagatcttgatggaagtgactggcctgtggctgaacagaggctcacctcgtgtctctacagacaacagacgcaaaattagaaccgaggtgcaccaatgcgctgtggcagccatgacttctcggacatctcaaagttatcacaaggcccacgcctccgtttctgggaaggtggcaatgctcaatcacgtagggcatgcagaggcagaacgctttcggaaaacactggccgatatcctccccctgtatgatgccaatgagctgacgaagaccataaatatcgtgaacgttttaagccggtccagtgagtcagatcgggaggagtacgccttcaatctgaactacttcaaaacaatgcagcggattaacattgtagcacgcagcgatcccaggctcgcccgaagactgagggaaaaactagccacctgcaaaccaataaatcagagcgacgaggctctgtatgatgagcccatatga

SEQ ID NO: 10934 - RNA, 1188 nt, synthetic construct
  source 1..1188: mol_type = other RNA
atgctaaccctgctccccatgaggccattctataaaaagaagaagatcggatctgtggcctccttgggcgccgcactgagagtttccgatgtcgtgctgaaacatactgccgccacccttgaacaacactacacaccttacgaaattcccaagaaaagtgggaaacctaggtccattttgataccgagtcttcaccttaagacactgcaaaagcgcattaatcgtgaaatctttgcccacgttcaataccctgattatctgtttggcggtgtcgagggaaaagactatgtacgcaacgcaagggtgcacgccggtagtcacgtgctcatctcactggatgtcaaggacttttacccttccatcacgttcgacagagttaagagaatctaccagcatttcttgcagttcgatccagccgtgtccgaattactcgccaaactcactacgtataataattcagtgccgcagggggcttgcactagctctcatctcgctaacctgattctgcacgacgtggaataccacttggcacagtactgtgctaccgcaaaattgacctacactcggcttttagacgacatatgcatttcaagcaagacagccctgtctaaggagaagattgctaagctgatcgataaggtcagctcaatgctgcgcgataaaggcatgaagcttaagcatcaaaaaacaagagtgtgttccaaaagcaaccccaaagaactgatggaggtcactggcctgtggattaacaggggcgcgcctcgggtcaaacccacagagagacgcaagatacgagtggatgttcacaggtgtcaggtcctggctaatcagagtctgaccaatcgggagtacgatcgtgcacatgctagtgtttctggacgggtagctatgttatcttatctggggcactcggaggctgagcgcctcagaaagtcagtggcggccatacttccacagtttgatattcatgagatcagcaaaacgaagaaaatcgtagcgctgctcagccgagcgtctgccaaagaccggaacaagtattcctttatcctcaacttcaacaagaccatgcagcgtttgaatatcgtggcacgaaccgacccaaagctagccgtgcagctccgcaaaagcatggccacctgccggcccacaaagagggctgacgcaactctatatgacgagccaatctga

SEQ ID NO: 10935 - RNA, 1074 nt, synthetic construct
  source 1..1074: mol_type = other RNA
atgctgcggaagactctgcactttctttccaattctcaggaacgaagagaggcatcctttgactcctacagcagcctccacctgaaaacgctacagaagaggattaatcgggaaatctttgcgcacgtcgagtaccctaattatttaagtggagacattgagggcaaggattatgtccggaacgcaaaggcccatgctgggtcgtacgtgctcatcagtctggacgtgaaagatttctacccaagcataaacttcaatcaggtgaaacggatcttccaatattttctgaagttcgagccgggaactagtgagctcctagctaagctcacaacatttaacaactcactgccccagggggcttgtacctcctctcacctggccaacctcgtgctgcataacgtggaataccacctcgcgcagtattgcaagaccgcccgcctcacatacacaaggttactggacgacatctgtatttcttcaaattctccaatctccaaagagaagatttcacgccttatcgaaaaggtcagtaagatgcttagggatgagggtctaaaactgaagcatcggaagacacgagttagctctagatccaatcccaaagaactgatggaagtaactggtctgtggataaacaggggcgcccccagagtcaaatcagctgaacgccgagctattagagtagaagtgtattgctgcaaagacgccgcccagacatcacttaccgatcgcgagtatcataaggcctacgcacgcgttagcagaaaggtcgcaatgctgaatcacttaaaccacagagaagccagccgcttgcggagaggcctgagtgagatcctgctccgttttgacatacacgagattactaaaacggagaaagtggttgctatgttgatgcgtgcaagcatcaaagatagggagaaacattctttcatcctgaacttcaacaagaccatgaatcgacttaatatcgtggcaaggaccgatccaaagttggcgatacgtttgaggaaggagatggccaagtgtaggcctactaaacggacctccgccaccttgtacgaccaacctatttga

SEQ ID NO: 10936 - RNA, 1071 nt, synthetic construct
  source 1..1071: mol_type = other RNA
atggacaaacactacaccccataccagattccgaagaaaaatggaaaacctcgcacaatcatgataccatctttgcatctgaaaaccctccaaaagcgcattaatcgagagatcttttcccacgttaagtatcccgactacttgtacgggggcgtcgagggtaaggattatgtgaggaacgcagagatgcacgcgaaagctcatgtgttggtgagcctggatgtgaaggacttttatcccagcatcagtgctgacagggtgacaggcatttaccagtatctcctcaaattcaacccaggagtggcagaactgctggcgaggttgactacctataaaggcgccgtgccccagggtgcttgtacttcttctcatctggccaatctcatcctgcacgacgtcgaataccatgtagcccagtattgtaagaatgcaggactggtgtatacaagactgctggatgatatctgcgtgagttcggaggccgctcttagtgagaagaagatatcacgcatcatagaaatgatctctcggatgcttcgtgataagggtcttaagctaaagcaccagaaaacccgaatttctagtaagagcaaccctaaggaacttatggaagttacggggttatgggtcaatcgtgggatgcccagggtcaattccactgagaggaggagcatcagagttgaggtgcaccggtgccggcaattagccgcaggcagacggaccgatcttgcgtaccacaaagcccacggctccgtgtcaggcaaggtcgctatgctgaactatctccggcattcagaggctggaaggctacggagaagcttgggggccattctgcccgagtacgaccaggccgaaatgaccaagactgttaagattgttgaaatgctgtcgagaacaagccctaaagacagagaaaagtactcctttaacgtatccttcttcaaaacgctccagcgactgaacgtcgtggcacgcacagatccgaagctggccgtacgcttacgcaaaaaactcgccagctgcagaccaaccaaacattcatccgcaactctgtacgacgagcctatttga

SEQ ID NO: 10937 - RNA, 1134 nt, synthetic construct
  source 1..1134: mol_type = other RNA
atgaacgcactgtgcgcagctctgaggattagcgagtccgctctgaagcatctggcagccaacctggatcgacactatactcccttcgagatacctaaagataacggtaagagacgcgccttgctcataccgagcctgcatctgaagaccctgcagaaacgcatcaatagggagattttttcgcacgttgcgtaccctgcttatctgtacggcggggtagaaaatcgggattacgtaaaaaatgcaagtgttcaccaacgcgccgaggtgctgatagcactcgacgtgaaggacttttacccatctatcgaaatgaaacaggtcgtctccatcttccaacacctatttaagttccctaaggaagtcgccgacattttagcccggctcacgacttacgagggcaaggtccctcagggggcttgcactagcagtcacatcgctaacctagtgcttcacgatgtggagtaccatatcgcccaagacttccataaccggaattatgtgtacacacgtctcttggatgacatctgcgtgtcatcacttaagcccctgagtcctgagaaggtggaagacgtgattaagaaggtgtcttccatggtcaaaaagaagggcctgaagctgagggctgccaaaaccagaattactagcaggtccaaccccgaatctctcatggaggtcacgggactttggctgaatcgcggcacaccacgtgtaaatccgaaacagaggcggagcatacggtcagcagtttatcagtgtcagaagacagctatgagtgacaattcgagcttgacatatcatgtggagcacgccagcgcctcagggaaggttgccatgttgaagtatcttaaatacggagacgcaactcgaatgagaaccatcttacagggtatcgtgcccgtgtacgataaagctgagctcaccaaaacaaagaagatcgttgatatgctttgtagaacctctcaccgggatagggagaagtacgcgtactctttgggatatcacaaagccaaacatcgcattaacattgtctccagaaccgaacccatgctggcccatgcgttacgagcgaaactcaaaaaatgtccaccaacaaagaccagatccgaaatgatttatgacgaatctatctga

SEQ ID NO: 10938 - RNA, 1215 nt, synthetic construct
  source 1..1215: mol_type = other RNA
atgactaccctcagcagccacgcctgctttatgctgagtggcttcatgcggcctcagtacaataaaaacccaatccgatccattgattccctgtgcgacgctttgagggtcagtgaggtggtgttgcggcatacagcggagaatattcaacatcactacacgccttatagtattcccaaggcaaatgggaagacaagggtggttcatatccctagcctgcatctcaagaccatacaaaaacgcatcaacaaggagatcttttcacacattacttaccccgattacctgtacggcgggatagaaggtaaagattacgtgaaaaatgccaacgcgcacgctggagcaaacgtgctaatcgccttggacgtcaaggatttttatcctagcatcaagagagaacacgtaactgatgtgtaccagcatctatgcaacttctcaaaggacgttgcggaactgctcacagacctgacaacgcttcgcgagcgcgttccccagggtgcttgtacctcctctcatcttgcaaacctcgtgttacacaaggtggaatatcccgtcgttcagaatttaagaaaccaagactttcgctatactcggcttctcgacgatatttgtatatctgcatctaagttcctgtcaccagctaagatcgagacaatcatttccgacgtcgctaggatgttgaagagcaaagagctgagactgcacccaaaaaagaagtcgattacctccaaaaacaatcccgagagccttatggaagtaactggcctatggctgaatagggggcacgctagggctaaacgggaagagaggcgcgccatccgtaccgaggtctaccgctgcgagaaggaggccgctagaagtaggtactcacccgaataccacaagatgcatggaagcgtgtctggccgtgtggcaaaactgaactatttgcaccacccggaggccaaaaacttccgactgcggctgcaggagatcctgccactctatgacgagcatgaaattatcaagaccagcaaaattgccagtgtgctttctaaagtagcaaaggcagatagagccaaacactggttcgccatacagcaccataaggcccagtatagagtgaatatcgttggacggaccaatgtcaaaatggcctccaaactctcacgacagctgtctctctgtagaccacctaagacactgtccgaattaatttatgacgaaccgatctga

SEQ ID NO: 10939 - RNA, 1170 nt, synthetic construct
  source 1..1170: mol_type = other RNA
atgcggccgatatttaacaaaaagtctatcggcagcatcgaagccctttcagacgctcttcaggtgaataagcacattctccaaaacaccgccgataacatttttcagcattaccatccatacgaaatcaagaaaaaagatgggggcactaggcttatccacatacctaccctgcatctgaagattatccagaagagaatcaacaagaacatattcgataacgtgacatatcccgactacttgcatggagggatagaggataaggattatgtaaagaatgccctgagccacgcaaacgctgaggctatcatctgcctggacataaagaatttttacccctccattacacagaccagggtttctaagatcttccagtacttcttcaagttccccgaggacgtgtcaaacttactcgcgaaactgtgttgtcacgaagaaagggttcctcaaggtgcgtgcacttcctcccatctggcaaatctggccttctttgattccgagtatcactttgcatccttttgcaaatccaagaagtacacatataccaggctattggacgacattacgatctcgaaaagctcagctttcagcgacacagaaattagtaaagcgatcgcttctgtaaagagcatcatctctccacatggcattaagctgaacaataagaagcagaagatcgtgtcaaggagtaacccaaaggacctcatggaggtgactgggttatggctgaatcggggacgccctagagcccaccgctcctatcgcaaagtcgtcagattggagatgcatatttgcgagaaaatggccaaaacagaccgatttagtgaggaataccacaaactgcataatcgtgtgtctggaaaggttagcaaattaagttacctgggtcaccacgaagctaccaactatcgcgatactctacagaaaattttgcctctctatgatattcacaaggcaacgaatcttcacaagaatgcactgatcctcagcaaagtcaacgccaatatccggaagaaattcgcctatttcaaacggtactcaaagattaactacgagctgaatatcctcgccagaaataataaaccattgagcaagaccattcgaaatattctgtctaactgtaaacccagtggcctccgtgacgatcttctgtacaacgagccgatatga

SEQ ID NO: 10940 - RNA, 1170 nt, synthetic construct
  source 1..1170: mol_type = other RNA
atgcgtccattttatgatgcccgacctatagggagcctggctgcactgtcaaaaacattgcaggtggaattgtcaattttgcaacggacagcgtccaacattgaagagcattaccatgcccacgaaattgttaaaaagtccggcggtacacgggagatcaatatcccctccaatcatctgaaaattatacagaagaggatcaacaaacacatctttgaaaatgtggtctatccttcttacctccatggcggcctgccagagaaggattatgtaaagaatgccaactgccatagctccgccgaggttgtgatcgctttggatattaagaacttttaccccagtatcagcatcgataaggtggaagaaattttccagttcttctgtcacttccctaaggacgtctcaaaattactcgcagagttatgctgcctaaacaattcggtacctcagggagggtgctcctcctctcacatagccaacttaattcttaacaacactgagtacagtctcgtctcttggctgtcttcaaagaagtatacttacactaggctgctggacgacataaatatctcgtctaaacacctgattagtaaagaggagatcactaagattatcaagaaaaccaaggaaaccataagtaagagcgatctgaagcttaacaataagaagcagaagatcacgagccggtccaatcccgaaattctgatggaggtgaccggtctgtggcttaatcgcggaacccccaaagctcatacgtatgatcgcaaactgattcgagcggaaatgcacaaatgtcagaccatggccaaaaaagaccgctttagcgctgagtatcatgagattcacaattccatcagcggcaaagtggccaagctcagctacctgaagcacaaagaatcagaaagatacaggtacatcctcagaggaattctgccgctctttgacaaaagcaaagaggtgagtatcagaaagcaggcaaactatctcctgaagtctaaaccgaactacaggaagaaatacgtttacttcaagaagtatcacaagctattgtataagctcaacatccttacaagaaacaacaaatctctggcaaatcaaatcaaagggaatcttaagtcatgtaaaccactgggcatgaaggacgagctactttacaatgagccaatatga

SEQ ID NO: 10941 - RNA, 1155 nt, synthetic construct
  source 1..1155: mol_type = other RNA
atgcgtgcacaatatacaaagaaacccatcggctctttggaagtcctgtcaagagctttagagattgacctgggtgtactcatcaacaccgccaacgccattgaccagcattatcatgcccaccaaatccctaaaaaaaaaggcggtttccgtactattaacataccaaccttgcacctgaagtccatccagaagaagatcaactcgcgaattttcagcaatgtcgtgtatccggaatacctctttgggggaatcaaagagagggactacgttaaaaatgccgcacagcatgccggatgcaaagcgctgattgcactggatgttaaggatttctacccaagtatatctctgaatgcagtgaaagacatctttcagtactttttcaggttcccccgggacgtcgccgaattgctgggtaagctctgttgcctcaacgaacgggttcctcaaggcgcttgcacaagcagtcatctggctaatctgtctctccaggagaacgagtaccattttgcccagtattgcaagaataaggggtggacatatacgcggctgctcgacgatatttcagtgtctagcaaagaggtctttcagcagaaggatgtcgacgccatcatttccaaggcaaaggcagtgctagcaggcgcccgcctcaaattaaacaataaaaagacccgcatcttgtcgaaggctaaccccgtggatctaatggaggtaaccggactttggttaaacagagggaggccaagagctcacaggtccgatcgcaacgccatccgatccgaggtgtaccaatgtgaaatccttgctaaggaaggcagagagcgtaaaaagtatcatgacttccactcacacgttagcggacgcgtgagcaagctcgcgtacctggagcacgcgaatagcaaactgtacagagaacggctgcggaagattctgcctatatacgatgtgaaccaggctactaatcttcttcgccaggccgagtatataagtaaaacgaccctgagcaatcgaaagtctgtggcctactacaagaaatatcacatactaaagcaccggttgaatatccttatgagaacagatagggggttggctaggcgcattcagtcaatgctcagtctttgtaagcccactctgcagtcctccgacatgctgtga

SEQ ID NO: 10942 - RNA, 1098 nt, synthetic construct
  source 1..1098: mol_type = other RNA
atggatttggggatcctcagaaataccatccggacaatagataagcattatcatccgcactcaatacccaaaaagaatggaggttccaggatcatccatattcccacgacacacctgaaaaccattcagaagaggattaaccgccagatctttgataatgttatctatccttcgtacctatttggaggcgtgcgggaaaaagattatgtgcgaaatactagtgagcatggagggtgtaacgcacttgtggctttagacgtgaaggacttctatcctagtattaccgttgctgctgtgaagaagattttccaatatttctgcaagttccccgctgaagtagctgaaaccctagccggtctgtgttgcctgaacgggagggtgccacaaggcgcctgtacgtccagtcacctcgccaacttagttctccatgacgaagagtatcacctggctcagtactgcaagaataaaggctggacttacacccggctcttggatgacatatctgtgtcatccaaggcagagtttgacgtgaaggagatcgacgccatcattaggaaagtaaaatacatgctgggaaaatctgctttgaaactcaacaacaggaagacccgggtcctgacaaaagcaaatcccgtgaatctgatggaggtgacaggcctgtggcttaaccgcggcgttccacgtgcccacagagcagatagaaatactatacgaggagaagtccatcagtgcgaggtagccgctcgtgacagcaggacagaaaagcagtaccacgagttacacaatagagtcagcggtcgggtcgcgaaactgtcttacctgaagcatgccaactcccgcgagtaccgtgagagactgagatcagtccttcctctgtacgacgagcaccaagcgaccaacctgctcaagcaggcgcggtacatggcaaaaactaaaacgaacatccgaaagactcctgcgtactgcaagaagtattttattcttcagcaccgcctcaacatcttgatgaggactgatcgcggggccgcaggcaaaattcgcgccatcctgacaacctgtagaccagccatcgccagcgccagcgcatatattgaatga

SEQ ID NO: 10943 - RNA, 1170 nt, synthetic construct
  source 1..1170: mol_type = other RNA
atgcgcccacaatatctggcaaagccaatcgccagtctgaacgtgctgtcagtcgctctcggcgtcgacatcgacgtactcagaaacgccgcttcaaacatcgaacgccactaccatcctcatagtgtccccaaaaaagatgggtctttgcggtctatatatatcccctcgatccatctaaagaagatacagaagcggatcaataggaatatcttcgagaacatctcttatcctggatatctttttggtggaatcaaagagcgtgactacgtgaagaatgcgaatgcccatgcatccgcagaactgttgatcgccctggacgtcaggggattttacccttccatcacaagggacaagaccttgaacattttcaagttcttcttcaagttctctcacgatgtggcctcgcttctggcggatttgacatgccttaggggacaagtaccccagggcgcctgcaccagctctcacttagcaaacttagttcttcacgacactgagtatcatttggtccagcacttgaacaataaaggcctaacatacacgaggcttcttgacgatattagcatctcctctaaaacccaactcgaagaaaagcaggtgcagactctgattggcaaggtgcgcaccatgctgaacgagcagggcctaaagctgcagaacaagaaaactaagattaccagcagaaagaatcccgaaaacctcatggaggttactggattatggctgaatcgtgggcgggccagagtgcaccgcaatgagagaaggattattcgagcagagctgcacaaatgtgaaagcatgtcccgcctctccaagagcagccctgagtaccacgatttttataaccggctgtccggtagagttgccaagctcacgtacctcgaacacaaggaggctctgagttatcgatcaagattgcgtgaaatactgccgatttacgagaagaatgagatacatcgcacaattcagttagtgaccagtctgcaaaaatcctcaatcaaagatcgaggcaaatacgcttactacgctaaatttcaccaggtgaggtaccggctgaatattctgggtagaactgacggggggctcgctaaaaaactggccaccaccctccagacatgtaagccaacaagcgataaagagcggctgttttatcatgacattatatga

SEQ ID NO: 10944 - RNA, 1170 nt, synthetic construct
  source 1..1170: mol_type = other RNA
atgaggcctctgtaccttgctaagcctatcgcctcactgcaggctttgtcctctgcccttagaattgacgtgcatgtgctcaaatcaacagcggccaacatagaccggcactatcatccacactccgttcctaagaaagatgggagtagccgatcgatctacattcccagcatacatctgaagaaaatccagaaacggatcaaccggaacatttttgacaaaattaagtaccccgattacctgtttggaggtattaaagagcgtgactatgtaaagaacgccaacgcccatgcaagcgccgagacgctgatcgcactcgacattcgggggttctatccctccatcacgtatgaaaaaaccctgaagatcttcaagttcttcttcaaattccccgaggacgtggccgcattgctcaccgatttagtgtgcctccgcggaagggtcccacaaggtgcttgtacaagctcccacatcgcaaacctgtccctgcacgaagctgagtaccatctcgttcagcacatacgtaataaggaatttacatacactcgcctgttagacgatatctcaatctcttctaagaagcagataaacgaaattcagatacagactctcattgggaaagtccgcaagatgctcaatgaacaagggtttaaactacaaaacaagaagacccggatcacatcaagaaagaatccagaaaaactgatggaggttaccggattgtggttgaatagaggccaggcgcgcttacaccgccaggaacgaaggctgattagagctgagctccacaattgcgagaaactcagcaagctatctagaacctcgatcgactaccacgagctgcataatagtctgtccggcagagtggccaagttgacttaccttggccacaaggaggctgcctgctaccgcagccggctaagggaaattcttccggtgtatgatgataatgaaatccataggacaatcaaactggtatcttttctggagaaaagtagtgtcaacgataggaagaagtatgcatattacgccaaattccatcaggtgggctaccgtcttaacattctgagacgaacccaaagcggccttgctaataaactggcggaaatactgaggacttgtaagccccctctgaataaggaggagttgttttatcacgagatcatttga

SEQ ID NO: 10945 - RNA, 1164 nt, synthetic construct
  source 1..1164: mol_type = other RNA
atgaggcccatttactccgcgcagcccattgggagtaccgctgccttggcgttggcacttggaatgtccgagagcgcgcttcttgcactggccgcttcagcttccatcagatattctgccttcgagataccaaaaaagaattcggataaggtgcgcaccgtgtgcgagccacatcacgagcttaaggtggcccagaaaagaataaatagggccgtctttgaacacgtcgtatacccagaatacctgcagggaggcattgccgatcgcgactacgtccggaacgctagaatccatgcccacagtaaaagtttgatagccttggacgtgcagaatttttatgacaatatacaagccccagacgtgctcaagatcttcaaattcttctgcaaattcccggaagatgtggcacgggtcctcacccagctgaccacaaggggtggtcgagtgcctcagggcgcatgcacttcgtcccatatcgcaaacctggtgtttttcgctactgaacaccgcgtagttagagagttttttcaacagggcctccgctattctaggctcctggacgacatcacagtttcttccgctaagcaactgagccaggagagaactagcaagattatccacaaagtgaaacttctgctcgccgagaagcatctgcgcttgaagacgtctaagactcgggtttcttccaacagtaaccctgaggtcctaatggaagtcacagggctgtggttaaaccggggcgcacctcgagcttttagggctgagcgacatgatattagagcccgcatgttcaaactggagcggatgcatgagttgagctcacacgatctggactaccacgccgagcacaatcgcatcagcggacgggtagctaaaattacttacctgggacatttcgaagcagagaactatagatcacgtctccagaagattctccctacctatgacggcaccgaagtggcccgtacacttaagctagttcgattactgtgtgcaacacccgcccatcagcgggataatctggcgtacatcgataagtaccaccacgtgctctatcgtctggggatcctctctcggacccacaggagactggcttcaaagcaaagggcactggtgatgaaatgtgcccccagcacgagcagggaagaactattatatgggtga

SEQ ID NO: 10946 - RNA, 1161 nt, synthetic construct
  source 1..1161: mol_type = other RNA
atgcggccgatctttcatggaaaacctatcgcctctattgccagcttagcagcagctctcgggctcaatgccacgactctgcaggacttttcagcgcgggcccagagccagtatacccgtttcgagatccccaagaaaaatgggggaactagaaccatctgctctcctacccatgatcttaaggtcattcagaagcgtatcaacagagcaattttcagtaacgttgagtttccacccttcctcttcggcggcattgagggaaaagattacgttaaaaatgctcaagctcacgctggcgccaaaactattattacactcgacgtgacggatttttacccatccatctctaagaaaagagtcgccgagatcttcaagtatttctgtcacttccccgacccggtgagccatttgctcgcagaacttgtgacactggatgaggtcgtgccacagggagcttgtacaagtagttatattgccaaccttgtgctctttgagactgaacatcgcttggtagaagaatttcgccagaggaagctgacatactcccgactgttggacgatatctgcatctcctcccagcgaaacatcgcacctaaagaggtccaggaaataattagccggactgcttcgctgttaaaaagcaagggtttcaggatcaagaatcgcaagaccagggtgagctcagcttccaatcctgaaaccctgatggaggtgactggcttatggctaaaccgaggtcacccaagagtttttcgggctgaaagagagaagatccgtacccaactgcacaggtgcgaggagaatttcaagatatcaagaacagcacccgaatatcatcaagaacacgatagattgagtggcctcgtggccaagccaacataccttaatcattttgaggccactaacttccgcaaccggctgtcagcgaagctgcctcactacaacagggcggacacctataagacggagaaaatagtggaatctctggaacgcgtcaatatgggtgaccgcgggaagatctcttacattgagaagtttaaccaggtaacccaccggataaatatactagcaaggtccaacgccaaactggccacaaacctgcgggacaggctgcgaaaacacgcccccaccaaaaccaaggaggacctgatttacgggtga

SEQ ID NO: 10947 - RNA, 1206 nt, synthetic construct
  source 1..1206: mol_type = other RNA
atggatcacaggagcgtccagcttagcaggtgtttatttcttagcatgaggccaattttcaacggaacaccaatcgcctcagtcgatgccctggctcgttcccttagtctgagcgcacagcagttacggacattggcgggagcagttagtggccactaccgcgattttgacatccctaagcgcgacggctcctttaggactgtgtcagggcctactgaggaactgaaaattatccaacggcggatcaatagacacatctttgagagagtgcagtatccctcgtacctcttcggttccatcaaggagcggaactacgtgcagaacgcacggagccattcccgcgcccatgtaatcgtggccatggacgttgagaatttcttcccaagtatcaaaagggaggctgtgctgaacatatttaagaacctcttccgctttccgcaagaagtggcctctctgctagccgacctttgtactaaagacggccacgtcccacaaggggcttgtacctctagctatatcgccaacttagccctgcacgatatcgagcacagactggtgagcaatctgcggcacgaaggcctgatatactctagactgaccgacgatatttctatctcctcccctcatcccctggcgaaaaagcgcatcgagtccttggtggtacaagttgccgaaatgttgaagtgcaagggattcaaacccaagagaaggaagacaaaggtcacctctaagaataactctgcagaactcatggaagtcaccggactctggttgaatctcggcgaacccagagtcaaaagagatgaacgggcatcaattcgcacagaggtgaggcgatgcattcgcgagtccaaagtcgaacgaacgagtcctgagttccacaagctccatgaccgtacgtctgggcgggtggccatgctcagtcagttgaagcatcgtgaagcgaatcgtttccgcgtggctctgagactgtgcgcacccctatactcaccaatagagattaaacgaacccagaagattgtagctgctgtttgcaagacccccctaaggagccgggaaactgctgtgtatatacagcgattttatcaggctagatacagggtaaatattgtgtcaaggacagaccctaaacttgccaaagagctgcatgcacgactgagctcgcacgttccgaaaatgaaaaaggaggaggccatttatggttga

SEQ ID NO: 10948 - RNA, 1185 nt, synthetic construct
  source 1..1185: mol_type = other RNA
atgtccgtgatttttaacagttgcatgaaggcaaagttccttggcactccaatcgctcgagttgagtcccttgcgagaacattgggtgtgagtatccacgatttacgcaccattgctggggccgcttcctccaggtacaatgacttccagattgataagaaagatgggggcaaaagggacgtgagctcgcctcgcatagagctgaagctaattcagaaacggatcaaccgcgaaatttttgaaaaggtctacttcccatcttacctgaacggcgggatcaaagggcgtgattatgtgaagaacgcatatgaacatggaaactcggagactatcatctctttggacatagagaacttttaccctaaggtatctcggatcagcatactgaacatctttaagaacttcctgaaacagcccgaagagatagccgagattctgaccaatctctgcacaaaagacaataaattgcctcaaggtggttgtgccagttcttacctggccaatcttgtgttcttcgacattgagcccagactcgttagcaggcttcaggaagagggctttacttacacacgtttaatcgacgacattaccatttactcaaagaaccttatctccaagaaaaaaatctcagacctcatcgaaagcatcacaaagatgctgaagtctagaggattcaaattgaagcagaaaaagactcgatgtacctcagctagcaatcccgagaagctgatggaggtcacaggactgtggctgaatcggggggcaccacgggttagacggaacgagagggccgaaattcggaaggaggtgagagaatgcctgatctccgcagagctgaataagaccgataaggagtatcacgatctccatcagaaagtatctggaagggtcgctaagctgagtcaactgaatcactgtcaagccgaacgctttaggaaagaattgcgggaaatcctccccatctatagcgacgcggatattcgaaagactcgccgactcgtcgccaaaatcataaaaacccctcgtacaacgagaagtagcctcggctatattaaaaagtaccaccagatcgtgtataggataaacattctagccaggagcaataagtccatcgctagatcattacgcgagaaaatgaaaatatgcgcaccgaccattacgaaggagaattcaattcatggctga

SEQ ID NO: 10949 - RNA, 1179 nt, synthetic construct
  source 1..1179: mol_type = other RNA
atgaatatttcatatagtcatcctcccatcggctctataagcaagttagccaaaatgctcgacgtctcagaagcctatttgtaccaggttgccaaaaaccccgagaatttttacgcattttccgagattcctaaaaagaatggagattttaggactatctcggatccggtgaaggagctcaagattgttcagcgccgcattatccggagaattttctgcaattgcatatttccaacctaccttttcggttccattaaggacattgaaaatccaagggattttgttcgcaacgcgcagtttcactcgaacgcgaatgaagtgatggctttcgacatagatagctttttccctagcatccaggctaagtacgtaaaacttgtgttcaagtacctgctcaacttccccaatgatgtatccgacctcctggtgaagctgacaactttgaatggctccatcccccaaggggcaccaacatctccttacatcgcaaacctggtgttctacgatcaagagccgaaacttgtcaagctgtttacagacaaaaagctgcggtattctcggctggtagatgatatcactatcagttccgaaaagcctattacatccgggaacaaaaccttcatctacgagcaggtgaaaaaactattggacagtaagagcctcaagatcaacaagaaaaagtatcaggtcacgaacacatccaacagtggaaaaaaaaccatcgtgaccggcctcataatcgagaacaatattgtcaagcttcccaaggagacaatcaaaagcatctccaggcaggtttatactctgaacagaatggccgacgtggccactactgatgtgaagtatcacaaagctcacggaagcaccagcgggctggtcgctctgtatagccgtttgtctaaggagaagagtgacgtgcatagactgtctctcaggggaataaaaccaacgtattcaccatctcggttaaaaaaaatagctagtctgtgtcgacgcttcattaaatacggtgagtcacacaccaaaaagcatggcgatgaagactatgccaagaaatactacaagtacaagcacaagatttctatcattcgtcgaaccgacaaaaagaccgcctacagattagacctagcattgaagcctatcaagccccttcatctgctgtcaagctatcacgaatga

SEQ ID NO: 10950 - RNA, 1179 nt, synthetic construct
  source 1..1179: mol_type = other RNA
atgaaaatagcctactcaaactcgtctattgggtccgtcgcagcccttgccaaaatgctagacgtgactgagaatttcctgacccttgtggccagtaaacctgatgatttctactccatcagcaagatccccaagaaaaccgacggcttcagaacaatttcagatccagtcaaagagctgaagattgtgcagcgtcggatcgttcgcaggatcttcagcaaatgtagttttccgtcctacttattcggatctattagggacgaaatcaacccaagagattttgtgcgcaatgcgcaatatcattcacaggctagggaggtaatggcttttgatgttgagtcgttttttccctcagtaagaccccaatttgttaagaaggtcttgaagttcctcttcaaccttcccaatgaagtggcagagatgcttgtctctctgatgacactccaggacgggctacctcagggagctccaacaagcagttatgtggctaatctcattttttatgactgcgaacacaagatagtgaagacgctgaatgctatgggattcacttacagtcgcctggtggacgacatcacggtcagttccaagactataatcaagaacgaggaaaggaggtttatttatgagcaaatctctaagatgctgggcgagaagaagctcaaaatctctcagcgaaagtatggtgtcactaacactacagtgatcgggaaaaaaacggtggttaccggattagtggtcgaagataagatgattaaactccctaaggagaaggtaaaactgattgggcagatggtgtacgagctgaagtcaaaggccgaggttagcaccaccgatcacgagtatcataaatccttcaacaaagccagcggcttggtggcactctactctcgtctgaatactaagaaagccgaaatacaccggcagcaccttcggcagatactgcccacatacgacaataaaaaggccaaaaaaatcggttggttgtgtcggaagtttattggctacagcaaattgcatccaagcaaatttagcgaggaaggctataccagaaagtactacaaattcaagcacaagatttccatcttgtcccgcacaaaccgaaccctggcaatctctctcgaaaaggacctgaagcctctgaaaccgacctgcctgttagcgtccttccatgaatga

SEQ ID NO: 10951 - RNA, 1179 nt, synthetic construct
  source 1..1179: mol_type = other RNA
atgcgtatcgagtatcagggaaagccgattagaagtatcaaagccctctcaacctgtctaggcgtgagcgaggactctctgagtcagattagcctggatattgagaatcagtacagtatctccgaaatcccaaagaagaaagggggctttcgcaccattagcgaccccctccctcccctgaaaatcatccagaggcgcatcgttagacgaattttctccaacatcaaattccctgactatctcttcggctcaattaaagatgacaataatcccagggatttttataagaacgccctctaccatcagaaggctaaggaagtgctgtcgttcgatattgagagttttttcccatcatgccgacctaagttcatctacaagatctacaagtacctgttcaacttttctgacgaggtcagccacttgctggtgaacctgacaacattaaataatggccttccacaaggagcaccgacaagttcttatttggctaacctgtttttctacgacaacgaacacaagattttcaagactcttaagagcaaaggatttctgtactccagactgattgacgatattgtagtgagcaagcagtctaagatcaactcaaacgagaaacagttcatttataggaacatcctgagcctccttagagagaaagaagtcaaccttaacaaggacaaatactcctactctaatactaaaacacacgggaaaaaaacgattataactggtctacaagtgcgaaatggtaacactatcctccccaaagaaaaaaccaccgaaatacacaagaagattcacgagattgaacatttgggggaggtcgatcgcacctccaataaatttcacgaggcctacggcacagcttcaggattgttagcgctttataagagggtggatataaccaaagcagagaaattacacaagaagataatcaccatcaagcccatttaccatcctaatcggataaagaagatcaagtggatttgcaacaaatttgttcggatctccaagtccaatcctcggagaatcggggagtataatcacgctaaaaagtatcatcggctgatgcataagatctctataatacgtaggacccatactgcattggccaaacagctgaaagcccggatgcaaagcatcaagcccacgcgcctcctgtcggaatatgaaccatga

SEQ ID NO: 10952 - RNA, 1182 nt, synthetic construct
  source 1..1182: mol_type = other RNA
atgcctctgcaagtcacatatcgcggctcacccatccgttccctggaagccctgtctagcgcattgtcgtgcgatgaacctattctgaagcacatcagcaatcacgtcgcagattactacactttctttgagatagagaagaaaagtggtggcgcacgacaaatcaagcctcctaagccaatcctgaaagccatccagaagcggattaactctaggatcttcagtctttgcgagtttcccgagtatctccagggcagtattaaggacgccacgaacccacgcgatttcgtgtctaacgctcgggcacatagcaacgggaagactgtcgttgcggccgatatcaagaatttttacccgtcagtaaccgaaagcaatgtgaaggagattttcaaatacttgttcagattctccgacgacgtgacagccgtgctcgtagctttaacaacactggacaattcattgcctcaaggagctcccaccagctcttatctcgctaatctggtgttctacaataacgaacataagctcgtgaccgaactgagaagaaaagggctcatatacactcggctgatcgacgatattaccgtgtcctctccggtggttctcgacaagaatgaacaggaatggatcatacggaagataaaaggctttactgctagtaagggtttagagttgcacaggggtaaactcaaggtctgtaccacctccaccccaggggccaacgtcatcgttaccgggctatggattgacagaggccatccccggatatcgagggaagccaggaacaaaattcgcgcggcggtgcacaggtgtaaaaaagagcatgaagccggacacaagactctgggggagtttcatgacagacacaacagcgtttcaggctctgtggccctaatttccagactgggacatacgcagggtaaacagtatcgccttatcctgaatgagaatctgccagaatactcaaaagagtatgctggcaagcttacaaagatttgttatcgctttagcgccaaaaaaggattacgaaaggagactctcagttacacaaagcgatactaccagcttatgtatcacctgtccatccttggacgttccgataaaaaaaaagcaaacttcctgcggtccctactgaagcagaacccacccaagcactgcctgagggagttgagcgaggagtga

SEQ ID NO: 10953 - RNA, 1260 nt, synthetic construct
  source 1..1260: mol_type = other RNA
atgtgctttacacttaggtattttcctgagtggctgccacaagtgtttctggagcttatcgacagcttaccttttctgtcactgggatatatgaataggataaccttcgcgtctaggcctatagcctctcgagcagctctcgctaaggcgttaagcattgacgagcgtgttctggccgagtttgagcagaacgcaaacgcatactactatttcttcgagcggcccaagaaacacggcgaaggcatcaggtccattacggctcctaaacctctcctcatgcagctgcagcgtagagtcaacaaccggatcttttccggatgcaactttccacgctatttgcatggatctattaaagatagtgagattccaagggatttcctgaccaatgcccgcgagcatatcaccgccgaccatgtcattaccctggacatcagaaatttttaccccagtatcggcagagaggaagttttcaaaatcttcaagtaccttctccgctttacagatgaagtcgcaagttccctgacaagcttggtcacccttaacggcacggttccacaaggggcccccacaagcagtttcattgctaacatggtgttctacgacagagaacccagattggtggaagaactgatcaggtccggtgtgcgctacactcgcctcttagacgacatcaccctgtccttctctaaccggatttcgtcagaaaagctcaagggggagataatcggtaaagtacggactatgtgtagcgctaagggcttcaaacttcatgatggcaagcagaagattcacagcctcatcagctctccaaatccggccatcgtgacgggacttagcatcaggaataataagttgggtctacccgtggcctaccgtaacaaaacacgcgccaaagtccacaattgcgtgcaacagtatagagctgggcaccagactgccgcagagtaccactctctgcacaacagtactttgggggatataacactgctaaagcgactgaagtataagtgcgctgacacctacgaggaaaagctgcggtcatgtctcccaacctatcaccctaaaaaagctcagcagctccgaagggcttgtgaggatctggccataaagattcggccctcctcagtagcgtccttaactagacggttccacgtgctcatgcattgtctaaccgtgctgcagcgaactaaaccggatctggcagcagccctgagaacattgctgcgcacttcatacgccaaggccatttcgaatgaatga

SEQ ID NO: 10954 - RNA, 1170 nt, synthetic construct
  source 1..1170: mol_type = other RNA
atgaaccgaattactttcgctagccggcctattgctagtagggcggctctggcgaaaacattgagtctagacgagcgcgtgctccgccagttggagcagaacgtgaacgcactttacctatcctttgagcgcccaaaaaagcatggggaaggcatgagatccatcaccgccccgaaacccgccttaatgcaggtccagagacgcattaatacacggatattctctggctgcaagtttccgagatatttgcacggcagcatcaaagacctggaagcacctagggattttctcaccaatgcatccgaacacaaagccgccgagcacgttataactctggacatcaaaaacttctatcccagtatcgagcgcgaagtggttttcaaaatcttcaagtacctcctgaggtttcctgacgaggtggcgacctctctaaccagtcttgtgaccctggacggcgtagtgccacaaggggcacctacgtcgtcgttcatagcgaacatggtcttctacgatcgcgagcccaagctcgtggaagaattcatccggtcaggggtgcggtataccagacttctggatgatatcacactgtcattcagcaacaggatttcttccgagaagctgaagggtgaggtgattggaaaggttagagctatgtgcagcgaaaagggatttaagttgcacgatgggaaacaacgaatacatgccctgatctcttctccaaacccagcaattgtgactggtgtcagcattcgaaatggacgggtggggcttccccccgtatacagggacaagactcgcgccaaggttcacacatgtgtcaaacagtttgacgccggacatcagacggccgctgagtatcataggctccacaattcagctctcggcgacgtcactcttctgaagagactgaattatagctgcgccgaggcttacgccgaaaagctccggtcctgtctgcctacatacagccccaaaaaagctcggcaacttaggagaatgtgcgaggatctggcaatgaaaatgcgtcctacatccgtggccgctttaacgagacgttttcacgtactgatgcattgtttaaccgtcctgggcaggacaaagccaaatcaggcacggactctgcgaaccttgctccgtacctcacacgccaaggccatctctaatggttga

SEQ ID NO: 10955 - RNA, 1020 nt, synthetic construct
  source 1..1020: mol_type = other RNA
atgaggagtctgtcagagcccattctgctccttaagattctgcagaaacggatccttaacaggatcttctgccatatcaagtttcctcactacctgcacggcggtatcaaagcaaccaaccccagagacttccactccaatgctagcgcacacttaggggcggaggtggccatcacactagatatcaaaagcttttttccaaacgtcacatccatggtcgttgaaaactccttcctgaggctgttccagtttcctgacgaggtcgcgaccgtgttggccaagttgacgatgctaaataatcagttaccacagggtgcccccaccagcagctgcattagcaacatcattctgttcgatagggaatacaagatagctgccaacctggaggcccaaggattccagtatactcggctgattgatgacattactatttcgagcaagaagaagatttcctccgaaagagtttcaaaggtcatagatatcatcgcaaaaatgctgggacactacgggcttaagatccatccagacaaaacacacgtacggtctaagggcaatcctctggacctgatgactattaccgggctgtggataaaccggggcagccctaagctcgaccgaaaaaaatgctttgagatatcttgtgaggttatccagctgaagcgcgaggctcttaaaaacggggtgaatgaggtgaaataccatacacgttacagttctgttgccggaaaggtggctctcctcgaacgtttgaaccattctcgcgccacacgcctcaagctaatcttggataccattctgccaacctataataattatgacgtggcaaaagtcgctaacttagtgtcaaagttctgtaagaatcaacgagattccaacagtatcggctatctcaaaaagttttatcagctccagcatgctgtgtctatagtgaagagaacgcacgtacccaccgcaaaaagtttgcaagccctccttaatatcagacgcccgaaaaggactatgtcagaattctacggctga

SEQ ID NO: 10956 - RNA, 1179 nt, synthetic construct
  source 1..1179: mol_type = other RNA
atggcctctaagcataaaatttactacgatggactcccaattgggtctatcaaaacccttgcgaagactctgtcatgcacagaagctcgcttaatcaagatatcaacagacccaagcttcttttatactacttttctcaagaccgtcaaaaataagaatagggagcttagcgaacctaaccccgagttgaagctgatccagaagcgaatcgtgagtagaatctttaaccacatcaaattccctcactatttacatggcggtatcaaagccttggaccccagggatttccactccaacgccaaggctcactcaggagccgagactgccattacactggacatcaagaacttcttcccgtccattaaagctgaccaggtcgagaacctctttctgcatctgttcaagttccctcctaatgtgagcagtgtgatgtctaaactgacaactctaaataactgtatcccccaaggggctcccacttcaagttacataagcaatctgatccttactgaaaaagaatatcggattgcggccaagctcgagtcccagggctttatatacaccaggctgatcgacgatatcacaattagtagcaagaaagaactgcccgagaaaaagatcacccagataatcaccaatatcgcaggaatgcttacacattataacttcgagctccatcctgagaaagtacacatatattctcggtcaaatccagaaaagttaatggttatcaccggtctgtggctgaaccgcggcatgccaagaattgagaagtctcgcagactgcagatatccaatgatgtgattgctattgccaagctcgcaacaagctccaccgggacgtccgatgcaagttaccacgagaagtttaatgccgcttctggcaaagttgccttgctacaacgatttaagcacaccgaagcacggaggctcagggccatcctgaacgaaatccagccgacgtataatgattacgacaagtgcaagattaacaagctggctttccgttttttgaataaaaagacctccaaagagacgattggctatctgaagaaattttaccaattccagtaccgtgccagcattattaaaagaacagaccccgcactagcgaagcggattcaggaaaaacttaacttgaaccgcccaacttcgaccaaaaaggcattctacgagtga

SEQ ID NO: 10957 - RNA, 1176 nt, synthetic construct
  source 1..1176: mol_type = other RNA
atgactacccataagatcttttattctgctaagcctattgggagcatcgccaagctggccacagccttagggttcacagagagcttcctccgaagtgtgagcaacaggacgacagactactacaccgagtttgttaagagcgtgaaaggtaaagatagggaactgagcgagccaaagccccacctcaaaacactgcagaaaagaattaacacacgcatattctctcatgtgaaatttccttcatacctccacggcggtataaagaccatagatccacgagattttgtgaccaatgccagtcaacactgtaaatcagaaacggccatcaccctcgacatcaaaggctttttcccgtctatcaccacagcacaggtcgaaaacatcttccgtaatctgcttaatttcccgaacgaagtctcagcattgctggcgagcatagtcactcttaacggtttactgcctcagggcgctcccacatcctcctacatttctaacctcgtgatgtgggagaaagagtgcagacttgtgtcgaggtttgagggcagggggctgatttacacgcgcctcatagacgacatgactatttcgtccaaaacaagaatcccagaaaagctagtgactaagattatcgaagatgtagcgggaatgctccagcactacaattataccttgcatcccaagaagaagaacattttcagtaaacgtgatcccgagcacctgatgttgataaccggattatggctaaatcggggggcccccaagctactgaaggaaaaacgggcagaaatctctcatggagtgattgctgctacccacatggcttctgagcctgacatgatcttcaatcctaaatatcacgccatccatgccacctgttccgggaaggtagccctgcttcagcgccttggccacactcgagcgatcagactgcggaatatcttgaattccattgagccacaattctccccacagtattgccaccgcatttcagttgttgtccggaaattttacgcaaagggcagggtcaagaacgatctgggaagtctgaaaatcttctatgagtttcagcataaggtgagcattgttaaacggactgaccctatcctggctaagaagctccagatctatctgaacgcaattcgcccccaagccactatgagagagttgaacggatga

SEQ ID NO: 10958 - RNA, 1185 nt, synthetic construct
  source 1..1185: mol_type = other RNA
atggccacctacgacaagatttactatgagtcaaacccaataggctctgtcgctgccctggcgaaatcactcgacgtcgcagagtcccgtctgctgcaggtggctgccgacatccaatcgttttatcacatcttcgagaaaacggtgggcaagaagaccagacagttatgcaatcctaacgacgaactgaaacgccttcaaaagaaggtggtcagtaggatctttgcacatctggtttttccaccgtacctgcatggcggaatcaaagccgaggatcctagggattttttgagcaacgctggggtacacgtgggagcccatgtggccatcgccattgacgtgaaggactttttcccttcaatctccgagcagtctattgcccaagcgttcaaactgctgttcagattccccaaggaggtagctgagatcctggctaaacttaccaccttaaatgggtttgttccacagggcgcccctactagcacctaccttagtaacgtggtgatgttcgacaaagagtataggctggtggctcgcctaagggcaaaaggcctccgttacagcagactgatcgacgatattacaatcagttcagagaagagcatgatgccctccgagattgatagggtcacaactgatgtaattaaaatgctgcgagcctataacttttatcatcacgaagccaaataccggatcctaacaagaagcaaccccaaggacttgatgatggtgacaggactgtggctcaatagaggggcaccccgcgtggctcggaagaagagagaagatattgccgcccacgtggtccagttgtctaagcgcgcacttgagaatcacgcgcgagaagatgagtcctaccatcaggaattccacgcgttatctggtaaggttgcactcctacagcgggtcggacaccgagaagcttcccggctgagatctatactccgcgaaattaagccgatatatggtgagcaggaactgaggaggcttcggaaaattatccccgcattttgtgaaaaggtgatagaccgaagcaagttggggtacataaaaaagttctatcgtttccagtactgcgttggtatcgtccggaattcccacccaaagctcgctgcaactctccaagccagtctcaatagcgttcgccctactaaaacgctgcgggaattggatgagcatgaatga

SEQ ID NO: 10959 - RNA, 1173 nt, synthetic construct
  source 1..1173: mol_type = other RNA
atgagacagaatcacaagatagtgtatgatgcttcttccatcggctctctgcaggttctggccaagacccttgacatcagcgtgcaccgcatccagaagattgcaagcgtccagacggacttttacacaattttcgagaagcaggtgaaaaataagatccgagagttagcagaaccaaaagccgaactcaagattattcacaagcggattatcagccgaatcttctcccatttcagatttccacactatctgcacggggggatcaaagctgacacccccagagatttcatctccaacgctagcgctcacgccgcttgcaaaacagcgatcgctatggacataaaatctttttaccccagcattacatacgaacatgtgtatcaaatgttcctgcggttgtgcaagtttccccctcaggtcagtgaggcacttgcaggcctgactaccttgaacggatcagtgccacaaggcgccccaacatcaagttacattgcgaacctcgtgatttgggaccgcgagtataagctagcgtcccttttcgagcagaagggtttcgtatatactcggctcatagatgacatcaccgtatctaccgaaaaaagcatgtcgaaagaggccatcgagaacgtgattaagctggtaagcagtatgctagtgaattacggattcaaaattcaccctgataaaactcagatttactccaagtcaaatcccgaaaaacttatgctgatcacgggcctctggctgaacagaggcatgcctcgtttggatgctgataagcgggtgaaaatatccgcctcggttacacgcctcaccaaaaacggggtcaaagattgtgtgtcagacgaatatcaccaacaacatagtaagctggccggtcaggtcgccctcctgaaaaggctgaagcatgttgaagccggacagttacgcaaactgctggacgcaactccgccgatattcgagcattcaaagatcgccaagatccagaaggtggtgaagatgtttgtcagaaaagagattgactcctctaagctcggatacctgcagcgtttttttcatcttcagcatcaagttagcatagtcaagaggaccaatcctaggatcgcacggcagttacagatcatgttgaataaaaggaggcccacatctactaaggagagtcactacgcctga

SEQ ID NO: 10960 - RNA, 1026 nt, synthetic construct
  source 1..1026: mol_type = other RNA
atgatcaagccacagcttttctactaccccctggccgggatccaatctattgagtcacttgccaagcatctggatattgacttagacaaactcacctatttgttggaaaacatcaactctcagtatattggcccaatctttatcaaaaagagcaatggtggtagcagacccatttacaggtgccgtccccaactgaagtacttcctgaagcggctgaacagtaaagtgtttaagttggtgcactatcctaacttcctgtatggagccttgcctaataaaagcatttataccaatgcgagccaacacctcaatgctaaggtcatgtgtaatttcgacatcaaatcgtactttaccactattacgtttgatcacgtgttcgatatcttcaagaattttttccacttctccaccgaggtgtctaacattcttgccacattaacaacgataaacaatcaagtgccgcagggctccccttgctccacttacatagccaatcttgttttttaccgctccgaggtcaatgtggcaaacaaactgaaagacaagaactacgtttataccagattcatagatgacatcactgtttcatctcagtacaaaaaaaccaagaaggacatcgaagaggtacatacaatcgtgatcgggatgattcgcgcttataagtttagcctgcagactgagaagcggagcattgctccctcacataaatgccagattctaacagtcaatcagatcaatatcgtcaaatccaacctcagtatttcaaaagaaaaccggaagaagataagagctgcagtccacgaactcaaatgtaatctgaacgataacaacatagagtttgtagtgaagaacttcgaaagtgtttatgggcgagtgcagtacctgaaaaatatccatattaaggaagcacagggcatgctgaaacagctagagcaaataaggagtaaaatcctcaagccactccagatttacaagtatcgaaagttaaaggaggccatcaggaagaaacagggatacaagctgtga

SEQ ID NO: 10961 - RNA, 1056 nt, synthetic construct
  source 1..1056: mol_type = other RNA
atgctgaatctgcaattcaaatacccactggctgctgtacagtccatcgagagcctggcgaagcatttgaatatcgactgcaacacaataatctacttattggagaacatcgactttctctacgaaggcccaataccaatactaaagtccaatggaaaaactaggcccatctatctgtgtaaacccagactcaaatacttcattaagcgcttgaacagcaagatttttaaagtggtgagctaccccgattttttgtatggggccctaccaaacagagatacatacaccaacgtctcacagcatctgaacgccaaggtgatctgcaactttgacatcgaatctttcttcactgcgattacatatgagcatgttttcgatatcttcaagaacttctttcacttctcggctgaagtcagccaagtactggcaaagctgacaacggtcaataaccaagtacctcagggttccccttgtagttcttacattgccaatctcgtgttctacagaagcgaggtcaatgttgtgcagaagctccggaataagaattttgtgtacacccggtttatcgacgatatttctgtgtccagcctttcaaaaaaaaaaaagaaggacatcgaggaagtccaccgaatcgtgataggaatgattagagcctatcagttcagtcttcagactgagaagatctctattgccccttcccataaaacccagagcctcaccgtgaataagatcaacatagtcaaaagtaggctttccatccctaaaaaaaagcgcgcaaatattcgagctgccctgtaccagctggaacagcacttccaggaaaaagacatgaaatttgtggtgaagaactttgagtcagttcagggcaaggttcagtatctctctaagtttcacccgaagattgcagataagatgatgaaaaggctggagaagatccacattaaaattgcacaacccctgaatcactataagaggaaccgtcttaaaagtgatattcgcaagtatcggaacattaacttcatacggaataaatcagccttaaccgagaagatctga

SEQ ID NO: 10962 - RNA, 1020 nt, synthetic construct
  source 1..1020: mol_type = other RNA
atgtcccccagcgcaaccagtgcgccatcttacagccagcgtagaattggaacactgcaggccctgcacgttcctttggggttaccagccagcgatttgctggccctggccgaaagggctgacggactatatcgagtagctaaacgcataacaaagccagacgggagtattagaatcgcatacgacacactggatccactgaagggagtacatcggagagtgaaaagtcagattctagaccacgtgtcctatcccgcctacctcactggttcaatcaagggctgtgacgcaaaagtgaacgcttcccttcacgctcgcgctcggattgttatcaacgaggatattagcggctttttcccttcaacatctgctgacagggttttcagtatatggcacaatttcttcggcttttccgaggaagtcgctagatgcctgacgcgtctcaccactcgacacggggaactcccccaaggagccatcactagctcattcctggccaatttagtattttggcgcgacgaacctgccctgcatgacaagttcgcggcacaggggcttgtgtactctaggtacgtcgatgatatcgccgtgtctagtaaaacatttttgaccaacaaggagaaaaccgacgtcatccgtcaggtctatggaatgctccttaagcacggctaccgcgctaaaagagcaaaacatgagatcgccacttctgcccgccggatggcagtgaccaaactggcggttaacagcaagcctggtctggatggcgcaaccagagacaagacgagggcagtggtgcaagctgtcgagcagaggtccgcccaaggcgaagtgttgtcgtttgatcggggtccttatgctcaggccatgggcaaggtgctccatttagagcggtttcatccgggtgatgcggctcccctgaagcgaaggcttctcgcactgaaggaggccgccgcctcaataaccagctcccacccctctacttggcggccgaatgagaagaaactcgggtcccactcatga

SEQ ID NO: 10963 - RNA, 972 nt, synthetic construct
  source 1..972: mol_type = other RNA
atgtcacaatcagctaccaacgccccctcttattcccagaggcgaatcggcactctccaggctctgcatgtggccctgggaatgccagtgggggatctgcccacccttgcagaacgcgccaatgacctgtacagggtagccaagagcatcaccaagccggacggaagtattagaaatacctacgacgctagagagcccctgaaagaggtgcaccgaaggatcaaaagtcagattctggatcacgtcaactaccctgcatatctcacaggatcaattaagggctgtgattacaaggtgaatgcgtcactccacgcacgggctcgcatagtcattaacgaggacataagcgggttttttccaagcacgtccgccgatcgggtatttagcatctggcgggggtttttcggattctctgaagacgtggcaaggtgcctcacccagctaaccactcgacacggtgagcttccccagggcgcaattacatctagcttcttggcaaacctggttttctggtgggacgagcctgaactgtttggcaaattcgccgcacaggggttagtttattcgcgttatgtagatgacatcgcggtgtcttccaaaacttttttgacaaatgaggctaagacaaacgttgttagacaggtctacggtatgctattgaagcatggctataaagctaagcgcgctaagcatgagatagccacaagtggctccagaatggctgtcactaaactggccgtgaacaataagccaggtctggacaaggccacgcggaataagatccgtgcagtggtccatgccgtggaaagacggatcgcacaaggcgaagcgctcagcttcgaacgcgggccttacgcccaggctatggggcaagtgcttcacttggagaggttccacccaggtgatgctgcccctctgaaacgcaggcttctggccctcaaagaggccggagcggccttaccgcattcctga

SEQ ID NO: 10964 - RNA, 996 nt, synthetic construct
  source 1..996: mol_type = other RNA
atgtccccgtccgctacctctgccccgttctactctcagcggcgaatcgggactttgcacgcactccaggtaccactgggcaggtcagtcagcgaactgctggtgcttgcgaccagggcagattccctgtatcgtgtcgctaagagtatgacgaaggcggatggcactattcgtaacacctatgatgccctggagcctctcaaagaagttcacaggagaatcaagggccaaatactggaccacgtgaactacccagcctacctgactggaagcatcaagggaactgactataaagttaatgcaagccttcatgtgcgcgccaaaatcgtgattaatgaggatatttccgggtttttcccatccacttcggctgatcgcgtcttttcaatctggaggggcttctttgggttctctgaagacgtggcgcagtgcctaacccaactaacaacaaaacacggagagctcccccagggtgctattacctctagctttctcgccaacttagtcttttggcgagacgagcctgccttgagagctcggtttgcagcccagggactggtatattcacgatacgtggacgatatcgctgtaagtagcaaggctttcttaacagacgaggagaagagtgacgtggtgcgccacgtgtacgggatgctgcgcgaacacgggtatcagcccaagcgcgctaaacacgagattgctaccgcgggaacacggatggctgttaccaaacttgccgttaacgccaagcccggcttggacaagtctgctagatcaaggataagggccgtcgtccatgcagtggagcagagagtggccagtggcgaagccctgagcctggaaagaggtccctacgcccaagccatgggccaggtgagacatttggaacggttccatcctggtgaggccgcccctctcaaacaacggcttctggcactcaagaaagcaacgaagccccagagcccaaattccgatgaccatgcagagacagcatga

SEQ ID NO: 10965 - RNA, 984 nt, synthetic construct
  source 1..984: mol_type = other RNA
atgaatcctagtgccacaaatgcaccatcctatcgacaacggcgaataggatcactcgaagcgctacacaacagcttgggccttcctgcctccaacctcctggcccttgctgaaagggccaatattctctatcgggtggcaaagtctatcaccaaagccgatggctccatcagaaacacttatgacgcgctggaaccgttaaaggagacacaccgtcgtattaagagccagatcttggatcacgtgtcgtttcccgcttacctgaccggcagcattaagggatgcgattacaagaccaatgctaccttacacgttggagctaggattctcataaacgaggacataagtggtttctttccttccacctccgcagaccgcgtgttcaacgtgtggcattgctttttcggcttcagtaaagctgtagctcaatgtctcactctgctgacgacacgacatggtgagctgccacagggagccatcacatcctcattcctggccaatctggtgttttggcaggatgagccaactctgcacgctaaactggcgagtcagggccttatttactcccgctacgttgacgacatcgcagtatctagtaaatcatttttgactgacgaggagaagtctaaggccgtcagacatgtctatgggatgctcctgaaacatgggtaccagccaaaacgggctaagcacgaaatcagcacatctgcaacccggatggcagtgaccaagcttgccattaactcaaagcctggccttgatagagccacgaggtctaggatccgcgccatcgtccacgcagttgagaggaggttcgagttgggtgaagtgctaagcttcgatcaggggccctacgcgaaagccatgggacaggtgagacacctggagcgctttcatcccggggaagcagcccccctgaagaatcggctcctggctttaaaaagcattagcagaacacgctctcggcatagaaaagtcgaatga

SEQ ID NO: 10966 - RNA, 960 nt, synthetic construct
  source 1..960: mol_type = other RNA
atgtcacccccagccacgagcgcaccgagctactctcagcgccggatcgggaccttaaacgccctgagactacccctggggctctccgtggacgagctgttatcactcgctcagcgtgcggacggcttgtatagagtcgcgaagagtataaccaagccagatgggtctatccggaacacatacgacgcccttgcccctctcaaggctgtgcaccggcgaatcaaatcccagatcctggaccacgtggtgtatcccgcctacctcactgggagcatcaaaggttctgattataaagtcaatgctagtctgcatacatccgcacgcatagtcattaatgaggacatttctggttttttccccagtacaagcgcagaacacgttttcaacatttggcacggacttttcggattctcccaggaagtatcacaatgcctgactcagttgactacccgtcaaggcgagcttccacaaggcgccattacgagttcgtttctggcaaaccttgttttttggcaggatgagccgacattgcatgctagattcgccgccgaaggcctggtctactcaaggtatgttgatgacattgccgtgtcttcgaaaacctttctatctaatcaggagaaatccgaggtgatgagaaagatttacggtatgcttctcaaacacgggtaccagcccaagcgcgcaaaacatgagatctccacaagcgggactaggatggaagtcaccaaactgagcgtgaatgctaagccaggcctgggaaaggcagtatacagcaagacccgagctgctgttcgggatatcgaagagagaatagccttgggtgaggtgctgtcctttgaacggggcccttatgcacaggcgatgggaagggtgctccacctcgagaggttccatcctggcaaggcggcccctctgaaacgcaggctgttagctctgaaggaaggagccaagacttga

SEQ ID NO: 10967 - RNA, 960 nt, synthetic construct
  source 1..960: mol_type = other RNA
atgaatctgcaggcaacgagtgcaccctcttactcccagcatcgtattggtaccctgaacagccttcggttgccgttaggactcagtgtcgacaaattgttatctctggcccagagagccgactctctctatcgcgtggcaaaaagcatcactaagcctgatggtagtatcaggaacacctatgacgctgtggcctccctaaaagccgttcaccggcgcattaagagccagatcctggatcacgtaatctatccagcttacctgactggcagtataaagggaagcgactacaaagtcaacgcagctctgcacactaatgccagaatcgtgatcaatgaggacatttctggcttcttccccgcaacctccacggagcatgtgttcaacatctggtatggacttttcggattttctcaggaggtgtcacagtgccttacacagctcaccactcgacaaggcgagctgcctcaaggcgcgattacatcaagctttctggctaacctggtgttttggcaggatgaacctaccctccatgccgagtttgctgcccagggcctggtctacagccgctatgttgacgatattgccgtgtcgtccaagacatttctgtccaacaaggagaaatcagaggtagtaaggcagatttacggtatgttgttgaagcacggctaccagcccaaacgaacaaaacacgaaataagcacctccgggacaaggatggaggtgactaagctctcagtcaatgcgaagcccgggctcggtaaggccgtgtattctaaaaccagggctgcagttcacgatatagaaagacggatcgccaatggggaagtcctgtcgttcgaaagaggaccttacgcgcaagtgatgggccgcgttctgcatctagaacgtttccatccagggaaggccgctccactgaaaaagcggttactcgctcttcaagaggggacaaagacctga

SEQ ID NO: 10968 - RNA, 960 nt, synthetic construct
  source 1..960: mol_type = other RNA
atgtctctgtccgccatctccgcccctttatacagacagagacggattggcactctacacgccttgcacgtgccgctagggctctctgtggacgagttgctttcgcttgcaaagagggcagatggtctgtaccgcgtggccaaatccattgcgaaacccgacggaagtatacgcaatacatatgacgctctggcgcctttgaaagaagtacaccgacggataaagtcccaaattttggatcatgtggattatcccgcatatctgaccggtagtatcaagggatcagattacaaggtcaatgccgctctgcatagcaacgcacgcatagtcatcaatgaggatatcagcggctttttccccagcacgagtgccgaactggtcttcaaggtttggaacggacttttcggtttctcacaggatgtttcccagtgcctaacacaactcacaaccagacaaggcgaactgccccagggcgccattacttcttcgtttctggcaaacttggtgttctggcaggacgaaccaatacttcataccaagctggccagccagggtctgatctacagcagatatgtggacgacattgctgtgtctagtaaagcctttctgaccaatcaggagaagagcgaggtaatgaggcagatctacgggatgctgcttaaattaggctaccagccaaagcgagccaaacacgagatctccacatctggggctagaatggaagtcacgaagctgtcagtgaacgcgaagccagggttaggaaaggccgtctactctcgtactcgtgccgcagtgagggacattgagctccgcatttccaacggcgaaatcctctcatttgagcgggggccttatgctcaagctatgggacgggttctgcatctcgagaggtttcaccctggcaaagcggctccactcaagaagaggctcatcgctctgaaagagagcgcaaaaacctga

SEQ ID NO: 10969 - RNA, 972 nt, synthetic construct
  source 1..972: mol_type = other RNA
atgattcacaccccgagcgattcccccttctattccaagaggagaatttcaagcatgaccgctctgtccaaggcccttaacatcagtcccattgaactgttaaatcttgcgaaccgcgccgaccatatgtataggctcgcatccacaattacgaaacctgatgggagtacaaggcagacttgggacgcttacgcgccactgaaaaaggtgcagcggaacataagaaggaatatactggactacgttgtgtatccggcatatctcaccggaagcctaaaggggtgcgattacaaggttaatgcctccttgcacgtcggcgccactattgtcatcaatgaagatatcacccggttctttccatcaactagcacggcaatcgtgcagtcaatctggcgatatttttttggtttttcacacgaggtggcagagtgcctcaccaagctaacaacccggcagggagagctgccacaaggcgctattacaagtagcttcttggctaacctggccttctggaaggacgagcccgccttgcaggcatctttccgcgctcgcgggataatctactctagatacgtcgacgatatcgctgttagctctgtgaattttctggataaaccagccaagaccaatgtaatagcctctatctacggtatgctctccaggcatggctatcagcccaagagagcaaagcatgagatcagaacttctggtcaacgcatggaagtgactaaattaagtgtaaactcgaagcctgggatctctagtgcaaaacagagccagattcgttcagctgtgcatcacctggaacaagccatcctccggggcgagattattgaattcgacaaaggaccttacgcccaaacactgggactggtccacctgcttgctcgatttcaccctggcaaagcgaagaaacttaagcagcgtctcttggccctgaaatccagcggctgtacaaacatgtacacctga

SEQ ID NO: 10970 - RNA, 972 nt, synthetic construct
  source 1..972: mol_type = other RNA
atgatccatacaccgtccgacagccctttttacagcaaacgccgcatttccagcatgaccgcactttcaaaggctctcaatatctctccaattgaattgctgaacctggcgaatagggccgatcacatgtatcgcctcgccaattctattaccaaacccgatggaagcactaggcagacctgggacgcctacgctccactgaaaaaggttcagagaaacataagacacaacatactggattacgtcgtttaccctgcctatcttacaggctcccttaaagggtgtgactacaaaacaaacgcaacactgcatgccggctcatccatcgtaattaacgaagacattaccctgttcttcccatcaacgtccgatacgattgtccacaatatctggcagcacttttttggtttcggaaacgaggtcgctgagtgcttgaccaagctgactacaaggcagggcgagcttccccaaggggccattacctctagtttcctcgcgaacttggtgttttggaaggacgagcctatcctccaagccagttttagagccagagggattatttacagccgatatgtggacgatatcgcggttagcagtgtgaactttctagataagcctaccaagactaatgtgatagcaagtatctatgggatgctctctcggcacggctaccagccaaagcgggctaagcatgaaatcaggacttctgggcagcgtatggaggtgacaaaattaagcgtaaattctaagcccggcttgagttcagctaaaaaatcccagatacgttcagcagtgtatcatcttgaacaggccatcctccgaggagaaatcatcgagttcgacaagggcccgtacgcacagactctgggtttagtgcacctgctggcacggttccattccggaaaggccaagaagctgaaacaacggctgctagctctgaaatcggctggtcacgccaatatgtatccctga

SEQ ID NO: 10971 - RNA, 972 nt, synthetic construct
  source 1..972: mol_type = other RNA
atgaatcacataccttctgattccccgttttattgtaggcggagaatttccaatatggcagccttgagcaaagcattaaatacttctctggacgagctgaactcactggcacgtagagccgatcagatgtatcggctcgcctccagcctgacaaagcctgatggtagtgtgagacagacctgggatgcatatgaaccactcaagaaggtgcagcgcagtatcaggtgtaacattttggataatgtggtgtaccccgcgtacctgaccggaagcctcaaaggatgcgattacaaggttaacgcttctcttcatattggcgcgaaaatcgtcatcaatgaggacattacatgcttcttcccctcgacaagcgccaccattgtccagaatatctggcgaaactttttcgggttcggaaaggaggtggccgagtgcctgacaaggctaaccactcggcaggaggaacttcctcagggcgctataacctcatcttttttggcaaatctagctttttggaaggacgaacccgttttacaggctagcttacgagcccgagggctgatctattctcgctacgtcgacgacatagccgtgagcagtgttaacttcctcgacaactccgccaagtcagcggtgatcgcttgtgtatacgggatgctgttcagacacggttatcgcccaaaacgcacgaagcatgaaatcaaaacgtcgggcgagaggatggaagtaactcggctgtccgtgaattcaaaaccaggtctttctgcttcccgtcaaagccagatccggagtgccgtcaaccacctcgaacaagcttttctgcggggcgagattattgaatttggcaaggggccatacgcccaaactctgggccaggtccatcttctggcaagattccaccccggaaaagccgagaagttgaagcaaaggctgagggctctcaagaaaatggagcgcatgaacaaatgcccttga

SEQ ID NO: 10972 - RNA, 972 nt, synthetic construct
  source 1..972: mol_type = other RNA
atgaagcataccctccctgacggcccattctacagtagaaggagaattcactccatggcaagcctcgccaaagccttaaacattcctgcttctgagctgatttcactggcttgccgcgcagatcgcatgtacagactggcaaacaacatccctaaggctgatggatccgtgaggcaaacttgggacgctcatgagcccttgaagaagatacacaggtctatacggcggaatatccttgaccacgtgacttatccctactatttgacggggtcactgaaaggatgcgactataaggtcaatgcctctctgcacgccggtgcaacaatcgttatcaacgaagacattacaggatttttcccaggtacctccgccgccgtagtccattgtatctggcggaatttcttctgctttggccaggatgtcgccgactgtctgacccgattaacaacaagacacggcgagctgcctcagggggccattaccagcagtttcctggcaaatcttgcgttctgggatgccgaatccgctctccatagcagttttaaggctcgcgggttaatctatagccgttacgtggatgacatcgccgtgtcctcagaaacatttctggataacagcaccaaaaccgaggtgatagctagcctctatggcatgctcttccgccatggataccgtccgaagcgcactaaacacgagattaggacgtctggggagagaatggatgttaccaagctttcagtgaattcgaaacccgggctatccacttcgcggcagagccagatccgatccgcggtaaatcacattgaacaagcgttcttgaggggagagatcacagtgtttgactctggcccatacgcacagactctaggccaggttcatctgctggctcgatttcaccccggtaaagcagaaaaattgaaacaacggctgctggccctcaagaagcttgcccagagtaacaagtgttcttga

SEQ ID NO: 10973 - RNA, 963 nt, synthetic construct
  source 1..963: mol_type = other RNA
atgaaccccgtacttagtgacgcaccgttctaccgcagacgccgaattggctctgtggcctccctcgccaaagcgctgtccgttaaggaggatgaattattctcactggccgctcgggccgatcagatgtacagactcgcctcttctgtgcttaagcctgacgggtctgtccgccagacttgggatgctcgggagcctctgaagtctctccatcgaagtattagacggaatattcttgacctcgtcgcatggccctcgtatttgaccggcagccttaaaggttgcgactataaagttaatgcaagcctgcatgccggcgctaggatagtcatcagcgaggatatcagcggattctttccagctaccacagaggcaattgtgcggcacatatggcgcgggttctttggattcagtcaggatgtggcggattgcctcacaaggctaacgactagacatggagccttacctcagggggccatcacatccagctttctggctaacctggcgttctgggacgtcgagccagaactgcaggctggcttccgcgctagggggctaatctactcccgctatgttgacgacattgatgtgtcttcctatacatttttggacaatcacgcaaaagccgccatcatcgcagatatttacggcatgctgtttcgtaggggttatcagcccaaaagagccaagcacgaaatcactacctccggccagagaatggaagtgaccaaactctcagtgaacagccggccagggttgaccgctagtaagcaatcgcagatacgttcagccgtgtaccacgccgagcaggcattcttaaggggagagatcacttgttttgactcaggcatttacgccatcacgctgggacaagtaaacctgctggcacggtttcaccccggtaaggctgagaagctgctgcaacgaatgcgtgcgttgaggaataagagcgaagaatcctga

SEQ ID NO: 10974 - RNA, 969 nt, synthetic construct
  source 1..969: mol_type = other RNA
atgaatccttctaccattctgcccagatacaaacgacagcggatagcatccttagacgcactgcaggcagctctcggcgttagcatcgagcagctccagtcactggcggaacacgctgacaacagctacagggtcgcgaagtctgttattaaaccagatggatccactcgccatacatacgatgccttcaaacccctcaaggatattcaccgtaaaatcaagaaccacattctcgatcatgtggcctatccttcctatctgactggcagtataaagggttgcgactataaagtgaacgctgagattcacacccaggctaagattgtcatctcggaggacataacggcgttctttccctcaactaccgccaaaaaagtatttaaaatctggcgtgacttctttggttttaactccgatgtggcaagatgtcttactcggctgaccacaaggaaaaatgaactgccacaaggcgcaatcacgtcttctttcttggccaatcttgtgttctggcagagtgagcctttcttatacgaacaattctctatgcggcatctcaagtactcccggtatgtggacgacatcgtcgttagcagcaagtccttcttggacgatgtagagaagacagaggtgatccgccaaatatacggcatgctgctgaccaatgggtaccacccaaagagagctaagcacgaaatttcaacaagtgcctcgcgaatggaagtcactaagcttgccgtgaatattaaaccgggactgaagaaggccaaaaaaagcatgatccgcgcagccgtccacagactggagacattgatcagcgaggggaaggaaatcagttttgagagcggcgattttgtggaggttatggggcaggtgcagcatatgaagaggtttcatcccggaaaggctgaagccttgattaagaggctaaacaccctaaagctgtcatatatcgtgcttcacaacaaatga

SEQ ID NO: 10975 - RNA, 987 nt, synthetic construct
  source 1..987: mol_type = other RNA
atgcatttgtctaccatcaacgcgccttcctacaagaggaagaggatcgggactctagaagcattggcatacccactgggccttaacgctgccgctctggaagatctcgctcggagggcagacgcaatgtaccgactggccaaggagatagtaaaaccggatggttcagtacgccacacctatgatgctttcaaaccacttaaagttgtccatggtcggatcaagagggagattttagatcaggtggcatttccgctgtacttaactggcagcatcaagggacgggattacaaggtgaacgcgacactgcactcgcgggcgaaaattgtcataaatgaggacataagtgggtttttcccagcaacaacgagtcagcacgtcttcgacatttggcaccgcttttttggtttctccgaggccgtggcaagatgcctgacagacctcaccacttatcacggcgaactcccccaaggcgctatcacaagcccagctctcgctaatctggttttctggaggcgcgagccccagttacaggccgaatttgctgccaaaggatggacttatagcaggtacgtggacgatattgccgtgtcatccactattggcatggccccccatcaaaagacagaggccatcagaaaagtctacggactgctgagcgggtatggatataagcccaaacgaaataaacatgagattaccactgccgcccagcgcatggtggttaccaagctgtccatcaatgccaagcctggactggcccaatctgaacgtgaccgaattagagccgcggtgcacgaggtggagagactagtctcatctggcaacagcatctccacagacagtggggtgtatgccaaggcaatggggagagttaccacgctcgcccgtttccatcctggcgaagccgcaccactccggcagagactgcttcgggctaaacagacccttcagcctttgttgtctccttcaacccgcgctccctga

SEQ ID NO: 10976 - RNA, 999 nt, synthetic construct
  source 1..999: mol_type = other RNA
atgtccctaagcacctcaagcaattcacccttctacaagggtactcctatacgacaacgtacctcacttgccgcagccctcgggtccactttgcaccgaatagagtacgtggcgccacgcgccaataaactgtatcgcctggcccacgcagaactgaaatccgatggcacgatcagacagacatttgacgccaaacctctattgaaggacctgcataggaggatcaagactgaaatcctggatcgcgtgacttttcctgattatctgactggaagtctgaaaggacgcgactacaagtctaacgcagaactgcacgaaggggccgcaatcgtaattgctgaggacatagagaacttctttccgaatacaacctcggataaggtgttcgacatctggaggcatttcttccggtttagtgagccagtcgctcagttactgacctctctgactaccaaggacggggccttaccccaaggggccatcacaagcccacagcttgctaacctcgttttttggcgggatgagccccttttgcaggctaagctggccgccgacgatattacctatagccggtttgtcgacgacgtgacagtctctagtgtggtgccaatccccgccgagaataagacggagctggtcggagctatttacggcctcttgagacgtaacggtcttcagcccaagagagtaaagcacgagctgaaaacaaggagagaacgcatggctgttaccaaactcacagtcaacgataaggcaggcctgtccgcaaaagagagatcacgaattagagccgcggtgcatcggttagagctcaagggcgcgcaacagcttctcgaggctggtgaactggccagcgtgctaggcaaggttcaccatatggctaggttccacccaggcgaggcaaggcccctcaaagctcggctgttgaaaattagcgcccatggatgtgcagctaccccgtctgaacagtccccactccctccttgcagtgaaccttga

SEQ ID NO: 10977 - RNA, 951 nt, synthetic construct
  source 1..951: mol_type = other RNA
atgaacccctctccgtcggacagccctagttacaacggtaggcccatcagaagtattcagagcctagccaaggccgtgtactgtaagcctcagcggctggcttttgtgtccgagagagcatctgacttataccgggttgccaaggaagtgcccaaagcagatggaaccgttaggcgcacctacgatgccaaaaagttgctgaaggacattcacaggcttataaaaacagagatcctcgatcgagttgattttccaccttatctgacgggatccctgaaggggcaggactataaaagcaacgccgagatccacgtcggagctgctattgtcattgccgaagatattgggaatttcttcccatctactaccgcggagcgcgtgctagacatctggagaaacttcttcaggtttagtgcagaagtggcacaatgcttgactaatctgactacacggaataacgaactcccacagggcgcaattacctcaccccaactcgccaatctggtgttctggagaaatgagccacagctgcatgcacgctttaaagcggacggtgtcgactactcacgttttgtggatgacgtggttgcaagctctaagacacccatcacgccgaaaaagaagaccgagatcatagccgccatctatggcctgatgaagcgctccggctaccagccaaaaagacgaaagcatgaattgaaaacagctcgtgagcggatgacagtaactacccttaacgtcaacgacacagtggggatacctaaagaggaacgatcacggatccgcgccgctgtccacaggcttgaagggcttgtaacctccggtcggggcgaggtggatctgaagcatgagtatgcggtcgtagctggcaaggtgaataatctgggaaggttccaccctggcgaggctcgtactctcagagaaaggttagctgccctggatctctgctga

SEQ ID NO: 10978 - RNA, 948 nt, synthetic construct
  source 1..948: mol_type = other RNA
atgaatcgcctgccaacgtcaagtcccttatactccggccaagcaatccgacgaatcgagagcctgggcaaggccttgcggttctccccacagcggttgggatatctcgggaacaacgccgataggttgtatcggatcgcccatgagatcgaaaagtctgatgggagtaaacgggtaactttcgatgccaagccggctttgaaggaagtgcaccgtcggatcaagagcgagattctggatagggtcaccttcccactgtacctgaccggcagcattaaaggcagagattacaaaacaaacgccgagcttcacgtaggagccgccctggttattacagaggacatcggaagcttctttcctagcaccaccactgcacacgtctttgacgtctggagaaactttttcagattctctgacgaagtcgcgaggttactgacagctctgactacaaggaatggtgagctgcctcagggagcaattacttcgccacatctggcaaatcttgttttttggagggatgaacccgcactccacgacagattcgccgctgacggtattgtgtactctagattcgtggacgatattgccgcttcttccaagaccccgatacctcccgaacacaaaaacgagatagtgcgtctcatatttggactcatgcttagaaggggctataagcctaagcgcgagaaacacgacctgaaaaccgcggggcaacagatgactgtgacgaagctaaccgtgaatcagcttcccggcttacccaaggctgagcgcggtcgaatccgcgctgctgtggaccatctcgagcgcctcgcatcaaggggccctctcagtgccgaacagtggcgtgaacatgcgtcagtttccgggagagtgacacatctggcccgctttcacccaggggaagctgcaggtctaaaagcccggcttaaaatgctgcacccctga

SEQ ID NO: 10979 - RNA, 963 nt, synthetic construct
  source 1..963: mol_type = other RNA
atgaaccagtccaccactaactgtccttcatacgacgcaaagcccatccggctcatcactagcctggcgaaggccctggaaaccgacgaaaatcagctcctccttcttgcagacgaggctaatgagctctaccgtatagcaaaaaaaataagaaagcctgatgggtctttgcgcagaacctatgacgcattgccaaggctgaaagacattcagcggagaattaagtttcgtatcttggatagagtgacatttccatcgtatttaaccggttcccttaagggcagggattacaaagttaacgccgccctgcattctggtgctaaaatccttatcgccgaggatattggatcatttttccccagcacatcagcttccagggtgtttgacatctggaagaacttcttcgggttcggccacgaggtggcttgctgcctgactaagctgacgaccttacggaatgaactaccccaaggagcaataacaagtgcgcaccttgccaatctcgttttctggcgagaggagccgcagttgcggactcgtctggatcagtctggcattgtctatagtcgcttcgtcgatgatgtagctgtaagcagcagatctgtgatagaaccagctcaaaaaacagaggtggtgacatccatctacggaatgatgatccggcatggatatcgccccaaacgaaccaaacacgaactgcacacagccagaaaccgaatggtcgttacgaagttgaccgtcaacgctaagcctgggctggaaaagactgaaaggagtaagatcagggccatggtgcatgagttagagcgcctctccgaaagcctggacaatactcaagcgattctggaccgcctcaactcagtggccggcaagatcaatatgctgggccggtttcaccctgggaaggcccagagcctgaaaaagaggctgctagaggtcaaacagattattgcagcccgctga

SEQ ID NO: 10980 - RNA, 912 nt, synthetic construct
  source 1..912: mol_type = other RNA
atgctctccctggctcataaagccaacacaatgtacaggattgctaaggaggtggagaaaggcgacggtaccgttaggcgcacctttgacgcccaccgcccactcaaagatatccaccgtaggatcaagctggaaattctggataaggtggtgtttccagactatctgacgggctctatcaaggggagagactataaggttaatgccgcattacacgccggtgctaaaatagtgatttcagaagacatcggggctttcttccctagtactacagatgcaatagtctttgacatctggcatgggttttttggcttcagtcacgatgtggccacctgtttgacacggctcactacttataatggcgagctgccacaaggagcgattacctcccctcagctagccaaccttgtcttctggcgttctgaaccagtcatgtaccagcgcatggcggatatggggctgaaatacagccgatttgtagacgacattgcagtttcgtcccggctggtgatcgcccccgaagcaaagaccgtgatcattagtctgatctacggaatgatgttcagacagggctataggcctaagaggagcaagcatgacataagcacatctaaggatcggatgacggtgacaaaactcactgtgaatcacaaacctggccttgcctccagccagcgatctcaaataagagccgctgtccacgctctggagtgcaacttggctgttaaacagaccgccgatgtagcagcgaagttgccctcagtgattggaaaggtcatcatgcttcgccggttccatcccggagaggggctgagactaaaacaacggttagcagcaatccaggcttcccagtcaccgcagagagaatgcaaggccgagctccagttcggtcccttagccggaagcctgtga

SEQ ID NO: 10981 - RNA, 1041 nt, synthetic construct
  source 1..1041: mol_type = other RNA
atgattcacgtcaaccggctcgaagttccacgctatactgccaccccaattgaaagcatggcagccctatccagggccttgggcgttaccaaccagcacctggcggccgtagctgctaaggcaagctcgctgtatcgggtggcggataagattgaaaaggcagacggaacattacgcgaaacatttgacgctaaacccgtcctgaaagatatccaccgcagaattaaactcgccatcctggaccgagtgtcctttccaaattacttgaccgggagtgtgaaaggacaagactacaggactaacgctcttctgcatagaaattccaaaatcctgataagcgaggatatccaggggttcttcccctccacaacccagcatctcgtccaggagatttggtcccagttcttcggcttctcagccgatgtggcgcagtgtctaacggctctctgcacgaaagacggtgcccttcctcagggcgctataacatctcctcacattgccaacctggtgttctggagggttgagccggccattagagcagagatggcttttagaggcttgcggtattcacgatatgtggatgacgtttgcgtgtcttctagcaccggcattgcccatgcagataagcagtctgtaatctccgtgatctacgctatgctggctcggcatggctactccgctaagcgttcgaagcacaagatccagacagccagtgggaggatcactgccactaagctcggtgtcaatggtgatccctctttaagcggacagcaacgcgggcagatacgagcggcggtgcacaagctggagctgacctttgctgccggggcattttctgacgcacgtgccttgctgcctagcgtgaccggaagggtcagtatgctcgcacgctttcacagcactgagggacaagcccttaagcagagaatcgcctcagtaagggaacaactgttacttgtccccatggttaccagagccgatgacgcaacacataaagcaatccgggattcagtggacgacataagtactgtgccttggtga

SEQ ID NO: 10982 - RNA, 1035 nt, synthetic construct
  source 1..1035: mol_type = other RNA
atgatcctgatgaaccagatagaagtaccccggtataccgccgcacccattgaatctatggctgccctctcccgagccttaggggtcacatctgcacatctactcgccgtagcagcacgggccagcagtctttatagagtggcagagaaagtggagaaagccgacgggacttttcgcgagactttcgacgccaaacctgtcctaaaggacattcatcggcggatcaaaagtagcatcctggaccgggtggcattcccgagatacctgactggttccattaagggccaggattaccgcacgaacgcgctgctgcaccggaatagcaagattctgattagcgaggatatacaaggattcttcccctctacaggccagtgcctggtttacgaggtgtggtcacaattctttggcttttcggatgacgtttcaagatgtctgacctccctttgcgtgaaggatggcgtgttgccccaggggggaatcacaagcgcccatctggccaaccttgtgttttggcgcgtcgaaccagcagtgagggctgaactggcacgtttcggaattcgctatagcaggtatgtggatgatatctgtctctcatcccctgatgctatcggacacgaggacaagaagaaagtgatagcgctcgtctacgctatgctggctcgtcatgggtactccgccaagaggagtaaacacaatgttcaaacctcccgaggcaggattgtcgcgaccaaactcggtgttaatcgcgaaccaagcctctctagacagcagaggggacagatccgagccgcggttcacaagttagagagtttgtttgccgacggagatcttgacggcgtcagggaacgtttgccatccgcaggcggtagagtgagtatgttagggaggtttcacgctgccgagggggctgctctggctaagagactggcctctatcagacgcgcccttgacctcctgcctgtcatcagcaagacctcggctgtgatgtcacaggtgtcacactctgatttggacggcacagtaccttggtga

SEQ ID NO: 10983 - RNA, 1026 nt, synthetic construct
  source 1..1026: mol_type = other RNA
atggatctgtttttaatcaagccaagataccgggcttccccgatcaggagtatcgcagcactggcacgatctctccgctgggatgctctcgctctagtggatatggcggagcgcgctaatgggatgtggcggacagtgaaacctaaacccgggtctatccggcagaccttcgacgcgatgggaccactgaaggagattcaccagagcctgaagctaaatatctttagtaaggtggactttcctgagtatctccagggctctcttaaaggccgcgactacgtttccaacgcctcactccacaaagacaagcaaattttgatatgtgaagacgtcaagggcttttttccgagcgttggggcagcctatgtggaggacgtatggtgcggctttttcggcttcgccccagacgtagcgaagcttcttacgaaactgacgactaaggacgggtgcctgccccagggatgtattgccagctctttcctggctaacttggtgctgtggcgacatgaacctctgctgcacgctaaactagcccagcgtggtataacctactccaggtacgttgatgatatggttatgagtgccgccacacatctggataaggcaacccagacatgggtcatagcgcaagtctatgggatgctcgcccggcacaatctcaaggctagccgtaagaaacatgaagtcttcagcgccacacaacccatgattgcaactaaactgatcgtgaaccgcaaacccagtttgagccttaagaagcggtcacaggtcagagctcaagtgagacaactggaaattgcagtgggaaccggtctggatgccgaagagcttagagacttagccaataaagccgcccagcaggtgggccagttaggtaggttccataaaacccaggccgagcacctcaggaacagaatcgctatcgtgaggggaaccttgcctattgagcacccatcaatcattactgctccctccaacgcacctctctcgcaggagttgtccactggatccctgtcttcaaagtga

SEQ ID NO: 10984 - RNA, 1029 nt, synthetic construct
  source 1..1029: mol_type = other RNA
atggacttatttctgatcaaacctcggtatagggctagcccaatcaggagcatcgccgccttagccaggggacttaggtgggatgctaaggctctggtcgaactggcggagcgggctaacggtatgtggcggactgtcaaaccaaagccggggtctacccgccagacatttgatgccatggggcctttgaaagagattcataaaagactgaagctcaacatcttccccaaggtggattttccagaataccttcaagggagtctaaagggacgtgactacgtaaccaacgccagcttgcacaaagacaagcagattctcatttgtgaggatgttaaaggcttctttcccagtgtgtccgcggcctatgtggaggacgtgtggtgctcatttttcggattcgcaccggaggtggccaaactgctgactcagttgacgaccaaagacggctcctttcctcagggctctattgcaagctctttcctggcaaacctagtcatgtggcggtatgaaccgctcctccacgcaaagctcgcacagcgaggcataacctattcaagatacgttgacgatatggttatgtccgctgcaactcacctggataaggaaacacaaacatgggtcatagcccaggtgtacgggatgctggctcagcacggtctgagagctagccgtaagaagcatgaggtgttctcggcttcaaagcccatgatagccacgaagctgattgtaaatagaaaaccttccctctcccctaaaaagcgcagtcaagtgcggacacaggttaggcaattggagatcgcggccgcagacggagtgaatgctgaggagctttgggacctggccaataaggccgcacagcgagtcggacaattaggcagattccataaaacccccgcagcctctctcaagaaccgcattgccatcgtgcgcggtagtctgccccccgaaaatcagcccgcgatcaccgggcagactatcgctccactttaccaggaacaccctccaacaggcactgccccatgggaatga

SEQ ID NO: 10985 - RNA, 1029 nt, synthetic construct
  source 1..1029: mol_type = other RNA
atggatctgtatcccatcaagcctaggtacagatccaaccctgtgaaaagcatcgctgccttagcgagaggcctgaggtgggatgctcaatctctcgtagagctcgcagaccgagcaaatgggatgtggcgtaccgttaaacccaaacccgggtcaacccgccagacttttgatgcgatgggacagttgaaagaaatacatcagcggcttaagctgaacgtcttctccaaggtggactttcccgagtatctgcaaggtagcttgaagggtagagattacgtcactaatgcgtccatccataagggtaagcagattctgatttgtgaggacgtgaaaggcttttttccatctgtcagtgcagccttcgtagaagatgtgtggtgcggattctttcgtttcagtccggatgtggctaaactgctcacaaggctcaccaccaaggacggatatctacctcagggcgctattaccagcagcttcttagctaacttggtcatgtggcgctacgaaccctggctccacgccaagtttgcccaacgcggcataacttattcccgctacgttgacgacatggcaatgagctcggccacacatcttgacaaggagacacaaacatggatcatcgctcaggtctacgggatgcttgctcagcacggcctgaaggcgtctagaaagaagcacgaggtgttctcagcttcacagccgatgatcgcaactaagctgactgtaaatcgaaaaccatctctgagtccaaaaaagcagtctaaggtgaggactcgagtgcggcaactggagattgccgccacatccggagcaagcaccgatgaacttagggagctggccaacaaagcagcccagcaggtcggccagctagggagattccacaaaacgcccgcagccaaactgaagtcccgcattgccgttgtgcgggacaatctgtcaccagaggccttgagtgttaccacggctccagccaaagtgcggctagacaccgtgcctctcgtgacagatgcccggccttgggaatga

SEQ ID NO: 10986 - RNA, 1023 nt, synthetic construct
  source 1..1023: mol_type = other RNA
atgtcgctgtgcctcagtaaaccatcttatcaagctaaacctattcggagtattgccgccttagctcgggctcttaggtggggagaacaggcgctggtgcagcttgccgaccggtcagagtctatgtggagaacagttaagccacagcctgggtctacccgccagacattcgacgcaatgggtcagcttaaagagctgcacactaggctgaagttgcacatcttctcaaaggtggtctttccagactacctgcaaggaagtctggcaggacgcgattacgtgacgaatgcctccctgcacgcaaagaagaaaatccttatatgtgaggacgtcaagagattctttccttccgtcggcgccatttacatcgaacaggtgtggcgggattgcttaggcttcgcccccgatgtggctcgcttgctgaccaagctcactacaaagggcgggtatctgcctcaaggagccatcacgtcttcattcctagccaacttggtgctttggcgtcacgaacccctgctccacgctaaattaaaacagcgggggataagctactccaggtacgtggacgacatggcactcagcagcgcaagccacctggacaaggacacacagacatgggcaattgcgcaggtttatgggatgctagccaggcatgacctgaaagcctccagagacaagcacgatgtttttgcagctagcagacccatgatcgccaccaaactgatcgtgaaccatagtccctccctcggcgcgaaaaaacgctcacaggttcgagctcaggtcctccagttggaaatggccgccgcgagcgtggtggatgctgatcagattaggggcttggccaacaaggccgctcaacgtgtcggtcaactgggccgatttcataagaccgcagcagctcacctaaagtcccgcatcgccaccgtaagagatactctgactgcggattctagggtagcaataaccggggagcgagccgctcattgggagcatctcgagggtgaaaatccgtggagctattga

SEQ ID NO: 10987 - RNA, 1011 nt, synthetic construct
  source 1..1011: mol_type = other RNA
atgagcctctcactgagcaagcccatttacaaggccaaaccaattcgcagtttggcgtctctagccaaagctctcggtctggacgaaaaacgattgaaagaactggctctgaaagccgacacactctggagggcagtgaagcctgagcccggctccaccagacagacattcgacgcctatgaacccctgaaaagagtccacgaacggatcaagcgtagtatctttagcaaggtgtctttcccagcttatctacacgggtctttgaaggggtgtgattacgtgacaaacgcagcacttcataagggccaacaaatactgatttgcgaggatgtgaaatctttttttcctagcgttcagtccgtctacgtacgcgacgtgtgggcaggactcttcggtttctcgtccgaggtcgccgacatcctgacagccctgaccactaaagatggagctcttccacagggcgggatcacaagctcctatttggccaatttggtgctgtggcgcaaggagcctttactgcaagctaaacttgcagcccgtggcattacctactctcgctacgttgacgatatgagcatgtcttctaagactctgctggataaagaaacccagtcgtgggtcatcgcccaggtttatggcatgctggcatttcatgggctgaaggcatccagaaagaagcacgatgttttcagcgcgagcaaaccaatgatagccaccaaattgatcgtgaatcagaagcccgccctaccgaaggcaaaaagatcaaacatccgggcccaggtaaaacaactggagttagcgtcacagagttcaattcctctcgaggaactcaagatattagctaataaggctagtcagagggtcggactcctcggtaggttccacgaaacggaggccaacgccctgcgacttcggattaaggcggtgagggcttcctttacgtcaactgaggaagtgcgggtgaccggcgctaagcttgaggacggacatgagtccagtactatctcctga

SEQ ID NO: 10988 - RNA, 990 nt, synthetic construct
  source 1..990: mol_type = other RNA
atgtctcttgctgctctggcacgggctttgcggctgtccgttggcgagctccatgcattggctgagagagcagatcagtcctaccggaccgtcaagcccgagccagggtcaacgagacagacctttgatgctctaggccagctgaaaacagtccatcgacgtattaaggaagtggtattcgtgaatgtgtattttccggagtatctgcaaggaagtctgaaaggcagggattacgtgaccaatgctctcctgcatactaataaacagctcttggtttgtgaggacgtaaaaaaatttttcccctctgtaaccgccgctttagttgaggatgtatggcacgggttcttcagatttgccccagaagtcgccaagctgctgactcgcctgacaactaagagcgggcacctccctcagggagccatcaccagttcttatatagcaaaccttgttatgtggcgccacgagcctctgctccaggcaaagtttgctgcccgaggaatcacatattctcggtacgtggacgatatggccatgtcctggtcttgccatgtggataaggagacgcaaacttgggtcatagctcaggtgtacgggatgttagcccaacacggcttgaaggccggtcgtgccaaacatgaggtcttctccgccagtgaaccaatgatcgcaacaaagctcattgtgaaccgcaaaccgagcctttcagcgaagaagcggtcacaagtgaggtcccaggtctaccagttagaacgagcggaagaagacggcaccgagactatgtcggtcgacgccctggctattaaagccagccagagggtgggtcagctgggaagattccacgttacccaggccgcacacctgagggagagggtgaaggcggtgcgcagcagacttagtgtggaagcaaacgccgccatcagcatgcccactgaaacccccacaacaccaagccccgaagacctatcagacgcacctgcgccttgggagtga

SEQ ID NO: 10989 - RNA, 1029 nt, synthetic construct
  source 1..1029: mol_type = other RNA
atggccctgtacctgagtaagccttcttatcggtgcaaacccgttcggagcatcgcagcattagcacgcgccctcaatttcgaagagcaggctctgagggtggtcgcggaaaatgctgatcagcgttacagaactgtggcgccaccacctggttcctctagacagactttcgacgctctgggccaattgaaggagattcatcgccggatcaaaacaaccttctttgacagggtgaaattccctgactatctgcacggatcactcaagggctgcgactatgtgacaaatgcacagctacacactaagaagcagctgctgatctgtgaggatgtcaagaaatttttcccaagtgtgacctcagagaaagtggaagatgtctggtgtgctttcttcggattcgcaccagaagtcgcccaccttcttgctagcctcacaactaagcagggcgccttaccccaaggagcagtcactagcagctacttggcgaacttggtcctgtggcgggatgaaccccttctgcatgctaagctggccgcacgcgggataacctattctagatacgttgatgacattgccatgtcatttagcatcaggccctccaaagagacacaaacgtgggtgatcgcccaggtgtacggcatgctgcgcaagaacggtctgacggccggtcgatctaagcatgagatttttagtgcctccgagcctatgatcgctaccaagctgattgtgaacagtaagccctcactgtcacagaaaaaacgaagccaggttcgagctcaggtgagacaactcgagatggcccagtcctccggcctagactctgagatggtaagggtactcgcggaacaggccgcccagaaagtaggccagctcgggaggtttcaccctacacaagccgctagacttaaaggaagggtgaaggcagtgcggcttgggttaccaatagagtccttttcgtcccgcgttaccaacagcaccggggttagtaatccgagcccctctgaagatctccgtttgccgtgggaatga

SEQ ID NO: 10990 - RNA, 1038 nt, synthetic construct
  source 1..1038: mol_type = other RNA
atgagcttgactccccacaaggctacttacagcaaggaaccgctgcggaccgttaagagtctgtgtgcgatgctacgacttgaggagcaagccttgcgagatctggcggctcatgctccagccctctatcggagggttaaacctaagcctgggtctaaaagagaaacttttgatgctctcccccgcctcaaagtcatccataaacgcatcaagactcaggtgctagaaagggttcgatttcccagctaccttaccggatccgtgaaggggagagactacaaggagaacgccgcaaaacacgccggccagcgtgtggtgatttgcgaagacgtgaaaggcttttttccctctgtgacagccgagatggtatgcgacatctggcagggaattttcggatgtagttctgacgtggcgcagctgctgacacagctgacaaccaaggacggtgctctgcctcaaggggctattccctccagttatcttgccaacctggtcctgtggcggacggagcctttggtccacgccaagttggacgcacagggcattacgtattcccggtatgtagacgatatcacaatgagctcaccgcggaggctgtccgtcgctcagaagcaggcagccatagggatggtgtacggcatgctgtcagaggccggactgcgtgcaggacgcgaaaagcacgatgtattcaatggctcgaaaccaatgatcgtgaccaagttagtggtgaatgagaaaccatctctcaccaagaaaaaaaggtcagccgtgagagccgccgtttttcagttccagcaaaccttggccctgggcgaacctactgcagataccgttataacactcaacaagttagctcagagagtcggtcaacttgggaggttccatccgcgcgaggcagcagtcctcaaattaaggctccaggccacgcgcgcgttcatcgataaggcccagccccaaaccctcactaccggcctgcttcccgacgcaagactgacaacaccaccagagggtgctccagctccttgggatgacctatga

SEQ ID NO: 10991 - RNA, 1020 nt, synthetic construct
  source 1..1020: mol_type = other RNA
atgagccttttcttgaggaagcctagctatccttgcaagccgattaatagcctccgctcactggctgcagctttgcgcgttaccgaggatgagctgctgtctgtggcgaacattgcggacacactgtaccgcaaggtcaagctaaagcccggcagcgatcggcagacattcgatgcgacgcccaggttgaaaagactgcacgcaaggattaagtcagtgatcctcgccaaggtcatcttcccagactatcttacaggctccctgaaagggagagactacaagaccaacgccagtctgcatatcaataaatccgttctgatcacagaagacgtcaagggctttttcggctctgtctctgacgtgcgagtgaatgatgtgtggagacactttttccgcttcgacgcttccgtcgctgaaaccctgactctccttacaaccaggcgaggcgctctaccacagggggcaatatcttcaagctatttggccaacctagcaatgtggtcagatgagccgcttctgcacgccaaactggctgcccggggaattatttattccagatacgtggacgatatgtgtatgtctagcaatactccactcagtatagcagaaaaaacccggactatcgaggacgtatacggaatgctgatgaaaaacggtttgtcggcccgtcgtgataaacatgatatcactcccgccacgggaagaatgctcgttactaagctcgtggtgaaccgaaaaccggcactcccaccagagcaaaggtcccgtatcagagccatggtatttcaagccgaacagatggcacgcaatgaggctgaccccaagctgagtatagccgccctgaataaggccgccaacaaggttggccagctcggacggtttcattgcaacttatccaaacctcttaaagctcggctggctctggccagggctcccttaccacaccctttagcggaaccccggtttaccgggcctgacaccggtagtacaggggatgcacctggagtgccctgggagtga

SEQ ID NO: 10992 - RNA, 1008 nt, synthetic construct
  source 1..1008: mol_type = other RNA
atgagtctgaacctgcggaagcccacgtacccttttcgccccattggctcactggcagccctcgctaacacactgaaagtgagcgagtccgagctagtgcacatcgccaagaatgccggctcactttatagggccgtccagctgaaacccggcagcaccaggcaggtgttcgatgctaagcccccgctcaagccaatccatagccggatcaaagaatttatcctttccgaggtccactttccctcctacctcaccggctctctgaagggacgagattacaaggctaatgctgaaatccatgcaggtcaagcagtggtgatatgcgaggacgtaaaggggttctttaattccgtgagtgagacatgtgtgttcgacatctggagacatttcttcctctttggtacagccgtgtcacaagtccttacgtcactgaccactaaagacggagctctggtacagggagccattcccagtagctatttagccaatctggcactgtggcgagatgaagccctgttgcacgcgaagcttgaggcccagggtatccggtatagtcgatatgttgacgatattgtgatgtcgagctccactcccctagagccatctcgcaagaccgagctgattgcgtctgtctacggaatgctgaggcggaacgggttgtccgccaggagagacaagcacgaaattgctccggccaccaaacagatggttactaccaaactcgtagtcaacagaagagcagccttacctcctgctcgtcgcgcaaacgctcgcactgcagtgttccaggccgaaatgctcgtcgctaatcacggggtggaggcagcccaggcggttatagcaaaagccgctgggagggttggccagctggcaagatttcatcctaacttggctgcccctctccaagaacgcttagcccggttgaggaaacaggcggcgactcgtaaatctcttccaacaatggagcctagcgaaacaccgaccccaccaccagaaaaggattcttga

SEQ ID NO: 10993 - RNA, 1059 nt, synthetic construct
  source 1..1059: mol_type = other RNA
atgtccctcattctgaataaaccgtcttatccctttaatcctatttggacaaacgagaaacttgctaaggctcttcgcactgaactggccgagctagaagcgatcgccatcgtcgctgacaggagctataggcctgtgcggatggatccaggcagcacaagagaggtcttttccgccaagccccggctgaaggccattcagcgccgaattaaggaggctatcctgcaacgggtgaggttcccagagtacttgaccgggagtgtgaaggggagggattacgtgaccaacgcaaaactccacactggtgccagaatattaatttgtgaagacgtgagcaagtttttcccttccgtttcagcagaacgcgtttgggacatctggaggcacttctttggatttggcgatgatgtcgctcaccttctgaccaagctgacaacgaaagctggcacactgcctcagggggcaggtacgtcatcttatttagctaacttggtgttgtggagagacgagccctacctgcaggcaaaactcgccaaacacggactcacatatagtagatacgtggacgacatggccatgtcaagcaaactcgatatcaccccggtggaacaggagagaatcatcgccgacgtgtacggcatgctgcgacggaatggcctttccgctaagcggaagaagcatgagatattcagcagttcccagcgtatgattgttaccaaggtaattgtaaacactaagccatcttggtctaaagctcgccgatctgccgtgcgaacccaggtgcatgaactggagaaaagagtggttgccgaggacgtcggtgcggaattgcataagttcgcagatcgcaccagcaacctggttgggcaactcggccgtttccacgtacgggaggcaggattactgagggcccgggtaaggaaggcacgcgaggtcatgaatcgcgccaccaggatacattttactatctccccaactacaggagcccaccagagttcgagactagtggatgtccccccctgggaaatgaaatgcagacgtgcggtcaaaagctcatga

SEQ ID NO: 10994 - RNA, 1026 nt, synthetic construct
  source 1..1026: mol_type = other RNA
atgtccctgatcttgagcaagccgatttacccatgcgacccagtttggaccctggaaaagttaggcgaagcactgcgtatagaccttgctgagctacaggcagttgccgccgtcgctaaccgctcttacactaaaaagttggtgaaaaaagaccgggaggtgttttctgcccggcctcgcctgaagctgattcaaaacagaatcaagatggcgtttctccacagggtgatatttcccgagtaccttaccggatctcttaggggttgcgactatgtaactaatgccaagattcacaccaatgctaggattttgatctgtgaggatgtccagcagtttttccccagcgtaggtagcgagaaagtgaaggatatctggttgaactttttcgggttttctgagggcgtggcggaactgctcacaaaactgacaactaaagctggggccgtgccccaaggggcatcaactagctcatatctggccaatcttgtgttatggcgaacggagccactcctgcaagccaagctcgctgaccatggcattacgtattccaggtatgtggatgacatgagtataagtagcgaattccagctcgagcccgccgagctagaacggatcatcgcggacgtatacggcatgctgaggaagaatggactcagtgccaaaagaaaaaagcatgagattttccgtgagtcacagcgaatggtcgtgacaaaggtcatcgttaacaagaaagcatccctgtccaaggacagacgatccgcaattagaacccaggttcacgtcctggagagccggatagctgctggtgaaaactcaatcgaattgtcgaaattcctggaccagaccagtcacaaggtgggccagcttggcaggttccacaaaaatgattaccgcgatttactgcctcgcgtgcgcgctgccagagaagcactgagaatcaaccctccgcccttcattacaggagataatgatcggtggccagaagccgcccctcctcatgcaccatgggagctcggagggatctga

SEQ ID NO: 10995 - RNA, 1047 nt, synthetic construct
  source 1..1047: mol_type = other RNA
atgtctcagctgcaacctcccccgcgatataggcacaatccaatccactcagtggctgcccttagcagggtgctggggtattctgtggagactttgaagcatgtggcaggaacttcaagctcccggtaccgccttgccaaacctatcctcaaagaagacggtagcttccgcagaccctttgatgccctgtaccctctgaaggacatacagatcaggatcaaacaacgaattctcacagcggtaatcttcccagcatatctgaccggaagcctgaaggggcaagaccaggtccggaatgctaagttgcatcagggcgcctcaataactgtttgcgaagatattaagtccttttttccctctaccacctcggaggtgattttcgacatttggcgaggtttctttggtttttccgaggatgttagtaacctgctcactctgctgacgaccaaggacgatctgttaccgcagggggctgtgacatcttcccaccttgcgaatctcgtgttttggcgccgtgagcatgcactctatctcgggctggcttcgcagggggttcggtacagccggtacgtggacgatattaccctaagcagccgactccccgtcacccatgacgacctcgcacggcacatttcccttgtctacgggatgatcagatctactggtcacagggcccacaggggaaaacaggagatccagagagcccacaggggaatgcgtgccacgaaactgttggtgaataggcgcgcggctttgggcacagctgaaagacaagccacccgcgccgcagtcttcgcactggaaaggagtttcgcagtcacaggcggagtattgtgtccagccctgatcaaggagttaaacagtgtgagtggccgtgtgtcccgcttagcccggcttcatgctaacgagggccaggcgctacgggctagactgacaaaattaagaaacgaagtcggcaagtctcacagagtaagaaacgatttctcacaggttgaggtgataggcgttgaaccagcccctcccgaaacaggcgagggaatgcagtga

SEQ ID NO: 10996 - RNA, 966 nt, synthetic construct
  source 1..966: mol_type = other RNA
atgtctcagctgcaaccaccgccacagtacagccacaaaccaattcattctattgcagcgctgagccgggtcctgggttattcaatcgacacactgagtcacgtagcagaggtttcaagcagtagatatcggctggctaagcccgtggtgaaggcggatgggtcaacccggcagcccttcgatgctttgttccctctgaagaatatacagatccgcatcaagcagaggatcctaacagctgtttcctttcctgcttacttgactggcagcttgaaaggccaagatcaggttcggaatgcctctttgcatcagggtgcatctataaccgtgtgtgaagacatcaagagttttttccccaacacgacttccgagatcattttcgacatttggcgaggctttttcggtttttccgagaacgtatcgaacatcctcaccctcctgaccaccaaagacggggtcctgcctcagggcgctgttacaagctcgcaccttgccaatctggtgttttggcgccaggagcacagtctctacgtgcgtctcgcctccgagggggtcagctacagtaggtacgtcgatgacatcacgcttagctcactgcttcccttgaattcaaacgaactcgcccggcatatttcactggtgtatggaatgattcgctctactggacatcacgcccacagaggcaagcaagagatccagcgtgcacacagggggatgcgcgcaactaaactgttagtgaatagaaggcctgccctttctaccgctgaacgccacgcaattagggctgcagtctattccctggaacggtccttagccgccgccgaaggagtgctttgctcctctctagcgaaagagcttaacagcgcttccggacgtgtggccagattaacacgcctccataggagcgaaggcctggccctgcgagagagactcctccgaataagaaaccaactggataatagttga

SEQ ID NO: 10997 - RNA, 984 nt, synthetic construct
  source 1..984: mol_type = other RNA
atgacacaaccaccccccaggtatccactgcgcgcaatagtgcgtttagataaactcgcactggttctgggcgtttcgcttgacctgctgctcgcggtgagtaaggacgcttcaagtcgttataggctggcgaaacttatcgtgaaacctgatgggtctaccaggcagccactggatgcgaaggtacctctgaaaggaatacagaggcgcattaaggaacggattttggagaaagtagtttttccggactacctcactggtagcctcaagggcagggatgctagagcaaatgcacgcctccacgtcggagctagcattgtcctcagcgaagatattgccaattttttcccttctaccaaggacacacttgtgttcaagatttggaggcaatttttcggtttcgccccagatgtggctgagatcctgacatcccttactacgaaggatggggagctaccccagggtgcttgcacctcaagctacttagccaatctggccttttggagagaggaacatcgcctgtatgaggtgtttcgggctcaagggatagcttatagtcggtacgtggacgacgtctccgtgtcctccaaacggcgcttgagcaacgaagagctttcagcttgcatcaaaaacgtttacggcatgatgggaagatctggattcagaccccggcgtaaaaaacaagagatccagagggccaactcccctatgctggtcaccaagttgttggccaaccgaagaccggccatctctgtgaaggaacgacaggcaattagagccagcctgtaccagctcgagcagagtgtggccgccaaggcaggtgacgacttgagctctaagctggagtcaatcgccggcagagtcaatcgcctatgtcagatgcaccctgtggaaggcgagcgactgaaggtgcgggtacgggtcttacgagggcagatcggcatgggcgcatccgaagtttgtggacccgtcactgggcagtga

SEQ ID NO: 10998 - RNA, 957 nt, synthetic construct
  source 1..957: mol_type = other RNA
atgtccagggttcctccgcctagttatccccacggctcaatccagtcactggccgcactgtccaggacactaggggtccccgcggataagcttctgcagatcgccaaggacgccgacaatagctatcggcttgccaagccaattgtcaaggcggatggatctgtaagacgccctgttgacgcaagggtcaagttaaagggcgtccaagtgcggattaaagaacggatattagaccaggtgaggttccccgattacctcaccggttctctgaagggaaaagatgctgtggcaaacgctagactacacgtaggcgctagcgtcgtggtgtgcgaggacgtagccggctttttcccagctacctcctcaccggctgtgcttggcatctggcgcggtttttttgggttcagcacggaggtaagcgagctgctcacgcagctgacaaccctgaatggcgcactcccagagggagccgtgacatctagtcatcttgccaacctggctttctggcgggaagagcacgcactctacgaggagctgcaccgcgaagggatcagatattcccgctacgtggacgatgtttctgtttctagtgttaaccaactgtccagacaggaattagctgcatgtatcagccgggtgtataccatgatggggcgcaatggttaccgtcctaaacgggctaaacaacagatacagtgggcgaatgggccagtgttggtgactaaattgcagaccaacactagggtggccctgactaaaaaggaaagacacgccattcgaggggccgtgcatggtttggaaagaatggcgcttgccggcccctcagatgagctcctgcgacgactgtccagcgtgagtggacaagtcgctaggctgcgtagactccatcccaacgagggacagatgctcaagtcgcgtctagacgccttgaggcgcctgttgacagcagccgtctga

SEQ ID NO: 10999 - RNA, 1020 nt, synthetic construct
  source 1..1020: mol_type = other RNA
atgaaccacaccgccgctcagcctaagtatacctcgtcccctgtcagatcgctcgccgccttatctcgttccctaggcctgagcgtggccgagctccagagaattggcgacgccgcttctagcctttaccgggacgccaagccaatcatcaaagtggatggatcaatccggagaacattcgacgcctttccagtgttaaagaacatccatcgaagactccaaacgcagttcttccagcgcgtggtcttccccgattacctgaccggatccttgaagggtcgcgatgcccggcgaaatgcagccctccacacaggcgcagccatcgtggttactgaggacataaagaatttctttcccagtaccgatgctaaagtagtgtatagtatttgggccaatttttttcggttcgctcctgaggtagcacggcttctgaccgctctgacagtcaaagacggggcattgccgcaaggggcaatcacttctagttacctggcaaaccttgcgttttgggatcgagaatggaggctgtacgaaaacctgcgcgataagggaatttcttactctaggtatgtggacgatgtcaccttctccagcaaagaaaaactgtcaaatgagcggattggctgctgcatagctggagtgtacggcttaatggctgccaagggactaaaggcgaagcgctccaaacatgagattcgcagggggaacggtagaatgctcacgactaagcttatggtaaacacacgtccagcgctgatgacaagggaacggcaaaatatacgtgctgccgtgcatcaactggaggttctgagccgctggaattcaaccgactccgtgagctttaaaagtgagttcagcagagtttctggcagggtcgggaggctctcacagcttcaccccatggaaggcgccgctttgagggcacgattggctactctcagggccggtctgtatgcgaaccagcagttgggtagacagctgagccagtttgcaggggtgactctggactgtgttatctga

SEQ ID NO: 11000 - RNA, 963 nt, synthetic construct
  source 1..963: mol_type = other RNA
atgaacccaaaggcggcacaacccaaatataccttcagtcccgtccgatcactcgctagcctttcacgctccttaggagtgagtgttgtggacttgcagcgtatcggagatacagcggggggcctgtatcgggatggtaagccaattattaaggcagatgggtctattcgaagaacattcgacgcattacctttgctgaagtctgtccaccggcgcatccaggctaggttctttcagagagtggtgttccctgattatattacaggctctctgaagggtagggatgctcgcagaaatgccgtcctgcacgctggggctgccatcgttgtgaccgaggacatcaagaacttctttccctccacggatgccaaggtagtctacagcatctgggtgtcattctttcggtttgccccagaggtggcccagcttctcactatgctaactattaaagatggagcattaccgcagggcgcgataaccagctcctacctggccaatctagcattctgggaccgcgaatggcgcttgtacgaaaacctgagagacagaggcatatcttactcaagatatgtggacgacgtgacctgcagtagtaaggagcaactgaacaacgagaaaatcggaagctgtatcgccgaagtatacggcctgatggcctcgaaaggctttcaggccaagcgatccaaacacgaaatacgtcgtgggaatggccctatgctgaccacgaagctgatgattaacgctaggcccgctctcttgactagagagcggcagaacatccggacagccgtgcatcagcttgaggttctctccaaaaattccaccgacccagtcaggctcaaaagcgagatcaatcgagtatctggacgcgttggtaggctgagccagtttcatcctattgaaggggccgcactgcgggctaggcttacaactctcagggtgggtctggacctcaatcaatga

SEQ ID NO: 11001 - RNA, 984 nt, synthetic construct
  source 1..984: mol_type = other RNA
atggtccagctggcctctcgcccaaactataaatacagccctgtgcaatcctgcgcgagtctgtcaaaggtgctggccgtctccccgtctgccctgaaagccctagcagccaattctaataacttgtacaggctagccaatccaatactgaagccggacggctctgtacgccagccttacgatgctctttatcccttgaaacttgtgcacgagagactgaaactgcgggtctttgctcacgtgagcttcccagactatctcaccggcagcctcaaaggaaaggatgcaatcaagaacgccagttttcacgcaggcgccaagatcgttgtctgtgaggatattaaggactttttccccagtgtcactgcagatgttgtgtactctatttggcagggattctttaacttcgcgcctgaagtgtccaggctcctgacatccttatgcactaaggacggaagcctgccccagggggcaatcacatcaagctacttggctaacctcgtgttctggaagcaagagtggaggttgtatgaggatctcaagagcagaggtatcgtttactcccgttacgtggacgatgtgaccgtgtcatcacgagagggccttgacaaggaacaattgagcgaatgtataggtaaagtttatgggctaatggccgctaacgggctcaggcccaaacggaagaagcaggaaatccaacgggctcatgcccctatgagagccacgaaactgatggtcaataagcgggcagctctgtccctgggcgaacgtaaagctattagggctgcggtacatcagttagagttagaagtagcccaggtcaatatgccaaaagagctgatggcgaagctcaatagtgtgtcgggaagagttgcacgcttggcccagctgcacgtagtgcaggggaacgagcttaaaaatcgcatcagagctcttcgagtgcggattaagctcctgaccacactggcactgcatgacaaatga

SEQ ID NO: 11002 - RNA, 981 nt, synthetic construct
  source 1..981: mol_type = other RNA
atgacgcctgatgcctccaagccgtcttaccgctgctctcccataagaagtctggacagcttgagcagagcactcggtgtgagcctagagacactcaatcgattagcaagccgcgcggacgattcttatcggctggcaaaggctatcgttaaaccagatggtaccatccgtcaaccttttgatgcccagccacctcttaaagctatccatcgccgccttcagaaaaggatattcgacaacgtcaggtttccagactacttgacaggctccctgaaggggaaagatgccagatggaacgccgcccttcacaccggcgctaaaattgttgtgacggaggacatcaagaatttttttccaagcgtgactgctaatattgtctattccatttgggcaggcttctttaggttcgagggcaacgtcgcccagctcctcaccctgctgtgtactaaggatggaatgctgccccagggggctatcccctcttcctatctcgctaacttagcgttctgggagcaagagtggaaattggtggcaaatttccgggccgctggtatcacatactctagatacgtggacgacgtcaccctgtcaagtcgggaatcactggataagccccagctgaccaggtgtatttcaaacgtgtattcgtttatggccgctcaaggattccgccccaagcggactaaacaggaaattcggcgagcgcatgcccctatgatcgcaacaaagttgatggtgaatcgacgcccggccctgttagtacaggaacggcaggggatcagatcagcggtgtaccaactcgaacgtgaagagatgcgtggatgcgacccaaaagagatcaaggcaaaaattgacagcgttgccggcagggtaggaagactaacccagctgcaccctactgatgggcacgctctgaagctgagaatagccgcccttaggaggaagctcgccagtatttccgctgtccccagtgcaaactga

SEQ ID NO: 11003 - RNA, 981 nt, synthetic construct
  source 1..981: mol_type = other RNA
atgaagaatccaccgaaaagacccgagtatccacaccgccccattggctctctggacgccttgtctgccgccctccagatctccaggattgagctggaacatgttgcgagcgtcacagacagtcagtaccgcctcgctaagcctattgttaaggcagacggttccatacgccagccatacgatgccctgcctctcttaaagaacgtgcagaggcggatccaagcccggcttctagcccctgttcagtttcctacctaccttacgggtagtatcaaggggagagatgccaggcggaacgccgctattcacgcaggtgctaaagtcgtagtctgtgaagatgtagcaagttttttcccatccacatcgcgactgctggtggagagcatctggactggcttctttgggttctccccagaggtggcacagatgctagccgtcttgaccacgaagaatggctcactgcctcagggagctgtgacaagcagttacctggcaaatctcgcattttggaaaaaagaaccgattctgcagcagcaactggagctcaacggaattgcgtattctcgttatgtggacgatatcaccatctcttccagacgggccctgttaaaccccgagctgtcatggtgcatcgctcagatctatggcatgatgagaggggcagggatgcaagcgaaacgcggaaagcaggaaatctggcgtggcgacggtagaatgttagccactaagcttgtggtgaacaggaggcctgctctcccacccaatgatcgcaaggccattaggactgcagtgttccaactggaggcgcgattcgctgctggcgacgtggaggatacctttgctaccgaactgaatcgggtagccggacgggttgtgaggttggcccagttccatcccgtcataggagccgctttgaaagggagaatagcaagcctccgacaacagctttcagacggccagacaagcgctatagccccctga

SEQ ID NO: 11004 - RNA, 996 nt, synthetic construct
  source 1..996: mol_type = other RNA
atgaaccctcctcagctcaaaccgaagtacgacctgaagtcaattcgggatatcagtgccttgagcctgagtctatccatgccagaagaactgctgatcaatgtagccgcacaggcagatagcttatatcggaaggccaaacccataattaagccagatggctctctaagacagcctttcgatgccttaccccctcttaaatccattcagcgccgaattaaggaccgcatcctcaaacgagtggaatttcctgagtatttgacaggctcactgagtggcagagactatcggaccaatgctgcaatgcacgtgggtgccgccatcgttatatgcgaggacattgagaagttttttcccgccacgagccgtgagcgcgtgcttgatatctggaggaatttcttttgtttctcggaagacatggctaatttgctcacaagcctaaccaccaacgacgggagcttgcccgagggagctatcacatccagttacctggcgaacctggcgttctggaaccaagagccacggctgcaggcgaagttagcccaaaagaatatcgtgtatagcaggtacgtcgacgatatatcagtttcatccaagcagtttatgcctaaagaggaacaaaccgcacttattgcccaggtttacgggatgctgaaacgtcatggatacaaggccaagagaaggaagcatgaaattttcacgtctggcaggagaatgctcacaactaagctcatggtcaataggaaaccagcactgcagcccaaagacagacagaacatcagagctgccgtgcatgctctggagcagcggatagcttccggcgagtctggagctgaaatcaaaactgagctcaaccgcgtcacttctcgcgtagggcgacttggaaccctgcacgctactgaggccatcccattgaaactcaggctgcggaacgtgcgtcaatctcttcaggcagcaatcctgcagcacaccccgctgattggtgaacccgagtga

SEQ ID NO: 11005 - RNA, 963 nt, synthetic construct
  source 1..963: mol_type = other RNA
atgacgccgccgctcctgaagccaaagtatgatttgaagcccatccgcgatatatccgccctggccctgagtctaggcatgccagaaaaactgcttatagacgtcgcagctcaagcggacacactgtaccggaaagctaaacccatcgttaagcccgatggcagcatccggcgaccttttgacgctctcccccctttgaaacctattcagcgccgtattaaggaccggattctcaagcgggtggaatttcctgagtacctcactggtagtctggcaggtagagactatagaactaacgccgctatgcatgccggcgccaagatcgtgatttgcgaagacgtggaaggattcttccccagcaccaagagagagagggtgatggatatctggctgaattttttcaggttctctgaagacgttgctaacctcctcaccagcttaacaactaaagagggggaactgccacagggcgccattacctcctcatatctagctaaccttgctttctggaatcaggagccaaggttacaggcaaagctggcgaaacgcgaggtggtatactctcgctacgttgatgatatcgcagtatcatccaagcaaaccttgaccaaggaggagcagacagctctgattgcccaaatttacgggatgcttaaaagacagggctataaggccaaacgaaggaaacacgaaacctttacatcggggcggcggatgttgactactaagctgatggtcaataggaagcctgcccttcagacaaaggagaggcagaatataagagcagcagtgcatgcgctggagcagagaatcgccagcggagaaagggggcttggaatcaaaaccgagttgaatcgagccacgtctcgcgtgggaagactgggtactctgcacccaacagaggcaaaacccctaaaattacgtctgtcccacgtccgccatctcaccaacaaccgtatgtga

SEQ ID NO: 11006 - RNA, 1014 nt, synthetic construct
  source 1..1014: mol_type = other RNA
atgtcagatccccagagacgtccaaggtacccccaccagaggatacaaagcgtggcctccttgtcagctgccctaaatgtccccgaaggtgaactggcagcgattgccaagatcgctagctcacagtacaggaaagcgaaacccattaccaaggctgatggcagtgtgcgccagccctgggacgcattgccaccacttaagcgggtgcaaaaacagattcaggcaaaattgcttcgcagggttgagtatccttactatctaaccggatctctgccgggaaaaagtcccagagagaacgcctcccttcacactaaacctgcaatcatcatcacagaggacatcgcccggttcttccctacgactcgagctgaacttgtgcatggagtgtgggccggactgtttggctttagcgaagaggtggcaggcatcctcacggcactgacaactaaagatgggttcttacctgaaggtgcccccacatcttcgtacctggccaatctggtgttctgggactgtgagccacggatagtcgaccagctggcccagttggacgcgacctatagccggtatgttgacgatgtcaccgtatctagctctaaggctctcaccccggttgagattgcgcggtgcatggccatagtttacggcatgtttggctcccggggttacaaggcaaagaggagaaagcacgagattgtcagggctaacgcaccgatgcgcgtaacaaagctcgtagtgaataaaagacctgctctgccaaaggccgacagaaaagccgtgagagctgctgtctataagctcgaggggattgtgaactccggccagcccctgcctgacgatattcagactctgctgaactctgcctcagggcgcgtttcccgactcggacaatttcatccaactcaagccgctccactgaaggcacgaatcgccaccatccgtgaacgcctggctcatttaaatgatagtctcgccttaaccgggcacgggcagaagacacctagtaagagctga

SEQ ID NO: 11007 - RNA, 1020 nt, synthetic construct
  source 1..1020: mol_type = other RNA
atgagcttccgctacaatgccaaccctatcagaagtctggcggttctggctattgccctcgatgtcaccgaatacgagctactgcgcctgtccaatcgggctgacgatctgtacagaaaggcgaagcccattcggaagcctgacggttcgttcaggcagccatatgatgcactcccccagctgaagcatgttcataggaggattaaggagcgattgcttgtgaacgtgcactttcctgcttacctcacaggatccctgccaggcaaaagcccaaaagccaacgcctctttccatgtcggggcaaaaattgttatatgcgaggatgtgcagaagtttttccccagcactcgcgcgacactggtacacgacatctggatgggtttttttgggttcagccaggacgtggccactatcctcaccaagttgaccactagattcggagctctcccggaaggggcaattactagttcatatctggccaacttagtgttctggcgccttgagcccggcctccatgagcagttatctatccgaggaatcgcctatagcaggtacgtggacgacatctgtgtttcctcaaaggagtttctccccgatattgataagtcagctgccatctccgaaatatatacaatgctgggccggttagcttacaccgcaaaaaggaaaaagcacgagatccagacctccgggcaccaaatgtttgcgacgaaacttatggtgaatagaagagtcgcaatcccacacagtgaaaggcataatcttaagtcagcagtgtttcagcttgagggaaagttcaaacacggtgcccgcgacgtggccttctttgaagaattgagccggacaactaaccgagtcggccgtctaggccaattccacatgcaagaggctacaaaactgaaagaacggttgaaaaagctgcgtatgagactggatagtgaaccggtggtaattaccccttctgtccagacggctgccaccataatgtctgccgccaaggcagaggctccttgggactga

SEQ ID NO: 11008 - RNA, 1050 nt, synthetic construct
  source 1..1050: mol_type = other RNA
atgaagaagccacctaactccgacaaaagcataccgtattacccctgcgaacccattcattccattgccgccctcgaaatggctctgggaataccagagcgctggcttaagagaatcgctgccgcggccaaccagagctatcgccttgccgcagaggagattaaaaaagatgggtcgaaaaggcagaccttcgatgcctaccctagattaaagtatgcacagagacgcataaaggaccgtatcctgtctcgggtcgaatacccagactatctgaatggctcattgaaaggcaggtcccctcggaaaaatgcggaagcacacgtcggggccaaaattacgattggagaggatatcgctaatttctttccaacaatctccagcactctggtgaaagctatgtggtgtgggctgtttggctttagtgaagaggttgccaacctattgaccctcctaaccgttaaggatgatggtgtaccccaaggggcggtgactagcagctacctcgcaaacttggtattctgggccagggagccccaactgtataagcagtttcagaggaggggttaccagtatacgcgctacgtggacgacatttcagtgtcctgcaagagaagaattacagatagcgaaaagtcagagatcatctcttctgtctacgccatgcttaggtcagccggcgtgcaacctaagagacagaagcacgaggtgcacactgctggagctcgaatcgtgaccaccaagctggtgcataacgtccgcgttgctctcccaaaagagatgcgccgtggcatccggacaagtgtgttccaactggaggctcgggcagccttcggcgagcatgacgaagcactccacaaggagttgctgactgtaagctctcgggtgggattacttaatagttttcacccttccgaaggtgcacccctcaaagcgcgtctgaaaaagctgcggaagatgatagaagatgccgcacaggggctgcagcgaacacaggacgttggtcgacaggctgtcggaatctctaatagtgagcccgccccgtgggactga

SEQ ID NO: 11009 - RNA, 975 nt, synthetic construct
  source 1..975: mol_type = other RNA
atgaagaagagcctgaagattgacggtctggccccctcctatcctcacgaaccaatctacggaatcgccgctctgagcagagctcttggagtgcgggagatgaggctgcagcgtgtggcccagatggctaacgatttgtaccgactggcctctgaggagacgaagctggatggctctaaacgccagacgtacgatgcccagccactcttgaaagcaatccaaaagcggattaaggaccgtatcctagtccgcgttatttgcccgccctatctcaacggctccttaaaaagacgctccacacggaccaacgcggaaccacatgtgggcgctcggatagtgttcgacgaagacatagccaattttttcccttccattagaccagaaatcgttaagaggatgtggctgggcctctttggctttagcaatgacgtcagcaccctgctgacacttctgacagtaaaagaccagggtgtgcctcaaggggccgtgactagttcgtatctcgctaacttcgtgttctgggcacatgaaccttcacttgtgcggcggtttgcggcccaaagattagcatatactcgatttgtcgatgacataagtgtgtctagtaaggctgtcgttgccccccaggctaaatcactggtaatttcagagatttacgggatgttgtcccggcacgggttagagcccaaacgagctaagcataagatctcaactcgacgcgataggatgaccaccaccaagttggtgatcaatgagcgtgttagcctaccgaaagaacgcagaaggaaccttagagccgcggtacacaaactggagcagagagcagcattcgaccagtacgatgagagtctcctgaaggaaattaataaagtcgccgtcaaagtgggacagctcaagggataccacgttgcagaggggacacaactcaaggagaggcttaggtctatcaggagccgcgtgctgctgtctttgtga

SEQ ID NO: 11010 - RNA, 1035 nt, synthetic construct
  source 1..1035: mol_type = other RNA
atgatgagtgagtttccaaattatccacatcagagaattgggaccctggacgcccttgctcgagtacttgcggttccgaaggaccacttgttaactgtcgcctctagagcggaagtgttgtataggatagccgctcaagagcagaaagcagacggaagtatcagacaaacgttcgacgccaaacctaaactgaaggaaatacagcggaacattaaggaacgcctcctacagaaggtaaagttccccccgtacctccaggggtctttaaaaggcagaagccctcgcctgaatgctgagtcacacaaaggcgctcacctgagcatctctgaagatatccagaacttttttcccagtgtgggtagagatcatgttatgtccatctggagggattttttccgtttttcggatgaggttagcgagttgctgacagctctcacggtgaaggacgacggaatacctcaaggcgctatcaccagctcctacatggcgaatcttgtcttctgggattatgaaccacggctggtggagcaactagccgcaatgggcctcacctacactcggtacgtagacgatgtgattgtgagctcccgacaccaccttactaaggaggtgcagtcactggtcgtggccaagatttacgggatgctgggccggtattcgctccgtcccaaaagggccaaacatgaagtgtccactaggtcaaaacggatgacagccaccaagctcgtcatcaacaagcgcgttgctctcccaaaggagacaagacagaacatccgagctcaggtttttgcaattgagcgcagagtgctggatggagatcgcggggcagacttggtgaaggcactggcctctgctagcagtcgggtgggaaggctggcctcaatgcatcccacaatgggccagggtttaaaggccaggctgaaagtcgtaaggaccacactggcctccgaatcccctcccgaggccttccaggttgcagtcgcatctcgcgtgcctcagagcgtggaggaagacttcgtgcccccatgggtctga

SEQ ID NO: 11011 - RNA, 993 nt, synthetic construct
  source 1..993: mol_type = other RNA
atgaaaaaaaccaccattgaacccgggcttgcccccttgtatctccactcagcaattcgcggactcgctgcactcagcaaggcactgggggtgaggcagaacgtgctcgagaagcttgccctgtctgcggagacactctatcgagtggcgcgcagtgaagtcaaatctgatggctcaatccgtcagacttacgatgcactgccaaggctgaaagccgtgcaaatcagaataaaggaacgactcctgcagcgggttatttttccctcctacctgcacggatccctgagagagcgttcaccccgaacgaatgccgccacacacataagggccaagatcacattcgctgaagacatttccaactttttcccatccgcttctcgcgccctcgttcaccgtgtctggaaagatctctttggcttctcagaggacgttgccgccttgttgactacactgacaactaaggatggaggtctgcctcagggcgcagtgacttctagctacctggctaacttaattttttgggactatgagcctgatctagtcaagaccctggctctacggggcttgcgctatagcagatacgtcgacgacatcaccgtgagttctaggctgggaatcaaggcctctgataagacctatgtgatcagccagatatacggcatgctgttgcatcacgggttcacccctaaacggaagaaacatgagattacttcggctgcaaagagtatgagaacaaccaagcttgtgcatcataccagagtatcccttccgatcacggaacggaaaaagactcgggctgcggtgtacgccctggaactgagagtaagcgctggcgagtccgggcctggagtaatgaaggagcttgccagcgtgagcacaagggtgggtaggttaggttcctttcacaaaacccaagctatggcactaaagaaacggttagacgttgtccgcgcgactctgaataccttcgaggcctcgccaacggtcagttga

SEQ ID NO: 11012 - RNA, 1011 nt, synthetic construct
  source 1..1011: mol_type = other RNA
atggaccggcccatttataagcaccgcccagtgcagacaattagcgccttggcacgcgcactcaggatctccgagtcgctgctactgggaattgcaggacgagccaccgatctgtacattggcccgaagcctaaaccaaagaagaacggaggcatccgctatgtatttgacaccaaaccaccgctaaaatcactgctccggcggattaacggaactttcttcaaacacacccaatttcctaagtacctgactggttcccttagcggccgggatttcgtggctaacgtggagattcacagggatgcacgtaatgccgtcaccgaagacatcgctcagtttttcgactgcattagtgctgaatgcgtgtataggatctggaaagacttctttcacttcggcgacgaagtggccgagttactgactaagttgactacgaaagatggtagggtctttcagggcacacccacaagctcctacctggctaatctcgcattttgggaccgggaatgtgccctcgtggaaaagcttaaggccagagggatcagatattcacgctacgtcgacgatatcaccatcagtaccgttagccccctcgctaagggcgacaagaggtgggcgattagccagatatacgccatgatcgggactgccgggttcaaaccccagagaagtaagcatggatcttttagtgcctcatctcccataagaataatggggctgaatgcgaaccgagcgcccacattgccaaaacaggagaggtcagcaatacgagcgcaagtttaccagcttgagcaaagagtggcccaggccgatcaatccgatgatttacgcgctgctctcagcgcagctatcgggaaagtcggtagattgaagaggctgcatccttctgagggcacagccctgcggcttagactggatgccatccgtcgcaccctggacgctcagccagtggtaacccatgctacgattcctatccaggtttccgacgaggccgcatctacacctttctga

SEQ ID NO: 11013 - RNA, 1011 nt, synthetic construct
  source 1..1011: mol_type = other RNA
atggataggcctgtatataaacatcggcctgttcagacaattagctctctcgctagggccctgcgcgtttccgagtcactgctcctagcaatcggggaacggtccgccgatctgtatattggtcccaaaccaaaacccaaaaaaaacggaggcatccgatacgtgtttgacaccaagcctccactcaaatctctgctgagacggatcaacgcaacatttttcaaacacacccactttccaaaatatcttaccggcagccttagcggccgtgattttgtggccaatgtcgagattcacaaggacgcccgtaatgcggtgactgaggacatcgctcagtttttcgattgcattagcgcagactcggtgtacagaatatggaaggactttttccatttctcagacgaggtggctgcactcctgaccaagttgactaccaaggatggcagagtcttccaaggaacccccacttccagttacctagctaacttggctttctgggaccgggagtttgcacttgtcgaaaagctcaaggcccgcggtatacgctatagtagatacgttgatgacataacgattagcacaacttctgcgctgactgaagaaaacaagaggtgggctatttcacaaatctacgctatgataggagctgccgggttcaagccgcagaggtctaagcacgggtccttcagtgcctcacatgcaattcgaatcatgggcctgaacgccaatcgctcgcccacacttccaaagcaggaacggtccgccatccgagcccaagtgtaccagctggagcagcagatcgttcaggccaacagcggtcctgagctgagggcagccgtgtcttccgccattagcaaggtggggagactgaaaaggttccacccgcgggaggctgaggctttacgcatccgtttgaatgcgatccgccagatcttagatgcaagacccgtcgtaacaaatgcgagtgtcccagtagaagtgacggaagacgtgggagccgcccctttttga

SEQ ID NO: 11014 - RNA, 1011 nt, synthetic construct
  source 1..1011: mol_type = other RNA
atggaccaccccatctacaagcataggcctgtacagacaatcagctctctcgctcgggccctcagaatatcagagtcccttctcctcgggattgcgggtagagcaacggatctatatatcggcccgaagccaaagccgaaaaaaaatggagggatccggtacgtatttgataccaagcccccattgaagtccctgctgcgcagaattaacgccaccttcttcaaacacacccagtttcctaaatacctgacagggtctttaagtgggagggacttcgtcgccaacgtggaaatacaccgcgacgcaaggaacgccgtcacagaagacatcgctcagttcttcgactgcatcagcgccgactgtgtgtatagaatctggaaagacttctttcacttcggagatgaagtggcagcacttctaaccaagcttactaccaaggatggccgagtgtttcaagggactcctaccagctcttacctggcaaacttggcgttttgggatcgggagttcgccctggttgagaagctgaaggcacgtggcatacgatattcccgttacgtggatgacattacaatatcgacagtgagtaccctggcagagggcgataaaaggtgggccattagccagatctatgcgatgattggagccgccggcttcaagccccaaagatccaaacacggtagctttagcgctaatagtccaattcggatcatgggtctgaatgctaatcgcgctccaactctccctaaacaagagcggtccgccatccgggcacaagtgtaccagctggaacagagggtggctcaggccgaccagtctgtcgatctgagtgcagctctctcagccgccattggaaaggtcggccgattgaaaagactgcatccctcagaaggagccgctctgcgtttgcgccttgacgccatccgcaggacgttagatgcgcagcctgttgttactcatgctaccacacccattcaggcctcaaacgaggtcgacactgctccattttga

SEQ ID NO: 11015 - RNA, 1014 nt, synthetic construct
  source 1..1014: mol_type = other RNA
atggatcggcctacctatccacatgaacggatccaatctatacagtccctgtgctgtgctttgggtctgtctgagcctaccttacgggccatagcttcgcgagcacccaatctgtatatcggtccaaaacctaagcccaagaagaatggcggaataaggtacgtttttgatacaaagagccctctcaagcctctcctgaaaaagattaattccgtgttctttcggagagtggtattcccacagtatctcaccggctccctctctgggcgcgacttcgttgccaacgtcgacgtgcacagaaattcccgccaggccatcactgaagacatcgcacagttttttgactgcatcaccgccgaccatgtgtaccgaatttggcgcgacttcttcgcttttggggaagatgtagcggatcttctgactaggctaaccactaaaaacgggagggtctaccaagggacaccgactagcagttacctggcaaacttagctttctgggaccgagaaccaatcctggttgagaaacttgctacgcgcaatattagatacagtcgttacgtggacgacattaccatgtcaagcgtgggagtccttgaggccgacgataagagctgggcaatcgctcaggcatatgcaatgattggggccaatggttttaagccccagcgcacgaagcatgccgcattcgaaggcggatctcccattaggattatgggcctgaacgccaaccggcaccccacacttccaaaacaagagcgtgcgcagatcagggctttggtgttccaactggagcagagtctggctagaggagataccggcgccgtgttcagaagcaggctaaacacagcctcaggcaaagtggggcgactgaagaggttgcactcaagagagggagaggccctccggctcaggctgaacaaaatccgccgggtcctggatgttttgcccttagtcacatgtcccactacacctccgggcgaaagagtgcagggtgaggatgcggccccattttga

SEQ ID NO: 11016 - RNA, 945 nt, synthetic construct
  source 1..945: mol_type = other RNA
atgctgcgatctattatacagcgcgcccataacctatacattggtcctaagccacaggtgaaaaagaatggcggggtgcggtatgtcttcgatacaaagccccctctgaaacccctgctgaaaaaaatcaactccatcttcttccgtcggacccattttccaccctatctcaccggaagcattgcaggccgcgacttcattgccaacgtagaggttcataagggagcgagggttgtcatcacagaggatatcgcgcagttttttgactgcatcacggagcaacacgtctaccgcatctggagagaattttttaggttcagtgacgagatcgctgatctgctgacgcaccttatgaccaaggacggaagggtctttcagggtacaccaacctcgtcatatctcgccaacctggcattctgggacttcgagccccagctggtgaatcgcttggccgcgagagggataaggtacagtcgctacgtagatgacatcagcatttctaccacaaatgatctctccgactcagaaaagcgttgggtggtggctcagatctacgccatgattggccgcggggggtttaaacctcaaagatctaagcaccagtatctgtcatccgcacggccgatcacaataatgggccttaatgcaaacagtagcagggccccaaccatcactagacgagagaggtcccggattagggcccttatttttcaactggagcaaagattcgcaagcggtgaaactgggccagaatttcggcagtcattgtcccatgctatcggcaaagtgggccgactcaaaagattacacaaggtggaaggagccgctctacggactagactcgacactatacaggccgccttggatgctttacctgttaaaactaaggctagcgcaaagttcgagtctcctccggctgacgccattgatgatcaccccttctga

SEQ ID NO: 11017 - RNA, 1011 nt, synthetic construct
  source 1..1011: mol_type = other RNA
atgaccaaaggacctgcctacagatacgctcccattctttccatccaggcgctttgcagggccctgggatgtaatgagcctttcctcagatcgctcgctgaacgcgcgtctgggatgtacatcggccccaaacctatgcaaaaaaagtccggcgggatccgattcgtctacgacactaagcaccctctaaaggacgtgctgaaaaaggtgaacagggtcttctttaagaagacccattatccgacctacctaactggttcactggatggacgcgactactcaaccaatgcaggcattcatgcaggggccacaggcgctataacggaggacataagtcagttttttcccagcattaccgccgacatggtttatgagatctggaccaagctgttccgcttcggtcacgagccagccatgttactgactgccttaacaacgaaagatggcgtggtttttcaaggaacacccaccgggtcttatatcgcaaaccttgtattctggtctactgaacacatcgttgtcgagaaactgcagagcttgaatattcgatattcccggtacgtggatgatgtgacactctccaaagcatccacattgtcactcgacgagaagacttgggccattagccagatttatagcatgataggcgcgcagggtttcaagcccaagcgggaaaagcatgggatactgagtggaaagggcgctattaaaatcatggggctgaacgctaacgctaaagtgtcactgccacgtaaggagagaagtctgatcagagccaaagttcatgcactcgaaaaacggttcgagagtggcgaaatcgatttttcctttaggacagaactgaacaaggtcagcggggtagtgggtaaaatgagcaggtttcacaagcacgaggccagccaacttcgcggccggatcaatgtgattaggcgttctatcgaattgatcccaattatcactattggatctcagtatccgagaaccgtcttgccacaggatgtgcagaattga

SEQ ID NO: 11018 - RNA, 1146 nt, synthetic construct
  source 1..1146: mol_type = other RNA
gccctgggacaccggcccttctacgagcttatagaacagctcctgaggaacagacgattcaataacctccggtgtggccttgcctttgcgtggcacacggacagttcttccagctggtacgcctctaacaccaaggtgctgactgggagccacgacccaatccaatcggtggggagtctgtgtagggcgctggccatcgccgaacccttattgtgctccattgccgaacgggtgccaaacctgtacattggtcctacacgcaagccaaagaaaagcgggaatggcttcagagacgtctatgacacccgactaccgctgaaacctttgctcaagcgcataaataaggttttttttgagcgggtagtttttcctgactacctgcacggctcaatccgtagttgcgacttcatatctaatgccagaatgcatgagggatccgtcaccgtgatcacagaagatatcaagggctttttcgaccatatcactgaggagcacgcttatgccatctggagaagatttttcgggtttggggaggttccctcagaactgctgactaagctcgtcacaaatggaggcagggtctatcagggcagtccgaccagctcctaccttgcaaatctggtcttctgggacatagaacctcggatggtcgagacgctgggagtaagggggttaaggtatagccgtttcgttgatgatgtgaccatgtctcacccaaccagcattgggacagaggagaaaacttgggcgattgcccaggtgtacgctatgctcggttcgcacggcttcaaacccgcaaggcagaaacatgctatctttaatggcagtgcatctcgcactattatgcgggtaaacgtgaacgagcatttgaccattacccccgcagaaaggcgtcaggttagagctatggtgcatcagctcgagcaacgagtgcggtcaggcgagaacacttcagaggtgagacaactactcagctcagctattggaaagatcggtcgaatccagcgccttcacccttcttatgccgaaaaattgcgcgtgcaggctcgcggtatccagttaacactggatgaaatgcccttctccacagagtcccaagcatccttcattgcaagccaggctgatgaaggagattccccattttga

SEQ ID NO: 11019 - RNA, 942 nt, synthetic construct
  source 1..942: mol_type = other RNA
atgcaatatctgagctataccaaagagaacagaatccagaatataagcagtctgtgtctcgcgttgaaaattaaacaggacgatctcctggagatcgctaacaatgttcagaactactacaagccaccctactttattgaaaaaaaaaacgggggtcagcggtgcattattgatacagtcgaccctctcaaaccgctcttaaagagcattaataaggtgttcttcaagaacgtctacttcccagattatcttactggttctatctcaggccgcgattatatcagcaacgtaaagatccaccgcaactctaagaatattatcaccgaagatatcaccagcttcttcgataacattaccgaatcacacgtgtatgacatctggcggcgctttttcagattttctgatagtgtcgcccagatcttgacacaactgactaccaaggacggcaagatccatcagggggtccctacatcctcctacctggccaacctgagcctatggcgacacgagcagcacttcgtgaacgacttaaagaaaaagggatttgtatacagtcgttacgttgacgatatgactataagttcctccaacgtgatatctagggaagacaagacttgggtgatctcgcacctgattggcatgctgtctgcaaatacactacggataaaaagatccaaacatgcagtgcttacgtctaataaaccaatgaatatcatgggactgaacatcaatggatcaaagcccacaactcctaaaaaggatagggacattatacgagccacccttcatcggtttgacaagcaccccgcttccttttcagttgaggacctgaggtcgttgcaggggaagattattaatatcaggagaatgcatgtgagcaagggcgagaagttcctgaaacaatttaaagagacgctccataagaatcacatcaccatttga

SEQ ID NO: 11020 - RNA, 942 nt, synthetic construct
  source 1..942: mol_type = other RNA
atgtattttgtggcaaagactgttttgaaagatgatgggacagagcggaccctgtacgacacacgccagcccctgaaaacagtcctgcaccgtatcaacgcccacttcctcagacaggtcgtttaccccgaatacttaaccggaggggtgcccggcaaggattacacggactcagtgaaaattcacgtcggagcccggaccgtggtgaaggaggacatctccaagttctatccatccgtgtcctttgatgtagtacgtgacatatggggaagattctttgggtttgcggatgaggtagccgaactgctggcaatgctcactactagggatggccatctggaacagggcgcacctacctcaggctatctcgccaatctggcactttgggatgttgaatctaaactaatcacgaagcttgacagcatcggcgtgactagatacagccgccatgtcgacgacattaccctgagttccgccgagcatctgtcgtcccagcgaattgactgggttgtgagggccgtaagcgccgctctcgctacaaaaggactactggtgcacaccggcaaacacgaggtcatgcaggccgatggtcaaatcaagattctcaagttggtggggaacgcgaagcctagtctgcctccgaaggaacggagtagggttagggctctggtgcacaatttctgccaaagagtggatgcaggaggtagccaggaggagctggagcagctgcttccacgagtgagaggtcaggcttataaagtcaaacgcttccatctccgctcaggcggccagttggtcgaaagggtggcccaagctgcttctttattggaagaccggaggagcaagtctcctccccggatctctcacatagggtcacaccttgacgacagcgattggctcagtgagcatccaccggttgggggagcgccatgggagttatga

SEQ ID NO: 11021 - RNA, 1047 nt, synthetic construct
  source 1..1047: mol_type = other RNA
atgaacgcacctaggtaccgccaccacagggtccagtcaattgagtctctgcgccatcctcttgggatgggaccctccgagttactcgccctagcaaaacgcgccagccacctgtaccgtatagccaaaaccgttcctaaggacgatggaacgctacgcgtgctgtatgacacgcgtgagccgctcaaagctgtgttgggcaggattaacgaacacttcttacgacgagttatttatcccgattacctgacaggtggtgtgcctaggaaggactataccgacagcgtgaagatccacgttggcgccaagagcgtcataaaggaggatatctcaaaattttacccatccgtgagcttcgacgttgtacgcgagatctggagcggatttttcgggttcgccgacgaggtgagcgatctgcttacaatgctcacaactagagacgggtacctcgaacagggcgctcccaccagtggatacctcgccaatttggccctgtgggatattgagtcccagcttatcgcccagattgcatctgcaggagccactaggtattcaagacatgttgatgacataaccatctcctcgccggaacacctgtctactagtagagtcgattggatcgtacgtatggtggctggcgcactggcaagtaaaggtttgagggtgaacgcgtcaaagcacgaagtaatgcaggccggcggtcagatcaagattcttaaactggtcggcaatgctaaaccatctctgcccccaaaggagcgaagtcgggtgagagctctggtgcatactttttgcttgcgggtggagtctggggaatccccagaagagctggccttactcttgccgcgggtgagagggcaggctcataaggtgaagcggttccatcggagagctggcgagcggctcgtcgagcaagtcaatcaagcggctcaactgcttaagaaccagaccgcggaagctcagcccgtaaaacagcccacacccaatctggtctttgatgaagccatcgcagggcagcaacctcctgaatccgacccaccatggtga

SEQ ID NO: 11022 - RNA, 972 nt, synthetic construct
  source 1..972: mol_type = other RNA
atgaacgaggccaaataccttcgtcgcagggtgcggtccatagaggcgcttcgccatcctttgggcatgggtccacgggacctgcagcgtttggcactccgggcttcctctctatactttgtcgcaactacaatgcccaaagcagacggcacactgagagtcctatacgacaccaggaagcctttgaaatccgtactgcaacggataaacgaacatttcttaaggaaggtcgtgtacccgccctatctgacaggaggcgtgccaggcaaggactatactgattcagtgaaaatccacgcgggagctaagacggttattactgaggatattagcaaattctaccccagcgtggggctggaggttgtgcgaaacatttggagtgggctcttcggtttttcagacgaggtagccgacttactcgccgctcttacgactcgggatggacatttggagcaaggggcccccacctcgggctatcttgccaatctggccctgtgggatgtggaacccgccctcatcaaccgactgaccgctatgggagtaagcagatacagccgtcacgttgatgacatcaccctaagctctcttgaaccactcggaacttctcgcgtggactgggtggtccgaaccgtcacccgcaccttggctagtaaggggttacagatccaccctggcaagcaccaggtgatggatgcaggcgagcagatcaaagtgctgaaactggtggggaatattaaggcgtctctcacaccggaggaaagatcaagggtaagggccctggtgcacaattattgcaagcgcgttgagagtggtgatgggctggaagagctcagagctctgctcccatccattagaggccaagcacacaaggttaaacggtttcatcctagggtgggagcccgcctggttgctgaagtcgaacaggcagcccagcagctgcagcatagaatggtcacatggatcaagtcctga

SEQ ID NO: 11023 - RNA, 1059 nt, synthetic construct
  source 1..1059: mol_type = other RNA
atgactgcgccgcgctatcctcatgaccgaatccagagtatcggctcactcagacatccgttgggaatggacgcacgggagttgactgcccttgccaaacgtgcctccaggttgtattttgtggccaaaaccattcccaaaaacgacggcacacaaagagtgctatacgataccgccaagcctctgaagccagtcctgcaacgtatcaatgacaacttcctgagacgagtgatctacccacactacttgacgggtggggtccccgggaaggactatactgattccgtcaagatacacatcggggctaagagcgtgattaaggaggacatttcaaaattctacccctccgtcacctttgatgtggtgtgcgacatatggagtggcttctttggtttctcccatgaagttgccgacctgcttgcactgctcacaacaagagatgggcatctggagcagggcgcccctacatcagggtaccttgccaatctggccctgtgggatgtggagagctcgctgattgcgaaactggcttcaatcggggtgacccggtatagtcggcacgtcgatgacatcaccctctctagccaggaacacctcagcgctgcgagggtggattgggtggtgaggactgtagccgcagcactcgctagaaaaggcctgttagttcatgcgggaaaacacgaggtcatgcacgctggcggacagatcgaagtgctgaagctcataggaaatacgaaaccatctttaccacccaaggagcgctctcgggttagggcattggtaaataacttttgtcggcgggtcgaatctggagactccgttgaagagcttcaaagcctcttacctagaataaggggtcaggcctataaggtgaagcgctttcaccgaaggaaaggagagcaactaattgagcagattgatcgcgtggctaagattctgcgcgcaagggctggcgaagctcagccaaacatcgataagctgcagagagacatggtagattcttactccgccaacgaaagcttcggccgccagagtgcagttgtagaccctccctggtga

SEQ ID NO: 11024 - RNA, 909 nt, synthetic construct
  source 1..909: mol_type = other RNA
atggaaccgaacgagctgctaaggttggcaaagagagcaagtcggatgtatttcgtggccaaaacagtccctaaggatgacggcacccagcgcattctttacgacactcgcaaaccactgaagacagttctgcatcggataaatgagcactttctgcgccgtgtcatctatcctgactaccttacgggtggggtgccgggtaaggactatactgactcggtgaagatccacgttcacgccgagtcagtgatcaaagaggacatttcaaagttctatcccagtgtctcctttgatgtggtatacgatatctggtcttctttctttagtttctcaaacgaagtggctgaattactcactatgctgaccaccagagacggccatctggaacagggggcacccacatccggctaccttgccaacctggccctctgggacattgaggctccattggtggctaagctcgcctctattggagtgaccagatactctagacatgttgatgatatcacactgtccagtcccgatcaccttagcgccagccgggttgactgggtggtacgcactgtagcaaccgccctcgcaagcaaaagcttactcgttcatcccggcaaacacgaagtcatgcacgccggccgtagggctatcgaggtcctgaagttggtgggaaatacgaaaccaagcctgccatctaaggagcgatccagggtacgggcgctcgtgcataccttctgtcggagggtcgaagctggggatagcggggaggaactggagagattactccctcgagtgcgaggtcaggcctacaaagtgaagaggtttcaccagaggataggagagcagttggtcctgcaagtggaccaagcggctaaactactgcgcgattccccttcagatgttggatccagatga

SEQ ID NO: 11025 - RNA, 933 nt, synthetic construct
  source 1..933: mol_type = other RNA
atgtactttgtggcaaaacgtatacctaaggaagacgggaccatccgcgtgctgtttgacacccggcagccgttaaaggccgtcctacagcgcattaattcccaatttctccgtaaagtgcattatcccccatatctgactggaggcgtgcctggaaaagactacgtgtcttcaaccagacttcacgcgcacgcgactctggttattaaagaggatataaggacgttcttcccatctgtccacgctgatgtcgtgctggatatttgggagagattcttcggtttttcgaccgacgtggcccaactcctcacattgctgacgacccgggacggacacctcgaacagggagcacccacaagcggctatctggccaatcttgccctctgggatgttgaggcccgcgtggtatcccagttagctcgcgagtgcgagttgactggctactcaagacacgtagatgatatttgcgtcagcagccctacccctatctctgcctcccaaaaagctcgcgcggtcagtttaattttcggcatgcttgcaagcaagaacctggccccgaaaagagccaagcacattacaatgcatggcggtcagcaaatccggatccttaagctggttgctaaccggaagccatctctgtcagccatagaacagtccaggatccgggcagcagtgcaccagttctgtcgaagggctgcaaacttgggggacccaacctcactcagagctgaactgcccaagatcagggggctggcccatcatctgaagcgatttcatcccaggaagggtgccgtgatgttggctgccatcgatacagttgcccgagctctaaactccacagacgtcgcacagagtgacgtggcacctactgtgagcacttttagcgggccagtagctacaaatgcccccgacagtcaggcgccctgggattga

SEQ ID NO: 11026 - RNA, 957 nt, synthetic construct
  source 1..957: mol_type = other RNA
atgtcctctgccagctatccgcacgcccgcattcagtcagtcgagtcactaagacacccgttaggcatggggccagtggggctgagacggcttgccaaacgcgcaagtgacatgtattttgtagctcatcgtatccctaaggacgacggatctgagcggattgtctacgacaccagggagcctctcaaatccgttctaagaagaattaatcaacacatcctccgcagggtggtgtatcccgattacctgactggtggtgtcccagggaaggactacaaaagcaacgtggagatacatgtgggcgctgcaacagttgttaaagaagacattagctcgttctttccctccgtgtccgaggtgttggtattcgacatctggcaccgatttttcggatttagtacagatgtggctgaggttctgacagcgctcaccactcgagatggccacctcgaacagggtgctccaacatccggctacctggccaacttagcgttatgggacgtggagcctaatctcgtgcacaggctggccgaagagggcttcaccgcatactcaaggcacgttgatgatatcgttttgagttcaaatgaggaacttgagggaggggagatcgcatgggctgtgtctcagatctatggtactctgcggaagaaggggctgcaggccaaaagggccaagcatgaagtgatgcgactgaataggccaattgtgatcttgaagcttattggaaacgaaaaggcttctttgcccgcaagagagagaagtcgtgtacgggcagtcgtacatcggttttgcaccaacatagaaagcggcgtcgatatagcgctgctggaagccgatcttcccagcgtgcgcggccttgtccacaaggtcaagcgcttccatcctacggagggaaacaaactggtggcccaggtggaacaggccgtccaactcatgcgggctagcaatgggtga

SEQ ID NO: 11027 - RNA, 1023 nt, synthetic construct
  source 1..1023: mol_type = other RNA
atggtgggtaacgatccgctggtcccaagatacccacacaggcccatagggagcattgacgccctggccagacatttgggggtttcccgccgcgaacttgaacggctcactcgcgcggctccaaggctttaccgggcaaaccccctgcctaagaagggcggaggctttcgctggacctacgacgctagaccccctctcaaacgtctccacgcagccatcaaagagaaacttctccagcccgtggagtatccaagctatctccaaggatcaattcgcgatccagacacacctagggagcccctcaccaatgcggacttgcatgcgggcaactacctgttcattcaggaagacgtagctggttttttcgggtccatcgggccttcagtcgtaaatgatatgtggaggcgttttttcgccttccctgctgatgtcagcgagatcctgacgaacttgactacactgaaagggctggttcctgaaggagctcgcccgagctcctacatcgcaaatctggcattgtgggacgtggaacctcagctagttagggagctgcagggcagagggttcgtgtattccaggtatgtcgatgacgtcgtgatcagtgccccgcggaacttatctcacgaggaaaagacagaggtggtgggacgactgtatggcatgtttgctgccaaggggctgcgggccaagaggcaaaagcatagcatagcaaagaagggccaggccgccggaaaaggtagaggggtgaccgtgaccggatacagcgttgcaggtggacgagcggctgtgtctaaggctgagcgaaatcgcgtacggtctgcagtgcgacagatcgaagttgaggcacgaacacggggcacttcacccgagctgcaagccagattccagtcggccagttctcgggtggacagaattgcccgtgccggatcagctcagggcgtcagattaagacagaggctagccgaacttaaaccctccgtctttccaaaaagtaatcggagggatatttacggtggcggctga

SEQ ID NO: 11028 - RNA, 948 nt, synthetic construct
  source 1..948: mol_type = other RNA
atgcgtgcgcattatcccaaacagccgatcggctcgatcagcgctctgagcagagcccttgatgttgaggaggacctgctcacccatataggggctaatgtgagtaccttctataggccaggtccccctcagcccaagaaggatggtacattgcggattacccacaatgccgccccagagttgaaaggcatccacagaaaaatcaacaaaagactcctccaggaggtgcagtaccctgactacctgcatggatcaattcgcgtgatcaatgaccccagatcaattaagacaaacgccgctctgcataccaatcagaaaactatactgtgtgaagatgtcgctggcttctttgatgccactactccggctctggttcggaaagtctggcagcacctgttttgtttcccacctacggtggcagaactgctgacaaaactctgcacccacgacgggttcttgcctcaagggtggcgatgctcttcttatctcgctaacctggttctctgggaggacgaagaccggcttgtacgtaatctgaggtgtcgcggctttacatactcccgctacgtcgatgatatgactatatctgcacctcgctttctgtccagagccgacaagagttgggtcgtgcagtcattaatttcaacactagctaggaatggctaccgcttaaagagaggaaagcatgagattcttaaggccgcgggaacgatgaaggtgaacggacagatcgtgaacggtaagcggccaaccctttctactaaatataggaacaatgtccggtggaacgtatacgcactacaaaagatgcacgccctggacgcctcctccgaggagtatcgaagccgatgggaaagctgcagtggcaaggcaatcagggtggcaagctaccacgaaaggaccgggcaaaaattgctcgatcagttatccgccattgcgccccaatga

SEQ ID NO: 11029 - RNA, 1008 nt, synthetic construct
  source 1..1008: mol_type = other RNA
atgaaatccctccagaacaaaccctgctacaagaacgctcccataaaaaatgttggtgccctggcccgcactctacggctgactgaacctcagctgatccagctggccagaaacgcatcccatatgtatcgtcgtgtgccagtccccaagaaagatggcacgaccaggcatacttgggacgcccagaagcagttaaaagaagtgcatggcatcattaatagtcgaattttccatcgcactacatttcctctgttcctgcagggaggaattcacgacccactctacccgcgcgactatgttcgaaacgcggacattcacgtggaccccagcatactggtgacactggatatcgctgatttcttccccagcaccagtgatagtgctgtgatggggatttggtccgactttttcaggtttccaccagccgtggccaagctgttaactatgctgaccaccaaagacggatttctccctcaaggcgcacgcacgtcatcctaccttgcaaacctcgcgttctttagatcagagcacgacctcgtcgcctgtcttgagcgtcaagggtggagatattctcgcttggtcgacgacattacaatctccaagcaacggagagcctctgatgatgaattgacccaggtgaatacaaccctgttcgcttttgttaatcggcacgggtactcagtaaagaggagtaagcacgatgtacaacggcgcaatgctcggatgagcgtgaacggtctagtagtgaataagaaggtgtcgcttcctaaatctcagaggagaagcatagcgtctgtgctgcacaggacaaacgctgcaatcgatgttggggaaggccataccatgcccgtcaaccgagttagaggccaggtcgcaatggtcaaaaggatgcaccctgagttgggagagaagatgttagctcggcttaagcagagcatctcagcagccgagagcaggccggccatcgaactcaatgactgcgagacagtgccattggatgagagatga

SEQ ID NO: 11030 - RNA, 960 nt, synthetic construct
  source 1..960: mol_type = other RNA
atgaccgaaccccagttgcttcagctcgctaggaacgcctccaggatgtatcgtaaggttccggtcccgaaaaaagacgggagtacaagatacacctgggacgcccagaaacagctaaaggaggtgcatggacatatcaatagccggatattccatcggactatgttccccctgtttttacagggcggaattagagatcgcctacaccctcgagactatgttcgtaacgccgaaatccacgtagatcctacaatcctggtgacgcttgatattgccgatttttttcccagcacatctgactccgcagtaatggacatctggtctaagttctttaggttcagccctgctgtagccaagctgctgaccatgctgaccactaaggacggatttttacctcaaggcgcgcggacttcttcatatctcgcgaatctggtgttcttctccgacgagcacgacctggttgcacgccttgaacgccagggatggaggtactctcggctcgtcgatgatattactatcagcaagcagcagcgagtcaattcggacgaggtgaccgagacaaaccgaatgctgttcgcttttgtgaatagacacggctactcagttaagcggccaaagcacgatgtgcaaaggagcaatgcccgtacgtccgtgaacggcctcgtcgtcaacaaaaaagtgtcactgcccaagcctcagaggcgctctatttcaagcttgctgcaccgaaccaacctggctatttcgataggggaagagtccactatgcccgtgagcagagtgagaggtcaagcagctatggtgaaaagaatgcatccagagctcggggaaaagatgttggagcgcttgaagcagagtcttagtgtgggtgcacggcggccagccgttatgcctgatgaccaggaggtcagtccacccatccgcagacaaacaaaaaggaaaaattccccaggcacctga

SEQ ID NO: 11031 - RNA, 1017 nt, synthetic construct
  source 1..1017: mol_type = other RNA
atgaagtcaccactgaataagcctttttataagaacgccccaatcaagagcgttggcgccctcgctcagactttgcagttaaccgagaggcaactccttcagctggcacggaatgcctcccggatgtatagaaaagtgcccatcccaaaaaaagacggaaccacaaggtatacctgggatgctcagaaacagctgaaggaagtccatggtctgatcaatagtaggatatttcaccgcacaacgtttccgctgttcctgcaggggggcattcgggatcagctctacccacgcgattacgtcagaaatgcggatatacacgtcgacgccacaactctcgtcacactggacattgcagacttcttccctagcactagcgattcagctgtaatggatatctggagtactttttttcggtttccccctgtagtggccgcactgttaacaatgctaaccaccaaagatgggttcctgccccaaggtgcaaagaccagctcctatttggcgaatctagctttctttcgggacgaacatgacttagtgacgaggcttcagaaacagggatggcgatactcccggctggtggacgacataactatttctaaccagcgtagagtatcaaacgacgaggtggctgccgtgaaccgtacactgttcgctttcgttaatcgtcatggctactcggtgaagaggccgaagcacgacatccagcgctgcgatgccagaatgagcgttaacaaccttgtggtcaacaaaaaggtgagtctccctaagtctcagagacgatcaatcgcatccttgttgcaccgaacctccgaagccattttcgtcggagaagaatgtgctattcctattaacaaggtgcgcgggcaaattgccatggtgaaaagaatgcaccccgagctgggcgagaagatgctcgccaggctgaaacaaagtatctctgcggttgagaatcgccccactatcgtgctcgatgaccaggaggcagttagctctacctctgatgcccaactttga

SEQ ID NO: 11032 - RNA, 972 nt, synthetic construct
  source 1..972: mol_type = other RNA
atgtctagtcgtccaaacaagccttcctacaattttgcacccattaaagatgtaaggaccctagctctggcacttgggctcgcggaacgccagctaaatcgcctggctgtaaatgccgggaatatgtaccggagaaagcctatcgcgaaaaaagatggaacggaaagagtgacctgggacgcccacaaacagttaaaagaggtgcaagggagaattaaccagctcttctttcacaaagtcttatttcccctttacctgcaaggttccatccgcgacaaggcctaccctcgagattacgtgcgaaacgcagaaatacatgctggagcctgtgtggccgtcactctggacatcgccgacttcttcccctctaccagggcggagttagtgcaggacatatggagagactttttcaggttcgctcccccggtagctgaagtgctcacacggcttaccactaaggatggcttcctgcctcagggtgccaggacgtcatcctatcttgcaaatctggtcttttggcaacgtgagcattgcctcgttgagacactggagaagcggggctggcgatattcaagactggttgatgacatcaccattagtaaagcaaccgatacatcgcaggccgagctgactgacatcaaccgtattgccattggttgctttcaaggatatggctatagcgttaaaaggtctaagcacaaagtgttgaggcggaaccaccgcattactgtcaacagcctcgtggtgaatgtccatccagctctgcccaaggacgaacgccggaggataggagcccaggttcatcaggtgaaggaggcactgacaagtgggacacaggctgatgtgcctagcgtggcaagcactcgcggcaagatcgctaaggtcgttagattgcacccagagctcggctctagattgtcagataagctgcggcaggccatcccattggacaccgaaggctccccggagtga

SEQ ID NO: 11033 - RNA, 978 nt, synthetic construct
  source 1..978: mol_type = other RNA
atgtccagacccaatcggccgctgtataaaggggatgagatcgcgtcctctgacgccctggcagaagtgcttggtttaacatcaccacagctccatcagctggcggcaaacgctagtaagatgtatagggaaaatccccagcgaaaaaaggacgggtctttacgcatgacctgggacgctcatcctcaactcaagaaggcacagaagcagattaatcttcggatctttggccgcatattatttcccttgtacctgcagggatctattcgggatagggcataccccagggactacgcgagaaacgccaatattcacagcggcgcagccgttacaatcgccattgacatccaagactttttcccatccataaccccagaccaggtcctgtcagcctggctcggagtgtgtcacttcccatggcaggtagcagagctactcacacgcctgacgaccaaagattctttcctcccgcagggcgctccaacgagtagctacctggctaacctggtcctctgggagaacgagcacgaactggtgagaactttgcagactaggggatggcactattcgcgcctgaccgatgacatcaccctgtcaaagaaagctcctgttgaaaaggatgagattacacggaccacctgcacagctattggtttcatccaaagaaacggttttactgtcaagcgttccaaattgaaggtgatgaaacgaaacgtccctatgactgtgaacaatctggttatcaatgaacatcctgccctacctaaggctgaacgcagacaaatacgagcccagcttcatcaggcgaaacttgctctggccagcggagcacttgtggacgcccaagccatcaatagcgcccgtgggaaggtgggcaaagtagtgcggttccacccccagttgggggccaagatgaaaggcgagttggatcaggagctggatagttggactgtcaggcagctcaacgatgagggctga

SEQ ID NO: 11034 - RNA, 1065 nt, synthetic construct
  source 1..1065: mol_type = other RNA
atgcatccgaatttactgaagcctttctactcgcacgggcccattcagaacctggatacgctggccgaagttcttgagatctcctgtaagcagctatgcagactggctagaaaagcaaaccagatgtaccgcctggtcccacagcagaagaaggatggctctgtccgtaagacatatgacgcggatcacgctctcaaacgagttcaacacctgatcaagacacggattctttccaaggtccgctacccgctctaccttcagggcggcatccgcgatcccgagaatccacgagactacgctcgcaatgcggcaatccatgcaggacaggcatgcgtaataaatgaagacatagccgatttctaccccagtaccacaagccaccaggtgcgcgacatttggaaacatttctttaggttccccgctggagtggccgactgcttaactcgcctcaccactagaagggggttcctgcctcagggggcgaaaaccagcagctatctcgctaacctagtgttttggaggaccgagtatgagttggtgagacacttggctgcaaagggcctgcggtatagtaggctggccgacgatatcactgggtcatccagcaaaccactgacaaggggtcagaagtccgaagtcatatcagccgtgtattctttcatcaaacgcgatggattttcaccaaagtatcggaagcacgctatctttgagcggaacgaggctatgctggtaaacaacctcgtggtgaatgcccaccctgccctgcctgttagagaaagacaagccgtgcggtgtttagtacacagggcctctaatacgttgaacgccggcaacggtactgtgtctaatgtgcccctggctcatattaagggtaaaattggaaaggtcaaacgttttcatgccagagccggacggagactcgcagctacccttcaagcggccctcaccagcgttcaaaaattggacggctccggcgcacaccatcgaggtagggtggaccgagatcatcgtaatgcccggaggtacgacggacatctgcacgcccctgcaccagcagggagttga

SEQ ID NO: 11035 - RNA, 960 nt, synthetic construct
  source 1..960: mol_type = other RNA
atgaaccgtctgtgctttagaggccgtcccatcgcatccatcgaggcgctggcatctaccttacacgttagcccaaggtatctgtggtgggtgatagaacgaactgatagactttacaggccaatgaaacctatcataaagccagacggctcagttaggcaaacctacaaccccgcagcccctctcaaagatgtgcagcgaagaatcaatcgcaacattttctcacgggtcgaatttcctatctacttgcagggtgggattcgagatcgcaagacaccgagacattgtgtcgcaaacgcccagctgcatacgaatgcggcgattgtgattaacgaggacatagccggattctttccctccatctctcggcagcaggtgcaggatgtttggcagcattttttcagatttccccttgcaattgctgaaaccttgactgccctcactacatacaatggtgccttgccccaaggtgcccctaccagctcttacctggccaacctggtgctctggaggcaagagccggagctggtcaccaatctggccgccagaggaatccgttattcgaggtacgtcgacgacattacgttaagtagcaagcgcttcctcaacaaccacctcaaggcagatgccgtgaggcaagtacggcgcctatgcaatggcaatgggttccgcatgaaggggcggaaggagcggatcgaaacctccggaaagccaatgagagttaacaatcttcagattaaccacggggtaacactccctaaaaaagagcgagctcggataagagctgctgtccgggtgtgtgaagtgtatcccgctgagtcacgcgacagtagcgagtatcagaaactgctgaattccactctgggcagggtgagcaggttgcgccagcttcacccaaaagaaggcgctgacctgatgcgacggctaacaatcatgaggggagcttctagaagtaagtga

SEQ ID NO: 11036 - RNA, 960 nt, synthetic construct
  source 1..960: mol_type = other RNA
atgaaccgccctcgattcaagggcaggcccatcggctcgatagaggcactggcgcgcgcactttatgtttccctgcgccagttgcactgggctataggcagggccgatgccctttacaggcccatgaaacctataacaaaaccagacggatctgtgaggcaaacatacaatccagccgctcccttgaaggagattcagcgtagcatcaatagaaacattttcagtagggtgaagtttcctatttatctacagggaggaattcgcgacagaaataacccccgacactgcatcgccaatgctaagctgcactgtggcgccactatcgtgtttaacgaggatatcttttccttctttccatctatcactagaagacaagtccaggacgtttggcagaacctcttccgctttccgccagaaattgccgaagccctgaccatccttaccacctaccaaggaattttgccccagggcgctccaacttcctcctatctggcaaatctagtgctgtggcggcaagaacctgagctggtcacgaacctggctgcccggggtatccgctacagcagatacgtggatgacatcacattatcaagtagaaggttcatctgcaatcatcagaaggcagaagttattcagcaggtgcggcggctgtgcaatggtaacgggttcagaatgaaggggtgtaaggagaggatcgagactagcgggaagcctatgtgtgtcaacaacctccagataaatcacggggtaaccctccccaagaaagaacgggcacgtattcgggccgcggtacgagcttgcgaagtgtaccatagtgagtcacgcgattcaagcgagtatcagaaactgctgaactctacgctcggccgtgtctctcgattacggcagcttcatccgaaagagggtaccgacttgatgaggcggctcacaattatgaccgaagtatccagaagcaaatga

SEQ ID NO: 11037 - RNA, 948 nt, synthetic construct
  source 1..948: mol_type = other RNA
atgaaccagccctgctttaaggataagcctatcgcatccactgctgccctggccagagccctgcatatcccacacaggcatctgacttgggcgacaaaccgagctgaccggctttaccgcgcattgcaacctatggtcaagcccgacggttcaattaggcaggtattcaacccggctcgacctttgaaggatattcagaggcgtattaacaggcacatatttggcagggtggacttccccttctatctgcagggcggcatacgtgatagaaagaatccacgccactgtctcgcaaacgcgaaactccactctgatgccaaaatagtcattaacgaggacatcagcggatttttcccgtctatcactaaaagacaggtccaaaatatttggcagcattttttccggttccctcccgatattgcgatcattctcaccaagttaaccatccacgacggacaacttccccagggcgctcctacaagctcctaccttgccaacctagcactgtgggaacacgagccacccacagtggaggcactgttcatcaaagggatccggtatagccgctatatagacgacatcaccctgtcaagtacatattttcagaacgaccacagtaaaacggctatgattagaaaggtgcggagcatgtgcaatcgcaataaatacgaggttaaaaggtccaaacatcgtattgaatcgtcaggacagccaatgcgaatcaataatctccagatcaataacgggatttctctgccaaagagggagagagcctgtatccgggctgccgtgcattcctgtgaaaagcacatcgaggaagagcgcaccgccaacgaataccacgtgttgtttaatagtaccgttggtcgcgtgaatcatctccggcaattccatagacacgaggggaagcgactactgaagagactggatgcctgcgcccctttatga

SEQ ID NO: 11038 - RNA, 909 nt, synthetic construct
  source 1..909: mol_type = other RNA
atggaaaatgcggccgatagcctgtaccgtcccgtcatggtgaagaaaaaagacggcacacggcgcgagtgctttgacgcaaagccccctctgaaggccatgcaagcacggatccaaaacatgatcatgaagaaagtcatatacccaggctacctcaccggtggattggccgacccaaaaacgccccgagattatgtgcgcaatgccgaagcccacaccggggcaagactcatggtgaacgaggacgtggccaagttctttccttccactacccatgaggtggtctacgatatctggagattcgtattcagattcccaaaggaggttgcgaggacactgactaggttaacaactaggtgtggggaactgccgcagggtgctaaaacttcctcctatctcgcaaacttagtcttttgggctcacgaacctagactagtgcagtggctgcacaatgccgggtttagatacacacggtacatagacgatatcaccctcagctccactgccgataagaccagggaggagcttggacaggccattgggcgggtggctagtatgcttaggcgacatggtctgcgcttcaaacgctctaaacatcacattgcctatgccggagaacgaatggaggtgacgggcctcaccgttggcgagaggagcgttggcctgtcacgtaagcgtaagtctatgattagggcgagtgtgcgccagtgcgaatgggcagcaaaaaaaggaatctttgacgatgcgatgcagaagtctgctgcttcactggtcgggcagtatacacggcttcacagaaacaagggaaaagctctaaagcgccgattggcagccttggaagtaagcagaaagctgccagctattgagcccgtggtatcggctgttggcatcgagcctacaacccggtga

SEQ ID NO: 11039 - RNA, 1122 nt, synthetic construct
  source 1..1122: mol_type = other RNA
atggacgccccaatatacccctttaagcccatacatagcattcgcgccctcgccttggccttaggggagtcagaacaattgctagaacggctcgccacccgcgctgatcaaatgtataggcatgtcccccaggaaaaaaaagtgaaaccgggtaagccaccggagatgagagatacatatgacgcacacgaaccactcaagagggttcagcggaaattggttgatcggattctgtccaaggcaacgttccctccttatctccacggcggcatcaaggaccgcaagagtcccagatcaatccacagcaacgcagcagtccatgccggagctaggttcgtgattcttcaggacatcaggaatttttacccttctatccttaagcggcacgtcgatgctctgttccgcggtctgtttgggttcggggcttccgtagctgccctcctgtccagtatttgtacccgagagggatcaactcctcagggagcctctacctcgggctatatcgcaaacctggtgttctgggacgtagagccaaaaattgtgaaaggcctactgggacgtgggtttcagtacactcgatttgcggatgacatcacaatttcctgcgggcgaaagccatcctctgacgaacttacgaacatcgtgtccactatcaccggcatgcttgcggctaaaggatgccaccagaagcggactaagctccacttacgcgtgagaggccagggcataaaagccgatggcgctatctttcagcctgtcacagtgaccggactgagcgtgttcaattctagtcccggactgaccaagctggagcggcgtagaataagatctgcagtgagggaattcgaggttatgagtgagtcaaccaacaattggagcgacctggaaagcacttatcatagagctatgggccgcgtcgggaggttattggcctgtgggcatcccgacggtgccatgctgaaagagaggctgaacctcgttatgagatcataccaggcccctctgctggagcgttaccaacaagcgattgtggccaattctaatacagagacaagctccctggctgcaccgccaatccttgagtacagcagtgaacaggatggtcccttgccttggcagtga

SEQ ID NO: 11040 - RNA, 1071 nt, synthetic construct
  source 1..1071: mol_type = other RNA
atggatgctcccacttatcctttcaaacctatccattctctaagggttttagctctggccctcggagagagcgagcaacttctggagcgcttggcagcaagagccgatcgcatgtatcgtcacgttccacaggagaagaaggtgaaaccggggaaacctcctgagactcgtgacacgtatgacgcccatgaacccctgaagagagtgcagcggaagattgtagataggatcctgtgcaacgctaccttcccccagtaccttcacgggggcatacgggatagaaagagtcccagatctattcacagcaacgcagccatacacgcaggcgccaggtttgtcatcctgcaggacattaagaacttctacccatcaatctccattaaacatgttgatgccctctttcgaggtttattcgggtttggcgcaggagtgtccgtcctactgtcaagcatatgcaccagagagggatgtacaccacagggcgcaagcacctccgggtacatcgctaatttggtgttctgggacgttgagcctaaagtggtgaatgacctgctgggccgggggtttcggtacagcaggttcgctgatgacgtaacaattagtagcggtcacgaaccatccagcgatgacctcactaacatcatttctaccatcaccgggatgttggcggcaaagggatgtcaccagaagcgaaccaagctgcacattcgcgtaagaggacaaggcatcgaagccgatgacgccacatttcagcccatcacggtcacaggactctctgtgtttaatagtagtccaggtctgactaagctcgaacggaaacggatacgatcggcggtcagggagcttgaagtgatgtccgagtctacatcggactggactgtgttggaacccaaataccatcgcgctatgggcagagtgggcaggcttctcgcgtgtggccatcctgacggtgaagctctgaaagccaggttaaatgtggctaagcgctcctgccagattccgctgctcgagcgctatcagcaagccatctcagagtcactggccaaagccgttgaagtcgatgtcgagtga

SEQ ID NO: 11041 - RNA, 1125 nt, synthetic construct
  source 1..1125: mol_type = other RNA
atgaaggcacccctgtatccacataagccaattcactctatcagggcccttgccctggcactcggggaatctgaggccttgcttgagcggttggctgcccgtgcagacaggatgtaccggcacgtgcctcaagaaaagaaagtgaagccaggacagcctccagagacgagggatacttacgatgctcatgaacctctcaagagaattcagaggaaattagtcgatcgggtgctgagtaaggcgattttccccacctatctgcatggcggaatcagagactgcaaaagcccgagatccatccactctaatgcagcagtgcacgctggcgccaggtttgttatcctccaggacatacggaacttctacccctcaatttccaaatcacacgtgcatgctatgtttcggggattgttcggatttggggccggcgtcgccgaactgcttagttcgttatgtacccgctcagggtccacccctcaaggggcatccacttctggctacatcgcaaatctggtattctgggatgttgagcctaaggttgtcagcgacctcagcgggaagggtttccagtatagtcgctttgctgatgacattactatatcctgtacaagagaacccgaagcggacgagctgaccggcatcgtatctgccataacaggcatgcttgccagcaagggctgccatcagaagaggtcgaaactgcacgtgcgaatccgcggtcaggctctcaagtcagaagggactactttccaacccatcaccgtcacaggattgtccatctttaacgctagtcccggactgaccaaatccgagagaaaaagaattcgcagcgccgtgcgcgagctggaactaagcagtgagacaacgagcaattgggttgagctggagcctatgtaccaccgggcgatgggtcgagtgggtcgtttgctggcctgcgctcacccagacggcgaaagcctaaaagtccgactcaatcttattaaacgctcttacgaaaagcctctgctcgagaggtatcagcaggagatagtggaacagtccgcgagagagatcaacaacgtgagctgtgcccgtacactgccctcacaaccgaccgagcccgtagattctccaccatgggagtga

SEQ ID NO: 11042 - RNA, 1083 nt, synthetic construct
  source 1..1083: mol_type = other RNA
atgaaaagtctggcactcgctttgggcgaaagcgaacaactactggaacgtctggccgccagagcagaccgcatgtatcgccacgtaccccagcaaaagaaagtgaagcccggaatgcctccagagactcgtgacacgtacgatgctcatgagcctctgaagcgtgtgcagaggaagttggtggaccggcttctgtccaaggccgtgttcccggcatacctgcatggcggtatcaaagaccgacagtcacctcggagtattcactcgaacgccgctgttcacgccggctcaaagtacctcgtcctgcaagacattcagaatttttacccctccatttcaatgcaacaggtggatgcgctcttccgccagttgtttggtttctccacaccagtggccacactgctgtcctccatctgcaccagggaaggaagcaccccgcagggtgcctcgacatctggatacatcgcgaacctgctgttctgggatgtagaacctaagatagtcgaagatttaatggggaggggttttcagtatagccgctttgcagatgatataaccgtgtcttgcagacacgagccaagcagcgatgaactatccgatatcgttagtacaatcactgggatgctggcaagtaaggggtgtcggcagaaacgggccaaactgcacatccgagtgagaggccaggggattaaagctgacgatgctacgttccagcccgttactgtcaccggcttgagcgtgtttaacccaactcctggactcaccaagagcgagaggaagtgcattcggtctgctgtgagagagctggaattgatgtctgaggccggctctcgatggttagacctggagcccgtctataatcgcgcaatggggcgcgtcggaaggctcatcgcttgtggccatccagacggcaaggccttcaaaggacggcttaatgcggtcaaactctcacatcaaaccccccttcttgacaggtatcagctcgcagctacaggagtagcggagtccgccactcctcctgttggggtgggccttagagagccatactctgccgagagagacgggcccttaccgtgggactga

SEQ ID NO: 11043 - RNA, 1047 nt, synthetic construct
  source 1..1047: mol_type = other RNA
atggaagccccaatctacccatttcgccctatccatagcacccaggctttagctctggccttgggggagtcagaacatcttcttgaacgactggcggtgcgtgccgacaggatgtaccggcacgtgccccagaagaaaaaaggtagaccaggcgagactagagacacgtacgacgcacatgagccgttgaagcgcgtccaaagaaagctggtcgatcgggtcttaagtaaggctatatttcctgcatacctgcacggggggatcagagatctgaagagcccgcgctcaattcactctaatgctgcggtccacgccggagctcgcttcgttattctgcaggacatcaggaacttctatccctcaatatctaagattcaagtggacgcgctttttaggggcttgtttggcttcggagcctccgtggctgccctactgtcctctatctgtactcgtgatagctgcgtgccacagggagccagttcaagtggttatatcgctaatctcgtgttttgggatgtggagcctaaagtggtgaaagacctccaggaccgcggattccagtactccaggtttgctgacgacattaccattagctctggccaggaaccttcgacagaggagatttccactatagtaagtacaatcacaggcatgttggcatcaaagggctgtcgccaaaaacgaaccaagttgcatatgcggattcggggacaggggatcaagagcaatgatgccaccttccaacctgtaactgtgacgggcctttcggtgttcaactctgcccccggtctgaccaagctcgaacggaaaagaatccgaagtgcagtcagagaactggaactgctgagggagttaacatccgattgggccgatctcgagccaaaataccaccgggcaatggggagggttgggaggctcctagcatgcggccaccccgatggagtagccctgaaatccagactgaacgttgttaaacgaagctatcagaagtctctcctcgagcgttatcagcagagcgagaacgcaagccccaattccgactcctga

SEQ ID NO: 11044 - RNA, 1047 nt, synthetic construct
  source 1..1047: mol_type = other RNA
atggaggcaccgatttatccatttaagccaatttactcggctcagtcacttgctctggctctgggcgagtccgaacacctactggaacgattggccgtacgtgctgataggatgtacaggcatgttcctcagaagaagaaaggcaagcctggggagacaagggacacatatgacgcctacgagcctctcaagagagtgcagaggaaactcgttgatagagtgctatccaaagcgatctttcccgcctatttgcacggagggatcagagacttaaagagcccacgctcgatccatagcaatgcagccgtccacgccggagctcggtttgtgatcctgcaggacatccgaaacttctacccctctattagtaagattcaggtcgatactctcttcagaggccttttcggatttgcagccggcgtgtctgccttgttggcgtccatttgtacccgtggggaatcaacaccccagggagctagcactagtggctacatcgccaatctcatcttttgggacgtggagccgaaaattgtcaaatccctgaccgatcgggggttccagtactcccgcttcgccgatgacatcaccataagctgcataagagagccatctagtgaggaactgagtgacattgtgagcaccattaccggcatgttagcatctaagggttgccaccagaagcggtctaaactgcacatgcgcgtacggggccaagggatacgtgccgatgacgcaacgttcctgcccgttaccgtgactggtctgtccgtctttaacggcactccatcactcacgaagctggaaaggaaacgaatcagatctgcggtgaaggagcttgaggtgatctcaggaagcatgcctgagtgggctgcgctcgaacctatgtatcatcgggccatgggtagggttggccgcctccttgcatgtggacatcccgatggggaagcactgaaagcccgcctgaacgtcataaaacggagctaccaaacacccttactggagcgctatcaacagacacttaacgctgaatatgagggtctgaattga

SEQ ID NO: 11045 - RNA, 1053 nt, synthetic construct
  source 1..1053: mol_type = other RNA
atggacgctccaacgtatcctttcaagcctattcattctatccaggccttggccctcgcgctggatgaaagcgagagactgttggagaggcttgccattcgcgcagatcgcatgtatcggcacgtgccacaggagaaaaaggggaaacggcgagacacctacgacgcacatgaaccacttaaacgtgtacaacgcaagttggtagatagggtgctgagtaaggccatctttcccgcctacctgcacggcggtataagagacagaaagtcacctcggagtatccactcgaatgcttctgtgcacgctggtgccagatatgtcattctccaagatatacgaaacttctaccccagcatcctgaagtcccaggtcgacgatctgtttagagggctatttggattcggtgcctccgtatcagcactgctctcacttatctgcaccagggatggatgcgctccgcagggagctagcacaagtggctacattgcaaatctgatcttctggaatgtggaaccaaaaattgtccaggacttcttagctcaaggcttccagtacagcaggtttgcagatgacattactatatcctgcagccgcgaacccacctccgaggaactgagcggcatcgtgtctaccgttacaggaatgctggctgccaaggggtgccatcagaaacgcaccaagcttcacatgcgtgtgcggggccagggaattaagggggacgatgccacttttacgccgctcactgtgactggactgtctgtctttaacggcgctcccagcctcacaaaactcgagagaaagcggatccgatccgccgtgaaagagttagaagtgatgtcagagtccacacctgggtgggccgtcttggagccaaagtatcatcgcgcaatgggcagggttgggaggttactagcgtgtggtcatcccgacggagaagccctgaaagcgaggctcaacgttgtcaagcggtcttgtcagatccctctgcacgagagataccaacaggccatcagtgaatgtctggcaaaagctgttgaggtggacgtgggctga

SEQ ID NO: 11046 - RNA, 1011 nt, synthetic construct
  source 1..1011: mol_type = other RNA
atggacgcccccacctatccactgaaaccaatccatagtatacaagccctagccctggctctcggcgagtcagaaagattactcgaaaggctggccgctagagctgatcggatgtacaggcacgtcccacaagagaaaaaggggaagaagcgagatacatatgacgcgcacgaacctctgaaacgcgtccagagaaaactggtggaccggattctgtcgcgcgctatatttcctcgttatctccatggaggtatcagggatataaagactcccagaagcatcttgagtaatgcagcaccacatgcaggagccaagtacgtgattctacaggacatcaagaacttctacccctccattagcgttgatcaggtagaggcccttttccggggactgttcggattcggcgtgcccgtttcagccctgctcagctcaatctgcacgcgcgaaggctctactcctcaaggtgcgagcactagtggctacatcgcaaacttaattttttgggacgttgagcccaaaatcgtcagatccttgctggacgatgggtttcaatactccaggtttgccgacgatataaccatttcctctggccggaaaccttcgtcagatgagctctctttcattgtttctacagtcaccggcatgcttgcatccaaggggtgccaccagaagcgtgcaaagcttcacatgcgggtgcgcggacagggcatcaaagaagacgatcagacatttaagccgttgacggtgaccggtctgtccgtctataatagcgcccccgggcttaccaaactcgagaggaaacgcatcagaagcgctgtgcgcgagttggagattgcgagcgaaagtgtgagagactggaacgtgctggagcctatgtaccaccgtgctatgggtcgggtagggaggttgctggcctgtaggcacccagacggagaggccttaaaggctcgacttaatacactgaagcattctcatcagaagccgctcctggaacgatatcagcaggtgtga

SEQ ID NO: 11047 - RNA, 1113 nt, synthetic construct
  source 1..1113: mol_type = other RNA
atggatgctccaacttatccgtttaagcccatctactcattacgcgcactggcccttgctctgggggaagacgaacgtctgctggagagggtggccgctagagctgacagaatgtacagacacgtacctcaggagaagaaagggacgaaaggcgaaattaggcatacttatgatgcgcatgagccgttaaagagggttcagagaaaggtagtggatcgcatactcgctaaagcaaaatttccactatacctgcatgggggaatccgggatgtttcctcaccacgaagcatcctgagcaatgccatggtccacgccggcgcgaggtacgttgtcctgcaggacattgagaacttcttccccagtatcagcacacaccaggtcttcaggatctatcgggacctttttggttttggggagcctgtgtccatgctgctggccagtattagcacccgggaggggtctacaccccaaggtgcgagcaccagtggctatctagcaaacctgctgttctgggacgtggagcctaaagtggtcaacgaacttttcatacgggactttcgatactctcgattcgctgatgatatcaccatctcctccgagcgcaagcctacccctcaagagttggcagacattatctcaacgattaccgggatgctcgcttcaaagggatgccggcaaaagcgcaagaaactccacgtcagggtgcgcggacagggagtgaaagtggcagaaggcgactatgaagccttgacagtgactggcctgtctgtttttaattccacacccggcctgaccaaactggagcggaagagaattaggagcgctgtgcgggagctcgaaattctggcctcgtctacaccctcatggagcactatagaaccacgctaccatcaggtcatgggtcgtgtgggccgtctgttggcatgtggacaccccgatggtgaggcccttaagatccgattgaactctgtgaagagattatgccaggtgccactgcttgagaggtacagactcggcctatccgatgacaaagacgtcttggaactcgcctgttccagtgcctctggcgttgccccaagtctcggagtaaatgaacccctcccttgggagtga

SEQ ID NO: 11048 - RNA, 1029 nt, synthetic construct
  source 1..1029: mol_type = other RNA
atggagtacccactgtatccacataggcctatacacaatttaaactcattggctttgctgctgggagagcctttaagcctgctcatcaaactggcacgcaattccgacaaattgtaccgcaaggtgccacaagttaagaaagatggcaccacgcgggagacattcgacgccagcgagcctctcaaatccatccagcgcaaggtagttgataggctgctggttaaggtgctcttccctaactaccttcatgggggcatacgtgatattaactccccgcggtctgtgtactctaatgtgaaaacccacgtgggtgctagaagtatcattttgcaggacattaagaacttcttccccagcattaccctcgaacgggtcttttccgttttcaaaggcttaatggggttttctgacgcagtgtccaatgtccttgcccacctggtcactcgatatggagcagtcccccaaggcgccagtactagcagctatatcgcgaacctggtattttgggatgtggagccccggctggtggcttggatcaggaaccagaagatggcctactcaagatttgccgatgacatcacaatatcatcgttcgatatgataagtgacgacctgaagaccgaggtagtgcgaagggtgactgggatgcttgcagcaaaagggtttgcgcagaagaggcagaaactgcatgtgctgaagagaggtcaagctattacaaaggccaaccagagcgaagtcgccgtgatcaccggactatctgtcgccggccctagacccggagtcacgaaggaagaacgcaaaaaaatccgctctgctgtaaaagaattcgagacactggccctcatgaatccagattcagatcgtctcaaggagctctataatagagccatgggtcggattggccgactacttgcatgcgggcagagtgacggattcgcgttgaaacagaggatgaatattgctttcgaaaagactaagaagtccatctttgttaagcacgcttttatcgagaacaccgtgcccgactga

SEQ ID NO: 11049 - RNA, 1032 nt, synthetic construct
  source 1..1032: mol_type = other RNA
atggattctcccctatatccctacaagagcattcacaatattaagtccctggccttactcttgggggaaaccgtgcccttgctgaacaaacttgcagaggactcacataagatgtacaggagggtccctcaggtgaagaaagacgggtccgaaagagagacattcgatgcgcatgagcctctgaaaagcgttcagcgcaagatagtggatcgcctactcgcaaaagtgtcctacccagattatctccacggggggatcagggacagtaactacccccggtcaatatatagtaatgtgaagagtcactctggggctcgcaacttggtcctgcaagacattaaaaactttttcccctccattacaatcgacaaagtgcttagtatcttcaaaggtatgatggggttcggagatgaggttgcggtcatgctgactcgactggtgacaaagggaggcatcgttcctcagggcgcctccaccagctcctacatcgctaatttagtcttttggaacgtggaaccacggcttgtggtgtggatccgagctctgggcatgtcatattctcgcttcgctgacgacatatctatttcgtctaagaacatcattctgccggatcagaagaccgaaatcgtacgtagggtcaccggcatgttggcagccaagggctttttacagaagagacagaagatgcatgtcctcaaaaaaggacagactatcactacggccaaaaaaccggagccagtagtagtgacaggactttcagtcgccggacctagaccaggtgttaccaaggaggagcggaagaagatacgcagcgccgttcgagaatttgagatcttggctgaggctggtgccgatctgattaaactccgggaactctacaatagagccatgggaagggtggggcgtcttctggcctgtggccaaagcgacggtctggcactcaaaaatcggctgaatctggcaatgagacaatgcaacaagcctctgctggaaaagtatgaaaagggcgaggtgggcggcattagcatctga

SEQ ID NO: 11050 - RNA, 1047 nt, synthetic construct
  source 1..1047: mol_type = other RNA
atggacaagcctcgctactcacaaaagcccatttttaacattgagtcgctcgccctgcgcttgggagaatccccaatgctgttaaataatctggctcgaaacagtcaccgactctatcggacagttccccagcagaagaaggacggctcagtgagggaaaccttcgacgcccatcaacccctcaaagccattcagagaaagatcgtggatagaatctttagtggtgtgatcttcccagactaccttcatggcggaatacgtgatgtcaattctccacgatccatttattcaaatgtggcttgtcacgctggggcaagggtcgttctcatgcaggacattaaaaatttcttcccctccattaccgaggataaggttcttggcgtcttcaaaggcgtactgggcttcggagatgatgtaagtagtctgctggtgaagttgactacacgccggggagtagtccctcaaggggcaagcacgtcctcttacctggccaacctggttttttgggatgtggagcctcggttagtcacttgggttaaggccaacaatctcagctactctagatttgcagatgacattaccataagctccaagggagacgtaagagatgaattaaaaaccgatgtgatacgcaaagtgactgggatgctggcgtccaaagggttctatcagaagcggcagaagatgcacgtgcttaaaaaggggcaggtcatcgtgacaaaaggtggtgttgagccgtttgtcatcacaggcctggctgtgtctggacccaacccaggcgtggcaaaattcgaacgtaagaagattagggccgccgtaaaagagtttgaagacttgatcgggagcggtgtgtttgtcagcgacgttgaaaacaagtacaactcagctatgggcagggtgggaaggctaatcgcctgcggccagagcgacgggatcatcctgaaggagagacttaatgctgcacggctcaaagcctctgtcccgctattggagaaatatctggcggcgaacatcatacctgtggtgcaggccaaggtggaggagtga

SEQ ID NO: 11051 - RNA, 1044 nt, synthetic construct
  source 1..1044: mol_type = other RNA
atgacaactgccaggtacactcgtaagcctgtgtacagcctcaaaaccctcggactgatgctcggcgagtccccagagttgctgctgagactgggcgcctcaagcagtggattttatcgggaggtgctacagcaaaaaaaagataagtctgtgcgtgttaccttcgatgccttccagcccctgaagagagtccaacgcaaaattgtcgaccggctgcttattcatgtaagctacccttcctacctgcacgggggaattagggacgtagactcccctcgctcccctctgagcaatgctagagcgcacttaggcgccaaatctatagcgctgcaggatattacgaacttcttccccagtatatctagggacaaggtccggaatattttcacaggattgttcggatttggctctggagtggcagagcttttgtccctgctggtcacgaaggacggcttcgttccccagggcgcttcaacaagctcctatttagccaacttagtgttttgggacgtcgagccgcgcttggtcagctggatacatagtcagaaccttatttatacaaggttcgccgacgatatcacaatctctagtaaggtgctggtgagcgatgaacagtggactgaaatcatatcgaaggtgaccggcatgcttgcaaccaaaggttttaagcagaaacgaactaagctccatgtgctcaaaaagggccaagctctgaccaaagggaataagcccgaaccactcgtcatcaccggtctggggatctccgggtcatctaccggtgtggtgaaggccgaacggcacaagatcagagcggccgtacgacagtttgaggctgctattgaaagcggttccagcttcgatgaggtggcacacctgtatcactcagccatggggagggttgggagaatgctcgcctgcggccaaccatcggggtttgaatttaagaaacgcttgaacgaggcaaagcgactaggccagatctctcttatcgataaatacatcgcagaaacttcagctgttagtgacgaggaggttcggggatga

SEQ ID NO: 11052 - RNA, 1041 nt, synthetic construct
  source 1..1041: mol_type = other RNA
atggatgccatcctataccactgccgccccatatactctctgaagtccctggcgcttgcactgggtgagtccgtggaatttcttggctggttagcttgccaagccgattccctttaccggcccgtgcaactggtgaagaaagatggcaccccgaggtacgcttatgacgcgagagcagacctgaagaaggtgcaaagaaagatagtggatagaatcctcgctcgggtcgtttaccctaaatacctccatgggggcataaaggacgccgacttccgcaggagcatttattcaaacgccaatctgcataccggggccaagtcatatatcgtgcaggatatcagtaacttcttcccttccatcagctttgctaaggtgtatgacgttttctccctgttctttaactttggccacgtcgtcgctcacctgttgactaggctagtcactcgagccggagttgtcccacagggggcgtcaacttcttcttatctggccaatctcgtattttgggacgttgagcctgaagtcgtattgggattgaaggaaaagggattctgttacagtcgtttcgccgatgacattacagtctctagcccaagtgcgttgagtgccgatgaaaaaaccgagatagtgacaaaggtgacaggaatgctcgcccggaagggatttaaacagaagcgctccaaaatgcacgtgttaaaaaaaggccaggccattgctctctctaatgggaaatatgagcctgcccttatcacggggctctcgatcagcggacccaagccagttatcacaaaaaaggagaggaataggattagaggcctggtgaagaactaccaggctctcattgacatggggcgacccgacagcgagctggaaaaagtatttcacaaggtgatgggccaggtgggtcgcattattgcatgtggccaggcagagggtgcagagttaaagaaaaccctgaatgaagcacggagactgtcgaaaaaatctatcttcgagcgtcatgattccctgatcaacgcaagcgaaagctcacaggcttga

SEQ ID NO: 11053 - RNA, 1116 nt, synthetic construct
  source 1..1116: mol_type = other RNA
atggacgcccccttttaccctcacagctcaatcaattccatcaaggctctggctagggccttgggtgaacccgctgaacgattgctcgcactagctcagaggagttcacgcctctaccgttatgtgccacagaccaagaaggacggcattacaccacgacatacttacgacgcccatgagcctctgaagaccattcaaagaaaaatcgttgaccgggtccttagtaaggtaacgtacccagagtatctccatgggggcatccgcgatcccaaattaccacgcagtatctattccaacgcgcgtatacacattggagccaagactgtgatcttgcaggacattgccgattttttcccctccataacaactgagcacattcagagactgtttgtggggctcttcaggttcagcgccgatgtggccagccttctggcctcactggttactcgggaaggacaggtgccgcaaggagccagtacctctagctatttggctaatctggtattttgggatatagagccagccctggtcacccggtttaaagcccagggaatggcatactctcgattcgctgacgatatcacagtgtcgagcaaaacccgcatcgcttccgcagctactacgcaggttattgcatctgtcacctggatgctgggtcagaaaggttgcctccaaaagagatcaaagctgcacgtgcgcaaaaggggtcaggcattgatcacaggcgagaaagccgaagcagtcacggtgacaggcctggtggtgaatgggccgatacctgcgctccctaaaaaggccagactggctattcggtctgcagtcaaacagctggaagatagggttcggggcaactccggacagctgagcgcggaagacgataaggaggtcaggagagtaatggggcgcatcggccggcttattgcttgtgggcatccggaaggacctcggttaaaggccagagtgcgtgtcctactggcacgaaccccccttttcaagaggtacgcggccggcgtggagatccaaccactcgtggtagctgacacaccccttggcctgaacgcagttgccaacactctacctcacgggcagagagagttaccctggtataccgagtga

SEQ ID NO: 11054 - RNA, 1122 nt, synthetic construct
  source 1..1122: mol_type = other RNA
atggatgcacctttttatccgcacagtccaattcactcagtgaaagcactcgcccgcgccttaggagaaccagcagagagactcctggccctagcgcaaaggtcttcccgattgtacagatacgtgcctcagaccaagaaggacggggtgactcctaggcacacctatgacgctcatgagcctctgaagacgatccagagaaaaattgtggatagaatgctgtgcaaggtgatctatccagagtatctccatggaggtataaaggacgcaaaactgcccagatctatttacagcaatgcccgtgtgcatatcggtgcgaaaacagtcgtgctgcaggatattgcggatttcttcccctctatcacaacggaacatatccaccgagtgttcgttgggttatttagattcagtcccgttgtggccactcttttagcgtcccttgtaactcgcgaagggcaggtcccacagggagcctcaacctcatcctacctggccaacctggtcttttgggacgttgagcccgccctggttaagaggtttgccgcacaggagatggcttactcacggtttgctgacgacatcactgtgagcagcaaaacacacatatcccctattgccaccacccagatcatcgcttctgtgacttggatgctcggccagaagggctgtctgcagaagcggtctaagttgcatgtgcgcaaaagggggcaagcactcattaccggggacaaggccgacgctgtaactgtcaccggcttggttgtcaacggctccatccccgctctgccaaagcaagccagactggctatccgagccgccgtgaagcagctggaggatagggtcgagggaaatagcggccaactaagcgccgaggatgagaaagaggtacggagggtgatgggccggattggtcggctcatagcttgcggccaccccgaaggacagcgtttgaaagctcgcgttagggcagtgcttacaaaagaaaccctgttcaaacgctacacagcagatcctgaattccacccacacgtcgtggctgcaacaagtgaaaagcggggtgtcccggtaagttcgattgggagcataaagccgcttcgcgaccctccctggaacaaagaatga

SEQ ID NO: 11055 - RNA, 1116 nt, synthetic construct
  source 1..1116: mol_type = other RNA
atggacgctccgttctatccccactctcctatccactcaatcagcgctcttgctagggccctcggagaacctgtcgagcgacttatcgccctcgcgcatcgtagctcgcgattgtaccgttatgttcctcagaccaagaaagacggaataactcctcggcatacctacgacgcacatgaacccctcaaaacgatccaaaggaagattgtggatagaatcttatctaaggtcgctttccctggttaccttcacggaggtattcgggacccaaagctgccaaggagcatttattctaatgcaagagtgcacactggagcgaaaaccgtgatcctgcaggacatagccgacttctttccctcaatcaccaacgagcatatacacaggcttttcgtgggcttatttcggtttagcgctgatgtggcaacgctgttagccgacctggtgacccgagagggccaggttccacagggagcgagtacttcatcctatctggcaaacctcgtattttgggatatcgaacccgcactggtcacacgcttcaaagcccaaggcttggcctactccaggtttgctgacgatattactgtgtcttccaagacacggattgatcaggccaccacttcccaagttattgctagcgtgacctggatgctggggcagaaaggctgtctgcagaagcgttcaaagctccacgtcaggaagagaggccaggctctgatcacaagtgataaggcggatgccgttactgtgacaggattggttgtcaacggtccaatcccagccctgccaaaaaagcacagaatggccatacgcgcagccgtaaaacagctagaagaccgcttcgaggggaattccgggcagctgagtgcagacgacgaaaaagaggcccgcagagtgatgggtcgcattggcagacttatcgcctgcgggcatccggaggggcaaaggttgaaggcccgggtacgcgtactgctgatgagagcccccttgatggagcggtacgctgataccgaatttcaggtccaaatggtggcagagacaacagctgatctcgatgtggccgcaagtagcctgcagattgatctacctgtggacctcccctggaaagtcggctga

SEQ ID NO: 11056 - RNA, 1089 nt, synthetic construct
  source 1..1089: mol_type = other RNA
atggacgctccactgtacccgcattccccaatccactcaatcaatgctcttgccagagcactgggcgagccagcagaaagactcctcgcgctggctcagaggacgtcccgtctgtaccgatatgtcgctcagactaagaaggacagaatcacccctcgccatacttacgacgcccacgagccgctgaagaccattcagcgaaaaattgtagaccggatgcttagaaaggtcgtgtatcccaggtatctgcatggcggcatccgtgaccgcaaacttccccggagcatctatagcaacgcgcgcgtccacacaggcgccaaaaccgtcattctgcaagacatttcagatttctttccttccatcacaacagagcatattcaaaggctattcgtggggctgtttcggttcagcgccgacgttgcaagtctgctcgctaacttggttacccgggaggggcaggtccctcaaggtgcttcgacctctagctacttagccaatctggtgttctgggatatcgagcctgccctcgttacacgctttgaggcgcagggtttggcatactcccgctttgccgatgatattaccgtgagttctaggtcacccataagtgccgcggtgaccacacaggtgatagcatccgtgacctggatgctaagccagaagggatgcctccaaaaacggagcaaacttcacgtaagaaagcgaggacaggctctcttgtccggtgagtcagccgaagctgtgacggtcactggcctcgtggtggataaaccgatcccagggctgccaaagaaggtaagactggccatacgggcagccgtgaagcagcttgaagacagggtgaagggagacttacgtcaactgagggccgaagatgagaaagaagctcggcggctgatgggaaggatagggcgcttgattgcatgtgggcaccctgaaggccagagattgaaggcccgagttagggttctcctgactcgcgctcccctactggagagttacgccgcagatgccgatcaccagcctagattacccgccgcaaaactgccctcttcttatcccgacactccaacaatctctgatcagtga

SEQ ID NO: 11057 - RNA, 1122 nt, synthetic construct
  source 1..1122: mol_type = other RNA
atggatgtgcccttctacccacataacccaatccatagcgtgaaggctctcgcgagggcattgggtgagccagtcgagcggcttttagccctggcccagcggagctcaaggctgtacagatacgtgccacagacaaagaaagatggcataactccgagacacacatacgatgctcatgaaccgctgaaaactattcagcggaagattgttgacaggatgctctgcaaggtgacctaccctgggtatctgcacgggggcatcaaggacgcaaaataccctaggtctatttacagtaacgccagagtccatactggggccaagaccgtgattctgcaggacatcgctgattttttcccttccatcaccacagaacacatccatcgcatttttgtcggcctgttttctttctcagccgaagtggcgactctgctggcgaatttagtgacccgagacggacaggttcctcaaggagccagcacgtcctcctatctcgctaatctggtattctgggacatcgagcccgccttagtcatccgattcaaggcgcagggtctggaatatagtcgttttgctgacgacataacagtctcctctaaagcccgcattagtcctgccgctactacacagattattgcttccgtcacttggatgttgggacaaaagggatgcttccagaaaaggagcaagctccacgtgagaaagcggggccaggctctcattaccggggagaaggcagaggctatcaccgtaaccggcctggtggtggataagccgatccctgccctcccaaaaaaggcacgcctggcaatccgtgccgcagtgaaacagctggaggatagggtccacggctatccaggccagctgtcaatagaggacgaaaaagaggttcgtcgggttatggggcgcatcggaagactgatcgcatgtggtcaccccgaagggcaacggttgaaaacccgcgtgcgcgcccttttgacacgagctcccctacttgagagatatgtggccgatgctgaatttcagcctcaaatggttgccgccacgtctggcgagctttcggtaatggccgcaagcgcattgcccatagatctcccccttgacctaccctgggaagcgggatga

SEQ ID NO: 11058 - RNA, 1155 nt, synthetic construct
  source 1..1155: mol_type = other RNA
atggaagcacccttatacccgcactcacccatctacagcgtaaaagccttggctcgggccctggatgaaccattcgaacgcctggtggctctcgctaagcgttcaagcaggctgtacaggtacgtgcctcagttcaaaaaggacggcatcacgcccaggcacacgtatgacgcatacgagccgctcaagaccatacagcgaaagattgtggacaggatcctctccaaagtgaactatccccgatatcttcacggaggcattaaggacgcgaagcaaccccgatccatttattctaacgccagagttcacgccggtgcaaagacagttatcctgcaggatatcgcagattttttccccactatcactactgagcatattcgcctaatatttaccggtctgtttcggttttcagaggacgtgggtgccttactcgcagctttggtcacacgggagggccaagtcccacagggagccagtaccagttcttatctggctaatctggttttctgggatatagagccagctctcgtggcgcgcttcaaagcacaggggctggagttttcgagatttgctgacgatatcacagttagctcaaagtcgaatctgcgcgacgccgtaactgcccagatcatttcctccgtgacatggatgctagggcagaagggctgccagcaaaagaggagtaaaatgcatgtgcggaaaagaggccaggccctgctgcggaccgaaaaagctgaggcagtaacagtcaccgggctcgtcgtcgaccggccaactttgtctctgcctaaaaaggagcgaatggcaattcgtgcggccgtgaaacagctcgagctgcgggtagtgggacatcaggggcagttcagcgaagaagacgatagggagattcgccgtgtgatggggagaatcggccgcttgatagcctgtggacaccctgatggtcagagacttaagtctagagtcagggccttgttaatggccgctcctctgctggacagatacatgggcagcgacgaagtgcctgttgtgatgcttgcgtctaccgacgagcttgttagcaccgagagcgccgctgtggaggatctagatctcccatgggatgtcaacgaactgtcccttgcctgcaagcaaaggagtcaaggatccgaaacatga

SEQ ID NO: 11059 - RNA, 1062 nt, synthetic construct
  source 1..1062: mol_type = other RNA
atggaggttctacgttatccctattcaccaattcactccttaaacgccctggctagagccctcgatgaaccagcagaacgactcgtggctatcgcaaaacgctccagccgcctgtatcggtacgtgccacaaaaaaaaaaagatggcataactccccgccacacctatgacgcacacgaacctttgaagtccatacaacggaagatcgtggataggatgttaaccaaggtcagttaccctgactaccttcaaggtgggattaaggatgcccgtaatcccaggagtatctacgccaacgcgagggtgcatgcggggtcgaaagtggtcattctgcaggatattgctgacttctttcctagtattaccgttgcccacgtccgcgaggtatttagcaagctcttcggattcagccatgacgtcgcccagctgctggctaatcttgttacgagggaaggccaggtaccccaaggcgcctctacctcttcatacctggccaaccttgtcttttgggatattgaacccgccctgatagagaggctcaaggctaagggccttcgttactctcgattcgcagacgacatcacagttagctccaaggctgagatcacacaggattcagtgactcagattatcggatctgtgacttggatgctgggtcagaagggatgccggcctaaacgcagcaaactgcatgttcgcaagagaggacaggcgctgatcagcgatgagaaaatcaatgcggtgacagtgacgggtctggtaatcgacaggtcatttcctggattgccgaagaaggaacggatggctatccgagcagcagtgaagcagctggaggacagtgcctgtgaatggccagaaggcccacccgccgaggagaaaaaggcaatacagagactcatgggcaggatcgggagactaattgcctgtgggcaccctgacgggcagcggttaaaagctagagtgagaacagtgaccagattggtcccattgattgagcggtataccccgaacgtagtggagtccgtcactctcaatcaaacagcccaggaccccgctcagtga

SEQ ID NO: 11060 - RNA, 1038 nt, synthetic construct
  source 1..1038: mol_type = other RNA
atggatgccctgcattacccccacagtcctatttactcagtctcagccctggcacgggccctaggagaaccgactgaacgactgatagcccttgccaagcgtggtagccggctctaccgctacgtgccccagaccaagaaagatggaaagacccctaggcacacatatgatgcacacgagccactgaagacgatacaacggaagattgtggaccggatcctgtcgaaaatttcatatccctgctacctgcagggaggcatcaaggacgtgcacgctcccaggtccatctatgccaacgctcgagtccatgcggggagcaaatcaatcatattacaagacattgcagacttcttccctagcatcacagtggctcatgtacgccaggtcttttctaaactactgggcttttctgatgaagttagtgagctgctggctgatctcgtgacccgggagggccaagttcctcaaggcgcatctacaagctcctatttggctaaccttgtgttctgggacattgaaccagcattagcagagcgtttcaatgctaagggcctccgctactcccgatttgccgacgacatcaccgtttctagcaagacagatatgccgcaggaggtagcgactctcgtcatcggtagtgtaacttggatgctcgggcagaagggctgccgcccaaaacgcagcaagctgcatgtgaggaaaagagggcaggccttaatctctggagacaaggtggacgcggtcactattaccggacttgtcgtggacggtagttccccttcccttcctaagaaggagaggatggcaatccgtacagctgtgaaacagctcgaggatagcgccagagattgggttgggggcccacccttggaaatgcagaaagatattcagagactgatggggaggattggccggttgatcgcctgtggtcacccagagggactgagattgaaagctagggtgcgcctcgtgacgagaagaggcccacccctggagcagcacacccagattgccgggaatatagaagttcattcctga

SEQ ID NO: 11061 - RNA, 1116 nt, synthetic construct
  source 1..1116: mol_type = other RNA
atggaagcccccctgtacccacatcggcccatttacagtcttaaggccctttctctggctctggcagagcccgaagccttgctcgtcgccattgccaagcgctcgtctaacctatatcggtatgtgccccagaaaaaacgagacggctctccaagagacacattcgatgcatttgagccactgaaagcaatccagaggaaaatcgtggacaggattctgatcaaagtcaagtatccggtttacctgcacgggggaatccgcgatgttgcacagcctagatcgatttattccaatgctaggtcacacgccgggtctaagagcataattctccaggatatcaagaacttctttccatccatcacaaccgctcatgtgaaagaaatattctccggattttttgggtttagtagcgaggtgtcatccctactggctgcactcacgacaagagccggtcaggtcccgcagggagctagcacttcctcatacttggcgaacctggtgttctggaatgtagagcccgccctggtcaagcagttaggtagcgaggggcttgcgtactctcggttcgccgacgacattaccgtgtctagcaagagtgagatccttcctgaagcaaagtcacggataatatccgctgttacgtggatgctcagtcaaaaaggatgtcagcaaaagaggagcaagctccacatccgtagaagaggccacagtttgcttgaggtgtcagaacccggagcagtgactgtgaccggcctgacagtagaccgcgcttcccctggcatccctaaagacgagcgacgactcatccgtgccatggtcaggagaatagagttacaagcggctgccgaacccggaccattaagcatcgatttggagagggaggtgcgcagactgatgggcaaggtgggtcgactgattgcctgcggccatccagatgggctgaggtttaaagcccgcctccgtactctcctggtccgggttcctgtgctagaacggtacgctgatacactgccaattaacgagattgaagcgttgacctccaatagcgatgtacaggacggtggcatcttcattcctccctgggagatcgaaacccctactaccgaccgcgtttga

SEQ ID NO: 11062 - RNA, 1128 nt, synthetic construct
  source 1..1128: mol_type = other RNA
atggacgcaccattgtacccacacagacctatttactccttgaaggctctgagcttggcgcttgccgagcccgaagcactgcttgtggcaatcgcaaagcgctcttctaacctgtacagatatgtgcctcagaagaaacgggatggttccaggcgcgacacttttgacgcctacgagcctctgaaagcaattcagaggaaaattgtcgatcggatactgactaaggtgaaataccccgcatatctccatggcgggatccgcgacgctgtacagccacgttccatctatagcaacgctcggtcccacgctggatcaaagtcgatcattctccaggacattaagaacttcttccccagcatcacaacggctcacgtggaggaaatattttcgggactgtttgggttctctaatgaggtgtctagccttttggcggccctcaccacgagagctggccaagttccccagggagcctccacctcctcatatctggccaatctcgttttctgggacgtggagccgaccttagtcaaacagctttctagtgagggcctggcctacagtaggtttgccgacgatataaccgtgtcatccaaatctgagatccctcccatcgctaagagtcgagtgatatcagcagtcacttggatgctgagccaaaaaggctgccagcagaaaaggagtaagctacacattcggagacgaggccaaagcttgatccaggtaaatgaaccaggcgcagtcacagtgacagggctcactgttgataaggttaagccgggaattcctaaagatgaacgaaggttaatccgcgcgatggtgaaaagaattgaaatccaagccgctgccgagcctggtcccttatccatcgatcttgaacgggaatgtagaaagctgatgggaaaggtagggaggctgatcgcctgcggtcacccagacggactgcgcttcaaggctcggctgagagccctgctagtcaggctccccgtcctcgaacgttataccgaggccagcccagatcatgagaacggggtggtagtccgcggcacagcggatcagtattctagcgagtacggggacgttatcattccgagttgggacattgatgtgccttcagcccatggcgtgtga

SEQ ID NO: 11063 - RNA, 1050 nt, synthetic construct
  source 1..1050: mol_type = other RNA
atggatgcgccaaggtatccatgcaagagcatccatagtctgaaggccctgtctttggccctaggggaaccagtggagcttctgctgagcctggccaagcgctcgagcaatttgtaccgacacgttcctcagaccaaaaaggacggttccgtgcggcacacctatgatgcacatgagcccctgaaaaaagttcagcggaagattgtggacaaatttcttgcaagagtgcgttacccggactacctccatgggggcataaaagaccctaacagcaggcgctctatctactccaacgctagaatccacggcaaggccaagacaattttgctccaggatatcaaggacttttttccttcaatcggcgtgcagcatgtgcagcagatcttcagcgggctgttcgggttctctgatgaggtggcacaggtactggcgctccttactaccaggcacggcgttgtaccgcagggggcatcaacgagcggatatttggcaaacctcgttttttgggacactgaacccgctctcgtcgcccgactgcacgctagaggactaaagtattcaaggttcgccgatgatataacaatttcagccatgacaacactcgagcgatctgccctaaccggcctcgtagccgccgtcactgacatgctggcaaaaaaaggctgccaacagaaacgcaccaaactccacattcggaagaggggacagtcccttctggctaaacccaaagtggaggctggatacgaacctttaactgtcacgggtctgtccgtcttcaatgaggcccctggtttgccaaaggcagaaaggaaagcgattcgggctgccgttaagcaggctgaggaccaggccagtcaaggcgcgagttgggcacaactggagcccacttttagatccgtcatgggtcgcgtgggacggcttatcgcctgtgggcatcccgatggcgaacgttacaagctgagactgaaggccttaaagacaagatgtcaagtccccttactggaccgctatgccgctgctgctaccggagcagatgtgccagtggtgtga

SEQ ID NO: 11064 - RNA, 987 nt, synthetic construct
  source 1..987: mol_type = other RNA
atggacgccccgcggtatccctataagcctatttactccctcaaggcgctgagccttgcccttggggaacccgttgagctcttaaagtcactcgctaaacgcagcagcagtttgtatcgtcacgtgccacaaactaaaaaggacggctccgttcgcgatacatatgacgcgcaccagcctctgaaggccatccagcgtaagatcgtggataagttcctggcaagagtcaggtaccccgattacctgcatggagggataaaagacccaagtagtccacgatcaatatactcgaacgcgcttacccacgggaaggccaaaaccattctcttacaggacatcaaggactttttccctagcatcagagtccagcatgtggagcacatctttacgggcctgttcggattttctgaggaagtggcacagctgctggcccttctgacaacgcggaatggtgtcattccacagggcgcaagcacctccgggtacttggcaaatctggtgttttgggacattgagcccactcttgtaagtcgcctgaacctccggggtctgaaatactctcggttcgccgatgatatcacaatctccgctatgatgccgttggacgggctcgttctgaccgagctcgtgggagcagtgactgtcatgttggctaaaaaaggctgccaacagaaacgctcaaagctgcatgtaagaaagcgaggccagactattcaggctaaagccggctttgaggccctaaccattaccggactgtcagtgttcaacgccgctccctctctaactaaagccgagagaaaagccataagggctgcagttaagcaagtagaagatcaggctacacaaggcggatcctgggggcaattagaacctacattcagatctgtgatgggcagggtcggtaggttgatcgcttgcggtcaccctgatggagagcggtataagcagaggctgaaaagcgtgcaggaacattgttacaagaagtga

SEQ ID NO: 11065 - RNA, 1047 nt, synthetic construct
  source 1..1047: mol_type = other RNA
atggacgcaccgctgtacccctttaagccaatttactcactgaaggccctgtctctcaccctgggtgagcctgcagagcttctggagagcctcgctaagcgcagctccaatctgtataggcacgtccctcagactaaaaaggacggaactcctcgtgatacttacgatgcctacgagcctctgaaagctatacagcgaaaaatcgtggacagactcctggcgcgcgtgcgttttccaggctatctacacggcggaatcaaggatccagtcaaacggagaagcatttatagcaatgcacatatccacggcagggcccagtgcgtagtgctgcaggacatcaaagacttctttccaagcattaagacacaacatgttcagcagctcttcgttggactgttcggcttcagtgaaacagtggcaggtatcttggcgcttttgaccaccaggcacggagtggttccccagggagccagctcttccggttacatcgctaatctggtgttttgggacatagaacctgccctggtcgcaaagctcaacacacagggcttgaattactcaagattcgccgatgatattactatcacatctacaaagccgctcgattcatccgctcttacgtccattgtcagtgccgtgactaacatgttagctcagaaaggctgttatcaaaaaagatcgaagctccacatacggaagcgggggcaaactgtgttatcaaagaacggcttcgagccccttaccgtgacagggttgaccatttttaacgccgtgccagggatccccaaggctgagaggaaagccattaggagtgctgtcaaacagctggaagaccaggccacccaggggatgacctggtccgaactggagcccttggtacggcgcgtaatggggcgagttgggcgacttatcgcctgcgctcatcccgaaggcgatagactgaaacaaaggctacatgcgctgaaggcaagatctcaagtcgcccttctcgaccggtatgcggccgcattacaggacgctacggtgaccggacagatacctggttga

SEQ ID NO: 11066 - RNA, 903 nt, synthetic construct
  source 1..903: mol_type = other RNA
atgattggcctgatcagcttttggggtcaggagatggacgcacctctgtacccattcaaacccatttacagcttaaaagcactgagccttacattgggagagagtgtggagcttttggaaagtctggccatgtgctctagtaacctgtaccgctatgtcccccaggaaaaaaaagacgggacgccacgggacacctatgatgcctttcaacccctgaagtccattcagagaaagatcgtcgatcgactgctcgcaagggtaaggtttcctgcttatctgcacggcggcatcaaggatccagtgaaccgcagaagtatatactccaatgcaaaggtgcatggcaatgccaagttcgtactgctccaggacattaaggattttttcccctccataaaagtccagcatgtgcagcagattttcgagcggttgttcgggttttccgaagaagtatccaagttactggcgttgctaaccacccgaaacggcgttgttcctcaaggggcctcttcttctggttacctggctaacttggtgttctgggacgtggagcctatgctcgtggctagactggaggctcaaggactcaattattcaagattcgccgatgacatcacaatctcatcactcaccccgcttaatagcgtgatgttaacgaaactcgtctcggccgttaccggaatgcttgcagagaagggatgttaccaaaagcggagcaagcttcacgtgaggaggcgtggtcagactctgaagatgaaagtgatcgacgaatttgtgcccctcaccgtcactgggctgacaattttcaaccagataccgggcatcccaaaggcggagcgtaaagccatccgcgctgctgttaaacagctagaagatcaggccactcagggacggacttggacatga

SEQ ID NO: 11067 - RNA, 1029 nt, synthetic construct
  source 1..1029: mol_type = other RNA
atgaactccgccctgctgtacctggacaaacacaagatggactttccaagctatccttgctcgccgatttactcactaaatgcgttaagtaggcttctcggagaacctctggacgtactgacacgaattgcgcttaagagcgatagtttgtatagacatgttccgcagcgcaagaaggatgggactccaagaccaacttacgatgcccacgagcccctgaagaagattcagaaaaaaatcgccagccgcatactcaatcggatcatctatccacagtacctgcacgggggagtgaaggacctgaagtctcctcggtctatctataccaattgtgcaccacatctgggaaagaacctcataatcctgatggacatagagaacttttacccctcaatatcccgggaacacgtcttttctattttcaacaagtgcttgggcttcagtagcgatgtaagtctgctgctgtcaacgctgctaacacgaaataatcaggtgcctcagggggcatgcacctcatcgcatttagcaaatctcgttttctgggatcttgaatccactacattttcttacctggaggagaacgagttcacctacaccagatttgctgatgacatcactatctccaccgatgcaaacaaggacaaaaaacaaacaggcgaggccgtctccaaagtgatcgctatgcttgcccggaaaggttgtcgattaaagaggaccaagtttcacattcggaggaggggacaggccattgttaaggacgagaaactcacccccatcacagtgactggcctctctcccttcaataaacatacattggctattacgcagagggagcggaacaaaatcagatctagcgtcaagaaaattgaaattcgcgcacatgctggggaaagctggaaagatctcgctccttcctataaccgcgccatgggccgtgtgggtagacttatcagctgtcgccaccccgagggcgacaggttgaagagacgtttgcaaatgctaaagacctatttcgaagccgctgtgtga

SEQ ID NO: 11068 - RNA, 984 nt, synthetic construct
  source 1..984: mol_type = other RNA
atggagctgccaaagtacccaaacgcgcctatatattccatcaatagcctctcccggatgctgtctgaacctccttccgctctgcagaaactttcagccaaagcagatactctgtataggtccgttccccagaagaaaaaggacggaagtccacgcgaaaccttcgacgcttatgaacccctgaagtctattcagaaaaagatcgccctgagactcctaaacaagacaaaatatccgagttacttgcacggcggcgtgagggacccttcaagtcctcggtccatctactcaaattcaaggccccatttagggagttgccacattatactcctggacattaaggacttctacccctccattacgaagagtcatgtgactaacatcttccaaaatttctttgggtttagcagtgatgtctcagacacactttctagactcctgactaaagatggacgggtcccccagggagcttgcacatcttcccatttggctaaccttattttttgggacgttgagccacaactggtgcacgatttgcaggcaaacggctttaattacaccaggtttgccgatgatattaccattagcagcgccagcaacagagataataaaacgaccggggaagtggtgtccaaagtaatatccatgctgaagtcgaagaattgtcacctcaaacggtcaaagtttcatatccgtagccgaggacagtcgatcactgggaaagacggcgagaaattccctctaacaattacaggtctgtctatctacaacaagagcaaaccaagcatcagccagcacgacagaaataacatcaggtcttctgtaaaggagatagaggtgaagacccatgagggggcaacttggagcgaaatcgccccgctttataaccgcgccatgggccgcgttggcagattgatctcttgtggtcaccccgagggtacccgtctcaagaatcgattacgcatggtcaagaactgcttctga

SEQ ID NO: 11069 - RNA, 1071 nt, synthetic construct
  source 1..1071: mol_type = other RNA
atggatgccccatattatccgtgtaagccaatttattcccttagagccctgtctctatttctcggggaacctgctgagacactgctgaggttaagcaaaaatgccgatcacatgtatcgcctggtgccccagaaaaagaaagacggtagcctccgcgaaactttcgacgcctatgagtctctgaagcgagttcagaagaagctggtgagtagaatgtttgggcgtgtccggtttccagcttacctccacggaggaatcagggacttcaacagtcccagatccattttttctaatgcaggggtccacgcaggagccaagaccgtcgtcttacaggacatcgaggatttcttcccctctatccggtttgagtacgtatacagcatctaccagggattctttggcttcgagcactcagtagcagaggttctggcgaggctgactaccaagcatgggtgcgtgccccagggcgcttgtacatccagctatatagccaacttggtcttctgggatgtggaaccgatcgtctaccgggccttggcagaaaaaggcgtgaggtacacccgattcgctgatgacatgaccatttcatcagctattgagttgtccaatgacgatataggggatgttatctcaagaattgtgtctatgcttcgttccaagggctgccgtcaaaaacggagcaagctgaatgtgcggcgcagaggtcagggcctcaaaaaggcggaaggattcgagtcgttgactgtcacaggcctcaccgtgtccaacttccatggcgtggggatcacacagaaggagcgcaacaagattcggtctagtgtgaaagagatagaaatcaaggcccatatggacatgccttggtcggaccttgaggtgctgtaccaaagggccatggggagggtaggtagactgctagcttgcaaacaccctgagggcgaacgccttaaaaaccgactcaatacggtgaaaagtttttacgacgtgagcaacgtgcgcgaaacgaaggttgtgatgggagataaatttgttgttctggacgcaagcggcgatgtaccaccttgggtcggttga

SEQ ID NO: 11070 - RNA, 1032 nt, synthetic construct
  source 1..1032: mol_type = other RNA
atggagcacacatattacccgcatcaccccattaactctctgaaagcgcttaatagggccctcgggatcgacgaggacgaaatctttcacgccctgtcaaacataagctataaagaagtccccatcaaaaagaaggacggtgccattcgagtaacatatgacgctaccagtgcactaaaggtagtgcagaagaaagtcacgtctaatattttccatcgagtgaatttccctcactacatacacggctgtattcgtgataccaagacaccccgcaatatatatacgaatgcttacccacacgccggatgcaagcaggtgatcttgtgtgatatcaaggatttcttcccttccattaaagcaaagaccgtgttctttatcttccgccattgcttagggttttcccccaacgttagccagaggcttacagacctgtgtacctacaacgggacattgccacaaggcgcatcaactagcagttatatagccaacctggcattttgggatgtggagcctctgctggtgaagaagctggagagtttaggactgacctacactagatttgccgacgatattacaataagcgccaagaaaagtatcagcaaatcactgaagactcaggtcctacacgaggtcagaaggactattcgaaaacggggctgctcgctcaaaaaaaacaagactatcgtcctcaagagatctcaagtaatcattggaaaggacaaagaaacgcaggaaactacaagaaatcctattaccgtgacctctctcagcatccaccactcctcagtgaccatctctaaagttgagcgccggaaagtgcgcgcgttcgtggataagctgagcaagaccgagttcaaccgggtttcctaccatgaatggtgccggaggtacagcagtgctatgggccgcgtgtcccgtttgatctcctgtggtcataaggagggggaaccactgaagcagaggctcaaagctcttaaagacgagcataaaaagtttcatcagcggtcttccaatgtttcaggcagaaagtga

SEQ ID NO: 11071 - RNA, 1032 nt, synthetic construct
  source 1..1032: mol_type = other RNA
atggataagatccagtatccccattctccgatcaattccttgaaagccttacaccgggctctgagagtagacgagtccgtcatgtcaaatgcgttgcagaatattaactacaaggaggttcctcttaagaaaaaagacggaactacaaggatcacctacgacgctgccccagcgctgaaggctgtacaaaagaaaattacttcgcagatcttccacaaaatcacatttccctactatatccatgggtgtatacgagatgccaacaatccaagaagcatatacacgaacgcatcaccgcacgccggcaagaagaacattatactctgtgacattaaggacttctttccatctatcaaggagaagacggtgtttttcatcttcagagagtgcttgagtttctcccccgaagtgtcacagaagcttacagaactgtgtacctacaatggcactcttccacaaggtgccagtacaagttcctacattgctaatttagccttttgggacattgagcctctgctcgtcgaaaaactgtcctcttttggattcacttacactaggtttgcagatgatattaccatgtccaccgataagcctatctcaacaacgctgaagacccaggccctccacgaggtgcgaagagcaattcgcaagcggaactgcagcctgaaaaagcgcaagacaatggtcctgaagcggggccaggtgatcaaagggattgacgagaaaaagcaaaagcccacagattctcctataactgttaccagtctgtccatacaccataaaaacctagctatcagcaagcaggagcggaggaaagtgagggcatgcgtgtataacctcgaaaagaccaatatggaggaaatcagctatcaggaatggtgtcgcaggtattcgtctgccatgggtaaagtgagcagaatcattacctgcggccataaagaaggggagcccctgaaacagcgcctcaaaaaactgaaagacgttcacaagcgtcaccatctacgtagctctaaagtcagcggacggaagtga

SEQ ID NO: 11072 - RNA, 963 nt, synthetic construct
  source 1..963: mol_type = other RNA
atgcgatccagatgcgaactgaccagcacataccctcacaacgctattatcgatcccgaacacctggcactgcttttaaatacccccccggagaagttgaaggatattgccaatgtggcctccggctcctatcgccccgttcctcaaatgaaaaaagacgggacaccaaggatgacatacgacgcctacccagagctgaagagaattcagcaccaaattgtcaagaagatcttacgtaaggtcaggttcccccgctatctgcatgggggaatccgagataccgacttccctagggatcatgtgtctaacgcagcgctgcacactggtgccaccatactagtgctggatgacattgccgacttctaccctagtctggaccggcagttagtgtttactacctggctgcgctttttcgggtttagcccagaggtcagcgagctgctcacaaacctgacaacaagacatggcgttgtcccccagggagcacgcacgtctagctacctggctaatcttgccttctgggataaagaagcccagctcgtggaagatctaggtaacatcggactcacttactcgaggtttgtagacgacgtgacctattcttcacatcggcagatattgaatagtactatcggaaatgcacgggctaaagtctatcgaatgcttgcatccaaaggatgcaggccgaagcggtcaaaaagccacgtttgtcgcaaggggcagaagctcgaggtgacgggcctcgttaccgctggctcaagccctactatagacaaagacgaacgtaaaagaatccgctctgctgtgcacaaccttgagaaggcggtgggcaaggaggggatgaccccagagaacaggaagaaatgggattccgctaagggcagggtgggtagattggtaagactgaaacatccagaatcacggaagctcagtcagcggttggatgccatcagacaaggctga

SEQ ID NO: 11073 - RNA, 957 nt, synthetic construct
  source 1..957: mol_type = other RNA
atgagaagtatctgcaagttaactcccacctatcctcataacgccatcattgacccacagcacttggctcttttgctgaatacacccttagagagcctgaaggctactgcaaagatcgccagtgggtcataccgacccgtacctcagaccaagagggacggcagcccccgtatgacctacgacgcttatccagagctgaagcgaattcagcaccagattgtcaagaagatcctacggaaagttagattccctaggtatctccagggtggaataagagacacggagttcccgcgcgatcatgtgagtaatgcagcgctgcatacaggtgcctccattctggtgttggacgatatcgccgatttttatccttcactcgagtcccagttggtgtttaccatttggctgcggtttttcggcttttctccagacgtttcggagctgctgacaaagcttacgacacggcattgcgtcgttccgcagggtgctcgcacttccagttaccttgctaatctcgccttctgggataaggaagccaaactggtggaggatctgggcaatatgggactcacctactctcgctttgtggacgatgtgtcctactcatctcaccaccaagtcagcaacagcactataggagaagccagggcgaaggtctatcgcatgctcgcatccaaaggatgtcggcccaagagatctaaatctcaagtgtgtagaaaagggcagaaattgaaggtcaccgggcttgtggccgcagggaactacccagcggtagggaaagcagaacgtaaacgaatcaggagcgctgtgcacaacctcgagaaagccgttggaagagacggcatgacacctgaaaatctgaaggcctggaactccgcaaaaggccgcgtgggcatgttattcaggctagagcacctggaagctcggtcactgagccaaaggcttgatactctcctgtga

SEQ ID NO: 11074 - RNA, 993 nt, synthetic construct
  source 1..993: mol_type = other RNA
atgttcgtttcctccgagctgaccccgttctatccccacaatcctattgtggaccctgaacatctggctagacttcttaacactccactcccaaaattagaggccattgccgagagcgctagcagctcataccgcccagtgccccagaaaaagaaggacgggagcccacggatgacctacgacgcctacccagcccttaagcgagtccagcaccagatcgttcagaagacgctgcacaaggtgcgtttccctcgttatctccacggcggcatcaaggacaccgaatttccgcgtgatcacgttagtaacgctgccctccatacgggggctgccatcttgatattggacgacatagcagacttctatcccagtttggatcgcaaactggttttttctgtgtggctgcggttttttcgattcagccctgaggtcgcggccctgctgacaaagctgaccaccaggaaaggatctatcccccaaggtgccaagacatcatcctatctggcaaacctagcattctgggatagagaggcgcaactggtggaagacctaaaagctatgggcctcacttactctaggtttgtagatgatgtcacatactcatcccgctgccgcattcctgattcagctgtcggtgaggcccgggccaaagtatacagaatgctgacttccaagggatgtaggcccaagagatctaagagtcaggtgagtaggaaaggaaggaagctcgaggtgactgggcttatcaccgcgggaagaagccccgcaatcagcaaagatgaacgaaatcgcattcggtcggccgtgcggcatctcgaaaaggctgtgaacgaagagggtatgacacctgaaaatagaaaggcatgggactctgccaaagggagggtaggccgattagtccgcctgaaacacgccgagggcagacggttatcccaacggctggacgcattgctccaggcagctccactggctcatagggtggataatcagtga

SEQ ID NO: 11075 - RNA, 966 nt, synthetic construct
  source 1..966: mol_type = other RNA
atgaaggcaactcctccactgtatttgcacgctagcatcgggtctataaacagcttaagtctcctcctaggagtgagccctgattctctcaaatccatcggcgatgctgcccagaagatgtacagagaggtgcctcagaaaaagaaagacgggagtttgaggatgacgtacgacgcccatccctcactgaagaaaatccaggacaagatttccaagctcatcctgaagaaagtggtctaccccgactacttacagggaggcctgccaaaaaaagatcaggtgagcaacgcagctaagcactctaaagccatcatcctcattcaagacgatattgaagacttctacccctccctgtccgatacaaccgttcggggggtatggcagcagttctttaagttttctcctgaggtggcaaaactcctaacctcactgaccacgctgaatggcaaggtcccacaaggtgcgaaaaccagtagctatctggctaatctggccttctgggactgtgagcatctgcttgttcagaagttgcttgacaaggatctgacatacactaggtttgccgacgatatcattgtatcaacccgagccatcatatccaactccgagattgcggtggtgagagcttctatttataacatgcttgccctgaagagttgcaagccgaagcggtccaaatcgagagtgtgccgcaagggcactcgtttatcagtgacaggtctaaatacaagccttaaaagtcccatggtaaacaagcaagaaaggaggaaaatacgcgccctccttcacaatctcgaagttagcgtctctttgaacggctatactgcagagaatgtcgctgcatgggaaagcattagaggaaaagttgtccggctgaaacgcctgcgacataaggaagccctgggatttgatgagcggctccacttgctgaagagccgtctgttctcttcatcgtccgtgctttga

SEQ ID NO: 11076 - RNA, 999 nt, synthetic construct
  source 1..999: mol_type = other RNA
atgctacgggaccggtacctgataattaagattccctctatcgcaaacacgagctcccttgctagtctgttggaaattacagaaaaggagctcttctacattgcagataatgtgcacgagttttataaaccaggcaaaataatgaggaagaaaaatggcgaccctcggcccacacacgatgccaagccagtccttaaacaaatccatgcgcgtattaagaatcgaatcctgaagcaggttgtgtatccatactatatgctcgggggcatttccgatctggaatccccaagatcctgcaaaacacacgctcagatacattctggaaagaaaatcctgatcagtgaggacattgcaaacttctaccccaatacatcctacgaggtggtaaaaaagatctggaagtaccacttcaaattcggagacgaagtgtccgagctgctgactaagctgaccacctttaacggggagttgccccagggttggaaggccagcgggtatatcgccaacctggctttgatcgataaggaacccgagcttgttcgcatcctggaggaaaaagggttgtcttactcaaggttcatagatgacattactgtctcctctccattctatctaacctcaaatgacaagcaattcatcatcagcaatatctatgccatgctgtttagctgcggatacaagccgaaacgaatcaagcatgagattgtgtcacgcgagatgcctatgtcagtcactagtcttaacgtgaataccaaaaaacccaccatacctagcaaggagaggaagattattcgcgccctcgtgtaccagctggaatgtgcctatcctgatgacggcagaagtatcagattttataaactctggctcagcgtctacggcaaagtaaacagagttaagtcttttcatgctgaagagggttctaaattacagatccggatgaggcagattaagccgcctaaacactttttctcgaacaagaagttactcagcacgtcgtga

SEQ ID NO: 11077 - RNA, 963 nt, synthetic construct
  source 1..963: mol_type = other RNA
atgccgcggaaccgctatccacagccctccatcccccctattgccaatatcacatcactagcgtcacttctgtccgtaaatgtgactgacctgctgtacatagccgacaatatcaacttgttttacaagcctggtaagatactgcagaaaaaaaatggggagcatcggtatacccacgatgctaagagaacccttaaactgatccaccagcacataaagaacaggatcctaaagaagatcgagtacccctactttatgcttggcggaatttccgacccgcagaacccaaggtcgtgtaaggcccatgcacagatccactgcaacaagaagatactgatcaacgaggacatactcgacttctatccaaccacaagctatgaactcgtgaaaagagtgtggaaacaccagttcaatttttccgatacagtggccgaaattctgactaaaatcacgacttatagtgggcaactgccacagggctggaagacaagctcttatattgctaatctggcacttctccccattgaggcccatttagttgagctgttggagaataagggatatagctacagtcggtttattgatgatatcaccgtcagtagccctactttcatctctcctcaggagaagaaaagcattatttctaacatctacggtatgctctttaaatgcgggtacaagcccaagcgaacaaagcacgaaattgtgtcaaacaaagaaaagatgatcgtcacctctttgaacgtcaacactgaaacccctacgctgtcaaaacaagaaaggaataacattcgtgctatggtgtaccaactcgaaaaactgttctccatccagggaaatacccaggcatacattcagaaatggcatagcctgtacggcaaagttaacagactcaaatccttccataagaagaatggcgagcagttgcaagagcgcatgaaactcatcaagccattaaagtga

SEQ ID NO: 11078 - RNA, 963 nt, synthetic construct
  source 1..963: mol_type = other RNA
atgaggaagattcgataccctatcgctaatatacaacccatcgccaaaattagtagtcttgctcgattactgtcggtgcgtgaggctgacctcctcaacataattgacaacatcgaatcatttcacagacccggaaagttgctgaagaagaaaaacggggatccccgccctactcacgatgccaaatccgaactgaagattattcacgcgagaattaacaatcggatcttgaaaaaggttcagttcccatactatttgcaggggggtatcgccgataagtcctatcccagaagttgcaaggaacacgcccaaacccatagtggtatgaaaatcatcatatgcgaagacatagcagatttttacccgagcacctcctatattactgtcctgaagatctggaagcattttttcaacttctccaacgaggtggccgagattcttacacgtctgacaacttaccagggagcactgccacagggctggaaaacaagctcttacatcgctaatttaaccttttggcattgtgagcctgagctggtgaaaataatcgaggagaaaggcctctcctactctaggtatatcgacgatatcacggtaggatcccgccttcatatttcaaacaatgggaaggagttcgtcattagctctgtttatggcatgctgttttctaacggctacaagcctaagagggaaaagcaggaaattgttagctccgagaaaccaatgatcgtcacatcactcaatgtgaacagtcagaagcccaccatcccgaaaaagttccggaataacgtgagagcaatggtgtaccagctcgaaaagtcttttatctcaattggcaatagcattgagtatgacaagaaatggcgcagcgtgaatggatctgtctgtcgggtaaagagcttccacctatcagaaggggccaaactgcaggagcggatgaggcaaataaaaccaatcaaatga

SEQ ID NO: 11079 - RNA, 966 nt, synthetic construct
  source 1..966: mol_type = other RNA
atgtcaataaagatctatacacccgagcctaagatccagtacatttctaagattagttccctggcccgaatcctgagtgttaattctaacgacctgcttaatatttccaataacacccagaagttctataaacagggcaagctcatatcgaaaaaaaatggcgagaaaagagtcacccatgatgcaaagccaaatctgaagaatatccacgagattatcaagaataggttacttaagacggtaaactatcccttttacctgcatggtgggatcgccgacccaagcatcaaacgctcttgcctaagtcacgccaagacccacataaattcccacattatttttcaggaagacattgctaacttctttcctaacactgataaaaacacgatcaagaaaacttggaagtacttgttcaatttctcagacgaaatcgcagagatactgagcaatctgaccactcatgaaaacatgctcccgcaaggttggaaaacttcaggctatctcgctaatctcgtgttttgggaaaaagaagctcaacttgtctccaacttggagaagaaaaatctttcttacagccggttcattgatgatatcgtggtgagcagcccatgtcgcatcaataacaacaacaagaacttcatcatctcaagcatttacaacatgttgtaccattacggatatgagcctaaacggtctaaacacaagatttcaacaaggaaagatcccatgagtatcaccgggctgaacatcaaccccaaatttaagtccttgacaatctccaagtctgaaaggaacgaggcgcgtctggctgtttataatctggagaagaattacaaccggattgagaaagaagactatataagactctggaatagcgcctccggaattatcgccagaattagtctgtttcacaagaaagaagcaaagacactacgagagaagataaacaaagtgaagttactctga

SEQ ID NO: 11080 - RNA, 969 nt, synthetic construct
  source 1..969: mol_type = other RNA
atgtccaccaataactttccgataattaacatccctagcttcagcaaccccgcctctctggcaagtctgctgtctgtttcagagcaggatctctttagaatcacttcttcagtcgataacctctataagcccggtaaaattctccagaaaaagaacggcgagctccgacggacacacgacgctaagaagcctctcaaggacttacacgagattatcaagaacaggatactgaaaaaggtggtctatccctactacctgctaggcggtatagccgatccatttaagccccgcaattgtacaaacaacgcgcttatccattccgggaaaaaaatccttattgcagaagacattgagaatttcttcccatcatcgagttctgacatcgtgttcaatatctggaaactgtgctttaaattctccccaaaaatcgccgacatcttaactaagctcaccacatatcagaaccaactgcctcagggatggaaaacctccgggtatcttgctaacctggtgttttgggataatgaaccggacttggtgagagatttcgaaaaaagaggctatagctacagtcgctttattgacgatatcgccatctcaagcaatcagtttataaacgataaccagaagtcctacattattagccggatctacagtatgctgagacttaagggctacaaacctaaacgcaccaagcatgagatacagactcaaattaaatccatgcacttgacggggctagggattaaccggaagaggcctacagtcccaagaaatcgtaggaataatgtacgcctgttggtgtataatttggaaaagcggcaccgtcatgaaggagacacccatcaataccgagaggactggattagcgtttctggaaaggtaggccacatcaggagcttccacaataatgagtgggagaagctgaagttcaggctgaataagatcaagcccaacgataaagtgtga

SEQ ID NO: 11081 - RNA, 963 nt, synthetic construct
  source 1..963: mol_type = other RNA
atgccaagggacagacatccggtgattaatatttccccaatcgccaaagttagctccttagcgagtctcttgtcaatcaaagagtccgacctgctgtatattgccgctaatgttgatcgattccatcgccccggcaaagaactaaagaaacggaacggtgagcctcgccaaacccacgatgccgagcagcgcttgaagattattcacggtcgaattaacaaccgcatcctgaaaaaggttgactacccctattaccttcagggaggaatcgcagacaaaaagagaagtcgtggatgcagggccaatgcaatcatacatagcaggaagaagctgataataaccgaggacattaaagacttctttccctgcacatcaaagcggatcgtgaagggcatctggcagtactgttttaggttccatcctgagatcgcagacatcctgactcgtctcacgatctaccagaaccagctgccacaggggtggaagacctcatcttacttagccaatcttgtgttttgggacaaggaaccggatcttgtctctctgctcgaacaacggggctatagctattccaggtatatggatgacattactgtcagctcagggcactacatcaacaaccaccagaagaactatatcatcagcaaagtgtacgagatgctgttttctaagggcttcgccccaaaaagaagcaaacacgagatagtaagtcagtcccaacggatggatattacaggtcttgtggtgaatagaaagaatcccaccgtgctaaagtctaagagacgtggcgtacgagtcggggtcttcaaactggaagaactccctattaataaccgcagtgatgctgattaccgggagtgttgggaacacctctccggactggtgtcttacatatcggcttatcatcctaaagaggggaaaaagttgcgggctcgcctgagaaacatcaagcccaataggtga

SEQ ID NO: 11082 - RNA, 1008 nt, synthetic construct
  source 1..1008: mol_type = other RNA
atggctccggaatcgaacaaaacctgttccaaagttgggcccattgcacatgtgaaagccttggcaagtattctctctacgacaccatccgagcttatagcactttctgagaatgtaccaagtctgtggaagcccgggaaagtgctaagaaagaaagacgggactccacgccctacacacgatgcccgaaaagcccttaaggtggtccatgaacgcatcaagaataggttactgcgccaggtggattacccagggtacctcctaggcggcattagcgacaagctgacaacccgagactattcccggcacgcagccctgcacgctaaaaagaagatcctgatcagcgaggacatccaggacttcttcccctcaacaaccgctgaggtagtgcaagaaatatggcagcgcttgtttaacttccatcctgacgttgcagagcttctgaccaggctcacaatctatgagggagccttaccccagggctggaaaaccagtggctacttagcgaacctcgctttgtggaggcgggaaccggactttgtcgctagactccaccggcagggtttggcctatagtagattcatggacgatgtgactgtctctgctccgtaccccctgtctaagactcagctgacaaacattatatccggaatttacggcatgctggcctcaggtgaatttgcccccaagcgggccaagcacaaaattgcaactggtcgaagccggatggaggtgactggactgaacgtgaatgccgccaaaccttctatgcctaagaagcgtagggatcaaatcagagcgcaagtttatcagtgcgagcagggatacaagagggatcctcggagcccagagtatctcacgcagtggagaaatgcatcaggcaaggtgggcaccatgaaaagatttaatcctggagaagcgaagtcactgaggacccgtccagctctgtacccccaagtcgcccagaccagccgctatggggctgtctcctttgatttcatcagctga

SEQ ID NO: 11083 - RNA, 999 nt, synthetic construct
  source 1..999: mol_type = other RNA
atggctctagagaataacaaggcatgtagcaaggtcggctccattgcccgcatcgaagctctggccagtgtgctgtccacaactccagcggagcttttggaactatctgagaatatccatagtctgtggaaaccaggtaaaatactccgtaagaaggacggcaaacctcgccatactcacgacgcaagaaaaccgcttaaggtcattcacgagaggataaaaaaccgcctcctgaagcaggtggattatcctcactacatcttaggcgggatctccgataaacagaccacaagagattattctagacatgcagctctgcactcaaagaaaaagatccttatcagcgaagacattcgagacttctttcctagcacgacctctgacgttgtgctgaacatttggttgcggttttttaactttcatcctgaagtggccgcattactgaccaaactgacaacccacgagggagtactcccccagggctggaaaacctcagggtacctggccaatttggccctttgggaccgcgagcccgatttcgtgactcagctccaccggcagggcctggtttattctcgcttcatggacgatgtcacagtgagcgccccttatcccataagcaagacgcaggtgaccaatattatttcaggtatttacggtatgctcgctagtagggattacaagccaaagcgtagtaaacacaaaatctccaccggacggcataggatggaggtcaccgggttgaatgtgaacgcgacacgaccctcaatgcctaagctgcggaggaaccagatcagagcacaagttttccaatgcgagcagctctttaaacagaatgcccggtccccagaatacctggctcaatggaggaatgccagcggaaacgtcggcactatgaagcggttcaacccctcggaagccaagggactgcgagcgagattaactgctgtaaagccctgcgccccaagaagggactgcacacgtgggttcccgtgttga

SEQ ID NO: 11084 - RNA, 966 nt, synthetic construct
  source 1..966: mol_type = other RNA
atggagcatcaggatcgtaaagcttacagtaaggttgggcctatcggatgcattgacgcgcttgccagtatgctgtcaatcagcgctaaagacctgttgactgtatctaagagcgtggagagcttctggataccaggtaagacccttcgaaagaaatcaggagagcccaggctcacctcaaacgccaaggagccacttaagggcctgcatgaaaagatcaagaatcgcctcctgaaacgggtgtgctatccttattacctactcgggggcatctccgactccatgatgccccgcgattacaaatgccacgctgctatacactctggaaagaatatcttgatttcggaggatatcaaggactttttcagctccaccaaaaccgatgttgtacactccatatggcagtgtttatttcatacaagtcctgacgtggcatccgtgctgaccagcttaactacatataacgattgtctaccgcaaggctggaagactagcgggtatttggccaaccttgccttttgggacttggaacccgacctcgtggaaaggctggaaaaacgaggcttcagctactcacgcttcattgatgacatcaccgtgagttcccgctgccgtatcggtgcctccaagaaatctttcgtcatatcggagatttacaggatgctgtccctccgaggatacagccccaagcgggcaaaacaccgcattgcaacaaatgataacagaatgggggtcacaggtctgaacgttaacaagaatacgtcttctatgccaaaggagaagaggaaaatcattagggccatggtgcatagatgtgagaatcactacatgcaggacagaacatctgaagggtataggaaatcatgggaacggacatctggcaaggtcagtactctgacccggtttcacgaaactgagggcaataaactgagaaagcggctgcagacggtcaaacctattagatga

SEQ ID NO: 11085 - RNA, 1026 nt, synthetic construct
  source 1..1026: mol_type = other RNA
atgggctttcatcctctcccacaggtaaccccgatcgccaatatatctagcctggctaacctcttagagatcacagtcgaagatctggagtatgtccttgccaacaaggaccgttactggtgcccagggaagaaactaaccaaacctaatggtgaagtgaggcacacacacaacgcaaagcctcggctgaaagccatacaccagaagattttggacaagctgttgaagaaagtgttttacccgatctacatgcagggcggcgtggcggatctgcttaatccccggagctgtaggacccacgccgcgtttcattgtaataagtctatcgtgatctccgaggacatcaagtcctttttccccaactgcgactataaaaacattagatcgatctggcaggggtttttctgcatggcaccagaaatcgctgagatcttgacacagctgacaacatatcaaaatgagctaccacagggttggaaaacctccggctacctggcacaacttattttctacgatattgagcctaaactcgtcgaagaacttgacaggcagcaagtagcttattccagatacattgatgacatcactatcagctcatcaagactgctgacagatcgacagaagacggacattatctcaaagatttacagcatggttttccacaaggcccatcacccaaatcggaagaagcagactattttttccccctctgttaacggagtggggaaaaccgtgactggactgacggtgaatagcaaaaagcccacaataaacaatgacaaacgcaaaaagctccgaagtgatatacataagttaagcctcagattccacactgacaagaacctgtatagttatgacaaggattggcgctctattacttccaaagtcggacacatcaagactagtcatcctcggcagtggaaaaaattcaggcaagagatgaacgccataaagcccaccttcaaacgcaagaaaaagaccaacaccaaaaaagctgttttcaagggaacgattgatggcaagtga

SEQ ID NO: 11086 - RNA, 966 nt, synthetic construct
  source 1..966: mol_type = other RNA
atgtctagtaaagacctggctcctagggtaggctctatatcaaatattgcaagagtgtcctccctagcccggatcctggggactacagacgataggctgttgtacatcgccggaaatatcgataagtattggaagccagggaagaagttaccgaaatccgatggtagtatcagaatcaccaatgatgctaacgacgtgctgaagaatatacacgagaggatcaataggaaccttctgaagccatgcttttatccacgatacttaaacgggagtctgccgggcagatcaattagaaaaaacgccgagtttcatctgcgctctatggtgctcgtgaacgaagacatcgaaaatttttaccccagcgcccggttccgccagattaagggcatttggaagtacttcttcaaatgttcagacgaagtggctgtcatcttgacgaagctgaccacatataaaggcagccttccacagggctggaaaccctcgagctatcttgctaaccttctcttctgggacaccgagtatatacttgtcgagaaactccaagcagccggattttcttactcccgcctgatggatgatatcaccgttagcagtcgcaagccctacactcctgaaaaattgtcagttctcataagcgatctcaacctgtttctccactccaaagagtttaagttgaagagaagcaaacactccatcaagccctcttatacacggcaaacagtcaacaatcagattgtgaacggttcgaaggtgaccgtccctcgagagaggcgtaaactgattcgggcgctcgtacacagcttagaaattgactactcttacggagcagtgttctccgacaaatataagactaagtggaagagcgccagtcagcgcgttgggggtctgaaacatggacatctgtcagagcggaattccctacgacagcgtctgcagaacattaagcctagaatcaggttctga

SEQ ID NO: 11087 - RNA, 909 nt, synthetic construct
  source 1..909: mol_type = other RNA
atggccaagcacctgggcctccctacagaacacttgatcgagatcgctcagaactcagccagccattggaggcaggggcctgatcttgtcaaacccgacggctctattagaaagaccaattccgccacgcagcagctgaaggacgtgcacacgagggttaagtttaagattctccgcaaaaccttttacccagattatttgtacggttctctccccaaaacacttgaacagggagtaaggaatcatattgctaatgcagagctgcacgcgggacagaggctgatcatcagcgccgacattaaagggtactttccaagcgtcgaccccgttgttgtgcacgggatatggcaggggttctacccgtttgcgcatgatgtggctgaggtgctgaccaagctgagtacctacaagaacgaaatgcctcaaggatggggcccaagctcgtacctggcacagttagtattctatgacactgaacatgatgtggtcgagtacttacaatcacagggtttccaatattccagactgaccgatgatataacattgagtaccaaccggtccctcaaaaaatctgagatcactgacgcaatccgcactctgaatcgaatgctcaatcggaagggtactaacattaaccgttcaaagacacgcgtcgacagccccaaaagacagcaaagtgtcaacaagatcaacgtttccgtgcgtggcatgacactaagtcagaaatatcgcaaggctgtgcgagccaaagtgcacaatgtggtgaccaaccctgaactattcggagataagcttcacagagagcttcagtcagcaaagggcaaaatatcctatttgggcaagttccatgaggccgacgccaaaaagctgaaaagccggattcggaattttgagctgtctactaagtga

SEQ ID NO: 11088 - RNA, 975 nt, synthetic construct
  source 1..975: mol_type = other RNA
atgaggctctctcagctgtcacctcgctatgcgaggcgtcgaatccagcgggtggaatctcttgcaaagttgcttggcacttccccaactgaccttgcagccctggcggccaattctgctcactattggatcccgggccggactaaaacaaagagcgatgggaccaagaggcacacgtccaacgccctcgaaccactaaaatccattcataaggccatcaagaacaaaattctgcgggccacgagttatcctcactacctgatgggaggtcttccatcagacgaagaggccggctgcattcgtcattgtgaagagaatgctaagagacacagcggccagagaattgtggtgacagaagatatcaagagtttctaccccagtattactgcaagtagaattcatgacatttggcaggggttctaccgattctcgccagaggttgcagagttgttgacaaaactcacaacgtaccgcggcgtagtccctcaagggtgggttccatcatcctatcttgccaatctcgccctgtgggactgcgagcccgggttagtcgcacacctcgagcggcagggtctgacctacactaggtggatcgacgatatcaccataagcagcaaaacatttgtggctcccgcgtgtaagaccgccatcgtgacagctgtgtacggtatgctgcgctccgccaatttttctcccgctcgaaccaagcataggataaggacccggggacaaaatcaacgcgtcatgaacctgaacgtgtcgggaaaaagacccaccgtacctcgacagcggttggccgaactgagagctactgttcgcaacctgttacgcgacgctggctcactgtctgcggccgattataccagcaaaagagataggatcgaggggcagataggatccatcagcaggatgcacccgcgcctagctgagagactccggaaccagctggcaagcgtcagacgtcctgcaaattga

SEQ ID NO: 11089 - RNA, 924 nt, synthetic construct
  source 1..924: mol_type = other RNA
atgtcaatcgtgctgagctccttctatccctacaaacctataagtaggcttgatagcttagcaaaagttctctccgtcgacgtgagtgcactggaaaaaattgcatctctggcctcatcgtactatagggagaataagctcaaaaacaataggatcacttacacagtcctgtccccgctgaaggagatacaggagaagatcaaaaagaatctgctggacaaggtcgtgtgggcctattatctgcactcttatattaagaagcggaatacgaaaaccaacgctaccgctcacctgtttaaaaaagccctctttaataaggacatcaaaaagtacttcgacaattgcaaagaaaagcacatctacaatgtatggtccaagttcttcaactttactgacaatgtggcctctatactgaccaagttgacaattcgaaacggcgagctcccacaaggttcttgtacctctcccagccttagtaacctcatattctggaaagatgaaccacggcttgtgtcagaatttaacaagatcggactagcgtacaccagatatgccgatgatatctcagtttcctctaagaacaaaaaactggataaggtgtacattatcggcaaaatatacgggatgttttccaaaaatggtttcaagcctgctagagagaaacataagatttataacagcagcgagaaaatggtagtgaatgggcagacagtcaactccaaaaacgtgactttggataagaagtacattttgaaggttcgcagctatatttacaagcttgagaaacgtatcaacacgttaacaaagagcgaattcgacatcgactatcagagtattttagggaagattaactacatcaagcagtacaacaaaaagggcctgggactagagtcgcgcttgaataagctcctggacatcttttga

SEQ ID NO: 11090 - RNA, 960 nt, synthetic construct
  source 1..960: mol_type = other RNA
atgaagccacactacctaaacaagccgatatctagtatttcatccctggccaagtgcctacagacaaccgtcgacgaattgcaaaatctgagcactaatgctgacaagtatttttttcttgccaacagggtccagaaggaagatgggtcttaccgagacacttacgacgtgcgccaacgcctgaagatcatccatgacaagatcaccaaaaatatcctcaagaaggtgtactaccccgattatcttcaaggatccctggcaaagaaagaccacatcagtaacgcagaaatccactctgggaaaaaggtgataataaagggcgacatttccaattttttcccaagcataagcaaagatatcatttaccagatctggattgaattcttcaacttctcaaaggaggtggccgagttgctctcccggctgacaacatttaacggaaagatggtgcagggctgtaaaacatctagttatctggcgaacctggtcctgtggtcccgggagtacaagtttgtgaacctgctgaaatcacagggttttacctatactcgctatgtcgatgatgtgcatgtatccagcgaacgaatcatgcacaaatctgagaagacgaaaattatctctaggatctacaatctcttcgctagcattaacgtacggcctaacagaaagaaacaagagatcatgcctaggaatcagcagcagattgttcacaaactcaacgttgataagagtacccctaacatgcccaaacagaaaagaaacgagattagaaaactcgtgttcatctgcggtaaagccttcgaggacaataatatcaccttgagcgagtacacgaaaaattataacactgtcatgggaaaggttaattatcttagacggctccatcccaaatgtggcaatcttttgctgtcaaatttaaggtcgatttccccattaaagcgtatgaagataattagctga

SEQ ID NO: 11091 - RNA, 951 nt, synthetic construct
  source 1..951: mol_type = other RNA
atgaaaccacgctacctgaataaaccaatctcttcaatcttttctctcgcaaagtcactccaaactacggtggaagagctgcagtacctaagcgccaacgccgataaatacttctttttggccagtaaagttcagaaagatgacggttcctatcgtgaaatttacgatgtcagtcagaagctgaagaatatccacgacaagattacaaaaaacatcctcaagaaggtctactaccccgactatttgcagggctccctcagcaagaaagatcacatctctaatgcggagatacatactcgcaaaaaagtgattgtcaaaggagacatctcgaatttctttccgtccatcggaaagaacatagtgtatcaagtatgggtggttttctttaatttctccaaggaggtggctgaactcttaagtaacttgatcaccttcaatggtaggatggtacagggctgcaagacatcctcttatcttgccaatctggttctgtggtctagggagtccaaacttgtcgagagcctgaaattgcagggctttacctatacaaggtatgttgacgatgtacatgtgagcgctaagaggattatgagcaagagtgagaaaaccagaatcatcaagggaatctacaacctgttcgcatcaattaacgtgcggcctaacagaaagaagcaggaaattatgcccagaaacttacaacagaccatacacaagctcaatgtgaacaagtctatgccaagcatgcctaaacagaagagaaatgacattcggcaactggtgtttctatgtgggaaagctttcggcgataatcggcttgcaatcaacgagtacacaaagatgtacaattcggtcatggggaacgtgaactatctgcgacgcatacatcctgaagaggggggccggcttctgagcaagctgaagtcaattactccctccaaccgattcatttga

SEQ ID NO: 11092 - RNA, 957 nt, synthetic construct
  source 1..957: mol_type = other RNA
atgattgtgtatccatataagccaatctcctcactgaaaagtctttctatcgtcctatgcattagcgagcaggagctgcactacatttatatgaactccgatagctactatttcctgacgaaggacattattaaaaacgacggtagtcataggttgacttacgatgtgaaatctaagctcaagaccatccacgataagattaccaaactgatcttgaagaaggtgaattaccctgactatttgcaggggagcctcagcggcaaagatttcataagtaacgccaaaaaccactccaaaaagcggattataatcagcgaggacattactaacttcttcccgtctatatcaaaggaaatcatataccagacgttttccaagctgttcaattttagccccatagtttgtgacatcctttccaaacttgtaacatataaggggtatctcgtccaaggctgtaagacatcatcttacctatgcaatctggtgttatggaatagagaaaaagcgctcgtggacaatttcaaaaagaagggatttacgtacacccggtacgtggatgatatccacattagctcgaactcatttatcaacaacgacgaaaaggaatacatcatcaaaaaggtgtacaatctgatgagaagtatcaatgtcaagcctaatcgcaaaaagcacaaaattatgaccaacgacaatagtcagtctgtccatggagttattgtaaacaaaaaggccgctttttccaaggaatatcgcaatgagatccgaggcctcgtgtttaattgccagaagaagtttaagctttcaattaacgagaaggagtataccaaattctaccaatccgtcttaggtaaagttaatctgttgaagaggctgaacgagaacgaggcaaagaaacatctgaacactctgtctaaaatcaaacccatccacttcaaggaaaaagagaaacatgattga

SEQ ID NO: 11093 - RNA, 945 nt, synthetic construct
  source 1..945: mol_type = other RNA
atgatgaagttttcatatcaaaacaagcccatttcaagcatcgacagcttggctaaggctttatccatcagtgttgacgaactgttctacctgtacaacaattccgataaattctactacgtcgccaagatagagccaaaacctgatgggtcctttcgtaaaacctatgacgtgaagactcgcctgaagaagattcatgagaagatcaacacaaatatcctgaagtgcgtgaaataccccgattatctacagggctcacttaaggagagagatttcctcagcgatgcaaacaagcacaccaacaagaagattattatcaaggaggacgttagcaatttctttccatctatctccaagaagattgtatatcaggtttgggcgattttctttaacttcactcatgaggtgtctgaaatgcttagtgagctgattacatataaagggttcgtcgtgcagggctgtaagacctccagttacatatgtaatctcatcttgtggaatcgggaggaaaagctcgtaaatgagttcaagaaacgcggctttatatatacaaggtacgtggacgacattcacgtctcatcgtgcaacataatcaaaaaagagaacaagcgatacatcatcaacaacatctataagctcatgtattctgttggagtgcggcctaatcgagaaaagcactctgtcatgcctaaaagcgacgtgcagaccgtgcataacgtaaatgtggataaagccataccaagctttcccaaacagaagaggaacaaaattagacttggtgtgtacaattgcgagaaactgtacgacattgaaaagcacacggaaaaataccggaaactgtattttagggtcctgggacaaatcaatatgatgaaaagattgcacgagaaagaagcccataaattaattcagagactgcgcaagatcaggccggaaaatatctga

SEQ ID NO: 11094 - RNA, 945 nt, synthetic construct
  source 1..945: mol_type = other RNA
atgatcccaaagtacctctttaaacctgtggccgacttagatcttctggcgaagatacttggcattacaaaacaggaactggacgacctctatcattcttcagattccttttttttcctgcacgagagaaagcaaaagagtgacggttcttatagagacacctataacgttaagaagaggctgaaaattatccacgggaaaattagcaaagagttcctgaagaaagttaattatccggactatctacagggcagcctcaaggataaagattttctgaccaatgccaaaaaccatctgggacaaaaaattctcataactgaggacatcaccaacttttttccctctatcagcaagaaaatcgtcttcgaggtgtgggtcggattctttaaattctcgaaagaagtcagcgagtacctcgctgaacttatcacgttcgagggctacctggttcaggggggaaagacttcatcatacatttgcaaccttatcttctggagtagggaatccgagctagtggactacctcgccaagaagggctacaaatatacacgttacgtcgacgatattactgtgagcgcaaacaaaattatcaccttaaaggagaagaccgatattatacgccggatttattccctgctgaagtctgtaggggccaaacccaatagaatcaaacatcagataatgccacgcaacaagcggcagatcatccacaacctgaatgtgaaccagaataagcccagtatgacaaagaagaagaagaacatgatcaaggcagctgtgttcgaatgtgaaaagaagttccaaaccgatcctaattccaaggagtacttgaaattgttcaataagacaatgggccgagtaaatcacatgaaaaggatacaccctaaaattggtgacgtgttgcagaaaaagttgaaactgatcaagccccaggataaattttga

SEQ ID NO: 11095 - RNA, 966 nt, synthetic construct
  source 1..966: mol_type = other RNA
atgtccgagcatagtagctttagatatccatacaaaccaatcgcgtccctggaaaaattagccatctgcctgaatataacgcttgaggaactgaactatctacaagagaacgccgactcattttactttctgaccacacgcgaacagaaaaaggacgggagcttccgcgagtgctacgatgtgaagaagcggttgaaggacatacatgagaagatctccatcaagttcctcaaactgattgagtatcctgaatacctgcagggcggcatcaaaaagagggattacatttcaaacgctagtcagcacacatgtagtttcgacttgatagaagaggacatctccaatttttaccctagcatcagccgggagatcatctatcaggtatgggttggattcttctgtttttcacatgaagtcgcagattgtctgtctaagttggtaacttttcaggggtatctggtgcagggatctaaggtcagcggtctgctttgtaatctgattctgtggaaccgagaaacaaagttagtcatgaatctcaagaggcaggggctcacttacacccgttatgtggacgatgtgacggtgtcttgcgatcgctacctcagtaacaaggaaaagcagcaaatcattaggaagatctatgctctgttctacactgtgggagcaaaacccaaccggcgcaaacacaaaattgaaagaaaaggcacacggcagaccgtgaataaccttaatgttacctcagagaacccgaccttgcccaaggagcaaaggaacaaaattcgagccgccgtcttcgaatgcgagaagattttcagaataggtaactcttcccttattcaatacaaggagctgtttgagagcaccaagggccgtgttaatcagctcaaaaggtttcacaaaaaacaggcaaattcgctactcaaaagactcgaggaaattcaccccaataagttcaaagctacttga

SEQ ID NO: 11096 - RNA, 966 nt, synthetic construct
  source 1..966: mol_type = other RNA
atgaacgattgtacgagtttcaattaccctggaaaacccatcgcttctctggagaaactggcattactcctcggcataagcctcgaagacctgatttacttacaaaaaaacgctgacagtttctacttcctggtgaaaagggaggagaaaaaaaatggctgttttcgggaatgctacgatgtgagagagcgcttgaagaacattcatgagaagaatttcgtcaggcttctaaaggtgatttcttatcctgagtacctacagggcgggattaaaaagagagactatattagcaacgccaaccaacataccagaagccacacaatcataaacgaggacatctccaacttttatccatcaatcagcaggaagatcatctatcaggtatgggtaggattctttcacttctccccggaggtggccgactgtctgtctcagttggttacatttcagggcaagctcgtccagggatcgaaggtgtccggactgctttgcaatctgatcctgtggaatcgagaagataaactggtgatgtcccttaagagccgtggcttgacatatacccgctacgtggatgatattacagtgtcctctaatagatacctgtcaaatcgcgaaaagcagcagatcatccgagagatttatacgctgttttatactgtcggtgcgaaacctaaccggtccaagcacaaaattgcttacaaggggaccaaacagaccgttaataacttgaacgttacttcagaaaagccaacccttcccaaggaaaaacggaacgaaatccgtgcagccgtcttcgaatgcgagaagaagttccaggaagggagtagttctatcgtggagtacaagaagatatttgagtcaactaaaggtagggtcaatcagctcaagcggttccataaaaagcaagccaacgacttactgcaacgcctcgagaaaatacaccccaatagctttaaggccgcatga

SEQ ID NO: 11097 - RNA, 963 nt, synthetic construct
  source 1..963: mol_type = other RNA
atgaacaagcctgtgtctttttgttatccccacaaaccaatagcctccctggaaaagttggctatttacctgggtatcaccttagaggaactgctctatttacgccagtactctaatagtttttacttcctgcatgaacggaaggaaaaagccgacggcaccttcagggatacttacaacgtgagagatcggctgaagaacgttcacgagaagattgctaagaagttctttacgattctggattaccctgaatatctccagggagggatatgcaaaaggagctctattacaaatgccaaacagcacatcggcatgaatatcctgatcaaggaggacatatctaactttttcccatcaatctccaagaagattgtacatcaggtgtggaccgggttcttccatttttcacatgacgtggcggactgccttgctgagcttgtgacttaccagggctatctcgttcaagggagcaaggtcagtggattcctgtgcaatctaatctggtggcaaagagaggccgacctggttgcagagttccagaaacagggactggtctatacaagattcgtggatgacgtaaccgtcagcacaaaacgcaacctttcaaacgcagagaagaagaagatcatcagcaagatttactcgctctttcacagtgtcgatgccaaggctaatcggaaaaaacagaagatcatgcacaaaggtcaccagcaaactgtcaataacatgaatgttagcataggcaagccgacattgcccaaagagaagcgtaaagaaatcaggaccattgtgttcaaatgtgagctgaccttccaaaataaagaaattcacatcactgcatacgagaagttgtttaactccgcgaaaggcaaggtgttttatctaaaacagtttcatacggtgcaagccgaacagcttttgcagcgactcaacaaaattcagcccaagttctttaactcctga

SEQ ID NO: 11098 - RNA, 936 nt, synthetic construct
  source 1..936: mol_type = other RNA
atggctgaatttgcatatccgcaccggcctatagcttcgctcgagaaacttgctatcgtcctcgatactaccgtcgccgagttagactttctcagtcagaacgcaaataacttctacttcaaggtgaaaagcatccagaaagccgacgccagctatcgtgacacttacgacgtccgggatagattaaaaaccatccacgccaagatcgtgaagaatttccttagaattatcgattacccagattatatccaaggtggggtacctcaccgggactacctgtccaatactgccatgcacactgcgaagcaggtggtcatatctgaagacattacgaacttcttctcaagcgttagctgcaccatcatatatcaggtctggtctaggttctttaaatttgctcccgttgtgtgtgagtgtctaaccaatctggtgacataccagggatttctcgtacagggcgccaagaccagtgggtacttgtgcaacctgattttttggaaccgcgagcaattcctggttgacacattggcaagtcagggttttacatattcaagattcgtggacgatatttcaataagctccccaaaagtgattacgtccgagcacaagaccgaggtcattgcaaagacatacggaatgttgcagtcttgcggcgtgaaacccaaccgcaaaaaacatcatatcatgtcaaagggcagctcccaaaaggtgcatcgagtgaatgtagtgtccaataaacctacattcgataagaaagagcgcaacgccattcgagccgcagtgcatgaatgtgagatgaacttctccaagagcaaatctagttctgaatatgagaagctgtttaataccactatggggagggttcaaaagatcaagaggcttcacattgaagaagcgaataagctgctggctaggctgcagaagatcaagccctga

SEQ ID NO: 11099 - RNA, 942 nt, synthetic construct
  source 1..942: mol_type = other RNA
atggataacaatgcattccattatccctataaaccaatcgctaatctgaagtctctggccctcagcctggacatcaccttggagcgattactctttctacagaagaactccgataatttcttttttctgcagggcagagtgaaaaaagaggacgggtccttcagggagacttatgatgtgaaagaggagctgaagaaggtgcatgctaagatcgtgaaaaactttttcaatgtgctgaagttcccttcatatctgcacggcggaattaagaagagggattacattacgaacgccaagcagcacctccaaccaaaaaccatcattagtgaggacatcaaaaatttcttcccctctatcactaagaatctggtctaccagatttggagcaacttctttaagtttagtcatgaggtagccgaatgtttggcggaaattactacatttaaaggtagcctagtgcagggcagcaaggtcagtgggtatattggcaacctggttctctggcaacgggagcccaaacttgtggaggaattcggcaagaaggggtggatatatacacgttttgtcgacgatatcaccatatcgtctaagcgcatacttagcaataaggagaagagcgaaatcatttctaaagtctatggattgttggcaagtataaacgtcaagccgaatcggaagaaacactccatcatgaaaaatggtaaagaccgccaaaaagtgacacagatcaatgtttcaacccagcggcttacattatcaaaaaaggagaggaattccattagatccgaagtttacttctgcgagaagttttacaagaactacaacaaggaagaatacaagaaactctacaactccattaaaggaaaggtatacaaccttcgaagattccaccaggacgaagccgataaactcctgaacaagctgaacaaaatccctccttga

SEQ ID NO: 11100 - RNA, 951 nt, synthetic construct
  source 1..951: mol_type = other RNA
atgagcaaccctatttacccacataaacccatcgggtccctggaagtattagcgaacgtcctcggaattcgggacattgatgagttactcctgatcaagaagcactctgacaattttttctttgtggcctccgtcattaaaaagagggatgggaccttgcgaaacacttacgatataaagcataagctcaagagcatccatagaaaaatcaagaacgttttcctgaagaagatttactatcccgaatacctgcagggcagtctggcaaagagggattacctgacaaacgcaaacattcacacaaactcaaagtgcataattacagaggacatcaagaatttcttcccctctatatcaaaagacattgtggtgtcgatctggaaaaacatctttcacttcccacacgatgtcagtgaaacccttgcagagctgatcacgtataagggatttttggtacagggttccccagtgagcagttacatagccaatcttgctctgtggtacaaggagccggagttggtgaatactctatctcagaagggctttatttacactcggtatgttgacgacatcagcgtgtctagtaaacgaccgatcacaaaaaaagagaagacccgcataatccggcagatccacacgatgctaagctccattggtgtggagctgaatcgcaaaaaacacaaaattatgccccgtaataacagacaagaaatccatcgcgtgaatgtgaatactaacgctcctaccctgcccaaaaaggagagagaaaaaatcgaatcagccgtctatcaatgcgagataatgtataaaagctccccaaaatcaagcgaatataagaccctgttcaatgctacccagggcagagttaatatgctttctcggttgcattcccctcttgccactaggctcaaatgtaggctcgagaagatcaagcctattaagaacacatga

SEQ ID NO: 11101 - RNA, 948 nt, synthetic construct
  source 1..948: mol_type = other RNA
atggacatcctgacaaaagtgctggggcttaaggacactaaccagctgaaggaattaaaggagaacagcgactcgttctttttcatagcgaagaaagagaaaaagagggatggtacaatacgcattacctatgacgtgaagagtgagcttaaactggtgcataagaaaatcactcggaagctactcaagaaggttaattacccagattacctcaaaggcagcctaccaaagagagattatttggacaacgccgatgcccacacaagttcaaagtgcatcatcacagaggacatcaagaattttttcccctcaatcagaaaagacatcgtaattagcatctggaaaaacattttccactttccccacgacgtagctgaaactctggctgagctgattacctacaaaggctgtctcgttcagggtggcacagctagctcttacatagctaatttggccctgtggtacaaggaaccagccctcgtcaaagagctgcatgatcaggggtttaggtataccagatatgtggatgatatctccgtgagctccaaaactataattacgccgaaggaaaagaccaaaatcattcgcaagattcacatcatgctttctagcataggagtcaaactgaatcgtaagaagcataaaatcatgcccagaaatgagtcccaaaagattcaccggattaacgttaacactaataatcctaccttgcccaagaacgaaaggcgaaaaattggatcggcagtgtaccaatgtgaacagatgtttaattcttcctccaactctcaggaatatgagaacctgttcaacagcacgttggggcgagtcaatatgttaagtaggctgcatgacagtctcgcagcaaagctcaagtgccggcttgagaagatcaaacctatcaaaaaaaccaccatgtcacaggcctcctcactggtgcctcgctcttga

SEQ ID NO: 11102 - RNA, 939 nt, synthetic construct
  source 1..939: mol_type = other RNA
atgaacaagccaaattacccctatgaacccattggatcgatttcaacccttgcacgagttctgggcctagaaacacaaaaactccagaacttatacgataactctgacgacttctttttcgtcacaaagaagaaactgaagagcgacggtagcttccgcataacttacgacgtgaaagccgaactgaaaagtgtgcaccggaagatcgccaaggaactttttaagaaggtgttctaccctgagtatctgcagggcgggatcgccaggagggattatatcggtaacgcgaatatccatatcgattccaaatgcatcatcacagaggacatgaagaattttttcccctctatctccaaggaaattgttatcgatgtctggaaaaacgtctttcactttccacctgatgtatcagagattctggctgagttgattacctataaaggatacttggtgcagggatgtgtcgcaagcggctacatttgcaatctggttctgtggaatcgtgaggcaaagctcgtcgtgaaattgaagaaccgaggcttcatctattcacgctatgtggacgatatctctgtgtcttccaaacggattttcacgactaaggagaagactgagattatcaaagacatacactccatggtgacaagtataggggtgaagcttaaccgcaaaaaacacgagattatgccaagaaataacagacagaagatacataggctaaatgttaactcctaccaggcttcaatgcctaagtccgaaagagagaagatcaaagctgccgtgtatcagtgtgagaagctgtacataaccgaaccctctagcgaaaagtacaaaagcctctttaatagtacccaagggagagtaaacagcctgagtaggctgcataaggaccacggcgataaactcaatttacggctcatgaagattaaaccgtactga

SEQ ID NO: 11103 - RNA, 942 nt, synthetic construct
  source 1..942: mol_type = other RNA
atgaactctccaacttaccctaactcaccaattgggagccctgccattctcgctcgtgtcctgggtattgatcccaacatactcctgagcctcaagaagaactcaaattcatttttcttccaggcaaaaaccgaagaaaaatccgacggcaccctccgaataacatacgatgtgaaagagcctttgaaaacgatccatagaaggatcgctgaaagacttctaaaaaaggtgacgtatccactgtacttgcagggtagtctgcctaaaagagactatttagggaatgccgctatccatacaaactctacctgcatcatttcccaggatgtgaagaacttctttccatccatcagcaaaaatacagtggtgcaagtctggaaaaatgttttcaagtttcccgaggatatcagcgaaattctggcggaactgatcacatatgaggggtttcttgtacaaggctgcatcaccagtagctatatatgtaatctggtcctgtggaatcgggagtctaagctcgttgacgagttaaaagaaaaaggattcacctacacaaggtatgttgacgacattactgtgagttcaaagcgaatcttcacactggaggagaaaaaggagatcataaagtccattcactctatgcttaagtcgatctccgtcaagctgaatcggcgcaaacacaagatcatgccccgtaacagtcagcaacaggtgcacagggtcaatgttaactccgatcgcactactatgcccaagtctgagagggagaaaattaaggccgcagtacatcagtgtgaggaattatacaaaaccctagccgaaactgaggagtacaaaaagttgtttaaccagaccctgggacgcgtggtgcacctcagcagactgcacgaacggcagggcaagaagttgaagcagaagcttagcaagatttacccgcggaagtga

SEQ ID NO: 11104 - RNA, 990 nt, synthetic construct
  source 1..990: mol_type = other RNA
atgaataaactgtcttacccacatgctcccatcggcgaacttgataagctggccaaagccttgaacattgaattaagcgagttacagacaataaccgataaatccgactcacttttctttcaaacgaaagagatcatcaagaatgacggtagttctcggttcacatacgatgcaaggcccacactcaaagtcatacatggcaaggtttgtgaagctttcctaaaacgcgtgaattaccccgactatttgcagggtagcatcaaacggcgcgattacctgactgacgcccggaagcacgccggatcaaaggtcctgatcagcgaagacattaccaactttttcccctctataagtaaaaaggttgtgcacgaaatgtgggtgggggtctttggattctctaacgttgtggccgagtgccttgcggagctggtgactttaaatggatttgtcgttcagggcgcaaagactagcagctatatttgtaatctggtgctctggaacagagaggagcgtctcgtaaactcacttaaaacgagaggactgatttataccaggtatgtggacgacgtgactgtgtcgtcaaagcgtctgatctcgctgaacgagaaaagcaagatcatcaattccatttactccctattccgcagcattggggcaaaacctaaccgaaataagcacaagattatgccacggaatacccagcaggaagtgcatggcgtaaatgtgaacaaaaaccaaccgaccatgcctaaggaaaaaaggaagaagatcagagcggctgtccacaggtgcgagattacttataagcagaccccagatagtatcgagtactgcgctttgtttaactccgtaatggggaaagtcaacacactcgggagaatgcacacatccgaggccgataagctccgactgcgcctgtctcaagtcaagcctgttagtgcacagtccttgaacaagcctctcgtgtctaataccggcctgataacctga

SEQ ID NO: 11105 - RNA, 945 nt, synthetic construct
  source 1..945: mol_type = other RNA
atgagaaagcccaattatccccacgcaccgattggtgatctcgataagctggcactggctttgcatgttagcaaaaaggggctgcagacagtgacagcccaatccaatgacctgtttttcctgactcggaagataaagaaagaggatggctcctatagactgacgtacgacgcgaaaccctcgctgaaaagcctacatggcaagatctgtgaggcattcctcaaaagagtagaatacccagactatcttcagggttctattcggaagagggactatctgacagacgctcgcagtcatgtgggctccaaggtgttaatcagcgaggacataaccaacttctttccttcaatttctaagaaaaccgttcacgagatgtgggtcggagtgtttgggttttctaatatcgttgccgaatgcttagccgagctggttacgatgaatggagatgtggtgcaaggagccaagacttcatcttacatttgtaacttggtcctttggaacagggaagcccagctcgtaagtcagctgcgaaagaaaggtctggtatatacccggtacgtcgatgatattactgtctcaagtagacgcagcctctccaagagcgagaagagtaggatcatcagctccatttactcaatgtttcgatcaattggcgctaaacccaaccggcggaaacacaagatcatgccacgtaacacacaacaggacgtgcatggcgtgaacgtgaataaggacaggcctactatgccaatggagaaacgtaatcagataagggcagccgtccaccgctgcgaaatcgcgttcaacgggaggccttcctctagtgaatacgtgtccttgttcaactctgtgatggggaaggtcaataccatgggcagaatgcaccgcagcgaggctggaaaactaaaagcccgactccttcaggttaagcctgtgatcacctga

SEQ ID NO: 11106 - RNA, 945 nt, synthetic construct
  source 1..945: mol_type = other RNA
atgaaccagccccgctatccctttgctcctataggcgacctggagaaattatccttagccctgggagtgaaactgctagagctgtacgacttgaaggcacgtagtaatgaactgttcttccaaacaagagacattgtaaagcctgatgggtcccatcggatcacttacgacgttcgcgctccactaaaactggttcacggcaagatatgtgaggtgtttctgaggagagtggaatacccggaatacctgcagggcagtattaagaaacgagattacttgactgacgccaataagcacgtcagatctaaagtgttgatcagcgaagacattacgaacttctttccctgtatcagcaagaaagtaattcacgaagtgtgggtgggagtgtttgggttcagcaacgaagtgtcagattttcttgcggagctcgtgaccctggatgggtttgttgtgcagggctccaaaactagcagttatctttgcaatctcgtcctgtggtcccgagaggcacaactcgtgaagaggctgaagatgaagggccttgtctataccaggtacgtggacgacataaccgtctcgagtaaaagaatcttgaacaacaaggagaaatctgatatcatcaacagcatttacgctatgttccggtcagtcggtgccaaacctaatcgcagaaagcacaaaattatgccacgcagcgcacagcaggaagtacacggggttaacgttaatcggcagcaggccacaatgccaaagtataagaggaatcaaattcgggctgcagtacatgagtgcgagatcatattcgattcagattcttcatccgagacatatatctctacattcaactctgccatgggtcgtgttaatacccttggaaggatgcataaggtcgaggccgaaaagctcaaggtgcggctcgaggcggtgaaacccatcctcgtctga

SEQ ID NO: 11107 - RNA, 945 nt, synthetic construct
  source 1..945: mol_type = other RNA
atgaatctacctgtatatccccatgcttctgtggcgaacctgtcatccctcgctttggcccttggcttgtcactgaaagaactgcatgagctggcgtctacctccgatgactactattttttaacgaggaaaatcgagaagcctgatggctcgctccgactgacttatgacgctcagccaatcctcaaggcaattcacggtaaaatcagcgaagtctttctgaaacgtgtggactaccctcggtttcttcaggggagtataaaaaaaagagactacatctctgacgccaagcagcacgtgtcaagcaaaatgcttatttccgaggatattacaaacttcttcccaagcatctctaagaaggtcgttcatgaggtttgggtgggggtgtttgggttctccaatgaggtagccgatctgttggcagaactggtgacctatcaggggtacgtggtgcaaggctctaagaccagcagctacatatgcaatctggtactgtggaagagggaagctgagttagtcagtaagttggaggccaagggtttcacctacacccggtatgtggacgacgtaacagtctcaacaaagcggattgtttccaaggccgaaaagtcggagatcatcaactctatttattccctcttcagatccgttggcgccaagccgaaccggaaaaaacacaaagtcatgcccaggaacaatcgccaggaagtccacggcgtcaatgtgaacaagactgcccccactatgcccaagaaggcacgagatcaaataagagccgcagtgcaccagtgtgagctcgcatttggagatgacccaactaccagtgagtaccagagcgcttacagtagcgccatgggacgcgtgaatacaatgggaagaatgcatgaaaaagaagctcgcgatctaagggctcgtctggccgcagttaaacctgtgacgaactga

SEQ ID NO: 11108 - RNA, 945 nt, synthetic construct
  source 1..945: mol_type = other RNA
atgactccaaagtatccgcatgatcccattgcccacgtggattccctgtgcttgagcctgggtgtgacccagtctaaactgaaggagatccaacgaaagtccgatacatacttttttgtcacgaaggaaattgtgaaaaaggacaacacaattagacagaccttcgacgtgaaaccagagctgaaacggatccacgagcggatatgtagtgcgttcttaaagaaggtagagtacccagcttatctgcaaggctccatcaaaaagcgcgactatctcagcaattgtgctctgcacacaggccagaaacttgtcatcagcgaagacgtgaccaatttcttccctagcatctcatcattggtggtacatcagatgtgggttggagtttttaagttttctaacgaaatcgccaccatactcaccgacctcgtttgtttcaacggatggttagtgcagggcgctaagccttcgtccttcatttgcaaccttatcctgtggaacagagaatcaaaattggtggaggaactgaaccagagggggctcaaatacacgcggtatgtcgatgatattaccgtctcatcccctactaatctgtctaagagtagcataacagagattttgagcaacatctacggtatgctggcatccgtgaatgccaagccgaataggaagaaacatcaggtgatgcccaatgggaaaagacagaacgtgcacagagtgaatgtcaaccatagtactcccacactgcctaagaaggagaggtctaagataaaagccgccgtttatcagtgcgagaaggattttgcaatcaaggtcagtaaagacgaatacgaactcctgtacaatcaaactcttggacgagtaaacaacctcaaacgtatgcacccaaagatgggggaggagctacttgcacgcctaaggaaaattaaaccctgcaatcgctcttga

SEQ ID NO: 11109 - RNA, 939 nt, synthetic construct
  source 1..939: mol_type = other RNA
atgacaccccaatacccgcacgagcccatagccaatttgaatacactgtgcctggcccttggcctgaccgcttcaaagctgaagtacttgcagactaattcggacagctacttcttcataaccaaagaaatcgttaagcctgaccagtctatccggcagacctttgatgttaaaccagagttgaagagaatccatgaaagaatctgcagcgcattcctgcgcaaggtggattaccctaactaccttcaaggtagtattaagaaacgagactatctctccaactgtgcccttcataccaacaagaagctggttatatctgaggacgtcaccaactttttcccatccatcagctccaaaatcgttcacgagatgtgggtcggcgtgtttaagtttagcaacgaaattgctagtatcctcacagatctggtatgttttaagggatggctggtacagggagcaaaaccatctagctttatctgtaacctgattctgtggaatagggaagcgaggctcgtgctcaaactgaatagcatggggttaacttatactcgctatgtggatgacattactgtgtccagctctatgaatctgtctaaatcgctcatcacggaaatactgagtgatatttatgggatgctaggttcagtgaatgccaaacccaatagaaaaaagcataaactcatgcctaacggatcacggcagaacgtccaccgggtgaatgtcaacacggacatcccaacacttcctaagaaggagaggaataaggtgaaggctgcagtccacgagtgctccttaaaattcaaagccgataactcctcaattgagtacaagtctctctataacagtacccttgggcgagtgaacaatctggctcgtatgcaccccaaattgggcaaggagttaaggacaaaactaattcgcttcaagcccattatctga

SEQ ID NO: 11110 - RNA, 1002 nt, synthetic construct
  source 1..1002: mol_type = other RNA
atgctgattaaacccacttatttacacaaacctatcgggagcatcgagagcttagcaaagtctctcggcctgtctaaggaggacctgattgaactggcgtcaaactctaatgagtacttcttcattgcaaagaaggtcgagaagcccgataaaagtatccgattgacttacgacgtcaagccacggctaaagcaaattcatgagaagatctgttgcaacttgttgaagaaggtaaactaccccgactatattcagggaggggtgcgcggcaagagctatctgagcaactgccaaaaccacacccacaaaaaaatagtgatcaaggaggacgtgtcgaacttctttcccagcatatccaaaaagattatacacgaggtgtgggcaggtttctttcattttccatcagatgtcagtgaacttctgtccgaacttgtgacctttaatgggtatttagttcaaggaggcaaagcttccggattcctgtgtaacctcgtattgtacgaccgggagtctaaactggtggaagagttctccaaaaagggattcaagtatacccggttcgtcgatgatatcacaatatcctgtctccgcaatattacaaaagatgagcagacttacatcattagaaagacctacggtctgctgaaatctatcgaagtgaaccctaataaacgtaagcacaaaatcatgtccaacggggtgcaacagcagctgcatggcgtcaatctcaatacaaataagcctacgcttcctaaggctgaaaggaagaaaattgaagccgccgtttttcagtgcgaaaaagcccatagtgaaaacagcaattcaatccagtacatcaagcagtttaactcagccatgggcagagttaataccatgaaaaggatgcatccaaaagccggtcaggctctcctagagaggctttgcaaaatcaagccgcagattaacagtcgcacatttgagcagaagcacagactggagatcttccgaaatctcgtgaattga

SEQ ID NO: 11111 - RNA, 939 nt, synthetic construct
  source 1..939: mol_type = other RNA
atgataccactgtaccctcataaacccatcgccagcttgaactcactcgctaaggctctcgggaccacctccgatacactctctaacctgactgccaattccgacaaatacttctatctgaccaaggtgattaacaagcccgatggtagcgtaagaaacacctatgacgtcaagccagagctgaaaaaattccacgagcgcatcaataccttctttttgaagcaggttaagtatcctaacttcttacacggatctctgaaaggcaaggattatatttctaacaccaaagaacacaccaacaaaaaagtggtgatctctacggatgtgtccaactttttcccctcaatttcaaagaagactatacatgaggtgtgggtgggcgtgtttaatttttctcacactgtcgccgactgcctgtccgaactagtcacgcacaagggttttcttgtgcagggctcaaaagtttctagttacctggccaatctggttctgtggggccgggaaagcaaattggtgtgcttctttaataagaaagggtacgtctatactaggtacgtggacgatatcactatttcctgtgaccggaacctgacaaagatagagatcgcggacatcacaagccaggtttatgccatgttaaaatcgattgacgtcgcacctaacaggaaaaaatacgcagtgatgacaaacggaaatagtcaaagcgtacatcgactcaatgtcaaccggagtgtccccacaatgtcaaagtccgagcgcgccaagatcaagtccgcagtattcgagtgtgaaagtaaggctgctgagaatcgtggcactcacgaatacattaaactatacaatcagaccatgggaagagtgaatagcatgaagaggctccatagcgatcttggggacaagctgatcagtagacttaagtgcgttaagccgacaccatga

SEQ ID NO: 11112 - RNA, 939 nt, synthetic construct
  source 1..939: mol_type = other RNA
atgaaacccacttatccccatcaacctgttgccaaactcgactccctggccctggcacttggcctcacccactcagagctcatcgaactggcttctgttgccaactccatgtatttcgtcaccagagtgattgaaaagccagacggtagtaagaggatcacacacgacgtgaaagctcgcttgaaacgggtgcacgagagaataaatagcgtctttctgaaacaggtcagctaccctagctacttgcagggaagcttaaaagggcgagattacctttccaacacgaaacagcacatcaataagcacatcattatctccgaggatatttctaacttctaccctagcatcagcaacaaggtggtgcacgaggtctgggtgggctgctttggattttctaacgaagttgccagttgccttaccgcactagtaacacataacggacacctagtacagggggggaagacctctagctacatatcaaatctggtgctctggtcccgggaatcgaagcttgtggaagagctgaaaagaaagggcatgacctatacacggtacgtggacgatgttacagtctcctcccctcgacccctgtcaaagtcggagatcacaaacgctattagttctgtgtatggcttgttcaaaacgattaatgtcaaaccgaatcgtacaaagcatgaagtgatgtctaagggcaagaggcagactgttcatcgcgtgaatgtgagcgcgggtcggccaaccttttcaaaaaaggaacgttccaagataaagactgccgtctttcagtgtgagcagctgttccccaaggctagtactactcaagagtacttgtcaatgtatagatctgcactggggagggtaaataccttagcccgcctccataagaaagaggcagatagtctgaaggagaggctgaaagcgattcaaccattcatgtga

SEQ ID NO: 11113 - RNA, 957 nt, synthetic construct
  source 1..957: mol_type = other RNA
atgacattgaccccgaagtacaattttaagactataggctccattaacgcattagcacgactgctccagatccccctgaacagagtcatttatctctccaataacgccagcgatttctatcgcgtggccagagtggagcagaagaagacaggcgggcaacggatcacatacgatgcctacaaaaccctgaaagtgatccatcggaagatacagacccagattttcaaaaaggtcatctatccccagtacatgcatggctctatcagcggccgctcttacatcacgaatattaagaatcacacgaagtccaagatcgtgatttgcgaagacatctccaactttttcccaactataaaggctgaacaagtagagaaaatgttcatccgactgtttcactacccaaaaaacgtagccaaaacccttaccaatttggtcacacttaacggatccgtgcctcaggggggaatctgctcatcttacattgcaaacctagtgatgtgggagaaagaaagcattttggtcgcgaggctggctcgggaagagctcacttacacccgttatgtggacgacatcactgtttcagctaaaagttatatgtcaaagcctaaagtgagtgaggtgatcgctctgatttacggtatgcttaggtattatggtctggagcctaataaaaagaagcacgaagttctgggcaacggaacatatcaaactgtacatagagttggagtgaatgggaggaggcccagtttcggacacgacgaaaagcagctcatacgcagcgccgttcataacctgcacattctctttgtggataaacaatgtacctacgagaattacctaaaagtgttttcgagcgtcagctcaaaggtcggcaagcttaaacagctgaacgagtaccaggggaagaagtatagaacgttgttaaacaccatcaaactgtctattaaggataattga

SEQ ID NO: 11114 - RNA, 966 nt, synthetic construct
  source 1..966: mol_type = other RNA
atgacactgacgcctaaatacacactatccccgatcggctccattaacgccttggcacggctgctgcagttgcccctcaatcgcgtacagtatctcgcaaagaattctagcgacctgtaccgcatcgcccgtatcgagcaaaaaaaatcgggagggaaaagggtgacatatgatgcctacaaggaactgaagagtgtccataggaagttacagcaccaaatttttaagaaggtgatctatcctcagtttatgcagggatctataagcggcagaagttatataactaatgtcaagctccataccaagagtaaactcgtgatctgtgaggacatttctaacttctttcctaccatacaggctgaaaaggtcgagaatatgtttatgagattgttccatttcccccaggatgtcgctaaaacactgacctctctggtgaccctgaacggttctattccacagggcggaatctgcagcagttacatcgcaaatctggtgatgtgggagaaggagtcagtgctggtgcttagacttaataacgctaagctaacctatactaggtacgttgacgacattacggtatcatcaaagaactacattaacaagcaggagatcagcgacgtgatcgctagcatatacgggatgttgcagcactatgggtttaaacccaaccgatcaaagcatgatgtcctcgggaatgggtcccatcagactgtgcacagggttggagttaatggtaaacgagcctccttcggcaaggaagaaaagaagaaagtgcgctctgcggtacacaaccttattaatcttttcagcgatggccaatgctcctacgagcactacttaaaaatctttagcagtgttagctccagagtgggaaagattcaacagctcaacgagtatcaaggtaaaaaataccgggaatcactgaacgccatcaaaccatccattaaacggttctatcacggctga

SEQ ID NO: 11115 - RNA, 966 nt, synthetic construct
  source 1..966: mol_type = other RNA
atgacattaacgccggaatataagctgaaaagtataggctcgatcgatgcactcgctttcttgctggatctgcctttgaacagagtgcagtacctggcaaacaatgcatccgacctgtacagggtcgctcgaattgaacagaagaaaagcggcggacagcgtgtaacttatgacgcttacaaggtgctaaaagcgatacatcgcaagctgcaacaccagatcttcaagaaagtgatctaccctcagtatatgcagggttctatctcaggaaggtcttatataacaaacgtgagataccacactaaatgtaaaatcgtcatttgcgaggacatttcgaatttctttcctacaattcaggccgtacaggtggaaaagatgttcatgcggctctttcgttttcccttagaagttgccaagaccctcactaatctggtaacactgaacggatctgttccacaaggagggatctgcagtagctacatcgctaatctggttatgtgggagaaagagtccattctcgtctcacgccttttgaccgtgaaacttacctatacccggtacgtggatgacatcactgtcagcagcaaatcctatatgacgaaacaggagatttccgaggtgatcgccagtatctatggtatgttgaggtactatggcgtcgaaccaaataagtctaagcacgaggtgctaggcaatgggagccatcaagccgtccatagagttggcgtgaacggcaacagacccagcttcggtaaggaggaaaagaaaaagatacgatcagccgtgcacaacctctctacacttttttccgatgacaagtgtacctatgaggcctacctccgcgaatttagctctgtgagttcacaggttgggaagcttcaacagctgaatgagtaccagggaaaacggtaccggggggatctgaacaccatgaagccctccattaagaggttcaatctggggtga

SEQ ID NO: 11116 - RNA, 909 nt, synthetic construct
  source 1..909: mol_type = other RNA
atgttgcagctgccggtccctagaattagatatctggcccagaatgcctctgatttctaccgtgtggcaaggataaagaccaaagccaacggggataagaggattacctatgacgcataccgctcactgaaagatcttcacaagacactaaaagtgcggttatttcagaacgtcagttatcccgactacatccaaggagccatctcggggaggtcctatattggtaacgtgaagaagcacacaaaatccaccataattatatgcgaggacattaccaacttttttccaaccatccgagagtccgatgttgagaagatgttcatgcgcttgtttcacttccccaaggaagtggcctcaattctgactggactcgttaccttgaatggcactgtgcctcaaggcggggtttgtagctcctatgtggcgaatctggtcatgtgggaaagggagagcgcattagtgagcctcctccaggctaaaaacctgacatacacacggtacgttgacgacatcactgtaagcagtaaatactacatcgagaaagtggaaatcggcaacgtgatcgcttctatctacgggatgcttaagcatttcggtgtgaagcctaacaaagccaaacacgaggtgctgtcaaacggaatgcatcagaaggtacatcgggtcggcgtaaatggtaagcgcccaagttttggcaaagaggagaagaaacgggtcagatccgccgtctataacctggaagctctgttcaaggacaatacgtgctcttacgatgaatacctcaaggcgttcaattctgctagcgcccttgtggctaagctaaaacaactgaacgaacaccagggacagaaatatcgagaaagcctgaatcttctcaagcccagtgcaaagagagttgagttgtcaaattga

SEQ ID NO: 11117 - RNA, 978 nt, synthetic construct
  source 1..978: mol_type = other RNA
atgaaccaaacccccgaatacccacacctgtcaatcggaagcattaacagcttggcaagactgctccgtcttcccgtgaaccgggtgaagtacctcgctacaaactcctcagacttttttcgggttgccaggatcgaggaaaaaaaaagcgggggccagcggattacctacgacgccttcaagtgtctcaaagatgttcaccgccgcttgaaggtccagatctttcagcgagtaatctatcctagctatctgcagggctccctgaaaggatgctcctacataaccaacgtcaaaaatcacactaagtccaaaatcgtcatttgcgaagatatatccaattacttcccctctatcaagagccctcttattgaaaagatgttcatccgcttattctccttcccagaggacgtggcacgcattttgactcagctggtaacactaaacggactgctcccccaaggcggggtgtgttcatcttacatcgccaacctgatcatgtgggaaaaggaagtgctcctggtgggaagttttgagaaaaggggtcttacttacaccagatatgtggatgatataacagtcagtagtaaggcgcatctgaccaagtcagagattagcgaggtgatttccagtatctacgggatgatgaagcactatggtataaagccaaatttaaagaagcaccaggtgttaggcgacggttctcatcagaaggtccacaacgttggggtgaatggccgaagaccgtcatttgggaaagaggaaaagaaacgtgtacggtctgcagtgcataaactgaaactgctgtttgacagccctgattgcacatatgaggactatctagccgctttcggcagggcttcttcgttggttggaaagctgaaacagcttaatgagcagcaagctacgaagcataggggcgagctcaataaaattaagccttctttcagaaacgccagcaatagtaatctcgtcgagtga

SEQ ID NO: 11118 - RNA, 978 nt, synthetic construct
  source 1..978: mol_type = other RNA
atgaccttgattccaaggtatacctccctgagtttaggatctattaatgcactggccagattactgcagctgcccataaatcgggtcagtcacttggcagaaaattcttcctcctattaccgcgtggctaagataaccgagaagaagaacggagacaaaagagtaacatatgacgctttcaaggtactcaaagatgttcaccggaagctaaaaaaccagctgttcaataaggtgatttatcctgactacctgcagggcagtctgcgcggacgtagctacctttccaacgtgaagaaacacaccaagtcaaagctgctcatctgcgaagacataacgaatttctttccgagcatttcagcggcccaggtggagaaaatgtttatgcggctgttttctttcccaaaatgcgtcgcagagattttgacaaagctcgtaacgctgaatgggtgtgtgccccagggaggggtctgtagctcttacatcgctaacctcgtgatgtggaacaaagaggcagtgctcgtggaaaaactgatttctgacgggctgcgctacactagatacgtcgatgatatcacagtgagtagcagaaggtatgtcacaaaggaaaagatcagcaaggtgatcgcgttaatctatgggatgctaggacattacggtgtgaaacctaatcgggccaagcatgaggttctcggcaatggcagccaccagactgttcaccgtgtaggcgtcaacggtagccaaccttccttcggcaaggatgaaaaaaaacgaatcaggtcagccgttcacaagttggataccatgtttcatgacaacaactgctcctacgccgactatcttaaggcttttggttcagtttcatcgaaagtggggaagctgaaacaacttaatgagcatcaagccactaaattccgaggccagctgaacgtgatccgcccctccgtcaaaaggctcaagcttgacatggataactcttga

SEQ ID NO: 11119 - RNA, 960 nt, synthetic construct
  source 1..960: mol_type = other RNA
atgaacagcgcattttacaacgggaagcccatagcttctattgccgccctcagcagcgcacttaatgtccccgaggacatcctgatcgacatgagccacaacgctaataagtactataagaaaaaccgccccgaaatcaaaagcaacggcaaggagcgcattcactactctgtatcggaatccttgaaggccattcaccaaaggatcaaagttattctcttccaaaacgtgacatacccagagtatcttcagggatccatcagggatacaaagaagacgcgggactacattagtgatgctcgcatgcactccggcaagagaatgctgatatctgaagacgttagcgactttttcccgtccatcaagtatgatcaggtgctcaagttgtggatgtacttcttcaacttcccgaaaaaaattgccaccactctgacggacctgaccacctacaaagggtttttacctcagggatcaaaaacatcatcttacgtcgccaacctaatattttggcaatatgaacctgccctgtacaataagctcaaggcgcagggtatcacttattctcggtatgtggatgatactaccctgtcatttgaccgatacgtgagcgataaagagttaggacagatcatatccagtattttcggtatgatgtgccaggttaatattaagccaaacagagagaagcaagacatcaaaagtagaaagaacaataccacagtacataatctgaatgtcactaagaaaagtcccaccatccctaagaaaaagaaaaacaatctgcggatggcagtgtttaactgtattaagcattctgatctccatggcaggaaatcagagacatataaaaagatgtaccgatccaccatcactagggtgggccagcttgggcgtttgcacccaaatcagtcccagaagctgaaggacaaactagctccatataaacctttcaatagctga

SEQ ID NO: 11120 - RNA, 939 nt, synthetic construct
  source 1..939: mol_type = other RNA
atgagcgcttactatccccacaaacctatcgccagcattgagtcccttgccaagactttggatgtgactgaagccgaactgttagaggttgcccagaatagcgactcactcttctttgtcgcaaaatgtgtaaagaaggaaaacgggaaggtgagagttacatacgacgcccgccctgcactaaagaacattcacgataggatcaaaatagctctgtttcgggtagtcaaatatcccttctatctgcaaggaggcatcagcggccgagattatatcagcaacaccaagatccatgccggtaaaaagtttcttataaccgaggacgtgtcaaatttctttccctccatccaggactcagtcgtgaagaaaatgtggctctacttcttccacttttctcctgaagtggccgatgtcctgactaagctgaccactcataatggttttgtgccacagggggccaagacgtctggctacatagcaaatctcattttgtgggataaagagcccgtgctcgtggaatatctgcgcaagaaaggaatgagttacagtcgtctggtagatgacattaccatctcgtgcgactacaagccatctaaaaagcttttggcttccatgatttccgatgtgtacgggatgctgctatctaaagacgtcaagccaaacaggggaaagcacaaaatcatgacccagggcgagaagcagcggatacacaacctgaatgttgataaaggaagaccttcattaccgaagtccaaacgagctgacattagggcagcggtgttccaatgcgaagagatggcgaagtacggcagaaagacagaggagtataacaagctgttcaacagtaccgtggggagagttgctacaatgaagcggctccatccgacacaggcaacgattctgaggaatcgccttgacatgatcaaaccaaaaaaatga

SEQ ID NO: 11121 - RNA, 1140 nt, synthetic construct
  source 1..1140: mol_type = other RNA
atgaatcttcgtccaaaatacacccagaaacctattgggtctattgaagctctggctaatctcctgaacttgactctccatgacctagataagctgattcagtcctcgaacgacgattatatcgtcgccgacaaaatcgagaaggatgatggttctattcgagtcacgtacaaagccaagcccaaactccggaccgcactggacagtattaaatccagggtattcgacaaggtcgagcaccccgattacataacagcgggacagataggtaaaagctatgtagacaatgcgcaggcccacatcaactcaagaatgttgatgtccgaggacattaggaatttctttcctagcattagcgtcaaggaggttaaccgaatcttccagcacttcttttgcttcccgccaaaggtgtccaacgctctaagcgaactttccaccaaagaaggctttctggtgcaggggtcccccctctcaggggaaatcgcaaacctgatattttatcgggatgaacccgaactcgttaagttctgtcaggatcaaggcctccgctacactaggtactatgacgacattcacatctcttcagatgagaaggacttctatgagcttattcctcatttgaagagtgagatataccggatctttgggaaatcaggagtgaagccacatagagccaagaagaagtcacacttctcaacatgtagttctcggctgtccgtgcacgacgtgacagtgaattcgaagaagaccaatcctagccaaaaaagaatctctaaggtgagacagctgctgtttacgtacgagtatatggtggataataactgcgatatcgaggacattataaaaaaataccgctccatccatggacacatcaacacccttcaacagcaaggctattctcaggcaggcaaattaaaggagcatttgagcctgattacttgccgcatcagtgaatctgaagctaagaagtacgcacgtaaataccgcaaagtgaagagcaaaaaggagctgacacagttttcatctaaggtcagcatcttaaaaaggatttccggcagagttgccatggttatcaatagtgagaagaaatgtgccaacgataagatcaagaaaaagctgagtaggaacagcagcatgtga

SEQ ID NO: 11122 - RNA, 1140 nt, synthetic construct
  source 1..1140: mol_type = other RNA
atgaacctccagcccaaatatacccaaaaacccgtcggttcaatcaaagctctcgccaatttactgaatttgaccctgaacgaactcgaggaattaattcagtcctctaacaatgactacattatagccagtaagatcgagaaggccgacggctctttaagggtgacttataaagctaagcagaaactgagaatcgctctggataccatcaaaagccgcattttcgataaagtcaagcacccagactatatcgcggcaggccagctcggaaaatcatacacgaacaatgccaaggcccatatcaattctaaaatgctcatgagcgaagatatcaagaacttcttcccttcaattagtacaaaggaggttaaccgcatttttcagcacttcttctgctttcctcccgaggtgagcaatgccctatcagaactttcaactaaagacggctttctggttcaggggagcccacttagcggtgaaatcgcaaatcttattttttaccaggacgagccggaactggtcgagtattgtcagtctcaggagctgagatacaccaggtattatgatgatatccacatttcctccgacaagaaagagttccacgaattgatcccacatctgaagtcgaagatctaccggatctttgggaagcatggggtgaggcctcatagatccaagaagaagtcccacttctccacatgtagcagccggctaagtgtgcacgatgttactgtaaatagcaaaaagacaaacccctcacacgagcggattagtaaggtcaggcagctgctgttcacctacgagtatatggtggacaacaatagcaatattgaggacatcattaagaagcacagatccatacgtggacatataaatacgctgcaacagcaagactactcgcaggtgaaccggttgaaagaacaacttagttttatcactcgcaagataaacgagtccgaagccaagaaatacgcacgaaagtacaggaaagtgaaatctaagaaggagctcacacaattttctagcaaggtctgcatattgaagaaaatttcagtacgagtggcgatggtgatcaactccgaaaagaaagcagctgatgataagattaaacgcaaactgtctcgtaacagtgtttcttga

SEQ ID NO: 11123 - RNA, 1056 nt, synthetic construct
  source 1..1056: mol_type = other RNA
atgcaccttcgggtagagcgtgtttacatcgtggccaataaaatcgaaaaagatgatggaagcctgcgggtgacctataaggcaaagcctaaactccgggtcgtgctagactccattaagagtagaattttcgataaggtcgaacatccagactatatcacagctggccagatcgggaaatcttacatagacaacgcgaaagttcatattaattcccgcatgctgatgtctgaggatatcaggaattttttccccagcattagcataaaggaagtgaaccgcatctttcagcactttttctgcttcccccctaaggtaagcaacgccctgtccgagctgtctacaaaggaaggttatctggtgcaggggtcacctttatctggtgagattgcaaacctggtgttctatagagacgagccggagctcgtgaaatactgccaggaccaaggcttgcggtacacccggtattacgatgatatacacattagtagtgacaagaaggagttcaacgaattgatcccacacctgaaatccgagatatacagaatctttggcaagagtggggtcaagccccatcgctctaaaaaaaaaagccattttagctcctgttcgtcccgattgtccgtccacgacgtgacggtcaattcaaagaaaacaaatccaagccacaaaagaatatctcaggtcaggaagctcctgtttacctacgagcacatggtagataataacttcaacattgaggacatcatcaaaaagtacaggtcaatccttggccatattaataccttgcagcagcaaggctatagtaaggccggaaagctgaaggaacaactgtcactcattacttgtcgtatttctgagtccgaagctaaaaagtacgccagaaagtatcgaaaagttaaatccaagaaggaactgactcagttcagctcgaaggtgtatatcctaaaaaggattagcggaagggttgctatggtgatcaactcagagaagaaccttcaaatgatcaagttacgcaaaagctacctcgtgattcagatctacaatcagcactga

SEQ ID NO: 11124 - RNA, 1140 nt, synthetic construct
  source 1..1140: mol_type = other RNA
atgaggaatctgtcccccgtgtacaaacaaaaacccatttcctcaatcgatgccctgtgcagactgctgcaggtggagcagagggacctgctgtctctggccgaaaaatctaacagccattacctaaagaagaccgttgaaaaatcgggaagtaagcctcgcgtaacctataaggcatcacccgagcttcgtccaatcttggacagtctgaaggatcgagtcttttcctgtgtctcctttccggcctatatcgccgctggccaactggggaagagttatgtggccaacgctgaatctcacataggtgcaaaaatgctcatgtctgaggacatcaaagactttttcccaagtatcactcagtcccaagtggagaatgtttacaagcatttcttcaaattcgcaccaaatgtgtctctgttactctctgagctatgtaccaaagacggtaaacttgtacaggggtccccactgtcaggatacctcgcaaatctggtgttcttccgggaggaacacagcatagtcgcctcatgcattgaacacggcctacactacacacgttactatgatgacattcacatctcctcatgtcagttgttttacgaggaagtccatgatctcaagcagttactttacgggatgatgggaagagtgggagtttcacctcaccgcagccctaagaagtgcaatattaaattgtcgaacacccgcctttatgtgcatgatgtgacgataaatagtcataagacgagcccttctcgaaaacgcgttagcacagtgcggaacctcctgttcaactttaacaattgtgtctccagcggctgcgacattgaaactctggtgaaacactatcggagcatcttgggccacatcaacacactgcagcagcagggctacgggaagtccaaaaccctcaagaaggagttaagggaagcagtccatcatatcgatgagaaatccgctaagaaatatgcgagaggctacaggaaggtaaagaactcaaaggagtttaaggctttctctttgaaagctagcattctcaagaggattagcggtagagttgccagcgtgatcaacgctgagcacgacacagccaaaaagaagcttgagagaaatcgggcgagtcggaagcccactagctga

SEQ ID NO: 11125 - RNA, 1131 nt, synthetic construct
  source 1..1131: mol_type = other RNA
atgtgcaatttaagccctatctacaacttaaaacccattggctcaatcgaggcgctgtgcagggtgcttcagattgagcagagcctgttattcagcatcgccaagaatagcaatgctcactactttaagaagacgattaagaagaacaacggcaagcctcgaatcacatacaaggcctccccccaacttaggaacattttggataagctgaagcacagagtgttctctcatatcgtgttcccgtcctacatatctgctggccagctggggaaatcatatgtggacaacgcaaattcacacactggcgcgaagatgttgatgagtgaagacattaaggatttctttcccagtatcacccagctccagatacagcaggtatacaagcatttcttcaagtttacccctgaagtctcacttctgctatccgaactatgtactaaagacggaaaactagtgcagggctcaccactgtccggttatctggccaacttggtcttctttaaagaggagcatactatcgtggacctgtgtatcaaaaatggactccactatacccgatactatgacgatattcatatctctagtcacacacccttctttgaagaggtatcggagttgaagcaacaactctatggcatgatggggagagtgggagtttccccacaccgttcccagaagaagtgtaatattaagctgtcgaacacccggctcgacgttcacgacatcaccatcaacagtcataaaacaagcccaagcaaaaagcgcgtttcccgcgtccggaacctgctcttccaatttcagaaatcagtgtctctgaatgatgatatagaggggatcattaatcagtaccggagcattttgggtcacattaatacactccagcagcaagggtatctcaaaagcaaagctctgaaaaaagagctttctaacattgccctttgcataaacgagaagaacgcaaaaaagtacgctagaggatataggaaagtgaagaacgacaaggaactgaaagcctttagcgccaaagtctccatcctgaagcgcataaacggtaaggtcgcatctgttatcaatgccgaacaggatgctgcaaaaaggaagctgaagaatagacagtctaaaagtaattga

SEQ ID NO: 11126 - RNA, 1116 nt, synthetic construct
  source 1..1116: mol_type = other RNA
atggttacgaatcttcagttcaaatacaccaacaaacctatttcaagctatgaatcccttagtaagaccttgagcataagtattcaggagatccacgacattgagagcaaatctaatgacttttacacgatcagcaagaagatcaaaaaacctgacggatctctcagagttacatataaagtccatccccgtctgaggtgcgtccttgatttgctgaagaaacgcgtgtttgattctgttgaagctccagaatacattctggctggtcagaagaataggtcttacatcctgaatgcgaagacacacactgagtcacagatgctcctgtgcgaggacattaagtccttctttccaagcattcacaaaaagttcgtcaaaaagatcttccagcacttctttttcttttcacccgatatttccgagagcttagccgagatcagcactttaaataactatcttgtgcaaggctcccccctcagcggcgaaatagcaaacctcatattctttgacctggaaccagccctagtagagagactgaaaaaatacaatctgcgttacacacgctactatgacgacatctacatctcctcaaaagagcataatttctatgaacataccgaggagataaagaggcagatctatcggatgtttaacacagtgaacctgaagcctaatcggaagaaaaacaagatctcaaaacaaagttccagaatatctgtccacaatattaccgtaaattctagcaagatctcaccgtccaaagagcgcctgagtatggtgcggaagaagatttacatcttcaagtgttccattgagaacaacatcgatattcaggatttgatcggacagtataagagtttgcaggggcacatatctaccctgaaaactcaagagtacaccaagcataaaattactaaacgggaactagaactgctgatctcgaaaatcgacgaacgattagccaaaaagtactcgcgaaagttcaggtctgtgaagaccaaggaaaactttaacaagctcgccaactccagtaacctcctgacaaagattagccccagagtgactggggtgtataaggatgagaaaatgaaggcaaagaaacgcctctggaagtga

SEQ ID NO: 11127 - RNA, 1152 nt, synthetic construct
  source 1..1152: mol_type = other RNA
atggtgagcgaggccaatacggtggagaattttcagtgcaggcaatcacagatagggtctatcaaagccctggccaagactctgtcactcattgaatctgaactcatcgacctggctgagtgcagtgatcagtactataaggtgagtaaagaaatcccaaagtctgacggctctgtgagacgaacctactccgtgtcctatccattgaagaaagttctaatccgcatccggtctaggattatatcgaatgtggattatccggactatatcctggcaggccgcctcggaagatcatacctggataatgccaataagcacaagagcagtgcgatgattctctctgaggacattacccggttctttgatagcataaagcaggagtacgtcgagcagatcttcaagtattttttccatttccccccagacgttgccaagacactgagtcaactgtgtacccttgacggttatttggtccagggctcccctttatccggggatatcgcgaacctaatcttcaacgagaaagagcctaacgttgtgaaactcgctgccgaactcggcctgaaatatagtcggtactacgacgatatctacgtctcaagtctgaccaacaactttgacgcccacattggcactttaagaaccgctatttacggtatgttcgcaagcgtcgaagtgaagcccaataagtctccccaaaaaagccgtgtaatgagatcatctcacagaatggacgtacacgatgtgactgttaactcacataaattgagccctagcaaaaaacgtacctccaaagtccggctgtccgttgacaggctgcgcaagatggtagccgaggatgccgccatttccgacatccttaaggtgtaccgctcgacgtttggacaattgataacacttaagagccagggatctcccaaatacgtaaaaatgaggtcagaactggatcagatcatgaagtccattgaacctgcaaaagctcggaagttcgcaaggaagtttcgaaacatcaaaacagaagcggatttcaaaagtttcgctcagaagatatccgtcttaaagcgaattagcccaagcgtggctggggtgatcaatgcagagagcaagtccgctaagcttaaaattaagtttaagcaggcaactacacattga

SEQ ID NO: 11128 - RNA, 1137 nt, synthetic construct
  source 1..1137: mol_type = other RNA
atggtgagtgaaacagatcccgtcaatgatttccagtgcaaacagtcccaggtggggagcattcggactctggctaagacccttagtctcaccgagccggaactcgtccggcttgccaagcattcagataagtactataacgtgagtaaggagatccccaaatcagatggatctgtgagactgacatattccgtgtcgtatcctctaaagaaagtgttgattcggatccgcaatcgcattattagcaacgttaattaccctgactatatactcgcggggagacaaggcaaaagctatttggacaacgccaagaagcacaaatccagcactatgatcctgtctgaagatattaccaggttcttcgactcaattaagcaagaatatgtcgaacagctgttcaagtacttcttccgctttccacctgacgtatcccagacgttaagtcaactgtgtaccctggacggttccttagtccagggatcaccaatctctggtgacatagctaacctgatatttcacgagaaagagccaagcgtcgtgcgcttggctgcaagtctggggctgaagtactctagatactacgatgacatatatgttagctcagctaccacgaacttcgactcccacgtggggacaatgagaactgccatctacggcatgttcgcttctgttgaggtaaagccaaataaatcacctcagaagtctcgtgttatgaggagctccaaaaggatggatgtccatgacgtgactgtcaattctcataaattgagcccctctaaaaaacggaccagcgaggtgaggctcaggatcgacagacttcgtaaaatggtagccgacaatgccgagatggccgatatccttaagttttaccggagtacatttggcaagctaatcacactcaaatcgcagggatcccccaaatacgcaaaaatgcggagtgaactggatggcgtgatgaagtccatcgagcccgcaaaagctcgaaagtttgcgcgaaagtttaggaagatcaagaaccagagcgagttctccagctttgcccaacgcatttcaatcctgaaacgaatttctccgtccgttgccggcgtgatcaacgccgaaagcgcaatagcgaagtttaagattgaggcaaagtga

SEQ ID NO: 11129 - RNA, 1125 nt, synthetic construct
  source 1..1125: mol_type = other RNA
atggagagattcaacttcttctacacacagaagcaaattggtagcctgagcgttctcgcaaagaccctgagcattaccgtcaacgaacttaatcgcttgcgcgcaaactccgattcttactaccagattgcgaagcgggtggtgaaggcagatggctcagagaggataacctatgacgtaaagtaccccctcaaaacaatcttgcaaaaactgaggtcccgcgttatcaagaacgtccagctgcctaaatatatcctggccgggcgtaaaggaaaaagctaccttgacaacgccatggagcatatgtcaaccaagatgatacaatccgaggacatctctaacttcttcgacagcataaagtccaagtacgtgatcaatgtcttcaagtacctgttcaaatttccaaatgatgtcgccgaagctctgactgatctctgtacctttaaaggccacttagtccaggggagtccagtgtccggagacattgccaatctgattttttatcacaaggaacctcagctcgtgcaggctatcgagtcgcttggactcaaatataccaggtattacgacgatatttacgtttcttcgaaagaagggaacttttaccagcatgtgtctttcttaaaagcccagatttatggcatgtttagcagcatccaagtcaaacccaatcgctccctgtctaaaagtagggtgatgcggaattcttcacgaattgatgtgcacgacgtaactgttaatagtcataaacttagtccgtccaggaagagagtctcaaatgtgcgggctcagatcaacaagctcaagaattccgttaatagccggggctgcctttcagaaacgatcagtctgtttaagagtacattgggtcaggtgaacacactgaaggcgcaagggagccccaaagccaaggacatgctcaaaaacatactggacgccctgaagggcatcgatgaagctcaggcaaagaagtattgccgaaaggcgagaaaggtgaaagagctaagacagctgaataagctagctcagaacttgtcagtgttaaaaaaagtgtctcctactattgccggagtagccaacgctgagttgaaacaggcaagagagcgtatcaagaagaagcagtga

SEQ ID NO: 11130 - RNA, 1116 nt, synthetic construct
  source 1..1116: mol_type = other RNA
atgtctagccagattgaatatccccaggccgggatcgccagtattgactcactggcttctgcccttcgcattccaagctcagaattagttgctctcgccaacaatacaagcaatttgtacagaaagagtgagcaaattgagaaggacgacggatcaaaaaggatcacctatgatgctttgccaccccttaagatcgtgctcagtaacttccgcaaacggatcattgataaggtgctccttccagagtacatatctgcaggtaagaaaggaaagagctatattgataacgccgaggtccacgcaggatccaagggcctgttatccgaagatatcaagaacttctttcctcaggtatcctttaaaagtgtttttgaagcgttcaagtacctgtacaaaatgtcccccgaagtcgctgaagtagccgctctcctgtgtaccaaagatggctacctggtccagggttctcctgttagcggtagcttggccaatattatcttctatgcgaaggagccctttctcgtcgaccgtcttaagttgctgggctttaggtatacccgttattatgacgacgttcacatcagccacaagactgatgactttagccgagacatcggagaacttcgaaccaaagtttacgggatattcattagtcagggcttgcaaccgcataggactgccaaaaagtcaaattacgcaaattcttcccggaggatgtcggtgcatgggatcgtcattaataacgagaagattaagcctaatcctaagaaggtcagcgacacccgggcgatgttattcaagttcgaacggctcctggagacggattacacaatcgatagtgtggtgtcactgtatcgctctatcagaggcaaaatacagaccctgaaagcacaggggtccacaaagtccgaggcctacctcacgactctgaactctctaatgagaaaagtggacgaggcaaaggctaaaaagttcgtacgcaaagtcaggaaggtgaaaacaatcaaagagtacaacaaactgtcatccaagctgtcggtgctgaagaaaatcaacgtgaaagtgactagagtggtgaaaatagagtgcgatctggccaagaaatccctaaaggcatga

SEQ ID NO: 11131 - RNA, 1113 nt, synthetic construct
  source 1..1113: mol_type = other RNA
atgcacaaaaattggagctactcaaatagacccttagcaaatattgaatccctgctcaagatgttggaaacgaatgaggaaaggctcgcatatgtgctcaagaacaagaagaactatttcaaaaccgtcccagtcctacggaagggcaagaaaagaaccacttacaaagtggtcggcgagttgctgaagatacatgagttgattaagcaacatgtcttcagtaagatctctctgccagaatatatcactggcggccgacggggagtgtcatatctcgatgattgcatcagccactgtaacaaatccattatcattcaggaggacatcaaagacttcttcccctcaataaaggaagagctgatcgctaaagcctttcagtactatatgaacttttcccctgaggtgagtagcctaattgccaagttgagtacactggagggatcgctggttcagggtaccaagctttctacagacatcgctaatctcatttttttagaggaagaagcgctaatctctgctgaagtcggtaagcttgggggcaattatactcgctacgttgatgatataactattagctttgagagcgaagttaataacgaggacatatcaaagatcaagacgatgatcctgtccatggcgttgaagtctggggtgaggcttaaccggcagaagagcaaggtgttaaggaatggacacagtaagattgttcatggcgtaaaagtgattaaggaactgcgccccacccagaaaaggaaagattccatccgaatgtgcctgtttaacctgaagaagaaagtgatcgaaaaggagtccataatggacattctggctctttactttaagatcagaggactcattaacaccctgaaacaacagggggataagaatcacgccgagtacattaagcaagccaatcagctggtagccgccgtagacaaaaaagatgcaatcaaaagtatccgtaagatgagaaaagtgaaagacgtgaaaaaacttcgctctttctactctaaactgaagcctctggggaacatcagcaaaacaattagcgtgatcctcgactcagagtacaagacatgtaaatgcaaattcaacaacaagtccatagagtga

SEQ ID NO: 11132 - RNA, 1101 nt, synthetic construct
  source 1..1101: mol_type = other RNA
atgcataagaattggaactattcaaataggcctctggctaatttggaatccctctttaagatactcgaaaccaaagaagagcgtctcggatatatcctgaagaacaagatggtctacttcaagaaagttcccgtgatccgaaaagagaagaagcgcacgacatacaaggtaatcggggagctgtccaagatccacgacttgatcaaacagcggatcttcagtaagattacccttccagaatacgtgactgggggaagacgcggaatttcctacatagatgactgcatgtctcattgtgacaaatcgattatcatccaagaggacatcaaagattttttcccaagcattaccgaagaattaattgccaaggcttttcagtactatatgaacttcagccctgaggtttcaagcctcatagccaacctgagcaccctggagggctctctcgtgcagggtacaaaactctctacggatattgccaatctgatatttctcgaggaagaggtgctgatctcggaggaggttgcaaaacttgggggtaattatacccgttatgtggacgacattacaattagtttcgaatcagaggtgaacaatgaggatatctccaagatcaaaacaatgatccttagcatggctattaagagtggcgtgcgactaaataagaagaaaagccgggtactgcggaatggccagtgtaaaatcgtgcacggcgttaaggtcatcaaggaactaagacccactcagaagagaaagaataacatcaggatgtatctgttcaaccttaggaagaaggtgttcgataaggagaacgtcatggacgtgttgtccttttattttaagatacggggcctgataaacactctgaaacagcaaggggatatcaatcacgccaaatacctgaaggaagcaaaccagttagtcgccgacatagacaaaaaagacgccattaagagtatcagggcaatgcgcaaagtcaaagatattaagaagattagagcgttgtactctaaactgaaaccgctgggaaatatttctaaaagcatctcagcgattcttgatgctgagtacaaatcctgcaaatacaagttcaacaactga

SEQ ID NO: 11133 - RNA, 1104 nt, synthetic construct
  source 1..1104: mol_type = other RNA
atgcataagaattggacatactccgatcgtccactggccaacttagagagcttgtttaagcttttggaaaccaaacaggagcgcctcacctatattctgaagaacaagaagatctacttcaagaaagtgcctgtcatccgcaaggggaagaaacggactacttataaggtcacaggggaattatcccggattcatgagcttattaagcagcgcattttctccaaaatcaccttgccggaatatatcactggcgggaggagaggaatcagctacattgatgactgtatttcccactgtgacaaaagcattataatccaagaggacgtcaaggacttttttccatcaataaccgaaggacttatagccaaggccttccagtattatatgaactttagccctgaggtgagttctctgatagcaaacctgagcacactggaaggctcactagtgcaagggaccaaactctcgacagacattgctaaccttatttttcttgaggaggagatcttcatctcagaggaagtgaccaaactgggcggtaactatactagatacgtggatgatattacgataagtttcgagtctgaggtgaacaataaggacatcagcaagatcaagacaatgatcttctctatggcgattaaatccggagtccgactgaataagaagaaaagtcggattctccgaaatggacagtccaaagtcgtacacggcgtaaaagtgataaaagaactcagacccactcagaagaggaagagcgatatcaggatgtgcctctttaatttacggaaaaagatcctggataaggaaaacatcatggatatcctgtctttctacttcaaaattagaggcctcataaataccctgaaacagcagggcgacgctaagcacacggagtacttgaacgaggttaatcatatcctgacaggtattgacaaaaaggacgcaatcaaatccattcgtgctatgaggaagctacgcgaggtgaagaaactgagggttttttacagtaaactcaaacccttgggtagagtgtcagaaaacgtttctaccatcctggatgttgaataccgggcctgcaagtctaaactgaataagatctga

SEQ ID NO: 11134 - RNA, 996 nt, synthetic construct
  source 1..996: mol_type = other RNA
atggaaaccaacccaatttacaaggggaaacagatctcaacaattcaagatctcagcgaaatcctcaatgtggaagtgaatcggatcaagcacatactctacagggcgaacagcttctacattgagaacccgcagcccaaagatgacggtaccatgaggatgacgtacatcattaagcctcctctgcagcagatccaagaacgaatcaaggacaatatctttagttgtgtagagtttccccactatctgatgggcgggataagagatgaggccaatcctagagatcatatacgtaatgcaaagatccattcaggcaagaaatggctaatctctcttgacatcaagaattacttccccagcatcaaaaacgagtatgtctacttcatgtggagaaagttctttggcttttcggatgaggtgtcaagggttttaactaggctgacgacatataacggatttctgccacagggctccaaaactagcagtggcatcgccaacctgctgttgtgggacaaagaaccccatttcgtcgattccttgaacaagcaagatttcgtttatactcggtttgtcgatgacattaccatatcatctaccaagttagtggaaaaagagatggtgagtaagataattgtggacatgaaacatcttctgcgccagtacgacctgaaactaaagggaaagaagaccaagtttcagacacgctctcagaaaatgaccgtgaataaagtaacagtcaacggtaaaaagccaactatctcctctgaggagcggaataatattcggctggaagtgcacctcttcgagaaaaaagctgacaatacaaagaattggaacgaaatcgatcacgactattacagcctcatggggaagcttaactatattaagaaggttcactccgcttacgccgagaaattgattagcagactggagattaagcgcgaggagttctattccaaaaactacgaaaaggacgggaacggatgccgactgtga

SEQ ID NO: 11135 - RNA, 936 nt, synthetic construct
  source 1..936: mol_type = other RNA
atggataagccacaatacaagaagaagccaattggatatgtcgattcccttgccaaggcactcagtgcagaaagggaccacctcattagagtggctaatgatgccgactcattttaccgtcttcataagaggatcgagaaacccgatgggacttttagggagatctatgatgcaagataccctctgaaacttttccagagacgaattaaccggaaactgatctcccgcgtcgatttcccccagtatctacatgccgtgaagcatcggtcccatataacagccgctagtaaacataatattcccctgctgcttctgaacctggatatctccaacttctttccttctatctcatctgagttggtctttgacatatggcggctgttttttagattccctaagcacgtctctcagatgctcaccaaactaacaacatacaacgggttcctgcctcaaggcgcccccactagtccaggcttggctaatttggcgttctgggacattgaaagcaagttagtagaggggatgaatgctaaaggcttcgtgtacacacgattcgtggacgacgtgacgattagctcagaaaggaaagtacagatggacgaactggcaccgattatcgcctcgatttttggaatgtttcgcaaccgcggtgtgaaggctaaccggaataaaatacacatctctacgagcggccacgagatgttggttcacaacctgaatatcaattccggcgtgccaaccatacctaagagggaacgcggtcgtatcagggcggccgtcaaggactgcgagatcacttacaccgaaattatccagaccgaggtttacaaaaagctctggcacagcactttaggacgagtgaattatctgaaccacttccaccccaccgaggcccagaaatatcatcaaagactccaggcagttcggccgagctga

SEQ ID NO: 11136 - RNA, 942 nt, synthetic construct
  source 1..942: mol_type = other RNA
atggataagccacaataccagaagaaaccaattgcccacatagatagcttggctaaactcctctcagttgacacaaacaaactggtgaatctggctgaccaggctgactctttttactacctctcggagcgaattgagaaacccgacggctcttttagggatgtctatggggtcagggacgagttgaagatcttacagcagcaaattgtgaacaaaatctacagcaatgtccggttcccgaattatctgtatgggtctattaagggcaccaatcatatcatggacgcatatgtgcacgcacatgcccagctgcttgtgaaaatggacatcagcaattttttccccacgctgacctctaagaacatcttcaacatctggaagaggttcttcaacttcagtgagcccgtggccaaaatcctgaccaaactaactacattcaacaattttctgcctcaaggtgcccctactagcccagggcttgctaatcttgccttttgggatattgaatccgcgatagtggatcgcctacagagaaacggctttacctacactcgttttgttgatgacgtaacagtatcatccaaatccagaacagaaatgcacaagttgaacaccattttcaagagtgttttcggaatgtttagatcaaaaggagttaaggccaacaggaagaaaaccaatattagcaccagcggatatcggatggccgtgcacaacctgaacatcaattcgggtacgcctacaatatccactaagaagcgctcccaaataagaagcgctgtccgaggctgcgaaaagagttaccaggaccagaagcagtcagaagattacaaaaagctctgggagagtgccatcggccgcgtgaattatctgtctcagttccaccctactcaagcacaggcactccataagcggttacaggcggtcctgcccgtgtcctaa

SEQ ID NO: 11137 - RNA, 1032 nt, synthetic construct
  source 1..1032: mol_type = other RNA
atgagtcaaaaccatctttcgaagtcactgcagactccattactcgcacctaagttttcgggcaccaggattagctccgtggagtctttgtcctttgtgctgaaaacacccatcgacgaattggtgagcatcgcagacacaagtgagtcatactatagaatacacaaggagattgagaagccggatgggtccattcgtaaaatctattctgtcagagaaccgctcaaaggaattcagcggaaaatcaacagcctcatactgaagaagtgcaagtacccagagtacctcacaggcagcctccccaactgtacccacatcaagaatatcaactttcatgtgggccaaaaaacgattattagtatcgatgccacgaacttcttccctagcatcaacgcctctgatgtcatgaatctgtgggctgagttctttaactttgagtctcagacttccacattgctgacccagctgtgctccttccaaggtggactggctcagggagcccctactagctcctacatctctaatcttgtgttctgggatgtagagccactcatagttcaggaatttcaccggaagggctacatctattctcgatatgtggacgatatttgtattagcaaatccagtcgcaccactaaagaggaaaaaacctgggcgataaaaactgctcagaaggtattcatctctaaggggctgtccatcaagtcacggaaaaccaagattatggagaagggcagccgccaggaagtcaataaaaagaccatccataacggaaaagttaatgcttcaaaagccgacaaggataaaattcgcgcggagattcacaatctgaagattaggatcgacaagaaccttctacccgacattccatacgaaaagaggtacttatcaatccgaggtaagatcctgtatcttgaaaagttcaacaagacagccgcccaaaaactacagaatcagttggacgaactggttgcatacataaaaagtaaaggggtgatctggagaagccccaaaaataagtatataccttga

SEQ ID NO: 11138 - RNA, 1026 nt, synthetic construct
  source 1..1026: mol_type = other RNA
atggccgaattagagtacccatttgcccctattggctccttgaacgctctggcacgccatctgggtctaagccggtggtatttggatggggctattgcgaaagctggtccgcgagcctatcgggtgcggaaagtgacacccagcgatgccagaggagtacccgacaaagtggaatacgcgccagccccttggcttaaagaactgcaacgcaccatcaatcgccggcttttaaaggcagttgaaatgcccgcctatgttataggcggcgtgcctggcaggaggattgaagacgccatccaacgacacgcatgtagtcaggcactcctgtcctttgatgttagaagattctacgagtctactagcgctgctgaggtgaggaaggtcttcatgaggctgctccggttccctccagaattgacggacgcccttctggctctgaccacggttagagggcatctgccccgtggcgcacccacaagttcttacttagccaatctcgtcctctttgatgtcgaaccagagctggttgacttcctgtctgggctgcagcctcgggcacttagatactcaaggtgggtggatgatatcaacatctcttcgccatggccgatcgacgagagactggcgggagaggtcaaggaccgagtcagcactatgcttcggcgccacggactgtccatcaactggaccaagtatcgcgagaacttgaggactaaatcagtcgtggtgcatcacgtgagaatagagggtagccgcttttccgtggccggctccaagaggcgtaatgtgagggccgctgtacacaatctcgaactggcatctcagaagcggcctctaagtgctagcgagctctccgaactgaccagacagcgaagtcgcgtagagttcatccgcccgtttcaccctcgagagatggagcccctcagaattaagttgcaggccattaaggagaaacagccaggaaggtcaaaaagcaaggacgggcccgactggcgttcaacagtgtggggatgcacaaagacctga

SEQ ID NO: 11139 - RNA, 1008 nt, synthetic construct
  source 1..1008: mol_type = other RNA
atgagcaccaaaaaacagagccctgagctccgacccctggtgtctttgtcctacctggagtaccttctgggcacaaaaagagatcgcctgcagaagatcgcgactagtgcgggatcttattaccaaccatttgacatacacaagaaaggcacagataaatggcgtcacattgacaacccccagcatcctctcaaaactctgcagaagcggatactgaagaacatcctcaacaggaatatccgcaggctaccagatgggatgaccggaggtatttccgggagatcgattgtcgaaaatgcaaagattcatatcgggaaggagtgtatcggcgtcattgacatcaaaaattgcttcccctcaaccaattatcatcagataaatcaggtgtggatcgaccatttcggttgtgggtacaagactgctaatctactgacaaagctgaccacctttcaacacagattgcctcaaggagctccgacgtcacctttactttgcaatttcgccctggctccagtttttggcgagattaaagccgtagcagactccgcaggcctggatatcacgattttcatagatgacattaccgtgagcggaagtaaaaagagcataactgactcaatcgagcccattattaagatccttgtgaagcatggctacgccgtccgcaagcgaaaggtgaaggtgataacaagtaactattcccagaaggttacagggatcccagtaaataggaagctctcaatcggtcgggggcacatccaacagattcggaacttgatcctggaaacagcctccttgaaaggatatatccccagcaacgattattgtaagatccagggaaaaatttcctttgctaagagcgtgtctaagacccagggcgtgaagctcggcaaattcgccgaaaaaatgttagtccacccgcttatgcaggtcggtgttaaaaaagatgaggcctctcgggactgcaaaaggtttagtgacaaccacaagtacactgaaagaaactga

SEQ ID NO: 11140 - RNA, 981 nt, synthetic construct
  source 1..981: mol_type = other RNA
atgaacaattctttgatttctctgaagaagttggaatttacactgtgcaccagcagggacgaattgcgcaggattgcagatagagtgggccgattatacgaaccttatgacctgcacaagaagggaactgataaatggagacacattgacaacccccatgacgagctcaaaaagctgcagcggatcattaacaagaacgtcctcaaaaagaacatttcactcctccctgagcgtatgaccggtggaatcaccggcaaaagcataattgacaatgctaagaatcacgtggggaaagagtacatcctaatcgtggatatcaagaattgttttccaaacacagatcagctcaaaatacttcatgtttggagaacctatttcggatgtggcaatacgactgcacggatcttaacccagctgacgacatttcaggctagacttccccaaggcgccccgaccagctcacttctgtgtaacttcgctctcctgccaattttccgaaaaatcgaccattacgctagtttgaacaatctgtctttcagcatatttgtcgatgatatcactatctccggtaggaaggcagatgtgattaagtccattaagcctatcatcaagattctgaaagagcacgactacgcggtaaagaaaaagaagattaagatcttcgcctccgggtacagtcaacggacaacaggtatcaatgtgaacaagaaactgtcagtcggacgtcggaaacttaacgaaatacgcaagttaatcatcgaatccgccaaactgaaggggtatctccccagcactctaattaataaaatcactggggacatcaactttaccaagcaggtgtcgccaaatgatggcaaaaaacttaaggagctggccaataaactgctgatagcccccatcaagattgttaagtctgagagtgattgcaataccaggacatgcaacgacttcaaacgcaaccacaaatatatattggactga

SEQ ID NO: 11141 - RNA, 978 nt, synthetic construct
  source 1..978: mol_type = other RNA
atgagcacactccagaagactaaaatcaaatccgtcgcagagttatctcagaccctgaaagtgggggttaaggagtttgttaagacggctaaaaacgccaatctcttctataggccctttgatttatccaaaaagggatccgaaaaatggcgacatattgataatccaaccggcaaattgaagatcatccagaaggctatcaacaagcagatacttcgtgacctaatgtttcaattaccacctaacattatggggggaattgaaaataagtcaatcctggaaaatgcaaaggtgcatgtagggcaggaaatggtggtgacgatcgatataaaaaattgcttcccgaagactaagaacgaagtgattttcactatttggaagaaccttcttggctttgagcccaacagcgccagactgctgacacagctgacaaccactaaagggcacctgccacaaggatctccagccagtcctagcctctccaatctcgctctcctgccgatctcaaaagaaattctgaactacagtaagaagcaccaccttaatttcaccatctatgtcgacgatataacactgtctggtaagaagagttctgctctggactccataagccctgtagtcaaaatcatccaaaaatacggctatgccattcgcaacaaaaaggtgaaaaagatgccctcatataaaacccagaccacaactggcattcagctaaatagcgagatttcaatcggaaagcagaagattgacgagatcaggaaggagattattaacttggcgaagctgcaaaaaccctacataaccaagaaatcgatattcagcaagattgactacgtgaagaaaatctcccccgaaaagggccagaaattgctggagtttgcgaacatgatcctcgaagaggacatcgactacatcgccgttgatcctgagaaggatgagaagcgggactgtaatggtaaagcatgcttggccaaatga

SEQ ID NO: 11142 - RNA, 1026 nt, synthetic construct
  source 1..1026: mol_type = other RNA
atgagtggccacgaacaccagctgaatatcccgagtccctttccaattctctccgttaacaagctcgctttcattctgcgtaccaaacctaacgaactgaaaaagctgagtgagaacgctggtaattattacaccccttttgacaggaaacagattaaagataatgggaaggtaaagtggagacatattgataatcccgcccccaaactcaaaaaaatacagcagaagatcaaccgtgtgctgctgaaggccaaggttgagtccctcccaacaggcatgaccggcgggattaagggaaggtcaatatttaccaacgcagcccagcacctgaaccagaaagccgttgtcaccatcgatttaaaggactgttttccgagaacatccaacaaaagaatcttccgggtgtggcgcaatcatctgggaacgagcgagtgcgtcgccaacatattaactaagctcactacgttccagcgcaggcttccacaaggctcacctacatcctcaagcctgtgcaatctcgcactattccctttgtttaaaaagacaaagcggtactgccagaaggaaaaatttaacttgactctctatgtcgatgacatcacgatctctggtcagacaattccaattagacttgcaatcgggcggatcatcaatttcatccaggaagaggggtatgcggtgcgacggaataaaatcaagattatgaccgcgagcgtgcaacaaaagacaacaggactgatagtaaacaaacagctgtccgtcagtgcaaaagctagagaggaaattcgaaaagagatattcatcttgagcaggcaggagatgttctcttcaaagcgcatgaggagcctatggggtaagatcaactatattaagaaggtgtcccccaaacaaggcggaaagcttgcttctctggcccacaccctgttattggacactctggccagccattcgtacgaaaatgtgacctctgagaaggaagtgactcgcgagtgtaagaatactcggcgacacaaatactctctttga

SEQ ID NO: 11143 - RNA, 1008 nt, synthetic construct
  source 1..1008: mol_type = other RNA
atgtcactggcgcgacctcagatcgtgtcatggaatctcatccgacaagtcacaggtttcagtgccgatgagttgagatcagtggccgaacgcgcaggaggactgtacgagagcagagatagactggcccacaaagcaaaaaaacccaaatggcggcatattgacgaccccgtccccgaactcaaacgcatacagagggcccttgtacgcggacttctccggccgatacccctacctgcctttttctgcggatccgtaagtggaagatctccagttgatgctatcaaaccacatgtcggcagaccgtctatcctggccctggatcttcgagactttttcccccgtactagccacaagagagtgtaccgggcatggacgagggtagtgggctgcagtcctgagatcgccggggttttgacacagttaacgaccctgcatcgaagactgccccaaggcgccccatcttcccctccactagccaatctggcctttcttgagattgggctggctatcgagagcgcttgtcggaacgctggtttacgtgtgacattcttcgtggacgacattttaatctccggtgaccagcctggcactgtgctcgatgagattatcgatctgctgcagcagagcggctatggggtcaagaggtccaagatggaattcatgggacctagggaaagacacgcagccctcggcgcggtttttaaccgctttatctcttatggccggggccccttcgcaataatacgtcagaggattttggcactcattgactccgctgaggtgaccccgtcgcaaatcaggtcactcaccggggcggctcactacgtccggtttctgaacaagaaccaaggggataagcttctggctttgattgtgcagttgaggcccactgttgaagacggcccacgggagcctaaggctcagtgggaaacctgccgcggtggaaataagtgtaaggcaaagccaagggggagccgcccactggtgacaactaccgggagctga

SEQ ID NO: 11144 - RNA, 1047 nt, synthetic construct
  source 1..1047: mol_type = other RNA
atgacacagtcccctgccgccgatccaggattggtgcctctggtaagcatgagaagactagaacagttactgggacgtagcagggaagacttaatccgcctcgccgagcatgccggtagatactacgccccatttgatgaatttaagcctaaccgagcagaaccgagacacattgaccggcccgttggggagctaaagctggtgcaggagaggattcaaacctctatccttcgccatatccctttgccaccaactatgttaggcggggttaaacgttgttcaattcgggacaatgcccagtaccacctgggcagccctttggtcgtcacaatcgacctgcgggattgtttcccgcggactcacgatctggccgtctattccgccttctgcagggtgctcggtgcttctgaaaagattgcacggctcctcaccaagctgacaacctatcagcatcgcgtaccgcaaggcgctcccacttctagccttctcgtcaattgggtcctgctgccacttcatgatgcaattcagacgattgcacagggggctgactgcaggtgcacattctgggttgacgacatcaccgtgagtggacccgcggctttggacgtggtggaacccatagtgatggcgatccaacgccatgggtatagtatccgccaccggaaactgcacctcatgcctgcttgcaggccccaggaggtgactggtgtgctggtgaaccgtcaccccgcagcaagaagggaataccgtaccgagctaagggccactatactgcagctgtcctcagaggtcgaagtatcagctagaaaacttgagcggataaagggccgaatctcgcacgttcgccacctgcatcctagacatggcgagagtttggaccaactccttgagcgaacaatgatgggcaggcgcgtcgatgagctgggagcttgtccacccaaagaggtgcggacgcgcgttcgatgtaaccacgtgcggagacacagggccggaagaagggcctctgctcgatccagagcagataccgggggcattgcgggtgagtga

SEQ ID NO: 11145 - RNA, 1074 nt, synthetic construct
  source 1..1074: mol_type = other RNA
atgtcagaggcgacagcgcggaccttttatagcaaggccgggctgggttttcatttaaagcgggattggtcgactctcgaaagcctggcagaacacgcgggcgcccactacagaagttttgatgagtggatgggcaataagtggcgtcacttcgacgtaccaagcaagcgccttgccgacgtgcaaagggaaatagccaggttccttaaggcaagagtcaaattcccagatacaatgctgggagggctcaagggaggctcacccaaaaaaaacgctgaggcacaccgaggccagggtctagtgtttaagctcgatatcagagactgcttcccatccatcggtcataggagagtgtttcgcatgtttcgggaacagctcaaattctctgaccctatctccaatcttctgacgaaactgactaccttccagaacaggttaccccaggggagccccgcctctagtgtgattgctaaccttgtcctcatggaattgcacgaatcaattcagttagagtgcgaggcactgggcttgaagtgcacctttttcgtggacgatatcactctgtccggggagagggttcgcgaggtgattgccccagttgtgcggctggttcagcgtcatggattcagtatgcgcccgtgtaaggttcggctcctggctgctcatagggaaaagctgtcagtcacaggggtgcttgttaacagacggaggctgtctgtgggacgaacgcgaaagaataagttgagagcccgcatccatcagctaagcagaggggagcgagtaaccgacagcgatctcaggtctattcagtcctccgtggtccaggtcaaacacataagtaatcatcagggcgaaaccttggagagactggtacaagagaagctgcctaagcgcggtgtgcaaacacctaaagagcgtgccaaaaagatccgcagggtctgtaaatgtacccataaacatcggcacaaacgaaacgaggagagcgtgactgctacacaccagcctgcctcttccgtggctgcaggattgccccggcaacacttcgtccacactctggaagccggcctgagatga

SEQ ID NO: 11146 - RNA, 963 nt, synthetic construct
  source 1..963: mol_type = other RNA
atgatgctgtccgctaaaccattagtctcccggagggagctctctttccggctggcctttcctagggatagactcgaatctgtggcggagagggccgggagatattaccgccccttcgatcgcgagaagaaacccggggctaaaaaatggcgccatattgacaatcctattgagccgctgaaatgggtccagaagcggataggccggggcatcctgaagtccgtcgacttcccagcagagctcacaggaggattgtcgggtcgatcactcgtggacaatgcaagaccacacataggtcaacctacacttgtgtgcctggatctggactcttttttcccccacgtcaaccatgatagagtttacgacgcactgaggcgccacctcggctgttcaggcgaaattgccaacctgctgactaagctaacgacctttcagaagagactccctcagggcagccccgcatccacattccttgcgaatctcgtgctgatcgatattgtggaagagttgcgggctatcgcacgcgaccgacatctggccttgtcctgttatatcgatgatttgaccttcagcgggatcggagcagaagaggccatcggagatgttgtggcagtgttaaaagcccaccaccttaagattagtcgtgagaaactgagcattgcgcatgaacatgaagctcgaagcgtcacaggcataggggttagcagacggttgaccaagcccagagacaagatgctggaggccagggactttatcaacagcctggccgcttcagagactgtgagtgaacgggaccttgccagagcccgcggaatcgtggctcacgttgggcaggtaaacaagagtcaagccgcctacttagctaggaggctggcccgtctaccacctgcaggtgatgacgctccgcaggaggtagaaaaaaccaagactcgacgttgctcatcttttcttaggccacactga

SEQ ID NO: 11147 - RNA, 978 nt, synthetic construct
  source 1..978: mol_type = other RNA
atgattaacagctactctgacctgtccccacttgttagcattcggcgactcgagcgcctgttgggctttgataggcaggcgatccagtggatcgccaatagagcagggagatactatcggcctttcgatgtgcgccgggtgggtaccaggaagtggaggcatatcgacaatccgcaaggcaagttgaagactatccagaaaaggattttaactaacatcctgaagaccgtcaacttccccgcggccatcttagggggaattgccggcgctagcattaaagagaacgctcgggtgcatcttggccaacctatcttggttgtgattgacatcaaggacttcttccctaatattacgcaccggaaagcttactcagcctataaaacatgtctaggctgttctgcgaagatagcaggactgctgacgaaactgaccactttccagcgccgtattccacagggagcccccacaagtaccttgctggcaaatatgagcgtcttaacactccacgacgagcttaaggaactagccgataatctcggcctgcgtgtgaccttttgggtggacgacattgctttctcaggtcctaacgcagataagataataggtgccgcagtcgagatcatctcccgacatggttttgccgtatccagcaaaaagataagggtaatgggacgcggaagtaggcaggaggttaccggggtccccattaacagaaagatctccgctgggagaaagtatatcgaagagctgaggaatagcatcctggattttaaacgaactgggatcacagcccacgaatttgcctcactgcgctccaaaatttctcacgtgcggtggctttgccccagtcagggaataaagctcgaagagtttgctaaagaacaactctctgacctcgtgctgtcgatcggctgcaaggcagctaaaaacgagtaccgcaagtgcgaagattggtcaagacacagaagagagccatga

SEQ ID NO: 11148 - RNA, 984 nt, synthetic construct
  source 1..984: mol_type = other RNA
atggcaggtaccgcgccccctgccgaaagcattttccctatcaaaagcttacggaggctggagcggttgctctgcgtccctagggaagagcttcgattcctggccgacgccgctgagcaccactatcgtccctttgacagatttcgtcctcgcgccgatgggacggtgaaagtgaggcatattgacaaccccgtggacaggctgaagtccgtacaagcaaggatcaattcacgcctcctccgaaccgttccttttccagcaacaatgatcggcggtgtgcgcaggagaggcccaagagatggagccagtcttcactgtgcatccccagatctggttaccttggatctgtccaattgttacccgcgtaccaccaaccggcaggtgttcgcggtgttccgcaacacgttgggctgtagtgaagaggtcgcccggctgctgaccaggctcacaacacgtcagggtcatttaccccaaggcgcccccactagcggactgctttcgaacctgtgtcttctggacctacatcagacaattgctggcctggctgcctctagaggactcgccttttcacagtacgtggatgattttgcactatccgggccgggggctagaaatgcactgggtgacatcctccccatgttctttgggcacgctagcgcgcgcttgaatcgcagtaagctgcgctgctgtggacgcggcagcagacaggaggtcactgggatttgcgttaatcgacgaactatgtctgctagaggcccaaagtatgaagcactcagaaatcgggtaaggtctttcgacccaaacgcctctgacgcgggaactgagcgacaggccatactgggcgcaatcgcccacgtccggtcaataaaccaattgcaggctgattcagtggtccggcttgctgaaaggtgcggattacggcgggacggatgcagggacacaccagattccgttagacctgtggggagagccgctggcgattga

SEQ ID NO: 11149 - RNA, 972 nt, synthetic construct
  source 1..972: mol_type = other RNA
atgtcaagaagaaagatcgagtctcttctaggcgagaagatcgaatatctggaacacgttgcatccaaagtgggaaattactacaagccttttgacatatacactcccggaaaaaagccccggcacatcgataacccaaactcagaccttaaaaagatccagaagaaaatcaagtcccgggtgttagagacagttatcctgcctgagacaatgatgggtggtattaaagataaaagccacaaggacaacgctctaaggcacattgacaaaaaggtggtgattacgctggacctcaaaagttactttccaaagaccaataaccgaaacatatacgacgtgtttatcaatgtgttcgggtgtaatagggagacagcccacctcttcactaagttgacttcctatcaacggcgtttgccccagggtgccccttctagtaccctgctggctaacatgtgcgtcttgccaatgcataacgatctccaggaacttttcaataggaacgacataacctggaccttttatattgatgacattgctttcagcggggataacgccgataaggtcattgacgaagccatcaaaattatccagaatcatggccagggggtgtcttgcaagaagaaaaagatcatgtacgcgaacaatcgccagatggtaactaaactgtgtgtcaaccgcaaagtcggcatcaagaaggaaaaaatcaacaagatcagagaggatatcattaatctctcctggcaacctaatattgataatcgaaaactgcaggccattaagggaagcattaactacgtaaagagcatctgcgcagtcaggggccaatcactggacaatctgtataaaaagatgttacccgcaaaaaccgggctcataggcaagaaaccgaagataaaaacaacctcgtgcaagtgttctaagaaacatcgcgagtatgtgaagggagttagaaacattagtaataaagagtga

SEQ ID NO: 11150 - RNA, 930 nt, synthetic construct
  source 1..930: mol_type = other RNA
atgaagtccctgaaccaggacgataatgtgaagctgcgaagcatgcgcagactggagtctctgctggggagaagtcgaaaggatattaagcgaatcgcagagaactccggtcgttactaccggccctttccaaaacgccagggagataaggtccgcaccattgataacccaactggggaattaaagcagatccagaaaagaatccaggaacgtatactgacggacttcgaattgcctgagagtatgctcggaggcgtgaagggccgatcaattaagctcaatgccaaattgcattgcggggctcccacagtggtgcacttggacctggtgaagtgctttccacggatcagtaataaggtcgtatacaaagccttcgtggagcatctgggctgtacacctaggatagccggtctgcttacccagttaactacctatcgccggaggcttcctcaaggctctcctgccagtacgatgctggccaatatctgtctcctgcggatgcacaacgagcttagggacgtagctcagactaatggctcaatgctgtcattcttcgtcgacgacatagggctcagcgggaaccggcccgaggtcttaattgagcaaatgattggaatcgtgcggaaccatggtcactctgtctctcaccgtaaaagaaaaatcatgagaagccatgagccgcaaactctcaccggactatcccttaatagaaggcccctggttccaagaaccaggagggcgcaagttaggaaacagatttatcactgggcctcccagggcaactgcaccgatgaattgcagagaatccgcggtgctgtgaattttgtgcggtgggtttccgaacaccaaggcgaagctctcgagaggacactaagccgcgcacagagctcaacaagcgcagaatctgatcgctcgcggcagggatgttga

SEQ ID NO: 11151 - RNA, 912 nt, synthetic construct
  source 1..912: mol_type = other RNA
atgacatcttctgaacaacagaagtccagccccaacccctttccactggagtccccgaataagtttgcctggatcatcagagtcaaaccgcacgaactgcaggaggtggcagcagttgcagaatccctgtataatccctacttcgagaagaaaaagggaaaaaaacctcggctgatccacaacccatcagacaggctgaagataatccagaagaagatcaacacgtggattctacagaagtatccttttccggatttcatagtcggcgggattaaaggtaaggccctcgaagaccattttaaattgcatcttaggaaagacatcgttgtgactctcgacattaaaaattgcttcccatctatcaccaacaagcacatttacgacgtgttcaaagataagctcggggccttgagcgatactgctcgcctcgccacactgctaaccgcctacaaggggcagttacctgtaggagcgccaaccagtccacttttggccaacctggtgctgttgcctgtgcttatagagatcaagaagctggttaactctcacggattcgagatgagtcagttcatcgatgacagcgcgttttcgggcaagcgcttacctgtggagctggtgtccgaagtctgtaagatgatggctcgtgctggttttaccatctcacataaaaagacactggtgatgcctaagagtgattcacagacggtgacaaagcgaattgtcaatcaaactcccggaattccacggaaagaaatgaataggattcgaagcgcagtcaatgagctcaaaaacacccccaaaaatgatcccctttatggcaaaagactggctagcgtaaaaggcagagttatatccattcggaagttctacccccaagtggccgagaagttcctccaggagatcggcgggtga

SEQ ID NO: 11152 - RNA, 939 nt, synthetic construct
  source 1..939: mol_type = other RNA
atggtggctgctcccatactttctattagggatttggccgcccgggtaggcacacctatagagagaatgaccgaaatcgccgacgatattgattctcactaccgccctaccgcactctatgacgagaaaagaggccggagtcgcatgctcaacgtcccgaggaaagaacttaaggccctacagcaacgcattcatcgagttatcctggatccaattgagctctccgcttgcgtgcatggagctgtgtcaggcagaagccctcggactaatgccgagcagcatctcggcaagccctgtgtgatctgcgttgatgtgaaaagtttcttcgactcagtccgccactacgtcgtgtatagaatgtttcggaacgatctcgggttcggaagggacgtggcacgcctgttgacaaggctgaccacgtacgactcccagttgccacagggggctccgactagtccagcaatcgcgaatctggtgctggcatttcaagtggacaagcctctggaagcagctgcggcaagcttggaccttacatacacccggtttgtcgacgacatcgccatctcggggggagatccacggcctctaatcaacgttgcagccaagctgttatccgccaggcgtctgaaggtgcaccgagccactggacgaggtagactcaaacccaagctgaaaatcatgagcggtggggtacaacagaagataacagggctggtcgtaaattctgcgtcagcgcccaccattccccgacgctatagggatcaggtgcgtgcagctatacaccagctgcgagaaatgcagtccggcgcctctttcaaccgctccgtggacagcattagaggaagaattgctcatgtcagacggctgcacccaagcggtgccgctaggttagccggcgagcttgcccgtgttatcgagaataggcgggaatgtggctga

SEQ ID NO: 11153 - RNA, 924 nt, synthetic construct
  source 1..924: mol_type = other RNA
atgattctggtccagccaatcctttcggtccgagatctggcagccaggttggggatcgaggctggttacttaagggaagtgggcagagacattgagagccattataaaatccagccattgaaacagggagccaaggtgcggatgctggccatccctcaggcggaacttaaaatgattcagagacggataaaccgcgctatcctcgccaaggtacccctcgccaaggcggtttacggaggggtcgcaggcggtagtccacggaaaaacgctgcagagcacgcgaaccaacggtgcgtgattactatggacgtgaagcacttcttccctaatgttcggcattacatggtatatcgcatgtttcgctctgaattgggcttcggtagagatgtagctagcatactgaccagactgacaacataccgttcctatttaccccagggagcgccaacttccaccgccgttgctaatctgctcctggcagcccccgttgatgtgcccatgtcagccgaagctgaaaggcaaggggtgcgctattctaggtttgtcgacgacatcgcaatcagcggggagaatccccggccgttgataaacaaagtggctaaactccttagttccaggaggctgccagttcataggagaaagattaatggaccttcaaagctacgaatagccccgtctggggtggcccagcgtattaccggactaatcgtgaacgcccaaaatggcctgtccgtgcctcgcgagcggagagataaggtgagggctgcaatttacgccctccgcagagctcctaagcacgagcttaaaaaagcagtcgccagcattagaggcaagatcacacacatcgcacagtttaacgctgccgccgcaaagcgtctgaatacctacctcgatggcacgctgcgacagcgactggacggctga

SEQ ID NO: 11154 - RNA, 939 nt, synthetic construct
  source 1..939: mol_type = other RNA
atgaacgaacctatcctgagcctccagaaactggcctggcggttaggcgtgcccgtcaacaggttgcgccagttggccgacgaaatcagcagggatcaccgagagcactataacgcttttgcactgaagacgggcaaagataagattcgtcagattcggccaccgaaagaagagctaaaggcaattcaaagaaagatcgtgaagagagtgctcgctcccatcggactagcccctaccgcacacggaggtgttcccggaaggagccagcgctccaatgccgagttacatttggggcaagctagagtggtgactgtagatgtcaaaaatttctttgaccgtgtgcagcatcgccggatataccggatgtttagaaatgagcatggcttcggggcggacgtgtccaggctcttaacccgcctgatcactcttcgcggaagccttccacagggcgcccctacttctccagctgctgcaaatctctttctgaggagagcggtcgacgagaagctgggcagtacactcgctaaactgccagtcacatactcccgcttcatagatgaccttacgttctcaggccccgatcctcgatcgcttatcactaccgtggcccatctgctttcagaatgcgggttgaccgtaaaaaagagtaaggttaaaatcgccccacggcattgccctcagaaggtgacaggtctgctcgtgaactctgcaaccgggggtcgactgacaattcccagggcccagagggaagcggtaagagccgctattcaccaactcccgagactggcaatacgaaaagagtgggataagcaagtccgctccatcagggggcggattgcccacgttgagcgttatcaccctggagacggtgcacggctgcggaagtgtttgagagttgctctggacggccagcagccaaaatctgacgcccccctgtga

SEQ ID NO: 11155 - RNA, 906 nt, synthetic construct
  source 1..906: mol_type = other RNA
atgcggagccctgtagatcactatagcgacgcctggttatctttcgagttaaggcatcctgttgacagattgagactgcttgcaggaatggtacccgaggacctgtacagtgtgaggagggtcgaaataaaccgcaaggttagggatatttcgaacccctgcgatgagctcaaagctgtgcagagaagtatccgcgagcgtctccttctgcccatccctctttccccaattgtgtactctgatgtcccggggcatagcgctgcgcaaaatgcagagagacacctgcatcaggcaaatgtcggaagcgctgatatccgggattgctataactctatgacaaatgccatggtgtttcgagtgttcaggcacacgctgaggctcggtgattcccttgctgacctgctcaccggcctcactacctcacgcggacacttgcctcatggagccccaacatccggtgcactcgccaacctgatcctgtcaccaatcgacgtcgagctagaacgaatagcggtagaactggacctgaagattacacgctacgtggacaatatcgacttttcagggcaaagaacccggcatgccttcctgcccattgtggccttgatccaatccttggggttcgcggtgaagcgccggaaggtgtttaatgcctctagacagcgcgtccagatcgttactggtcgaacagtgagtggccgggtcctgcgtcttcccagagccaaaagggctaacgtgagagcaaacgttcacgaagtgctctgtcgtcggcgagacggcttgccgatacaggataagcagattaacaggctaagaggccgcctgaattatctgcggactcaggggcacccaaaagaagcccgagacttagccacccggctggctgctgttggcattaatatttga

SEQ ID NO: 11156 - RNA, 903 nt, synthetic construct
  source 1..903: mol_type = other RNA
atgagaatgccagttgaacactacagcgagcgatggttgagtttcaccctgtcacaccccagagagcggcttcgggttctcgccagcactgcagaacgtctctacaagtccggatggagagatgtgaagggtaaacagcgttacattactgagccgtttgaagagctgaaaatagtgcagcgcgctattcgcgaacacctgctgctgcccatccccttaagctccatcgtgtatagcgatgtgcctgggcgctctgctacaatgaacgcggtccagcatgttaaccagcctaatgtggcgtctatcgacatccgggactgctatccatcaatgaccaacgcaatggtcttcagggtctttaggggaccagttggtctgggagataacctggcacatacactgacccgccttaccacgctctccgggcatctaccccaagggacccccacatcaggcgccttggctaatctgattctgtctcctgtcgacgtgatattagagcagatcgccgagggtctgagactcgtcgtcactcgatacgtggacaatattgacttcagtggagtgcgatcccgggaggccatcctgcctactatagttgctctgcaggccgccggcttttcggtaaggcataagaaggtgatgaatgccggctaccgtcgggctcacgtggtaaccggaaatcttgtcgatggctgtaggcttcgcttgcctcatcgaaaacgggccaacgtgagagccgcggtgtatgaaatcgtacagcgctatgaggatgggctcccaatcgcaacgaaggctatgaacagactcagggggaggctccaacacctaaggacacaaggccacccgcgggacgctgaaagattagccgctcagttggtggcagccggcattgcaatttga

SEQ ID NO: 11157 - RNA, 915 nt, synthetic construct
  source 1..915: mol_type = other RNA
atgccctacaatgtgaagtccattaagtcactggccaagctgctggatgtggatgtggaagagctggtcaggatagaacaaaacccagagaaatactatgagcccttcgaaaaaaagcgaggggagaaatcaaggtctatcgacaacccaactggcgaactcgccgctctgcagattaggattaagaagttcctgctctgcgacgtcgacgtgtttcggcctatagctacgggtggcgtcaaggggcactccacaaagacatcagcactgctgcacaccaataaagattgcgtggcaaccgtggacgtaaaaagctttttcccttgcgtgacaaacaataaggtgtacaaggtcttctgtaacctcggatactcccccccagtgtctcggatgttgaccaggatcaccacttataagggacatctccctcagggttccgcgactagtactatcattgccaatctggccctttataacttcgatgagtacctctacaaccagagcttgagattagggtgtgattgcatccgatttgtggacgacatcattatcagtggcagctacggaaaagtcaccgaacttgtgagccttgtctttcccgccttacatcggatgagattttctgtccaccgcgcgaagaaactgaaaatcatgaagtctaacaagcggcaggaggttctgggactaaccgtgaatagagccgttggcgttacaaaatcatatgtggaggaagttagaacccaaatcgcttgtgtagagaagtgcagtgtaacaagctgtgtatatttgaaacttgttgggaagatacagtatattggcactacgaaacctattatcgctggtaatctaatgcgcaagttgcgcaattccctcatgcgtccggagaaagaatgtctggcatcgatagagcagtga

SEQ ID NO: 11158 - RNA, 1014 nt, synthetic construct
  source 1..1014: mol_type = other RNA
atgacagtggacctgccagaaaagaacatagacctggcagcagcccctaagctggacctgctgagcatcagagaattagagttcaagcttggtttggaacgaggttacctcaggacccttgctgcacacgccggaggacactataatcccttcgtgaaaccagaaaaagtttttccatttcagcgacggttcaagaacaagaagaagcgcatcatcgataaccccgacgagcagctgcgggatgtccagaagaggatctacagaagactgttgaggcctgaatcgcttcctgattacatttatgggggggtgacaaacaagtgcattcaggataatgtgaaccggcatctgggggccagaatgctggtcaccgtggatattgcgaatttctttcccagtgtgacgaatgagtatatttattggctatggaaccatgtacttagatgttccagcgagatctccatcctgctgacgaaattgacttctttcgagcgccacttaccgcaaggcgccgctacttctacacctctggctaacatcctcatatgcacaatcgataaacagatccggtctgagtgcgaacggatggggattacctactcaacctgggtcgacgatttagcattttcaggagacgacccacgaagaatcataccggtcgtgatcggcgccctgcgcaaaagtggcctacggcttagccgtaagaaaattactatcatgggtcctgccacacgcaaagtgctcaatggcattgtcctcggaaagaaactgggggtaacccgcgaggttcggtctaggattcgcgctggcatccatcgtctcaaaactggagcggttcccatacaagaccagcccaagtacatgaggagcttgattgcccgtattagacaggccgagactatcaattcctcccaaattcaaaagttgaggagtcagctcgctgccgtgctaagggacaggtcaatagctctcaccgagcgacagcagtttctgaaacagctcggctgtgcatga

SEQ ID NO: 11159 - RNA, 957 nt, synthetic construct
  source 1..957: mol_type = other RNA
atgagtatcccgcagctgagtatcgttagcgtgaacgacctggcgcagcgccttaggattgaccctaaaaaactgcggcacattgccgcccatgccggtgattattacaaacctttcaagcaacgcaagaagcccaaacctttcgcaaagaagtctaagccagccaaggtccgggaaatcgacaatccctcagaattactcaagactatacaacgccgtatctgtgataatcttttgtgcggtgtcccctggccagagcacgtgttcggcggaattaaggaacgaaacacagtcaaaaatgctaagcttcacttgggcaatgagaagctcgttaccatcgacatccgtagctattttcccagtatttccaacaaggtgatatatgacatttggtttagattcttgggatgtggctcagaggtgtccgcaatgttaacacagctgacgacatttcgaagaaggctgcctcaaggggcccctactagtaccgcactggcaaatctggtactcatctctatcgatggggagttggtcgagttttgccggcagaattccattacttacaccacctgggtggatgaccttgccttttctggcgagaacgctgaactcgccctagaaaaggctattagctccttaaggagggctgggctcagagtggcccggaacaaagtaaaagttatgcgaggatcaaaaccacagatcctgatgaatcagacactgaacaactctatgggcgtgaataaaatctataggagcaacgtgagaagcgctatcaataaactggtgacgcatccacccctgaatctgaaagagcagttcgcgtcaataaacagcaagatcagatacgtcgatacaataaacaagaaccaggctcgggcactaaccaagaatctgaactcgaccctcaatcgcattaagaactcctctctctccccgtacactaaagccatttga

SEQ ID NO: 11160 - RNA, 909 nt, synthetic construct
  source 1..909: mol_type = other RNA
atgaaccgcaatggcagaaaccagttacgactgaatataggaagtctggatgtgctggggtatgccttgggcctgtcacccgaagacccatttataaagatcagcaatcctgccccatttgcagccgacccaatcgagcccaagcaaaggaagatcgataaccccattctaatcacaaaggaaatacagaagagaatcaatcgatcactacttcgcccactgcacctgcccgggcatatatgcggtggggtgaagggcaagaccttattggacaacatcattcctcacctgaatgccagggtgattgttaccgcagacattaagggtttttttccctcaataactactttccaggtgtatgccatttggtccagactcctgggctgttctccggaaatcgctgctattttgactcgcctcacaaccttcgagcgacggctccctcaaggagctccaacgtcttccacgttggccaacctgatcctgttctcgtttgatcagcctatcaggagcttctgcgcacagcatggaattacatacaccacctgggtggacgatctgattttctctggggctgagagcaggtccgtgatcaatgtcgcagttgcggctctcagagagggtggcttttccctccctcataaaaagcttaaaattatgaccgcgggcaaacgcatgagggtgacaggggtccttctggggaaaaaacccggtgtcatccgtcggtatgcacgcgatacaagggccggcatctacagactcactaaaggagacttagccgagccgaaagtagaccggtacgtaaaaagtatccggggacggattgcccacatcaacagactgaaccctaatgtcgcccggagtcttgatcaccagttccagcttgctctcaagcgtgcggttagctga

SEQ ID NO: 11161 - RNA, 990 nt, synthetic construct
  source 1..990: mol_type = other RNA
atgacacttcagaggaataaaagactgccccttgaccagctccccctgcgatctctacgggaattagagcacttgctgggtgcctctcgcgaggctctgctgagattggctgaatgggaggccaattattccccctttgagcaagccaagccactgaagccacacgcaaagaaaccgcagacaaaaaagctcaggaagatcgataaccccggcgtggaactcaaaaagatacagaggcgcattttgagccggttgcttctcccattaaatctgcctaacttcctgttcggcgccgtgcctaagcggtcagtaagagagcacgccgctgcacatctcggagcgaccaccatcgttaagatggacatcaaatcatactaccccaaccttaccaatgaacacgtctataaggtgtggcacgagatactatgttgctccgcaccagtgtcaaagatcctgacaaagctgactacttgcgatttccatctccctcagggggccccaacttcgccgacacttgccaacttgtttctggctagcatctacggtcccattatacaagattgtgtggctaaggacatcgtggcgaccgtttgggtggatgacttaactttcagcggggaacggagtcgcgacgtgatggagcttgtccgacagaccctcgcctgcaacggcttgcgggactctcgaaagaagcgcgtgattctgacgggaaaaagttctaaactggttacaggagcgaggctcgggagggaagagctcagagcttgtaagctgaaagtccgggagattcgtgcaggcattcataatctgaagaggggtaaagtgacgactcgcgggcgttccaaagatgttcagagcctgctggggaaagtcggctttgtaagaagtctgtgcccttcagatgcaatccctctggaaaaacagttgagatccatcaacgtcagcattcctagtcaagccggactaacctcccgtagcgccaagggctga

SEQ ID NO: 11162 - RNA, 963 nt, synthetic construct
  source 1..963: mol_type = other RNA
atggacctgcctcagacaaaacctatcgttggatctctgtctgacctggaacaccgcctaggaatcaagcgtggggatttggccgtcctcctacaatgccgtgccggtctttacagaccgttcaagattcccaaaaagcaacacccctacccaggcaaactcagacggctgaaggcttccgagccagtcaagtatagacagattgacgatccggtgaagcagttgaaagacatacagcgacgcatccttgcaactgtactttcccgggtggaactgcccgcttacatgttcggggccgtctcaggtcggactttactcgggcatgccaaggaacatgtgcctaaccagagctcgattgttgtccggatggacattagcagttattaccccaacatcacctgtgagcatgtctattacgtatggaatgtggtactgggctgtccccccccaatcgccaggttgctcactgagcttaccacgtttgactggcatctgcctcaaggcgcgcctacctccccagctatagcaaatatcttcctcgcctcaatttatgctcccatctgcttagcgagcgagcaggcgggactgaccattacaacatgggtggatgatctgattttttcaggcgtggccgcccacacagtgatggagactgtgagggctaccttggcggctcacggttttaagatggcaccagataaacgagagatatttggcccaaaagaccagaagaatatcacggggacacgactggggagattcgaggttcgcgttacccataaaaagatgtccgaactgcgcgccgcaattttcagactggctatcggagcactcgaacctggcgaactcgagaagtacaggcggaacttaagtgccaggatagcacacattgctactatccacaaaggagatgccgcaaaggtgcgcaggcacgccatcaaaagctctgtgatcctgaagtga

SEQ ID NO: 11163 - RNA, 975 nt, synthetic construct
  source 1..975: mol_type = other RNA
atgatgatcatgaagaagaagaacaagcacaagctgattacaatcagtgacctagctttgcacctgggcatttccgagggttatctacaagatatcctgtccgagttgtattcagaagataccaaactctaccgcagttgggacaaaattaagccaaacggagagacgaggcccatggacgctcctagggataagctcaagtttatccagaaaagaatcaacggacggatcttgcagcggacacagatttcaaaaatagcaaccggcggtgtcaggggacgtaagttgaaagacaatcttatcccacatctcagacagcaaatggtggctaattttgacctgaagcgatttttccccaacatcactaataagcaggtgtatgagatcttcattcttattggagtgtccccagacgtcgccagagttttaactagactgaccacctttaaaaatcgaatccctcagggcgcacctacaagttccatgctggcgaaccttgttgccgggtacggcggcagccattgtctggacggacgcatagaaaatctctgcgccatcaataatttcaatctgcgacgctgggtggacgacatctcaattagcgggcctaattacattaaaaagttcgagccgaccattgagaaaatcatctttgaatccggttttatccccaatcgggataagacggcgttcatttctaaaaacaacgcccagataatcacagggcacctggtgaacgaaaaggcaaacgtagtcaaacaagaaaggagacggatccgcgccatactgcacaagtgcaagactagcggcctcgatggctacagcaaaaaccgtatagatcatcttaaacggtctttacgcgggaaaattgctcacatcagctctataaatcccaggagtgggaacaagctgctcgataagttcaactcaattgagtggtcgagcctgattaatgagatgactaactctgcctga

SEQ ID NO: 11164 - RNA, 999 nt, synthetic construct
  source 1..999: mol_type = other RNA
atgctgcggatacgacaggtcaaacatttggccagaaggcttaaattccctactcgagtgctggagaagatcgcagaggcgcccgaactgtggtgcgaggagctcgtcctcttagatcctgcgaagccaaccaaaccacggaacgtgctcaacgttcgcgggcagctacgacaactccagagcaggatgctgcgcagcattctgcttcccgtgctgccggtttcccagttttcacacggctccactcgccagcgtcatattaagagtaatatcgaaccccaccttagatccacattcgcttttaccaccgacattgcagatttttacccttctgtgtcccacaatcgcgtctatagactctttgctaaaaccttagagtgttcgccagacgtggcacgcgtttgtaccaagctgtgtacatatgatcaccacttggccctgggcctgattacgtcacccatactcgccgaccagactatgcaccagatcgatagaaggataggactggcctgctggaaggctaagctggtgtatacccggtacgtggacgatttgactatctctggtggatatgatttggctaaaagcgggtttgcaaatcttgtgcaaggcattttggaagagcatggcttcgcagtcaatccagacaagcatagattcggtagactggaagagggcactacaatcacaaaaatccgtgtcaaccgcggtcaccctgatgtacgaaggcagtacgtgaccgaactggaaaggcaaatcgaggacgcccatcggctagccgtagacgagcagttcgacggaccttactacacggaagggcagatctgggggcggattcagtttgtttcttgggtcaacccgggccgtcaacgggccttagtgcggaagttcagagctgtaccatggaacaaagtgaaggaagttgctgagtgcagggggctggtgtgcctgaagaaagtccttagcaagaggattctcgccagtcccggaacagtgtga

SEQ ID NO: 11165 - RNA, 984 nt, synthetic construct
  source 1..984: mol_type = other RNA
atgctcaacattcagcaagtgaagcacctcgcccaccggttaggggtgtcggtgaaacatttggaggaggtggcggaatctccagaaggatattgtgaagaattggtgctgttggacccagccaaaccggagaaaccccgcgatgtgctggatgtacgtgggcccctcagaaagatgcaactccagctgctcagagaggtcctgctgcctaagctgcctataagcgcacactctcatggtggcgttcgaggcaggcacatcaaaagtaatgtgacgccgcatctggatagcaccttcgtgtttggcacagatatctcagacttctaccctgggatcaaacacaaccgcgtgtaccggttgttcacacagcagtttgggtgcgcacctgacgtcgcccgaatatgcacaaagctttgcacgtatcaatatcatttagccttagggctcattacttctccaatcctagctgatcaggtgatgggacccatcgacgaacgcattggtactgcttgtagaaaggctaagctagtctacacacgctacgtagatgacctcactataagtgggccctttgatttgcatgagaataagtccggcattgccggtctggtgcagagaattcttaacgatcacggcttcgccactaacccatccaagaattccttcggacggcttgccgacggagttcccatcaccaagattcgggttaagagaggccacctggacgtgaggggagagtatgtcaaagagctggaacgacagctggctgacgctgcgtcactggccaatggcggtgattttgacggaccctactacaccgagagccagatcaggggcagggtgcagttcgtatgttgggtgaacccaggcaggaaacgggaactgatgcgccattttcacgtcgtcccttgggacaaagttggacaagaggcagtaaggcgtgggcttgttgcaaccaaaaaggtcctgatgaagagaacctga

SEQ ID NO: 11166 - RNA, 1014 nt, synthetic construct
  source 1..1014: mol_type = other RNA
atgctcaatctgaaaaccccgaagaatttggcgtaccgcctgggtgtatccctgtccgtgttgagggatgtcgcggatagacccgacgactggatcgagacacttctccttaacgatccaacaagacccaacaaacagagggaggtgttaaatgtaaaggggaagctgaaacagatacagactaggctgctcagagtggtgcttctcccagtgctaaacgtatcgccttattcccacggtggcattagcggtcgtaacatcaagacaaatgcctcttgccacttaaacgccaactatctgttcagtgccgacatctctaatttctatccttccatcggacaccgccgggtctaccaactgtttagtaaacggctcaattgttcgccagacgtttcaaggctgtgcacgaagttaaccacgtacgattacaagctggctctcgggctccccaccagtccaattctggcagaccaattgttccatcccatagatgcacggattgccggggcatgccgaagcatgggactttcttattcccgatttgtcgatgacatcgcaatctcaggaagctttgatttgtcacctgagagctgtggcgtgtctgccttgctagagaggattgttactggaaacggctttgagctgcagctggaaaaatcccgattcggccggctgagtgaggatgaaatgactatcacccagctgcgagtccggaatggaagattggatgtccgggagcagtacgtgctggagctggaacgccaactggctgacgccggcgaactgagcaacgatcgccattttgacggtcctttctacacagagagccaggtgcgcggccgcgttcaattcgtgggctggattaatagggacaggaagagacagcttctccagcgttttagagaagtgaactggacccaggctatggctgttgggagaagccgggggctcgtcgtgcagaagaaaactcttatacgtatgcagaagtctgacctagactcaacagaaacctga

SEQ ID NO: 11167 - RNA, 996 nt, synthetic construct
  source 1..996: mol_type = other RNA
atgctaaaaatccggcaagtcaagcatctcgcttctgctctttctacgacccctgccgaaatggcggccgtgttgaaatccccagccgacttttatgaggaacttgaactgagagatccgagtcgaccagacaagcctcgcattgttgtcaatgttacaggagccctcagagcgctgcagtccaaactgtaccgtagaatactcctacccaagttgagccaaagtgcacactcacacggtggagtgtccgggcggtccattaaaaccaacgtagagcctcatttaggctcgaagtttgtgttcaaaactgacatcgcaaacttttacccctctatccatttccggcgggtgtacaagttgttcgtggaagatttcgagtgtagcccagacgttgccagtgtttgcaccaaaatctcaacgtatcgtcaccatctcgcactgggactgatatgcagccccatgcttgccgatcaggtattgcgacgcgtggacaggagaattggaggcgcttgcgccggtttagggctggtctacacaaggtatgtggacgatgtggccattagcggtccgtttaatatcgagactagcggcttgcctcgcctggtcgaggatatcttagctaaggacgggtttaaggccaatgctgacaagcacctgttcggctctctcgccgaggacctcagtattacttccctgcgcgaagtccgagggcaccttgatgtgagacgggaatatctggatgagctcgagcgacagatcgatgacgcagcttctctggcaagggatggcgaattcattggcccctacttcacctccgagcagatcctggggcgtgtcagattcgtgtgttgggttaaccctggccgcagaaggagccttatatcacggtttcggacagtgaagtggaaaaaggctagaaaggtggcgaaaaggaggggatacgaggtaactaggaaaaccctgacaaagctgccccgcagggaagagccatcatga

SEQ ID NO: 11168 - RNA, 993 nt, synthetic construct
  source 1..993: mol_type = other RNA
atgttgaggataaggcagactaaacaccttttagagactctgggagtatcaagcgacgaactgtccgctatcctcgcgaacccgagcgattactatgaggagctcctccttaccgatcctcagaaaccccacaagccccgcgcggtggttaacgtaacaggccggctgcgaaccctacaatcccgcctgtatcggagggtgctgctgactaagctgtgccctagtattcactcgcatgggggagtgagaggtagaagtataaaaacgaacgctgagccccatctcggctccgcttttgttttccgcactgatatttccgatttctacccgagcattcatttccggcgtgtctataggctatttgccgaaagactggaatgctctccagacgtagccagaatctgtaccaagatctgcacctaccggcaccatctcgcccttggtctgatttgttcaccaattttggccgatcaagtgctggcacgggttgacaggagattgggaggcgcctgtgctaaggaaaatctgacctacacaaggtacgtggacgacattgcaatctccggccctttcgattttgagaagtctggctttgctaaccttgtgcagaggatactggccacagacgggttcaaagtcaatcctcagaagcacgtctttggcagtcttgctaaagattgtactatcacaaatctgcgggaggtgcgaggacatctggacgtcagacacgaatatgtggaagagctccagaggcagctcgcagatgcatcatctctggcacaggaccgcgaattcgaggggccatactacacatttggtcagatcttaggacgcgtccgtttcgtgtgctgggtcaatccagggcgacgccgagacttaatgctacgtttgagaagcgtgaactggcgcaccgttaaggccatcgccagaaaacggggctatgaggtgagcaagaagacgttgtctaaacgggacgggcccctcgcccaatga

SEQ ID NO: 11169 - RNA, 993 nt, synthetic construct
  source 1..993: mol_type = other RNA
atgctgaacgtgcggtccgaaaggtgtttggccgatatcctgggggttactgttcacgcgcttaaagtggatttaggcaggctgaaccgcgatgttcgcgagtttcaactgattgaccccgctcgccccgacaaagttcgggaggtcatccaaattgtaggagcatggcggaggcacctcgacagattgatggaaaggctgctgctcccacgaatcactccttctatccacaatcacgggggtgtcaaggggcgttccatcttcactaacgccagtgcacacgccgagaacgtgtatgtctacaccgctgatgtgcgggactttttcccaagcatacatcatagaagggtgtatcgactcttttttggaaggttcgggtgcagcccggatgtcgctagcatctgcacgcgactctgcacacacaattaccatctggccgtgggactaccctcttcgcctttgctggctgaccaggcaatgcgtgaggtggatgaacggattcatggagcatgtcagagcgctggcttaacctataccagattcgtcgacgacctcacaatttcaggcggtttcgacttcgcaggcagtggcttcctgaaactcctgcctaggattcttgaaaagcatggatttagactgaatccgcgcaaaatagagatagggaggctggatgacggccctcaggtgacaaagctgtgggtgaacagaggacgccccgatgtcgcccgggagttcatccagaggttaatggagcagatggaagatgccgagagactcgccaatggaggcgactttgtaggcccatactttaccccagaccagatttatggtagagtgtgtttcgtgagatccatccgatgggggcgtggtcgggatttgatgcgccggtacagatcagttcagtggtctaaagtggaggccgaagcaggccgccttgggcttgtagctgaacgaaagcgcctaattcctaagcccaaggaagaggcgggctga

SEQ ID NO: 11170 - RNA, 1005 nt, synthetic construct
  source 1..1005: mol_type = other RNA
atgttacatattggatacgataaactcttggctcggatgcttgggaccaccagggctgagctgaacgacattttggacaatgccgatgagtattttgacgagctgtcccttttcaacccggaaaagccagacaagccccgggacgttatttccgtacgcggcaagctacgaactttccaggcaaagttctataggaaagttctactcaggaagctgtctgtttcaccccattctcacggtggcgtgaaaggacgaaatattaagactaatgccaagccccatctgaattccagatacatatacaagatcgacctccaggacttctttcctagtatcaaacagcctcgcatttaccgccttttcaacagcaaatttgcttgcagcccgcctgtagccaagctgtgtacaaggctgtgcacatacgaacaccacctggccctggggctgataacctcgccaatcctcgccgatcaaataatgcagagcgtcgacactcgtatcgggagcatgtgcgataatgctaaattggagtatacacgttttgtggacgatctgacgatctctggacccttcgattttgaagaaagtgggatcccagacctgatcaaccagatactcctggagtccggcctgaccccaaatcccaagaaatatgtgtacggaaagatcgataacggcatcagtatcaccggcatcaggaaaaatcaggagggtaaaattgacgtggaagaggagtatgcattgaaagtcgaagagcaactggaggcaagcaagtcacttgagctggggaattggcctgatctttcctgtttatatcacactcccgcgcagattcggggtagaattgatcacattaaatggatcaacgaatctagaggcaagaagctgctaaacatttacaagaagatcaactggtcacgggtggatgaggaagcccgcaagttaaaattggtcgtgtcaaagaaaagactcacgaaaaagacaaaaaccctcctcgtggactga

SEQ ID NO: 11171 - RNA, 1014 nt, synthetic construct
  source 1..1014: mol_type = other RNA
atgctcaatctgtggcgacttgaccagctgtgtcgacttctcaaaactgaccctgaaaaattggcttccgcactggaaagtccctcgaagtttatcaaggagctgttactgtgcgatccagcgggtgagaagcgtcctagacgagtgatagatgtctcaggcgaccttagactggtgcaggagcgcttctatcgtcgggtcctattacagagactgtggccaagccataacagtcacggtggaatacgggggagatccattaagtctaatgtcatcgcccacgcagggagcagattcgccttcaagtctgatattaggaatttctatccttccatccatcgacggagggtttacaggctctttgcggataggttgcactgctccgccgacgtggctagagcatgtacagctctgactacttttaatcaccacttagccctggggcttgtttcatctccgattctagcagaccagatcctctgtcccattgacaacaggatcgcggaagcctgcaagagcatcggcgtggtgtatacccgctttgtcgacgacattacactgtccgctagatatgacttgcgtcggagtaatgtcgccagcattgttcggaagatcctgggagatcatggatttgagattcaccctgggaaagaagctttcggaaggctcgaagatctcgcaataacgggtataaggatgcgagatagtaaactggacgtaacccgcgagtacgccgaccgcctggatcaacagctgaaagatgctaagtcattggccgacggcgcccatttcgatggcccatttcaaaccttcaaccaactcagggggaaggtgcagttcgtggggtgggtaaaccccggacggaaggcttacctcatgcggcgccttttctctatcggccgcgagaaataccggcgcgaggctatcaacaggggcctggtggccagcaaaaccggtctgatgagcctagatcccacaccggcagcccagttgagagtgtttacaccaggctga

SEQ ID NO: 11172 - RNA, 1032 nt, synthetic construct
  source 1..1032: mol_type = other RNA
atgtctagtatcggcatggacgccaagctgttcagcctgcatcgcccacgccaggtggcagatagactggggctagacgaatcttggctgctccgcctgagcgaagagttgcgcaccgcagaaggccgtagcaactacatccgggaatttaccttgttcgatcctcgaccagggaaaaagccgagggatataataagtgtcaggggtgatctgaggctcgcacagagacgtctccaccagcgcttattgtcccattcaatcgagcctactccttactctcacggaggtgttcgcgggcggtcaattaagacaaatgccgggcaacacgcgagaaatcgatttgtctacctcaccgatattgccaacttctatccatccatccactcatcccgcattaacgatttttttaaatccaacggctgcctgcctgcagttgctagactcctgactagtcttacaaccctagactaccacctggctcttggtcttatcacatctcccatcctggccgaagccatcatccagcccgtggacagacggatcgccgttgcttgtgatcgacagggccttgtctacagcaggtatgtggacgacatatgtatcagttccaagcactcgctgcatggcagcggcattgacgccacagtgagaactattctgagacagtccggattcaaggtgcgggtgtcaaaagacagatttatacgggtagacgagggatgcgcggtaacgggcgtgagaatccaccggggacgcctgtctgtcacgccaagctatattggagagctggagactgatctgagctccgctttgtcttttgcccggggagggcatcataccggcctcttcttcaccaaggagcaactctggggccgagtgcagtttgtccgatggatcaatccgggtagggctaaacccttgattaggttattcaggcaaattccctggcgtcggtacagggttgcggcaagccagtcagggttaattgccgctaaagctttcttcgccgagaggaagagttatgtgctttga

SEQ ID NO: 11173 - RNA, 999 nt, synthetic construct
  source 1..999: mol_type = other RNA
atgcagaaccccgcgacccgtagcaagtacattaacgaatttaccatagtggacccacgggaggacagaaagccacgcgacgtcatttctatcaggggcgacttcaggacagtgcaacgaagaatttatcagcgtatcctctcccaggtgatcaaacccgggcccagctcacacggcggaatcagaggtaagtcaatcaagtctaacgccgaggcccacctgggtaatgtctacgcctaccaaactgatatcgctaactttttcccttccatacatagagacagggtaagatccgttctgcaaaactacgtcgggagccgagacgtggctgagctgttagctcagttagtcactctggacgaccaccttgcgctgggcctggttacgagtccaattctggcagaggccgtaatccagcccgtggacacccgtatttccggtgcatgccggaaaatgggcctgacatatagcagattcgtcgatgatatctgcattagcggaagttttccgatcgacaagagttgtattcctcggatggtgcgcggaatactccagaacaatgggttcaaaatccgcccagaaaaggatcgcttcgttagcctttctacagatcttttttcattgaccgggatagaaatccgcaaaaatagactgcgggtcccgcagcgctatatcaatgatctggtgcatgatctggagtccgcaaatgcaattgccatgggctgtgaacaccctgttaccttgtattacactagggaacaaatagtgggtcggatccagtttgtcaggtgggtgaataaaggccagtcttccattctcgtgaagaagttcaagaagatcaactggcgactacatagcaaacaggccctccttaggggcttgattgtactcaaaccccggagtgttgataggtcctcaggagctgtgtcggatggaacggtggtgggggagtctacacctctacagtctaaaaaacgaagtattaagtcagtagactga

SEQ ID NO: 11174 - RNA, 987 nt, synthetic construct
  source 1..987: mol_type = other RNA
atggagtcatcaaatctgcaggccatgaactgcaagacacttaggatacggaccataccgcacctcgccaatcagctgggaatacatgaaaacgggctgatcgacgtagcagaaaatacggaacgctattacagagattttaaacggaatgtgaagggaaaagaccgagatttggtcatgtctatcaaccctttagccatgctccagagacgcattctggatcgaattctgcatcgtctgccaattagtgattacgcgtacggcgctattaagggccgcagtatactagacaacgctaaaaagcattctaacagccttttcatcgctaagttcgacgttaagtccttctatccaagtgtcaggtaccaaaagatctatgactttttcatgggccaggaatgcgcccctgatgtttccagaattttgaccctgctcaccacacggaagtattcgcttcccctgggcacctcaacatcacccatgctcgctgaccaagtgatccagcctttagacaaacgcatttgtgggatggccgcaaaggcggggctgaaatatacgcggtacgtggatgacattactatctccggaagctaccctgtggagcagtttacagacctagtgatcgagattatcaggcagaatggctttaaggttaaacaatccaaaatcgatgtctacgcaccaggtgacggcaaagagaggatcatctgtggcgtcagagtgcagaatggtaaggtatccgcctctactgattacatcaagactctcagaggggaactcttgaaggcaatacagcagagccagcacagggacatctctggagattttgatactcggaaccagtaccgggggcgaattggtttcgtgatgtggttagacaggcccgagggattgaaacttctgagcctgtatcgtaaggtgaaatggcgccacctcgagtggattctgtatgagagaaacaaaagcccccaaaagaccagcctgtga

SEQ ID NO: 11175 - RNA, 969 nt, synthetic construct
  source 1..969: mol_type = other RNA
atggagccagattccccctcttctgacggcctgcgcatccagagaattgagcacctggcatctcagctgggtttccccgttgacagactcgtggattgcgcagaacacgcaggtgacttctatcatgactttaagaggaacgtgaagggcaaagatcgtgacctgaccatggcgaggcccccacttagcgtcttgcagcgaagaattctcgacaggatcctctgcaggctcccagtatccgagcacgctttcggcgccattaaagggcgtagtattcgggataatgccgtggcacatgcacgggcccctttcgtagctaaactggatatacgtgatttctacccatcaatcagataccagaagatttacgatttctttatggcgcagggatgttcaccggacgttgcccgaacactgactctattaacgacgaggaactattctttacctctgggcaccagcacctcaccgttcttggctgatcaggtggtccatcccatagatactcgcattggagggctggctaaggccaaagggctgaggtatactcgctacgtggatgacgttacactgagtggaccttttgaccttgaacagctggccaagcaaatcgtaacaatcatcagacaagcaggctttgcgattaagaggactaaaatggaattttaccgccctgacgacggcaaggagcggatcatcaccggagtgagagtgcaagacggtaaagttagcgcccccagcaattatatcgaactccttaagcgcgacttggtcttggcccggaaggccagtctccacgaggtggtgcatcaggattttgacacccgggaccagttccgggggaagataggatacgtgatgtggctggatcctaaggctgggagaaagcttatacggctataccgaaaagtcaagtggtcgcactttgagtatgctacatccaggcgcaaatccatggccaaagtctga

SEQ ID NO: 11176 - RNA, 960 nt, synthetic construct
  source 1..960: mol_type = other RNA
atgatcaagcgcatagtggacaagttaagaatcgtcgaggtgaagcacctgagcatgcacctgggctcaactcccgtggaactggcgcacgtgtgtagcagcattagcagacacccgtcccagtactacagatggtggaacaagtgctttcccaacggcaagaccaggcctatggtggaagtgcgaggtcgtctgcgagaaatactggacagactcaacgatctgcttcagcatgtctgcctcccagaatacgttaacggcggggtaccgggacggtctgttctctcgaacgcaatgccacatctgaataagcctatgttgatgaaaaccgacctcgccaatcattttccccgggtgtctccaggtagggtctacgctatgttccgcaaacagcaagaatgttctcccgaggtggcccggatattgacccggctgacgacacaaagcggggggttgcctcagggcagtccaacttcagttgcagtttccaatctggtcactcttggacttagtagaaggctaaggaggtttgcagaggcccgcggagcagttctaacacagtatgtagacgattatatcttcagtggcggcaaaaggttggctggatgcaaggaaaaaatcatctcaattgtgaagcaagaggggttcaaagcgaatgaggcaaagactgtgtccgtccctgccgacaaggagcagatcgtgacgggaattcgggtaaacggttcccagatggatgccccttcttccaaggtagctgatgtgcgcaaagccatacgtcgcctgcgatgtgagctggaggtgacaggcagtgtccccacaaagcgcattaaaagcatcgaggggaaaatctcatacattgccgcttataatcggggtaccggcaaatatttacgtagacagctcgatcacatcaagaccccaggggtcaggattgccggcagagaggaaattgctggatga

SEQ ID NO: 11177 - RNA, 945 nt, synthetic construct
  source 1..945: mol_type = other RNA
atgaagcgaaggatctataacctgcgaatcagggacgtgcagcatcttgcaaagctgctgagtacaactcctcaggagttgcacgccctatgcgacaccgtggcgtcacatcccaagaggtactatgtgcagtggagcaaacctactaagaagggcaaaatccggccaatggtgaagattcacggcaggctgcgtgcaatactcgatcagctgaaatctctgctgcacaccatcgctttaccttcccacgtgcacggcggagtacccaaacgctccacatataccaatgccataccccacctggggaaaccgatgttgctccgaattgacctccagaaccatttcccatcagtctcccaccacaaagtgtacgcaatgttccgcaacgaacaaggctgtacccctgatgtcgccaggttgttaactagactcaccacgcttaatggaggattaccacaggggtcccccacatcaacaataatcagcaatctcgtcacccttcatctgagcaaaaggctgagaggatttgcccagtctagaggcgccggttgtactcagtacgtcgatgactataccttttctggggagagaagactcgccaagcatagtgggcggattgtatcaatcgttgctcaagagggattcaaagcgaacccaaccaagacaattgcagtgccagctgattgcgagcaagttactactggtatccgcgtgaacggcaagcaagctgatgttccgacttctaatctaaaggacattcggagcgatctgaatagtctggacaagcagatagctcttggctcgaagagctctgaaaagattatcaaacgcatcgaagggaaaattcggtacgtgagacgctggaaccctggtgccgcaaaaagtctgacccgtaagttgacgcggatcacactcaagcccgccacgtccgctagcacagtctga

SEQ ID NO: 11178 - RNA, 966 nt, synthetic construct
  source 1..966: mol_type = other RNA
atggctttccatcagggcaccacaatggtctgcaataatctcgataactaccaagaaaatggattaagccctattaacttcatgatatccacaaaagccgccctttacaatactttgaagttcaccgaaaagcacatttggtacatcattaagaacatagcaaagcactacaaggaaaaagaggttgacaaaactaagtatgggaaaccacaactggataagaatgggagtatccgtaaacgaaacctgaggatccccacttatcctttggacagaatccagaagactatacatgagtttatcaccgctcagtcagcctttcccgactacatgtatggatccatccggggtcgcaatcacatccaaaacgcgtttagacattgcaacaatgtctatttcctgaaggtggacctaaagaactttttcccgaacatttctcatagacaggtctatgggagtctagtaaaattcggcctcccccatgatatagcacggatcgtgaccccactcactacagtggagggaaaactgcctcagggcgcccctacctcctgtattattgctaacctggtgctgcagaacgttgcccggcgactgcacgactttgcgaggaccaataacctgacatttacgtgttaccttgacgatttaaccttctcatcgaaggaagatttcagggccctgaacgagaagatccttaatatcattaaggaggaaggctttttcccgagcccaaagaaaatttcttaccgcaaaattagctgcgagattacgggcatcatcgtgaaaaacaacactcttgatctgatacacgagatgaaaagggaggccttgacaaatctccacatctatcactactacatgtctttcctcaagcagagagacagcttgtttaatctgagctatcccaacacattttccaatgctttcctcggtgcaccacgcaatatcacctcaccccagtga

SEQ ID NO: 11179 - RNA, 921 nt, synthetic construct
  source 1..921: mol_type = other RNA
atgattaagagtgtgcataatttgtatagcttcttaggcctgacccctggggagctcgatagtataactagccgcatcactgaaaactattatcagcgctctcgcccaaaaattaaatatggagaattccagcgggacgattcagggaatatcaaatatagggacctccttataccatcctatcttctgaagtcacgacagcagaggattgcaagactgctctccggtatcacactcccagtgtacatgttcggcagcatcaaagaaaggtcaaacatccagaacgccaggcagcacctgaaccatcaatactttttcaccctggacttgaagaagttcttccctaacatcaatcaccgacaggtgaatatgatgctgtgtgaaaatggcttctcgttttccgtgagtagaatcctcacccagctgacgacctaccaggcgtctttgccgcaaggcgcccctagctccccagtcatagccaatcttgtgtttatgcctactggaaatagactaaacgagctggccaaaatgaacaacataatctttaccacgttccttgacgatctcacattttctagcgatcattgtttcaagaagcggatccccgaaatcattaagattgttaaacaagggggattttacccggcttacgacaaaatgcactaccggaaaggttacagcgaggttacaggcttgtttgtcaagggtgatcggctcgagctgccctactctatgaataaaaaaacccgtgagaaccaccacattaagtcctacaaggagcaggtaagaaagtataactcagtgcgtccctgcttaattaagcactgcaagaaagacctaagactgtttgaggctaataagaagggacatcgcctggtcacattagcacccctgcaaaacctgcccactggcgggctgtga

SEQ ID NO: 11180 - RNA, 912 nt, synthetic construct
  source 1..912: mol_type = other RNA
atgcctcagaaggagatgataaacacactaacccatctcgcctttgagctcaaattcaaactccccgagatcgagagcataatcaacaacatcgacaagttctactatgaaaaagtggagatcaaaccggataagtttggaaatccgaagttgaaaaatggcgtgatacagaagagggtgctcaaccccagtattacaaggctgaagctgcttcaaaagaacattcagcgtaacatcttattgaagctggaaatgcctgattatgcattcggcgctgtcaaagggaaggacaatgtccagaatgcaaaacaacaccagggcaaaaagtacatctttactaccgacctgaaatcctttttcccaagcattaaccataaacgggtatttgagatgttcagatccttcaacttttcacccactgtggctagagtcctgacccaactgacaacgttcaaaggacggctacctcagggggcaccaacgagtcctaccgttgccaatcttgtcttcgtcaagaccggtaagaaactgctcgagttcgcgaaggaaaataagctcacttttactagctttgtggatgacttgaccttctccgcaccaaccgattttaagtctaaggctcagttcattattgaaactcttcaggctgacggatttaaaattagccacaacaagacgaactacaagacaaaaatgcccgtggtgaccggtgttgtagttaagaataacaagctgtctctgaccgacaatttcaagatcaagttgaacaatactgaggattcaactcccgaacgcatcaaaggcttacagcaatatgccgccaaagtggccaaaacaaattcgtctccactgcttacagccattcgacagcctctgacaggcgggctggcgttactgggacagacctggtga

SEQ ID NO: 11181 - RNA, 936 nt, synthetic construct
  source 1..936: mol_type = other RNA
atgaatagctcacagttcaagaagaatgaattcaagaaactgtgcgcgaccatcggttttaagcccgcacaggtagaggaactcattagtaagctggatacctattacaaagagtgggtcgaacaaaaaacggataagaaaaccggagactttaaacggtataaggatgggacaatcaagcaacggactattagaccttcccttaaggagttgaaggttatccagacaaacatcaagacgcgcatcctggcacccatagctctgccaaactcagtgcatgggggggtgaaaaagaggagcaatatatccaacgctaaacctcatcagggcaataaatatcagtttaccactgacttgcaggagttttaccccaacatcgacttcaagagagtgtacaatacattcatcggtctgaagttttctccacattatgctcactggctcactaagctgaccacttggaagtacgagcttccacagggcactcctacctctacacacattgccaatctggtgttccttgagacagatattaaactcatagacctatgcaacaagaacggcattacctacacgaggtatgttgacgacttaactttcagttcccagcaggattttaggcacttgttaaacgacatcctccaaattgtgacttcggggggcttcaagctcagctacagaaaaaccaaatactctgataatcagaccatcacaggaattaacgtcttcctgaataaaatagacgctccggaaaaaatcatcgaaaaggccaatgccgagaaaaacacaaagtttaacactaagcctttcacaaactatctgaacaacatccgcaaaaccaatcgtgccaaacggaaaccagccaccaataagtccattgcggcaattggagccggccgaaagcccaatcaccagcaatgtataagcaaactgtga

SEQ ID NO: 11182 - RNA, 903 nt, synthetic construct
  source 1..903: mol_type = other RNA
atgaacagctcacagttcaagatcaatgagtttaagaagatctgctccatagtgtgtttcaaaccaaatgaggtcgaaaatatcgctaagaacttagacaagtactacaaggagtggattgagaagaagctggacaaaaagaccgggctccccaaaaagtatctggacgggacggagaagcaacggaccatcaggcccagccagaaggaactaaagctgatacagtcacgtattaagaacaagattttggtcccaatcaaacttcccgccgaaatccatggaggcgtgaaagggtgttctaacatcaccaacgctaaaccgcaccagggcaacaaatacgtgttcactacagatttgcaggagttttatccaaacattacaagtcaaagagtgtatgatacattctgcaaactcaagttttccccacattttagccattggctgactaatctgacgacctggaaatacgaactccctcagggaacccctacttccactcacattgcaaaccttgttttcctggacacagacattaagttaatagaactctgcaacgccaataatatcacttacacacggtatgtggatgatctgacattcagtagccaacaggattttaaacacttgctgaaccctatactcgacattgtcacctctggaaatttcaagctgtcttataggaaaactcagtacaaaggcaaacagacaataaccggcgtggatgtatttcttaataaaatcgacgcccccgagaagattatccaaaagtcaaagatcgaggttgataccaaagcagaccttaagccctataccatctacttgaacaatattcgcaagacgaattccctccgaaaatcgctaccgcctactctgggtctggcgaaagtaggtagaaccgaatga

SEQ ID NO: 11183 - RNA, 951 nt, synthetic construct
  source 1..951: mol_type = other RNA
atgattaagagcttgagacatcttgaagctgtgatcgggtataaactgaaagacatcgacgctgtgctcgacaacctgcataagtattacaatagcttttcgcgcacaaaaaagtcaggcaaaaagcgtgacatcgattcttccgagaatattctgcgtgatttacacaatagaatcaatgaccgcattttcagccagatctctctcccgtaccatgtgaccggttccgtgaagtaccgatcagcggtcctgaacgccaaataccacagtgggaaaaagtatcactttcagactgacctcgttggctattttcagttcgtgtctaataggttggtgtactctacactggtatcattcgggttctccgccgatgtggcctcctacattaccaaaataactacctataagggacacgtaccccaaggtgtgcctactagtccatttctctgcaacgtggtcggactacgcattcttgacggtgagatcctggagttttgcaagtcccgctctataatttacacccggtacatcgatgacctgactttcagcagcgatgtcgacatcaaagatttcatccctgacatactccagatcatcaacaacaagaactttctgtattcccatagaaagacaatctataaagcaggagatattgtggttacgggcgtattaaccacatgtaacggcctgaaaatgccagagcggttgattgaaaagatgagtaacgaggttgatataatcaaaaggaagggctacgagaatttcgcaaatcagattcaacggatacacaagcttgggacgctgaacgctatcgtcgataggcagagagaattagttttccccggacggcttaaagaccgaaagaaaaagaatgcaagcagtgccgtgctagatctcgtctcactggaaaataagaagttggaaattgagagggagattaacctgtactga

SEQ ID NO: 11184 - RNA, 909 nt, synthetic construct
  source 1..909: mol_type = other RNA
atgatcaagtctaaaaaaattttctccctcgtcctaggctacgaactgaaaacgatcgacaacataatcgagtgtttagaggacgaacagaagagaggaaagtattataacccctacaaggtgaagaaaagtggcgggaagttcagagtcattgcccctagcaggggtgaactgaaaaaaattcaagcgcgaatacacgaaaatatcttctcgcatattcagctacctttctatgttactggaagtctcaaacggagatccggggttatcaatggtaagattcactctggaaagaaataccactttcaaaccgaccttgtgaatttctttggctttgtatcatatcggaatgtgcttaaggcactgaagatgctgggcttttcacatgacgtggcattctacatcaccaagctgacaacctatgacggccaccttccacagggggtgtgcacatcaccctttctcgccaacttggtggggctgaacatcgatgatgctatgctggatttctgcaaatcccgcaacatcacctactcaaggtacgtcgatgacctcactttcagcagccagagcgactttaaagatgagctgaagatcttcttatctgggataattgctcagggattcatctacagttaccgcaagacaaagtataaaattggcagcattgacgttaccgggactaaggtaacaaatgaaggaataaagggcactgacaaacagtacggtcgtgcccttctgatcgatactaaatccagctccttcaagggcctggtcggacatctcgagtatgtggaggagatcaacgataaatttaatctgacaacgtaccgaaacgagaatatttttttgcggtttccaaccaggttgtttccctatatgaacttcaagaagaaagagtctaagtga

SEQ ID NO: 11185 - RNA, 939 nt, synthetic construct
  source 1..939: mol_type = other RNA
atgggcggatttgactatgcaagctctctgcggctggatggactagcagctgcgcttggggttactgtctctttcttagaaaaactccagatttaccctggtgcgtactacgacgactttgcaaaaaaaaaggatggcggactgaggaagattgtgaaagttgactggcccgtacggcgactgcaagagcgtctgcaccacaacgtattcggcaaaattaaactgccagatttcgtggagtgccagtcaggccgcagctctatcgatcacgctctcagacataaaaaccagacgcagatcatcaccttcgacattgagagctacttcccatccataacttacaggagagttcgccagacattggccttttttgggttcaatcagctcgtgtcagccgtgattgccagaatcaccatccgagatggaagcctcccccaggggacacctacaagtacggacatcgctaatttcgtcggcacatttcttgatcgccggttgcttggtctgtgtgagaagcataactgggtctacagtcgctatgtggacgatgtagctatatctggattcaagaatatgggctgggccaagaagctaatcaacaagataattatctcggaaggcttccgtatctccaccaaacaaggagggttaagtgtgaccatggtgaaggacgtgcctcttgtcactggtgtgaggataaacaaaacctttatccaagccccaaaggagtattatcggagcgtcaggcagaaaatttacctgtggcagaagttcggctatgaatccgcctatcccggcttttcaaagaagcaatccatttccaagctgcacgggaaagtgcattacctgatgtatctcgacaaggtttcaaagagatttaatggtcaagggtaccagttgtttaaacagttccagaagctgcacaaggatccggcctga

SEQ ID NO: 11186 - RNA, 918 nt, synthetic construct
  source 1..918: mol_type = other RNA
atgtcactgccctcttctcttactaaatggaccccaagtctcgtgacccctcctgatccattatgtccaattgtgggcatcaaatcccccaagtctctggcacgcattctggggtaccccctaagccagctggaggagctttgcggaaatattgagagcaattaccacaagaaggaaatcacaaagaaaaatggtgccgtgcgtgtattgagcgtgccgagcggagcactccgtaaggtccagactgccattctgcggcagcttcaaaaacacccactccatcccgcagcctatggtgccgttcagcgaaggtgccatatagataacgctaaacggcacgctgccgcgccctatgtgtattgcctcgatttttcatcctttttcccatctatcagcagtaaccgaatctataagctgctcgccgaacaattaggatgcagcccccctgtgtcaaacattttgaccaagttgacaacgtacaaatataagctccctaccggcagcccaacctcccctgtactgactaatatcctgtgttttccgctggataatcgcctgaacagtctggcttgtgattatgggctgacgtacacacggtttatcgacgaccttaccttttctggcagaaggatccctgaaggattcatcagaaagacaaaggagattattacttcgttcgggctcctactgaatgacgaaaaagaggagttattcacaccctacaaaggtaagctggttacaggcatcaacgtgaacaccaacaaagtcagggttagtagatactacaagaaatccgtccgcgctcagaagcatcagttcgggcttttcaaggactatatgactgactcagaaaagtccaaagaggagtccagaatagacggcaaagaacaatacataaggttggtccagcggcgctga

SEQ ID NO: 11187 - RNA, 909 nt, synthetic construct
  source 1..909: mol_type = other RNA
atgtcccatttgcacttccccattaacaccgtgagtgagctatcaaccttgctttctatgcctattcgagatctgtggaggctggcaaagaatacagataaaagctatttcacctggaaggaaccaaaaagcagcgggggctttcgctccctttgcacgccagattctagactgaaggaggttcagaaaaagctgcataagctggttttctccaagataattcactcccggttttcacattacggcttaaagaagaaatcgaatgttaccaatgcttctgaacattacgggaatgatgtgatctttgccttcgatctgaaaagcttctttccgtcaatcaggcctgaacgagtccggaaggcactcattgacgaggtcggttgtcctgcccctctcgcctctctgatcactaagctagtgactttgaactatcagctgccccagggtgctccaacgtctaccgacatagcgaatattgtgacatttcggctgcagagaagattgtatagtcttgctaagcagtggggaatcaagaaattcactatctacgccgacgatatcaccttcagcggaaacaacattccccacggttttatgaagcttgccaagaaagtggtacgtgaggaagggtacaagatccacccagaaaaagggggcgtgttcgacaaaagtggcaatcagataattaccggaataaacatcacacacggcctcacagtgggaaagatgaacaagatctggcgcgctgagaggcaccaaaactttctccaatacctcaaaggccagctgcccactacagagttcgacagctccgagaaaaggtttaatagccgcattgtctattcaaacttcatcaagaaatccgggctgaaagtagcagacaattatttaagttcggcctacaaatga

SEQ ID NO: 11188 - RNA, 1401 nt, synthetic construct
  source 1..1401: mol_type = other RNA
atggaaaagtggtgtattttacctaacaacctcatacagaagctgaataaagacgatgtgatcgtggcaagcctgactcgtttctgcaagtgtagcactgatgaattgttcgcagtccttaaaaatcggtctaaggaaaacaggtggtggtggtatgggtacacccagtataccaaaaataacggcaaaaagatccgcactattagcgtgccgcgcaagaacctgaaaaaaattcaggaagccattaaagatcgactcgaccagatacccgtttctctggcttccactgcttggaagattggtgattctgccgagaaaaacattgaactgcacaaacacaatctgtatcttctttccatggacatcaaaaatgcctacccgtcaatcaccacccatcgggtgtacaagaacctgcagtgggccttgccactcaaataccggtgccctcagctgattacagatgaggacaaggacatttttattaggacgattacgcatctttgtgtgcacgacaatcagctgccacaatgggctagcacatcgggccagatccagaatatagtgtttagtagtttggatatccagatcgagaaaaaaatacctgaactggtatggagtcatatggtctactcgagatatgctgatgatatggcgataagtttcccacattttagcaccctggagatcctgaaggagaaaatggaaaagtacatacaaaccctgaagaaacaccgagagagaagaagcatcctactggatgagttcagcaaggacacattcatcgttacagataactttgagcagaagtatctgcaaaagaagatcgaggacattaaagagctcatgaaatggtcttggctccccgatgaggaaatttataagcacattggcactcttgacgcctacaagaaaaacatcaagtattcaacctggagaatctccgacatacatgacgagatcttgaaagtcatttggtgggaatggcgcaagatcaataatataaagactaacatgcggaccccccaatccgatcgagaacgcgagatcaatggaatcacactagacgaggaaggtaacaagtggttaaacaaaagaaagagggcccagtatttgaaaatcttcaatcacctcatcaagcactcacaaaacgacctaaaggggttcaccttttaccgtgagaagtttaatacactcgagaactttgacatctgctcttccactatcacgcagataatcgatggaatttatcaccgcattgcaaggatttacggaacagggcggatcccaaagcctctgcatgaagcgtaccagaaggcaaagcataaaaggtcctctcacgagatttacctcacctacctgcccaacaattcagacacaaacaatgaagagttacttttctga

SEQ ID NO: 11189 - RNA, 966 nt, synthetic construct
  source 1..966: mol_type = other RNA
atgcgcaacaatgaaattaggactctgaagcgtttgtgttccctgctccacctgaaggaggaatacatacttgatctggccagcagagcaaactcttgctactactcatacgacaaaaagagtagaaagaaagacgggacagcaaagattcggcatatagattcccccaacattgagctcaagaacatacaaaagaagattgacagcgcgatcatcaagccttatgtgaacctgcttcctgattacatacacggagcccgaactggaaagagcattgtgaccaatgctaccaatcatgctgggtatgaggccattctgtcattagacatcgaaaactgtttccccagtattacatccaagcgaatctactatatcttccgcaataccatccattgttcagataaagtcgcaagcgtgcttaccacattgacaactaaggacggtgtgctgccacagggttgccctacctctgcgtctctgtgtaatctggtactcgtgcagatgattgaaaaactctccgagattgacgggagtttggactacaatatttcgcactatattgacgatatcttctacagcggcagatattgcgatctgcaaaagattcggaagccggccatgacggaaatcggcaaaaatggctttcgcccaaacactaagaagacactgctagtaaaaaacggaaggcccatgaaagtgacgggcatcacagtcaataccaaagtttccgccggacgtcggcggatacgcaaaattcagaggaaaatcctcaaaatcaccgagaaagataaagccgagtatgacatcgtcctaaagaatagaaaaaggaacaacaactcgaaaatcaaagcttgcaagatcgaaaaactctttggcgagataagcaatgttatctctatcaacaaggagcaggggtataagttaaagaagaagatcgaggctaaattgaatgatcttatcacttga

SEQ ID NO: 11190 - RNA, 981 nt, synthetic construct
  source 1..981: mol_type = other RNA
atgcgacaggaaccccctaccatccgtcgcccattggagcctcgtgttgtcacaatccagcagctggctgccctggtgaatctaccagtcaaccagttggatagattcgtgctggaagccccgaagctctattccagctttgaggttcctaaacctaatggcaagactagaacaattcgcccaccggcacgcccgcttagagacttacagaggatgctgcttgaggtcctccaggagtgtgtgagatatccaaggtggcttatgggtggtgtgcctaagcgcagtatttttgaccatgcaaaacctcatgtgggatggaaaatggtggccacctttgatgttaaggctttcttcccctcaacacggtcggcgatgattcggcccgtgctcgagagaattgggatcagcgatgccgcggctgatgccgtgctacgactggtaattaaggatgacgaactcccccaggggtccccaactagtggcttcctcgctaacctgacattagaacccgctgaccggagaatcgatgctctgtgcaggcggcacggactgaactttaccaggtatgttgatgacatggccatcagcggcaatactgacctgaccaaatttcaaggtgcgatagtcgaagccgtcaaggagtctggctacgaggtggctcccgagaagatacactacatggatcggtctaagacacaattaattacgaaactccgtgtgaatgacaagataaggccaacccgggagttcatcgccgaggtgaaagccgatatctgggaatgcctgaacgtcggggcagcagtcgttgcaattgaacgcggcgtgcagctccaccgactgaagtcctctcttacgggaaaagtgtcacatatccgatccgccgacagggaagccggcgagaaactgaaaggaatgttgtacggggtagactggaaccagcaactgcacactaagttcgacgtacccagcttgaccgcatga

SEQ ID NO: 11191 - RNA, 954 nt, synthetic construct
  source 1..954: mol_type = other RNA
atgagggctgaacccccagtcgttaggtataatcggagcctacagatctctactctcgatcaggtggccggatgggtgggagtagagctttcaccgttgtctgatactatcaaccgcgcctctaccatgtactcctgtttcgagataaaaaaaccaaacgggggcagcagaacaattcgaccacctaacaaggtgctgaggaccctgcaacacaatattctgcgcgagctgcagagcatggtcaggtaccctcggtggatgatggggggtatcccgcgccgtagtatctttctgcacgcaggcccccacgtcgctaaacggatggtggcaacgtttgacgtcaagtcattctatcccagcacaaattcctgtctggtcaggtctgtgttagagagactaggcttttccggcgaagctctcgatgcaatggtgcaaattctgatcaaggacgacgagctaccacagggagggccagccagtggcttgattgccaaccttgctctcgagcctgctgaccgtcgcattgacgccatttgccgaaagcatgacttgcggttcacccgctacgtggatgacatcgccatatcaggggaacacgatctcagagtgtaccagggtgcgattattgatgccataggtctgtgtggatatgaggttgcccctgacaaaatcaagtttatgggtaaggaacagtgccaggtgatcacaaaactcgtagtgaatgaacagcttagaccctcgaaatccttcatcttcgaggttaaggccaaaatcagggaatgcctggcgaatggagcatttgttgttgctgtagagcatggcatctccgtgcctcagcttaagagcaaactgaacgggaaggtcagccatataaagcaagcagaccaacggctggggaagagtctccagagaaaattaaatggcgtgaactggtcacgacagctgcccgattga

SEQ ID NO: 11192 - RNA, 957 nt, synthetic construct
  source 1..957: mol_type = other RNA
atgaatatgctctctcaacacaccatgcagcagaacgactggcctccccctatttccaccagagagaggctggcccgcacgctgaacgtcagtcctgtggtgatcggggaatttgttgcagaacccgcgcggtggtattcccagtttaccgtgcccaaaccctcagggggcaatcgtattatccagccaccgaagaagccactgaggcgagtacaacgggctctgttgcgccttctttacagcagactgcaggtgcctccatacctacacgggggcgtgccgaagaggagcatcttgacccatgctcgcagccaccttgggcgcaaaatggtcgccacactcgacgttaaaaacttcttcccctctacacagcagaagttcgtgcagccaatttttgaaatggccggaatagtggatgaagcgctgactgacgctctcgccattacaatgttagcagagggactgccccaaggcgctccgacttcatcattgctggccaacttagctttcgtccctgtggataaggccgtgatcgccctgtgtcgaagcagaaatctgtcctttagcaggtacgtcgatgatatcgccctcagtggaaatgtggatttcagagagttaaaaggcccactgatagaccggatccacgctgctgagtatgagattgccgaacataaggttcggtttatgcctgcctccgagcggcaggtcgttactggccttgtggtgaaccaaaagctgaggccaacagcagagttcgtagcaacgctcaaaagtgacatcagagtatgcctcggccacggtgtcgactttctcgcggactctgagggtatttccactcgtggaatgcgtatgcgcctatcgggtcgagctgcccatatagccgcagcagatcccaagctgggcaagcggatcagaggaatgttgtgcggggttaaatggaccaccgcatctaggtga

SEQ ID NO: 11193 - RNA, 960 nt, synthetic construct
  source 1..960: mol_type = other RNA
atgcctattcaattgcacgcaacccgtaaggctgcaaatctggtatccaatcttgacgggctcggcaagttactcggctttccggtcgtgcggttaaacgcggtcatcgaatgcccatctcgacattattccagtttcgacgtccccaagaaaaacggtggcgtgcggacaattgagccgccccacagacctttgcgcgagattcagagatccctgcttaacaggctgtatcgccggatcaaaattccaaagcacatacatggaggagttcccaggcgctctatttttacattcgcaagacctcatgtggggaaaagcatggttgctacgttggatatcaaggatttcttcccaagcgtgggccccagccacttagagccagtgtttttccagctcggttttaggggtgaggcgctgaatgccgtagtgtcgttgactatgctgcgagattgtcttcctcagggcgcccccaccagttgtctactggctaatctgtcattctcaaacgccgacgccagttttaacgctgtctgtcggaaacgcaacctcctgtacggaagattcgttgacgacatcgccatatctggcaatgtggacttcggtgagctgcgcggaacgtttctcggcatcatcgaagccaaggattttcaggccgcagaagataaaattcacttctacgcacaaagccagagacagatagtaaccgggctcgtgctgaacgagaagctgaggcctactcgagaatacgtggccagcctgaaacaaaggatccataattgcagaaccttcggaccaacatttatcgctaattccgatggactgactgtcaggaagctcaaaaatagccttacatcttccgctcgttttgttggccagtctgaccccaagctggggaagaaattgcgggggcttctatgcagtgtggcgtggggggcctcaaccaaccggttctcagactga

SEQ ID NO: 11194 - RNA, 1047 nt, synthetic construct
  source 1..1047: mol_type = other RNA
atgtcctaccggcatctgcttaagccaggagccaggcgggctgaggctttggtagatgtggacgggctggctcgagcgtgcggacaagatgccactcgcttgcgaaggttgcgcgaaaatctcccgtctgcatacggtcgcattgagaggcctaaacccaagggggggtttcgcatcataaggcctccacgtcaagatctcaaagaggtccaaagaggcctactcgattggctggagacacgcttcaccgccaagccctggatgcacggaggagtagcccagcgcagcataattagtcatgctcaacctcactgtgggaaggccatggtggccgtccttgatgtgagagatttttttgggagcgttcggcgtgagaggcttgctgccctcctcactgcagcaggactggaaggggaagccctggagacactgctggacctcgttacactggatgacaccctcccacagggagctccaacaagttgcctactcgccaacttggctttctttcccgcagaccagcggttcagacgggtgtcagcgaaaaggggtcttgtttacaccagatatctggatgaccttgcactgagcggcgacgaggactttaaagaactgagaggcccactggtggaagctctcacgctggaaggattccaggtggcagcggagaaggtcgccttcatgggtagacatgagccacaggtggtcactggtctggtggtcaatgaccggttacgtcctaccagggccttcagagaagcgctgattgctgaaatcaacgactgtcagatcgagggcttgggcgctcggtccgacagacttggcacaaacccccagaggttgcgggccagactactgggccagatccggcacctggcacgatttgatcccgcacctgcccgccgtttagaacgacgcttaaggagtgcccctggcggccgagctactcagtcatcgagggccagacgacgcaccagcaaggcatcttcctctagctccgcctatctggcccaggagagttcagagccgccctcacggagggcatga

SEQ ID NO: 11195 - RNA, 984 nt, synthetic construct
  source 1..984: mol_type = other RNA
atgcactacgagctgctcaggcgacggccagctcaggatgctctggctgatgtgagtgacttggcgagagctctcctgcttccgcgcaaggggctgtgtgagctggccgaaaacaccgagtcccattacatcgaaattcggattcctaagcggcatggagggttgcgccggattcacgcacctgacccaagcctgaagaaggctcaacgcgctgtgctacggttgcttgaggatcggatggtgcccaagtcatggatgcatggaggcgtcacaggtcgctctatagttacgcacgccgccccacattgcggcaggtgttgggtggcagttttggacctcgccgatttctttccatctgtcagacgcagcagggtccaggccatcctcgaagcagcaggctttactggcgacgccctgaaagtgctgctggcgcttacaacactcggtggagcattaccccagggggcccctacctcatctcacctcgccaatctcgccttatttccattagacaggagacttcgcagcttggcgaggcgatgggggcttacctattcgagatatctggatgacatcgcactgagtggcaaacgtcccctgcggcccctcaaaggaccactgcacgatgcagtgataagagagggattcaggccctcaccctccaaaaccgcctttatgggtcgtcacgaacctcaagttgttactgggctgctagtgaacgaccgcctgaggcctgtgaagtcctacagacgcgctcttgtggaggaggtcgaagcgtgcagacaggacggcccgaaagtccgagcagccctacagggcatctccgtagcccgctatcggagcaggattttggggcgaatcagacattgggctagattcgatgccgaaaaggccgagcggctggagcgtaggttcagacacctcccccgacctggtgctgcagctagggagactgacggacgtgaaaaagtaggcctgcggtga

SEQ ID NO: 11196 - RNA, 909 nt, synthetic construct
  source 1..909: mol_type = other RNA
atgtggcgtgtgctgaatgacgactttgcccattggagtccaagacgcttagctgagctcctgggcagggacttagaccggctcgtgcagttgacggagggtacagctggccgataccgagcgatccggctgccaaagcgaggaggcggtcatcgggaactggctgtgccagagccggaactcaaagcgctccagcacgaccttatggtcctgctcgatcgcgctctggaggctcctccatgggtactgggcgggagaaggggtcggtctttcgttgaccatgccgcccgacatcaagggcggtcctggcttctgaccgtggacgtggctgacttcttcgggaggattggacccgccttggtggctcccgttctgagagagtttgggctgcctgaggcaagcataacacttatcgtcgcgctcgcattccgtcacggagccttaccccaaggagccccgtcgtccccactcctagccaaccttgccatggcacctattgatctgcgcctaagacgtctcgcaaggcgcaggggccttgccttctccagatattttgatgatctggctttttcaggcgacagggattttggggagctgagagggcccattgcagcactactccggcaggccggactgccattggccgaacacaagactcgctacactgggcgtgacagacctcaggttgtcaccggcctggtcgtaaacgatagactgaggcccaccaggagctttcggggcgagttggaggaagagctgcgcttgttgcagggtggcgcactccccagacctcgcttagaagccagggtggaaggaagactgcaccacctggcccggttcgatcgacgggaagctgatcgccttaggcgccggtatggaagggcgctgcctagctcttcaagttcttga

SEQ ID NO: 11197 - RNA, 933 nt, synthetic construct
  source 1..933: mol_type = other RNA
atgcttaaaatcgtgcccctaaaactgaatagcattgctgagattgagaatatcctggggttttccttcgataagattaagaagatcgttgagaacaagaacaacttttattccaaggtaagcatcgtgattaagggcaagatgaggatcctggacatccctaactcgtcactcaaaatcatccagggtaaactggcccactactttggggaaaacgttgtgtggccctattacgtacagggcggtgttaggaatcggagcgtgaaaactaatgcaagacaacattctggaaagaaatttgtcctgaacctggacatcaaagacttctttcctagcatcacaacaaaaatggtgaagaattccctgatggagttgggactcaatcagaaagtgagtactctcatatcagagctttctacctacgaaaacagagttccacaaggctctccctcctctacctacgtggccaatatgttcttcttgaagatcgataaactcatcaacaacttttgcaagaagcacagtttgatttatacacgcttcgtcgatgatctgactatatcagggaaaaacaacatcttcccgtataagggaactattattcagtacattgcgagaaatcgccttatagtcagtgagaaaaagacgacaattcgatcttcaagtgaaaagcagattgtcaccaagctggtcgtgaatgataagattcgaccagacaagaagtacatcctgacgctcaagaaggacataagggaaacctggaaaggaaacgagggcatacgcaaagtcgccttaaagaacaatattaccatgcctaaagtgaagggtaatttatggggccgtaccaactatatccggcagttcgataaaaaaatagggcgggaagtgagggctctactggtaaaaagcaatttcgtggacgtgagctcctga

SEQ ID NO: 11198 - RNA, 972 nt, synthetic construct
  source 1..972: mol_type = other RNA
atgaagctgctgaagttcctttttgatatcacgctgaacctcacaattcacccccacaaatcgctgaagccccaccaaatccagacagaacaggacgtcgcaagactggccaatcaggaagtcagcgcgctgcaggagataatatctaataaagaggagcactatggatttttcagacaagagaaaaaggatgggaccctacgggatatccatcccccacggaagaaacttaaactcatccaacgcaagattaagaagttcttcgaccatttcccatggcccagatacgtccagggggggatacggaaaaggtcaattttatccaatgctcgtctgcattgcggaaagaagatggtggcctggttagatatccgaaagtttttcccgagcaccaatcccagtatggtgctcgagagcctagaaaaaattggcattggtaaagcagcaagcaagctcattgttgaactgggcacttataaaaatgcgctgcctcagggttcccctgcatctgtgtccttggccaatttggttttcctggatgccgatgacaggtttgagcttttttgtaagaagcaccgactcatctacagtaggtacatcgacgatatctctatctccggcgatatcgatttccgtccacataagggccagttcctcaagtttattgaacaaaaggggtatgtagtagctaaggacaaaattgactttattggacgcgacaggcctcagatagtgaacaacctcgtggtgaacgacaaagttagaccgaacaaagactttattaacgacctgaagaacgatatccggtgttgctggactgaggaaggtatggagcttctggctgccgacttcggcctgttgccaagggagttgcagcgctcactttggggccgcataaatttcaccaaacagtttgatcctaagttatacaaagacctgaaggctatcatgatcggagcctttttcaaatga

SEQ ID NO: 11199 - RNA, 942 nt, synthetic construct
  source 1..942: mol_type = other RNA
atgccggagaaaagaacggagggcattaaacagattactcaggaatgcgtggccacgctggaaagcatactaaagaacaaaagcgctctttactatgaattcaagatccccaagaaaagtggagaatcccgagtcattaccccctccaagcccccccttaagaatattcagcacaggatcaataagtatttcgccaggaaacagttcccagcctgtgtgcatggatacgttcggaatcggaacgtgctgactaatgctcagtcccatgtggggaagaagtgggttatcacaatcgatctgaaggacttctttccatcttgcgacaccattaaaatcagtcaggccttcctgaacatcttctcaaacgaccaaactattaatctgttgacagagcttgtcacctttaataatcagttgcctcagggtacaccaactagccctataatcagcaacctggtactccataacttagatcaagaatttgtgagactctctaagaagcacggttttacatatacccgctatgcggatgacctaacccttagtactaacggaaaaaacccccacgatttcctgaaagcctttacagacatcataacgtcaaacggcttcaagatcaatcctgacaaactcaaagttatgccctgctcagctcggcaaatcgtcaccgggtttgtggtcaataagtacgatgggaacggctttctgaaaccaaccaagaagtatatctccgacttcaagatcttgattcgcaactgttaccaactcaacatgtttcagcagattgcggcagatcagggcaaaactgtgccgaaactgaagagatcgatagagggcaagatactgtacattaaacacgcaaatcctgcattagctcgtgagattagcaacctcaggtaccctctgaagccatctgccacagagattaccgtaaatatctga

SEQ ID NO: 11200 - RNA, 1152 nt, synthetic construct
  source 1..1152: mol_type = other RNA
atgacccaccaagatagcaaacttacgattgacgacattggaaataaactgggcgtgaccccacagttccttttagaggcggcatctgccgctagcacccagtatgagctgtttgacctcccaaaaaagtcaggcgggactaggacaatctgtagtcctaaaaatgagttgaaaaggctgcagcggacgatcctggaggagctcttgcacaccttcgccatgccagattacgtacacggttgcgtcaaaggacgatcaatagtcaccaacgctaagccgcacactaataagccgttagtgctcaccatcgacattaaggattttttcggatccatcaatcccgaacaaattaatagaatcttccgcattagcttcaactgcgacgataagtccgctgaagtgcttacagccctgaccacctatggcacatttctgcctcaaggagccccaaccagtcccgctttggccaacatcgcggccctccctctagatgctgccatcctggatatatgtgagcagtccggcctgcagttttcttatacccgttacgtcgacgatattactatttctggcgacaaccgcctggctcttatgctggcaagcttttacaagacagtttccgcacatgggttcaccgcaagtcccggtaagctacgtgtgggtcggccttcgaaccgccagaaagtgacaggcatcatcgttaacaagaagatggccccacccaagaagctgatacggaagattaggcaacagctgtattactgcgagaagttcgggattgaggaccactgtagaaaagaagggatcgaagaacaggaatttttgaatcagatcaacgggatgttaggcttcatcagattgacacagcctacgacagcggatctgttcaagattaaactcacaactctgcaggggtacacttttgtttctgttgacgaatcagtgctcctgatactcaaacatgcagtcgaagaggagaagcatgtcaatttcgtgtaccatggaagtactaggaaagtagcccccgtggaggtgtttatcgatgacgaaggcatgaaatttatgcgaggatatcagactgtgcccgagcagaagtgggaacggtacatgatacctgacatccaaagcctaagactttccgagaacgcctga

SEQ ID NO: 11201 - RNA, 1152 nt, synthetic construct
  source 1..1152: mol_type = other RNA
atgacgcaccagaaaagtaagctaactattgacgatatcggcaagcgtctcggactcacccctcaatttctgtttgaggccgcaaagacggcagaaacccagtacgaactttttgacctccccaaaaagtctggtggggccaggacaatctgcacacctaagggagagctcaaacgagtgcagagagctattctggaggaactgcttcagcagtttgagatgcccgaattcgtccacgggtgtgtgaaaggacggagcatagttaccaacgccaaaccacatgtggacaaaccactggtactgaagatcgacataaaggacttcttcggttcaataaaacccgctcgggtgctggaaatttacaaggatatcttcgattgcgatgagaagtctgcggaagctctgaccgcgctcacaacctacggcaatttcctaccccaaggcgctcccacttcgccagccttggccaacctggtggctctgcccctggatcgaacacttctcgacatttgtgagcaaagcggcctccagtatgactacaccagatatgtcgatgacatcaccatctccggggattctagactgggacagctcctagccgcattttacaaggccatccagcatcacggctttattgcctcacctgggaagctgaaagttagtaggccatgcaatagacagaaggtgaccggaattatagtgaataagaaaatggcgccacctaaaaaactgattcgcaaaattaggcagcagctctattattgcgagaagttcggtttggaagatcactgtcaaaaggagggtatcgaagaggaagagttcttggataggattaacggaatgttaggctttattagactgactcaaccggtcacagcagacctgttcaagtccaaattgactcgtctgcagaaattcgaacttgttgatcaggacgagagcatcctgctgttgttaaagttggcagtggaagaggagaggcatgtcatcttcagctaccacgaggctactcggaaggtcgccccggtagaaatcttcatagatgacgacgggtttaagtttatgcgcggctaccagacaatgccagagcctaagtgggagcggtatcttatccctgacatccgctcccttcgcatctttgagaaattatga

SEQ ID NO: 11202 - RNA, 1215 nt, synthetic construct
  source 1..1215: mol_type = other RNA
atgacctccaacctgagcctcaccctaaccgacctctgcgacgagctcgaactgccctctcagtttgtgctagacctcgctaactctgccgaagacgaaaaacgctatcacagttataagcggcttaagaagtccgggggcgctcgttacatcaatgcatcggtcgggtccctgaagagattgcagcgtagcattcacgaacgcattctctctaggcataaaatgcctgagcatttgcacggcggcataaaggggcgctctatcgtgacaaacgctgcagcccatgtaggaaagaaactggtaattaacatcgacctgacagacttcttctcaacgatcaaagtggccgttgttaaacaaatttacatgcgggatcttcacttcgatgacgagacagccactgttctggcccaggtcagtacgttcaaaggagccttgccaacaggggctcccaccagttcagcgctggctaatctggccggcttggtggtggatgacgcagtcatttcaacacttactaagaagattgaacgaacagagtttggatacagccgatacgtggatgatatcaccattagcggcgacgatagaattgtcgagatcttacctgatatctttgaggccgtgaagtccgccgggttcacctgcaacgataaaaagaccagaatcttaaggagatctacccgtcagtgggtaactggagtggtagtgaataggaagctgaatcctccgaaaaacatcgtcagaaaaatccggcagtatctgtactatatgcaccgctggggtgttgaggaacactgtgaaactcacggcataaatccctacaggtttatgagacagataacaggctacattgcctatgtccggctcactcaacctgagttagctgacgaattcctgcggtcccttaaaccgcacctggcacggtttcatcaggtggacgaagaaagcgctcccagcactcttaatatcctgaaggttatgatcgacaaggaggagatagcgcattttctgtatgatagggaggaccgagctgttaaccacccttcctatgagccagtggccgtgtcagtggcgccagagagcctcgacgtcgacgatgatggaactctgaccatgaggggtttcgaactcgcacccaagcaacgctggggtatttaccatttggagagtatctcggcactgtctgataaaccactaacggatgtgacctga

SEQ ID NO: 11203 - RNA, 1317 nt, synthetic construct
  source 1..1317: mol_type = other RNA
atgcattccctggccttagaggctgtcatcgccgacctggggaaggagaattgtagagcagccctgaccttgctcgcggagatggttggtgtcgagcggcaggctatactggactgcttagaactactgaaccgacatggcgaggtggaggacggagagagggtggtggcttatacatcgttttacaggccaaagaagagcgggggaaaaagactgatcatagcccctgttgagccaattaaggacctgttgaggaaagtaaaagatgagattctctgtcgtagtagcctccctcgcttcgttcacggataccgaacgcggcgctcctggcttacaaatgcccgtgtgcacttcgatgcaggagcggtgtatgccataaacttagacatcaaggactgcttcccttctaccaaaattcagctggtccggcgcgtttactggcagacaaccggccgaatgctcagggatgagggcattccagaagaggtggcaagagccgcagtagagattctcaccgcgctatctaccctgaagtatgggcggtcaaaggtgcccgttttacctgtcggatcacccacttctccagcactcgtgaatctggtgctaactcctgcctgcatccgcattgctagggcactgaaaagactgcccggcgaatacgcattctccatctacggggacgatctgacagtctcaagccgcgaaccattgccgccagaggtcaaaatgatcgtactgcgagagtggcagagactggggtatcgggctaacccgggcaagacaagagtgatgagacgcgatggatccggtacgcccatagaagtcactggcctgatcctcggccgggatcgtattctgttgcctgacgactggctgcagaggactgaacttatgcttatcgcttacgccggctcccccaaatatcctggcgataaggctaaacgcgggctgcaaagtagggtttcaatggtgaggaagctctatggcgtcgagatgcccgggcgagtgggtaactgtttgaagagccttatcgcccaggcgaagtctaatcttgtcatgagggaacgcctcgcagaattgctccggggcaaaatgcctgaagtggtagaaggaagcgaagaagctccagaaccagccatggaacaggccgtggagcaggatcgggattggagaaccgaatacgggcccgtgccccaaagtatggacgccagaggtcaacttttttgggattttgacgatgacagccccggaggagctgatgacccgtttgtgcctgagcacggtcagctggagcaaggcgagtgggagggggagtga

SEQ ID NO: 11204 - RNA, 933 nt, synthetic construct
  source 1..933: mol_type = other RNA
atgaacagtaaacaggccatgaagtgggccgatattagacccattctgcagagctccgagggcctgagcaggcacttgagcgtgtctgaagacacactgtttagacttagtagaactgccagccgattatatacacggcgcgagatagagaagggaaggatcctgaacctcccctcgggtgagcttaagcggatccagtctctaatccacaagaagattctgctgtttgccccctatcatgcctcaatccacggctatcgcaaaggccgctcacagaggtccgcagcagaacctcatcaagacaaaccaatgttgttgaagggggatatccaaaaatacttcccctctatttctccagacgctgttctcaaagcctttcgacagcttgggatcagttaccaagtttccaagttactcgtggatctgtgtacccatgagggccaactacctcagggggctccgaccagccctctcatctccaatctgatatggtcgcggccagcacgcaggattcggggattcgcggaccagcacggatttgaccacacgatattcggggacgatgtttttatttctggcgcttgccgggcaaaaaagttcaagaacctcttgaagagaatcattcgtgaggaaggtttatctgtgtccgaacgcaaaactcaggcgctcccatgcacaacccgtcaggtggtccttggtctggtcgtcaacaagaatctgggtgtagacaaggatgtgaggagagatattaggcaggtgattcataactacgtgagcaaagggttctcagacccgctcggaagtaatctgcgagcagccaagacctcactggctggacggatcgcccacatcaaacatataaatccttcccagggccaaaaactgcagcgtgaattcaagagaatcaattgggaggagggcgctagcgtatga

SEQ ID NO: 11205 - RNA, 906 nt, synthetic construct
  source 1..906: mol_type = other RNA
atgaagtggggggaagtgcgcgcccacttgcaatctattgattcactggctcggtatctcggggttggcaaagacactctgttcaggctctgccgaacctcaagtaggtgttacgtccggggagaagagcccaaagattccggaggtgtgagggagttctataaaccacgcggcgaactcaaggagattcagcgcttaatacacaaaagcatcctgttgtttgccccatcccacgaggcaattcacggttacaggaagaaacgcaaccagcgaaccgctgccatgccccatctgaagaaggacatgttggtgaaggctgacatcaaaacctttttccccagcgtaaagcccaaacaggtctatgatgcctttatgggcatcggactacctcattgcgttgcggacatgctcacaaaactgtgtacacacgcagaccaactccctcagggggctccaacatcccctatggtcgccaacctgctttggctgaggcctgctagacggatacaaggagtggccgacaagcatggttttggtcataccatcctgggcgatgatgtgttcttaagcggcaagaagcgtgctgctaagtacaagtccttccttaagagagtaatctctgaagaaggcttccgtgctaatgatagaaagactattgcggtcagtcacaacggaccacagacggtcgcaggcctttctgtgaaccagaaagttaacgtgccgaaagcctacagaaaggccctccgaaatgagatctacagatatgcactgagcggagaggacgagaatgggcttgcccgccagaagggacgggcaagtctggagggcaagattgcgtacgtgaaacagtttaattcgctacaaggggccaaattgcagcagaagctggccgcagggcggaaatga

SEQ ID NO: 11206 - RNA, 909 nt, synthetic construct
  source 1..909: mol_type = other RNA
atgttcgacagcaggctggcaactgttgaagagctgtcggtgctgatcggggttccttccggcgagcttatctactttgctaccgcgattgaaaagaattaccgaagaaaagtcgagcataaaccagacggggatacccgaatcttcttcgtgccgtcacccggtcttaaaaaaattcagaaatgcattcaccggaggttcctcagaaagctgccagtccacgagtctatacactcatataggcgccggcgggacacaatcagcaacgcctctgtgcacgttggcaagcagatcctcgctaagctggacattaagaagttcttcccctctatactgcctcaacgcgtgtatagggtcttcttgagtcggggttgtagtcctagtgtggcctcccttctgacaaagctgaccacctttgaaaatcagttaccccaggggccaccgacatcacctgggattgctaatcaggtgctcactcccctggccaaaaggctcaagggagtctgcgatcagcataacctcacgctatccatcttcgccgacgatatctttgttagcggatccgagcatgtgccacaagtcaacaatttgttaaagcgcatcgtggaaagcgagggctttacatttaaccttagaaaaaccgagatgcggtggcccggcgaaaagaaaattgtaactgggataagcgtgactgccagaattaacattgagaaaggctattaccgtaaggtacgtgcactggtacatcacgcagcgaaccatggttacatgcacctctttccaggagtgacgcctctgtctgccaaagataagttgcagggcatgattagatatataagtcgcctaaatgcttccaagggacaccagttgcaaatcaagagcctgcagatcgccgatgcaaccaaatga

SEQ ID NO: 11207 - RNA, 999 nt, synthetic construct
  source 1..999: mol_type = other RNA
atgcgatcgaataactgcttctcaaagagcaaggtattcgtctggccgatctgggcgagaagtctggacaatcacgtgcaggatggcatcccactggccgatctgaccgatttatccgacttggctaggaaactctctgtgaccgaaacggatcttcaggccatcgcccaaactcactctctgtactaccgtagaaaggacaaggtgaagcccgatggccggcggagaactttctacatcccccacggtgacctcaagaaaatacagggggccatcgcaaaaaagttgctcgccccattaccattgcatcgcgccattcattcataccgtaagggcaaaagtaccctgacaaacgctagggtgcacctgggctccccctttatggttaagcttgacatagaggactacttcccaagcatttctcgggaccatgtctttaaacttctgggaaggctcgaattttccgggccgattgccaggatgctagcggtgctcacaacttttaagaaccagctgccccagggagcacccacgtctcaagcaatcgctaatctggtgttcgatgaaatcatcaaaaagcgcattgctcctttatgtgaggcccataatctggaggttacagtatatggcgatgacctgacaatctccggctcaaaacgcatagtcggcctaaagcggctgctcgagacaattatcaaggaggagggatttaaagtgagtactaagcctagcaaaaatcaactgctgcgcgagcacgaccagaaaatggtcaccgggtatgttctaagaggggataaactggatgtccctaagagcagatatcgagaagttagggcaataattcacaactgtttgaaaaacggaggtgctagccagttcgactgcgatgtgaagaccgcaaaacttcgattgcgcgggaagatcgagtatattcggaaggtgaaccctctcaggggaggtaaacttatgagagactttgaacggatttcctggatgtga

SEQ ID NO: 11208 - RNA, 912 nt, synthetic construct
  source 1..912: mol_type = other RNA
atgagcctgaaagtgcccccttcatcaatcccatctctgggacagacacttggcctacctgacggcgctctggaagcctgcatccgggacctgcccggtcttgtaagccgctgtccgaagcgtaagccctctggatccatgcgaagggtgtacgcccctagagatccgctccacgatatccagcagagaatcctccataagctcctgcggccaatcgagcactctagcgagcttcatggaagcgtggtcgggagaaaccctaagacgaacgtcaccccacacgtaggcgctttcgtgtcaatcagtatggatattaccgacttctatccatccataagcaaggctagggtgaaccgcatctggatagatctgggatactctagacgagtcgcacaagcgctgacgcaccttaccacttttgatcaacacctagcccagggcttcccacccagttccgacattgccaacattgttctggagcaagatctgcttccacgtctgcgccccctgtgctcgcagcatcacttaacattaactatgtaccaggacgatttgactatcagtggtggggcccgcttgaggagtttgggaaatttaatacaacggatcttgctgcagtccgggtatcctgtgaatgtggacaaaacacggattagcaaccctggtcagcgccacatgtcaactggcctcgtctacaacacaaagccgaacattcctaaagagaggtacagagctctccggggggaactgcacaggtgtctgaccaatggcgttattaccgaagccgtcgacagacccatctggcagtataaacatcatctcgcatctcgaatcgagcatgttcggtatcacaatccctccagggcaaataatctccagattgtgtttgaccgtatagactgggggatttga

SEQ ID NO: 11209 - RNA, 990 nt, synthetic construct
  source 1..990: mol_type = other RNA
atgaagtgtacgaaaataataatcaaccagaccaacaaagaggaaggcattctgcggattaacacaatcgatgagttagctgagaggctgggacactcaccgggagaactcaagcgtatagccaataccaagatccgatactacaaggttaacgaaaaaatcaaaccttccgggaaactgaggactctttacgaacccatgggccctctcagtaagattctaaagctaatcaaggagcgtttgcttgacgggatagagctgcccgaatgcatgcacggctatagaacgggacgggattatatcagcaacgcttgtgtacacgtcggaaaaaacattatctgcaagctcgacattaaaaatttctttcccagcatccatcatggcagagttttcaatatcctgatggatctcggatgctccaaacaggtggccaaacttttgaccagactggtaacatgcgacaaccataccccacaaggctttaatacttcacccacactgagcaatatcgtggtgtctaatctggccaggcgcttgcaggggctctgtaatcactatcgcctgacattaaccatctactctgatgacattaccatatccggcaatatagaacagaaaaagttcgagggcctgttctataaggagcttctcccaattatcgaggagattatcaagcaggagggtttttcgcttaactttggtaagattaagctggtcaagagacgggatagccaaaaggtcactgggatcattgtgaataagaaacctaacattccaaagcaaaagcggcgggaattgctctcaactatcaaagagtaccagatgaacggggtgagtatttcacacgacagcgacctgttaaaagtgaaacagtccctgcgcggtaagatcgcgaacgcacagcgagtgaaccgcagtttcggtcagctgttgctgagggagttcgaaaaaattgattggtccaggagagttagcttttcttctaattga

SEQ ID NO: 11210 - RNA, 1536 nt, synthetic construct
  source 1..1536: mol_type = other RNA
atgttgaagaatacccttaatatacagtcaatcgaagagctcgctgaaaaattggacgagtcacccgagtatttcaaatcaatttccaagcggattccgaagctgtactactcgcctacaaaacgcaagaaacccaaaggaggggtccggaaaacgaacgagcctataaacaaattgaagtctcttcagtccaaaattctgcgaaacatacttgaatccgtgcctctgaatagctgcatacatggttataggaagaaccattcgccactaactaatgcaaagccacacgtcggcaaaaagtttctcctgaagcttgatatcaaagacttctttcccagtatccactataaacgagtggagaaactgttcagcgatctaggttgttctctggaagtgtctcgcatgttaacgcagctgaccacattccaacattacttgcctcagggtgcgccaacttctccctacatctccaatttaatcccagccaacgttgacaagcagttacaaaagatttgccgccgtaacaatctccctccgcacaagagatatggcgatgacattaccatctccggcaataagaatttcagtaaactgattcccgagatcgagaacacaattaagcagaacggcttcaaaataagcaagaaagagtttctgacccccaaagacaggaaggtggtgaccggcttgattgtgaacacaaaggtcaatgtgcccaaggaaaaggtgagaaaggtatgtgccatcattcacaactgtattaaatatggcccagattcccagaaccgggaagggaaacccaatttcaaggatagtctcagggggcacgttgaatatatcagaagcattaatcctccactgggagataagctcatgcaggagttcaacaaaatcgaatggaatagcccggagaaaatcaccatctctagtgtttctatagagaataatgaggtcgtcgagatctttgtagacggcgctaccagtccaaaccctggacccagcgctattgggtggattgcctttcgtaaggaaaataagctagaagagtacttcgagtatatcgggtgcacaactaacaatatcgccgaatacactgccgttatcagggcactggaagccgcgcagtccaaatggccacaagagaaaatcatcattaggtctgactccgagctggtggtaaaccaagtgaatggaagttggaacattaaccagcagtacctggctgacctgtgtaagcaggtgaagaagtcaggaaaggataccgagtggcaactgctctgggtcagcagaaaggaaaacctggcacataaactgtcaatgcgcggtctttacgaagagaagataaaagcacgggccagcgggcttgctgtgagaaagtcaagccctggaatttacaaagttgagtccgcaagcgggcatggcatgtacgacgtcacactcgcccctgattcttgcacttgcctcttttttcagaaacggaagtgtgtgtgcaagcacatctttgctgcccgaatcgccggcaaggcggacaactga

SEQ ID NO: 11211 - RNA, 984 nt, synthetic construct
  source 1..984: mol_type = other RNA
atggacgggaaaatatcagagtttgccggatctgcactatattctttgacgtataagatcggttacaatgaggaaaagctaaggtatatcctgagccattttcgagagcagtactacaaacgcaaagaactggacaaaaaaggaaagaaacggattatctcttccccatcaaagaacctgctgaagctccagaggttgattcttgcctacattagcaagaagaccctgtttcctgaaaccttccatggttacaaaaagaagcgtagtaacctgactaacgctcggtgtcacctcaataagcgagttattactaagctggacataaaggacttcttcccatccgtacacttcaagaaagtgctggctttgtttgggtccctgggcttcaatgagcaagagagcaaaatactctctcggcttacaactgcggattattgtctcccgcacggctttagcacatcgcccaccctcgctgcattgatgctcattaatttggataagcgcctcaagactttatttatgaaaatcggcctggattacacctataccttcttcagcgatgatatcacaatctcaggcaacaaaggcattaaaactctgaagaagctgatatgcaaaattttcagacaggaggggtttatcgtcaacgagtcaaagatcaaggagcaaaatttctgggagaagcaggaagtgacaggaatttccgtgaacgaaaaactgaacgtcccttacgattaccgccacaatcttagggccatcgtgcataactgcattaccttagggccccgtacacagatcgacagatttaattccgagttttgcctagacaggaaacttgacttaagcctcagtaaatttagagaacggatcttcggcaaaatcaactatataaagcctattaaccgcgaactgtacaatcagctgctggcctatttcaacaagatcaactggagaacgaataatcccgtcagtgttcttgtgtga

SEQ ID NO: 11212 - RNA, 960 nt, synthetic construct
  source 1..960: mol_type = other RNA
atgtgcgcagtgaatgagcggaattatttcgatactccctctattcagagcgtggcagaaaagctgcgcctttcagcgaatgccttgcacgaggttttagacaaatttcacacacattaccggaaaaagtcagagacaaagagtggcaaaaccagaacgtatcactgccctttccccgtgctgagggatatccagaagcgaatcaacaaatatatcctgaaggccatccccttgccatcatccatgcatggctacgtagccaagaggtccattctcaccaacgctacagtgcatctgggcaagaagaacattgctaacgtagacattaaaagcttctttccaagtattcactaccagcgcgtgcagagaatcttcaggcaaatcggatttaacgagggagagacgctagtgctgacccgccttacaactgccgattgttgtgttcctcacggtttcccgacttcccctcgcctggctaacctcgtcctgataaatgccgacaagaggctcagagatcttttcggtcagcagaaaattaaccacaccttctattctgacgatataactatttctgggaacaaaaacctgcggcagctcttacagccgatccgcaccatcttccgacaggaaggctttcggatccataggaaggaatcgtctccccagaaaccttactttaaacgtcagaaaatcacaggactccttgtgaacaataagaggctgaatctgcccagagaggacatacggagcctcgaggccattattcacaactgtctagttaaggggccatccagtcaaatagctgaatttgaggcacatttcgggcctccaaagcgagaactgagcaccgtccaaaaatttaaagaacgggtcttgggcaaattgaataatgtgagacgtgtcaattgcgaccaatacaagaagctgaagaaggactttgacagaatcgattggaattga

SEQ ID NO: 11213 - RNA, 903 nt, synthetic construct
  source 1..903: mol_type = other RNA
atgtgcgaacaatccatcattactaatctgaagaccgttgaggacatcgcgtttacaattggcgtagatgagttccaattaagagagatatcacagaacattccactacactataaacagatctacatcaggaccagtcccactaaaattcggaaaatctctaaacctaacgagaaactcaaggccattcagaagctggtcaataaaaggatcctccagcggatccccttacctgactcagtgcattctcggaagaagcgcagtatactgacaaacgcagaacagcatgtgggcaaagaagtgatcgttagcctggatataaaggacttctttcccagcattagttctttgcgtgtcaaccaacttttcaaaaagattggctacaactccgaagccagcgcagtgctgacgagactcaccaccctggacggatgtctccctcagggtgcccccacatccccatctatcgctaatctaatcattactgacatggataaacgctttgaaactctttgcgccgagcaagagtttacctatacgaggtacacagatgacattaccatctccggggatcagtatgtgcgaaagttcttgccgctcttttgcaagatagtacgccagagcgggtttttggtgaacgaaaagatcaaggtcgagccaaggagtcgtcggcaggagacaactggaatagtcgtgaacgttagaccaaatattccgaaagagaaacacagaaagatatcagctattatccatcgatgtaagaccttcgggccctcgagcgtgacaaatgaagatctgagcaagttccgcgagagactgctgggtcacatctcatacatgtcccacattaatcctaccctgggaaggcggcttctgaacgacttcaatcacatcgcttggtga

SEQ ID NO: 11214 - RNA, 912 nt, synthetic construct
  source 1..912: mol_type = other RNA
atgtctctagtcgtgatcgggagtgactttcactccccagaggaactcgtggagttcctgggattagattatagcgagattcaacatatcctgcaaacactcagctatcagtatagaccactccttatccctaaggcagaagatgagtggaggaagctcttggctcccaaacgggagttaaaacatacgcagagggtggttttggacatgcttctagacgatgtccccttccccgattccatccatggttacaggaagggacggagcatcctgacaaatgctgagccgcacatacaacaggagttggtcatcaatattgacatcgagaatttctttccatctgtacacccggaacgagttaagcgaaacttcttgatgcttggctaccgtgatcccgtggccaagtttctagtcagattatgtaccttcaaccatcagttgccacaaggtgctccaacctcacctgcacttgcgaatctggccatctccagaaccatgctggccctcgagaagttttgcaagaaaagagggattaacttcactggctacagtgacgatctgaccttttccgggccccaggccatcgagaaacacattgaaacactcatgagcattattagggagaacggctttcgggtcaacaaaaacgaaattaagatacagccttcttcacagctccaggaagtgacaggactggtggtgaatgacaaagttaatctgaacaagtcgctgaagaaaaaagtgcgcgccatgctgcatactgcacggaccaatggacctgaatcactgcaccgcgacaataagccttatcgcaaagatcagctgctcggcctgatacttcacactaaaaacgtagaccagaagctgggcgaaaagcacctgaaggaattctacgagatagactgggagtga

SEQ ID NO: 11215 - RNA, 918 nt, synthetic construct
  source 1..918: mol_type = other RNA
atgaagaagattatcacacacaaaaacctgtgtaaagacatcaaaaccaccgatgacttttgtagaatactctcactggagaagtctttcgtacagaaacacatccgcctgtgccctcttctttatgtcgagatacctcttaagaagaaagacgggactccccgacctataagggcgccaaaagataagctgaagatcatccaacgcgccatcttgaagaacatcctctccgatattaaactccccccatgctgctacggattctcgaaaaacaagtcaatcattgagaacgcaaaggttcattcaaaaaacgatttcctactgaacctggatatccaggacttctttcccagtgtgcattataaaaaggtgcagcagatttttctggacgtggggctgaacgaccagattgccggaattctgtgttctctcactacttatgaatatcggcttcctcagggggctccgaccagtccatttttagcctccttcgctttgagcaatttagactatagactgatgcagctagcaaaatccaattacttgacatacacccggtactttgatgacatatccttcagcggtaataagagggtggttgtgttggaaaaggatattatgcggatcattaaagaaggcggatacgttgtgaagatcaaaaagaggaaactgtttaccaagaaggaggtcaaggaggtcaatggcattctgatcacagacaaaaagctttctttaaagaacacggacgagctcttcaactacgtgagtgacattaataaatacggtctgtctaagctccaaactgataatcccgagaaagaacgtcagagcattaagggcaagattgcctttctcaaacaaatcgatgagacagtaacgcacagcatagaaaccatcttcaataagatcaattggtga

SEQ ID NO: 11216 - RNA, 915 nt, synthetic construct
  source 1..915: mol_type = other RNA
atgatcataaggaatctgtcaaaacgagtggaaaccattgacgatttctgtcacctcatcctgctggacaaactatatcttcaaaaactggtcagactgtgccccctccactacattgaaatcccattcaagaagaaggatggaacaccgcgccccattagggcacccaaagaaaagctgaaaattatccaaagagtgatcctagataacttgctcagctgcattaaattgccaccctgttgttacggtttttctaaaggcaagagtattatcgagaacgcgaaagcccacctgaggggtgattatctcctcaatttagacataaaggactttttcccatctgtgcattacaccaaggttgagaagattttccttgggatggggctggatcgtgattttactaatattctgtgcaacttgaccacacatgagtataaactgcctcagggggcccctacctcaccaaaacttgcctcagtggtactgcacaatttggactaccgcctgttaaagttggctcagagtaaccatcttacctatacgaggtactttgatgatatcagcttctccggaaacaagcggattatcactttagaaaaggacatcctgcggatcatccgcgaggagggatatagcgtgcacacatccaaggacaagaaaaaactcttcgcaaagaacgagactaaggagataaacggcattcttctgaaggacaaaaagctgtctctcaagaatatcgacgaattgtttagctacgtcgaaaacatcaatcggcatggcctgtccagactcataacagataatcctgagaaagagcggcagagtatcgctggcaaaatatcgtttcttcgacagattgaccctgaaagatcccacaagctcaaggttctgtacgacttcatcgagtggctatga

SEQ ID NO: 11217 - RNA, 1011 nt, synthetic construct
  source 1..1011: mol_type = other RNA
atggaccaggaaatcgattttgactcacacgaggacctgcctgtgttacccccacactcatcccccttctgttggcgatgcttcgtttttatgaagaagattctccagatccagaaatctaagtctagcatagacacgcgcgaaaaactgatatcatttctaggactcaagaaagagaaatttgaggagtgtttcaaagtgatccctttactctacgaactgactccaatcttgaaaaagaataacgccggttaccggaagctgtctatcccaaaacaagagctcagagatattcaacggtgcgtgctggataagatttttacagacattaaactgcccagctgtgtatatgggttcagtagtgggaagtctatagtggagaacgccaagtatcacagtaaaaacgactacctgctcaatctcgatattaaagattttttcccgagcgtgcattttgaaagagttcgacagatattcaaagacctggggtttaatgatagtgtcagcgagatcctatgcattctgacaacctacaaccatgaactgcctcagggagccccaaccagtccccttctcgcttcccttgctctgaacaacttggacaagaggctgatgaagctggcttcacttaaccatatcctttattcccgctacttcgacgatatttctttcagcggctctaaaaggatcctggacatcgaggaaacaatcaagcagataatccgtagcgaaaattacagaatcaacagcaaacggtatctgtacggcaagggtgaagcaaaagagatcaatggcatctccatttcctccgggaagctgttcctcaagaataccgacgacctcatgggctatttggaagatcttaaaaatttcggagtcagcaagttaaggtcagataaccctgagaaggagcgcaagtccttgattggcaagatttcgtttctaaaggaagtcgatattgagaagggagtggaggcgaaaaatttgctggagactatcaagtggctttga

SEQ ID NO: 11218 - RNA, 924 nt, synthetic construct
  source 1..924: mol_type = other RNA
atgaagaagatctatccgcaaactttctcgagattcaaagacctgcggattgagttgctacccaacctgttcggagtgcgagacatggaattttacagggttagttccaacgcccacttcttatatcgccccatagagatcaaaaagaagtctggaggagtgaggcaaatctatgctccaagcggtcgcctcaagtttctccagcggcggatccttagtaaactcttagaaaaagtcaggttacctcctttcgtctttggaggagtgaagggcaaaagcatcattaataacgcgtcctgtcatcttgggtccaagtacctgctgaatctcgatattgagaatttctttccctccgtaaattggcagttggtccgaaaactcttcattgacctgggctgcgactcatctgtggcagatgtgttgactagatttacgacactcgattataggcttccacagggggcccctacttctccatacatactgaacctggtattgtccaacctagaccgtcggtttttcctactggcttgcagcaatcgcctcacatacagtcgttacttcgatgacattacaatcagtgggggtaaaagactgatcggcttggaggagtccttcctcgaaatcctgcgccaggaggggtttaccattaacctgaagaagaagtatctgtacggacccagcgaagacaaaaaggtgaccggccttgtcctgaagagcgggggcagaatggagctggtttctatgtcaggcctcctgaaatacttaaatgaactgataaccgaagggctctcaaatcttgatggcattaatttggagaaggaaaaacagacccttctgggcaaaatagagtttgttaagagcatcgacaaggtggatggtcagaacctgaacacactgtttaacaagatcaaatgggtgtga

SEQ ID NO: 11219 - RNA, 1140 nt, synthetic construct
  source 1..1140: mol_type = other RNA
atgactcatggcttcagtaacacagaggtcgtgatgataaagacacctgatatccctgaagatatgccgttcctcattgacgactgtacattagccttcttcttgggctttaatacacgtatcctttggtacgctatcacccgcaaggacgaactatacaccagactgacaattcccaagaagagcggggggtcacgcgtcatacatgccccagacaaagttatgaaactgttcggaaagagaattttggagcggctattaaatccccttcaaaaacagcttggggatcacgtaactgcatacagggagggccgatcgacacagatggctgtggaacagcacgtacctgaatgtccgatttgtgatactgcaccaccagggaccgagcatgattgcccccacagagggacctactttaacctggacctgaagaacttctttccatctacccgaagggtctggattaggcagtattttaagcaggtgattggatatagtcattatgttagcgacctgctggcgagtctcgtgacggtttacgcattcactgactccagcggttatcagtttagcggtgttcctcagggaaaccccgcctctggggccatctgcaatctcgtggcagattggatgctggacactcccatgctcgcgctgatagatgatctgaataaggagcagggactggagggcgaatacgcctggaagtataccagatatgctgacgatctggcgtttacgtgcggtaaaaggttctcctactacaaacgcatggccatcttgaataagttgatgaacgtgtgtacccggtcaggctacgccgtgaaccacactaagacccgaatctgggacggcagacaccggaaggcattactgggcgccgtgttcaatacacacactaacatccctagggaccagtatatttccgtccgctccctgacctataattgctggaaacatggttttgagtcccaatgctctcgggctggcaaggacagcgaagaagagctccggtggtggctccttggacgtatcaactacatggagcagatccactctggaaaaggccaacaactcaaatcagtctataacgccgctgtgcagaagtacgataaaaataaaacgcacccaaccgcttga

SEQ ID NO: 11220 - RNA, 1158 nt, synthetic construct
  source 1..1158: mol_type = other RNA
atgacctacggctttacagaatcaaccttcgagacaattacagttccggatacagaattcttattgctggatgactgcactttggcatttttcatcggttttcggaacaaaaccatgtggcatctgctccagaataagtcagaccagtacaaagtgtttcacatacccaagtcaaatggtaagaaacggattatccacgccccctcccctctgatgaaggtgtttctgcatagacttcacgctcgcctcctgctgccgttacaggagcaattgggcgatcatgtgacggcatataggcctagcaggtccatcgtcgatgccgtgagccgccatatccctgcttgtgacatctgtgatactgctcccaagggacagactccacaacagcatacctgcccaaaacagggcgtctatatcaagatggatctaaagaacttcttcccctccacccgacgagcgtggattcgccactactttcaaagtatagggtattcttttcacgttagcggactactggctaacctcatgacagtgcctattaaaaattcgaaagggatcgacgacgataagtatcggggtaccccccggcagcagttcttccatggaacaccacagggcgctcctaccagtggcgccatctgcaatcttgtggccaaccacagattcgaccaacggattcttgagtactttaacgacagaaataagagggaggggctggaaagtccatgggactggagatacagcaggtacgccgatgacctcactataacctgtggacaagatatacctgcagcagagaaaaaagagattgcgaaggacgtgacgcagatcgtagaatcttctggctataagataaatagagccaaaactcgcattgcgtccgccttctaccgccgtaagatgctgggtattgtcatgaaccagaagccaaacattgagtacaatgaatatctgcgaatcagggccattgtacacaattgcatggtttctgggatcgaaacgcagcatgagagagcagggatgactacacccgaagagctcctccagtatcttaggggcaaggtcagcttcatccgtcaggtgcactccgataagggagacaaactgaaagctgagttggatgtcgccatcgacaactggaaagcccacgacaagtga

SEQ ID NO: 11221 - RNA, 1041 nt, synthetic construct
  source 1..1041: mol_type = other RNA
atgccctcttatagagagacacgcgtcgatattgtagaattcccgttagaagttccatacgaactgccccacgccattgacgacatgagtcttgctttccatctgggtatcagaaactcgacgatgtggtggatgatccacgacaagaaaaagatgtataaggtgttcaagctgcctaaacgaggaagacctggccgttatagaaacatacagaacccaatcgatgtgttgaagaacgtgcagaagaacatactcagcaggttcctctctgccgtgccagtcatggcacatatcggcgcctatgtccccggtagatcctgtagggacaccgcggcccaacatgtggggaaaggggtgatcgtctcccttgacattcaggacttctttccaagtatgcgcaggtctatggtgaaacagtgcctccacagaaagattggttacgggtacagggtcgcttcactacttgccgagctaatgacctacacaaattttgtaccgcagggggctcctacctcaggactgatcgctaatctggtggcacatgacaggtttgataggcagatcttgcgtgatctcaaggagctcgatccccagtggacatacacccggtactccgatgacatagacctgtctcacccagaagttcaggagcccgaccggttgactgcaatcattgcacttgtgcgggatgccgttgagagtgctggcttcaaactgaatcaacgcaagactaaagtggagcctcattggaagagacaaaaagtgctcggaatggtggtcaatgaacgcgttaacattcctcggtacgagtatatgcgaactaggtccatcatacacaattgcttagtggatggcttcgataaccaatttgaacgagcaggaatgaatagcgctagcggcctgaaatcacacctgcgcggcaaattggcctttttccgccaggtcgatcccattaaggcccagcggctgaaggatcagtttgacctggcctgtcagatgcacgcggatgttcaagacaatgaggtacggtttgacagctga

SEQ ID NO: 11222 - RNA, 1038 nt, synthetic construct
  source 1..1038: mol_type = other RNA
atgtcctcctataaagagacggagttgtcatacatagacctgccaagtgactcttgtctccagacaacctggccctggctgctggacgactttgccctggccctgcagctaggcatcagatgtaaaaccctgtggttctgcattaccacaaaagataagcagtacaagcgcttcaccataccgaaaagaacggggggaagacggcctattcacgcgcctgaacccgtgatcaagtggatccagcagcagattcatgagcgcatcctcaagccctttcctatcttagactgcgtaggggcctatgtcgaaggaaagcggtgtgcagactctgctcaagtgcatgtcggcgctggcgtgaggattggaatggacttaaaagattttttcccatcacacggtagggcacggatcaggaatttcttcaagaggcattatgggtacaaccaccaggtggcatctctgctcgccgatctgtgcactgttagagaaggtgctcaccactatgctcctcaagggtcccccgccagtccaatgttgtgtaatatgatggcccaggagactcttgatcgagagattatgcgagtgctcggcccacacggatgggcttatacaaggtactctgatgatttgtcattgagccacaaagatgacttaccttcgaaggaggtgaatcaagccataaaacaagttactaagatcagcaaggaaagcggttaccgtattaacctcaagaagactaaggtgcagcgaagatggcggcggcaacagatgctaggcatcgtcaccaatgagaaacttaacatttcacgccctctgtatcgtcagtaccgcgcaatccttcacaactgcctgcatcagggcgtcgaagtaaacgctcttcgctttggttgggaccccccagaaagcttcatctcccatctcgagggaaagatttcctactttgcgagcataagtgagacaaggggcgggaaactgaaaacaatgctgcatgaggttaagagagcactggaagaggaaaatgcccagacccacccgtga

SEQ ID NO: 11223 - RNA, 1119 nt, synthetic construct
  source 1..1119: mol_type = other RNA
atggaactcaatcaattgcagcagcagttgtcttcacaaaacccagtttacccccagctaagtttataccccgtggcctcccccctgtttaccatacagactaaccgccagttggccctcaagctgaagatgaagtttgcaaatcggctcacatacgtgggaatgaacaaactgaatcactactcgaccctttccataagaaaacgtggagcggcaggcaagtaccgaactctgtataacccagatcagcctatgcgcctgattcagttcaaaatcctgaaggaaatcttggaacaggtgcaggttccagactatctttatgcctttgagaagggccggtcaattcccgctatggcacaaaaacacgtaggtaaaaaagtcattgtgagcgtggatctcaaggattatttccaatcaatcaagcagtaccatctgaaccaggtgttcaaacatctcgggttcggggagaaacctgctctattactgagcgagctctgcacttataaatccttcgtgcctcaaggagcccttacttctccaaagctgtctaatattatcaccacatataccttcggacctttaatcaaggaatactgtgaagaaaggggctatacgctgactatttacgcggacgacatcacaatctcatctgactctttgatagatgacatgggcagcgacaccgtacatagtcttataagttacctgaaagagacagtgggccggtttgggtttagggttaacagcgagaagaccaaagtcatgaagtattaccagagacagtacgtgtgtggtgccgtggtcaactcgaaggtcaatctccaaaaatccgagcgcaatacactgagagccattattcacaactgcgagatcaatggaattgaggccgaagccagcaagacccagatcaccgaagatgagtttattagtgctatgaacggtagactgaactggttcaaccagcttaacccgcaggctgggagccacttcatcaaccagtttaaggagatctatgggcgatccacggcaaatgtcaggaattcccaggatgttagggtagaggaactggtcagccaaggcgttaataatgtggaggtgcagcaggctcaaacagcatga

SEQ ID NO: 11224 - RNA, 1266 nt, synthetic construct
  source 1..1266: mol_type = other RNA
atgattaagaaaattatagagcggttcctatctatctttaaacgcgagggaactactagcgagaaggagctgcccgagactgagcacaaaccagaattacacactaatctccctagcattaatccgattaaaacctcccataagtcctctgtaacccagaatctgcttaaggaaagactgaaggaagataatatcctgctgctgggtcacctggtgtcaaaagacgaagggaagagcaatcttaagatacctggtattcccaattttaacacaatctcagatgtgttggaatacttcgagaaggagtacaaaataaagaaaagtaagctcgcaaacttcgccagcttttctagtaagactaatcagttctacatcgagcggaagattcttcagaaatcctccaaaattggaaacaaagcgaggtatatttacattccgaaaccatttgtcaagtttgtccaaaaagtcatccttaaggacatactggagaaggtagagactcccccacagttagttggcttcaccaagaacaaatccatcaaagacgccgtggtgtcacatgttaaaaaggacgtggtgctcattttggacattgaaaagttctttcagaacaccaccgccaagaaggtgttcaatatcttcaagaatatcggctattccagggaggttagtctgtttctgacagctctgacaacaacgaaagtaaaggtggaaaacaaaaaggggtttaaaggcaaacgggccctacccacaggatcgcctaccagcccatatttaagcaagttggctttgattgactttgttgcagagctgaacgaactgatcaagaagtggcaaaatatgccgatcaaagatgtcgatttttctgtgtacgccgataacatcatcataagcttcaacaccgagaacaaagaaaagcgcaaggagatttctaaggggatcatagagaatcttcaggaactcctcaaaaaacacggctataagttgaacaaggaaaaaaccaagatcctcacgaagaagaagaaggtgctgggactcgtcatcaatgaaaagatcaacatcgacagaaactattacagaaaattgcgagctgagattcataatctctggaagaataagcagcgttttggcgaatcatccttccagatcgatgagaagctgatccaaaaaatcagggggaaactgaactatcttaaactgattaaccccagtaaatacaactcgctcttcataaaatactctacacacctggaagagctattctga

SEQ ID NO: 11225 - RNA, 1170 nt, synthetic construct
  source 1..1170: mol_type = other RNA
atgctgaagaacattttcaactacatcaagaagatccttaagctggaaaataagaacaaaaccaagagcgtgtatctgagcggcctgaagatcaagacaactgataatctgaaaactaaccctctggagtactttaaatcggaggaaagaaagctgttagaggtcaatagtagtattaacccggatattccatattttccgtcaatcaaggaaatcctgaaatatttcaacgacaactacaaggtgttaccaaagatgcttataaactttgccttgttcaacacaaagacgtcagatttttacattgagaaacggatcataacgaaaaataaggagaggtacatttacattcccaaaaacttcacaaagaagattcagaagatcataaagaaggatatcctcgataaactgacctttcccgaagagatttgcggttacattaaaaacaagaacatcaaactcgccgtggaaaaacacgttaaaaaagacatcctcattctgatcgacattaaaaatttcttccccggcattgggaggataaaagttcgcaaggcttttgaaaacttgggttatccttccgacgtggccgcttttctcaccgccctcactaccacaaagatcaagtaccaagaagacaacaaaattaagacaaagtgtgctctgccaataggctcacctacttcccctaccatagcgaatctaatcatcacaaacatcaataaccagatcaagaactacttcaaaacccttcagaacgataataacatcagctctattgaccacactatctatgcagacaacattatcatttccttcaataccagcctaaaaggacaggacctcaaaaatatcaccaacaagatcatcattgagctcaagaagattatagcaaagaacaaactgaagatcaacgatagtaaaatccgtgtactgaaaaaacggaaaattgtcctcggactgtccataaatcagaagatcaacatcaacaagaagtactacaaaaaccttcgagccgagatacataatctgagcttcaataagaacaagctgactaaagagaagatagagacgttgaaagggaaattgtcttacttgaactttatcaaccccaacaaatacaacaacctttacaagaagtaccatacacgcttatctgaaattttccaatga

SEQ ID NO: 11226 - RNA, 3057 nt, synthetic construct
  source 1..3057: mol_type = other RNA
atgaatagcatcaattattccaccaagtataagtttgtcgacgacaatttgttcctgattgcaaaaattaaccccaagaccaaaaaacagtgtctcgtatttcagcagattgacaaggaatctagaaatgtaatcttctcccgtcagctgacttgcattcacaccgctgtcacccgcatatctattgctgactacgagtcaatgataaacgatgactctgagaggaagaagttcaacaacaacttgctcaacatcataagtaccgagaatctggagccaatcgatttggaactcgacgaaaaatattttgccttcaagtcatgggttcagggcatcgccgaaagcggtctaagtgcgatattgattcaagacgagatcgagagaatggccctcatcaacaaccccatttctattttcctgtcttcatgtctcataaaggctgagcctgattttattgatgattacctggcactaatcaagcagagctgtaagaataaagatatctggaacaaagggaatgagaatagggacaattggcaccgctctagcttaattgctagcgtggatcgaatcattacgattatcaaagaactcgacgaaactgagttacttgtagagacagtctacaagctcattaagttctatatcactgagtccctgcccacatgcgtgataaactttatcctggaaaaattcgacttcaatatcctgggagacttgctggcagaactggaatacgactggatagtgaagatctacaacgattctcagttagaggagagaaacagagacttaattttttcgttccgaattgaaaccgattccgaatttgtcaatgattacctggaggtgatcaagaaagaagcgaatatcaaaatcaagagagataactcgggcaaagaggatgatcgcggtgagaatccctccctgaaaaagaaggtgaagaaaatcatctacgtgattaatcacatcaagaaggagcaatcccggcgcgaactgagctacaagttttttaagctttacttcacagagtcacttccacttcaggtgatgatcctgatcttcgagaacataaactcctatactctgtcaaacattctcgataacctcgaaaatgattggatcaagaagattctcaacgattacatccaaagcattaagattaagtgcaagaacaactatgagcaaagggagtcagacaagatctatgaaagctggaataagcagtcactgaggtactctatctcaattatcctaactttcatcgaacgtatggaaaatcctaaaaagagatccgaggtgttgtacagcgtttttaaattctacttcaccgagtgcttgccggtctatgtgctgaactatatcttcaagaccgtgaagaagaaatttctccgtgaggtgcttagtgacctggagagaaattgggtgattacagcatacaatacccctgatctgaagaaagaacacaagttcctgatcttcagctttttaattgccaccgactccgaatttctgaatgactacctcaaggtgataaagctgtgcaattcggggaaagaccataatcgggaaaatgtttccagtttgaaaaagagcgttaagaagttcattcgggtcatcaatgatatcgagaactataggatcaagaaaaaactgttgtacaagctgcttgatctgtatttcactgaatcattgccaagttatatcctccggctgatatttgacacaatgaacaaaaagaaccactccaatatcctggacctcatgcaaaacatgcctaataactggatcgtggccatccacaacatcgaagatttctataacaagaagtgcctgtttaatcagttttgtagaaaacacgacctgtctgacttactgttcatacaggattacagcatatggaactccaccatgtctcacagatggagggtttttgacgtccttaaacatatcgatcgggaggagatcaataaaaaagcccgcaagaataacattgacagtttctttattcggaactgcataactaaggtcaaaagcaagaaaaataccattgaagagcttgtcaaacataaaactaaggttcctaagatcggaagcatttatgaattctgcgtgctcgccaactacaatccaaaaaaacttaaacgatggctcgcaccccagatttccctgcataaatcctacatcgaaaaaaaaatccccaagagaaaaggagggtataggacgttgcacattccttatcccaaacttaaacgaattcaggtgtggattaaggaggaaatcctggacaaactccccgccctgcagtgtgctaccggcttcatcaagaataaatcaacgaagaacaacgccaaaccgcattgtcaaaagaaactgatcatcaaaatggatctcatggacttctttcccagcatcaagttttggcagatttacaggatatttcgctctctgcggtatattcatgagataagtatcgtactgacatatctttgtacagtgccattagcgaagcatataacacacaagggcaaccagaaagagtactttctagagacaagttttaggttcctgcctcagggggccccaacaagtcctggtctgtctaatctcgtattgatagaagctgacaaggagttacagaatcttaccaagtctctaaatatgagctatacgcggtatgcagacgatctaactttttctgtgaacgacagcgagtttaaaattaggcccttcatccagaaggttttcaacattgtgcgcaagcatcacttctgggtgaacaaaaagaaaatcaagattcttaggccgtacatgcaacaacgcgtgactggactggtcgtgaataaagaagttcacattccacggtcctactatatgcgcatacgtgggatcctgcataagttggagaactacggcagtgagatgcctctcgaggaacgaaagacactaaaaaatatggtatccggcatgattgcctacatgcactcaattcagccacggaaagctgagaagatgattaactggtacaaccgaatcaaaataaacgtcagtaagtga

SEQ ID NO: 11227 - RNA, 1359 nt, synthetic construct
  source 1..1359: mol_type = other RNA
atgattgcgaaaaaaaaggtgaagaagtcaaagattgagaagctcccggtgcgcgtgaaaaaaatgctcaatatcggcctgtggtcttatgaagtgcaagtgcctgacgatcagacccttgagcggttacatcttctggaccgggatataatcaagaggaaaaaggatatccacattcccgagacagggaaaaaacagatctatcgacaggccgaaaaacagtatgataaacattcgagcaagaaaagaagcgagagaaaaaagttggccccaatacggcaaatcaaaaaaaaagaggactgggaagagtttaagaaggtaaatttcgtccacctcggtacgagcgtttcgaattggctcaatctcagggtagagaacactgataagttaaataaggtcggtctgccatctattagcgattcccatcagctcgccaagttgctgggaattagcattgctcagataaagtactttgcgtatcaccgcaaaagtagtcaagtgaaccactatgtcgatttttacatccctaaaggcaaacgcggccgtcgactgatctccaggccgaagaaggagttggaaaatatccaaagcatcatcaaaaaggagatcctggacaagattagtttttccgacgccgttttcgggttcattcctggaaagtcccacataaataatgctcaggagcacgtgaaacgagacttcatcatcaacattgatatccaggacttcttcccatctaccaacttctataaggtcagatccatcttcaggaaccttggatactccggggaaatttcatctgtgctggctcttcttaccaccaaacaggacacacggtcaatcactattggcgaagatcagtaccataccttcactgaaaataggtacctgccccagggcgcatgtacttctcccaccctgtctaacctggcactggtgaaggtagataaccaactaattaagcgtagtattgagctggggtacaagtactccagatacgtggacgacttgacctttagcatcaataagccaatctccaaaataaagacgctgctgtatatggtgaggaagacactcgaataccacggatatgaggccaacccccataagacaaagattctaggcaagaacaacagccagaacattactgggttagttattaattcaggagagtcaaacgtccctcggtattggagacggcgcctaagagctgcagttcatcagtttcagtacataaaagacgacgaaataaagagtatcgagctggtgcgtctgctcggttgcatcaattatttgaaaatcagccactctcgccttgcccagaactactttgaactggtcacaaaatactaccaatga

SEQ ID NO: 11228 - RNA, 1005 nt, synthetic construct
  source 1..1005: mol_type = other RNA
atgaagctcaacgattttaatgatgttagttgcgtcctgggggaggagctgaagatgcttacgtacctcaagaaactgaaaaacaggctgtacacatcttattacataaaaaagcgcaacggcaaacgggagattaatacttatctctacaagcgcagactgtctgacctcgaggatgacattcctcagctgcatggctatgaattagccaaactcagccgcgcatccgaaaagcttgaggagatccacaggaagatcgattccagaattctcgacgaaatagaattgcccgagtgcgtcaacggctttaaaaagggcgagagtattaaaaaggctgtgcagccgcacgtcggtaatgactatgtcgcctgtcttgacattcataacttcttccctagtgtaaaatcagattacgtgctggaagggctccagtcctgtgggatcggtgctgacgcagcttggctgatcgcccggctggtgtcatacaagggacatctgccacaaggcgcggtgacatcacccaaggctagcaatattgcgttcatgaaggtagacaagcagatcttagaattgtctagatcgaagggaattacctacactcggtacgccgatgacttggtttttagcgccaattttgaactcaaggacttcgttgaggaagctatccagctggtcaccaatgcaggctacaccattaacagccagaaaatcaaattctacggacccaaggagcctcactatatactggggatcatcgcaaatagcaaactgaacatgccaagggataaacgacggaacttggaagccgccatccacaattatgtggataagcaccttgtgcctgctggagtgaacgagatcaggtataagaaaacattactaggcaaggccgcatatatgctgtccataaacccaaatttggggcgtctacaaaaactagtgatgaaactgagagagttcgaccccaacggtattgagtttgaacgaatctaccttggagattga

SEQ ID NO: 11229 - RNA, 1032 nt, synthetic construct
  source 1..1032: mol_type = other RNA
atgaacgccgaagcagttgcattagagatccaggaaccgctgaagaagctcacctacctcgagaagataagaaataggctgtacgtcgagtattacatttcgaagcggtccgggggcaaaagagagatctgtgtgtacctgtgcgattccaaggaggctcaggctcgtctgaaaaataagcttcgcaccctgaaaaaaaacgatgctgagctggagaagcttgtgcgcgccgcccaggagcttaagacagtgcatcggaaactgaaagaattattggatcgcatacctctgccagactgcgtatttgggttcagaaaaaacgagagtattgttacttgtgccaggaaacacgtgggaaaaaagtatgtcatcagccttgacataaaggattttttcccatccgttacatctgacatggtgctccggcagttgaagcgagagggtttcgaagatactggggcatggctcatagctcggttagtcgccttcaaaggtgtcctgcctcagggtgccatcacaagcccagcggcctcaaacgtagctttcaaaccctatgacgagaagctgcagaaatacttcgaagaacgaggctttgtgtatacccgttacgctgacgacgtcaccgtgtctactgaccaggaagtcacagatgagatgatccaacaaatcgtggaagaaacgagtcaaattattgcaccctttaagtggaacgcgaaaaagattaaaatctacggacctaacgaaccacactacgtgttgggcctcattgtaaacgccaagcctaatgtgcccaagcagaagaggaggctcatcagggccatggtgcataattttgtgcgcaaacacgcattgccgcagggcgaggaccccattagatataagcgaaagctcatgggaaagctggcgtattgcctgtttgttaatccccatatcgaaagcctgctagagctatacgaagagcttagaaaattcgatcctaatcgggtcagcgagtggaagtctctgtatgtttcagaggaggagggcgaatga

SEQ ID NO: 11230 - RNA, 963 nt, synthetic construct
  source 1..963: mol_type = other RNA
atgcaaaaaatcggctacgccaatcgactcaatctgccaaggaaattgttgacctaccttgagaagatcagatcccggctgtacgctgattattatctgaggaagaaagatggatccaagcgcgagatagccgtctatgtttgtgacagtcgcatcgccagccagctggatgagaagcttgttgagtactctaaagtgttgaaactcgtgcatcggaggatcaaaaacctccttgacgaaacaattgacctgcctgattgcgtgttcggattcaaaaaaaactgctctacaaagatcgccgcatcaaaacacgtggggaagaagtacatcttctcagtggatataaaggactttttcccctccattactagcgatatggttcagcaagcgttgatgaatgagggggtggagcagaacgatgcttggctaattgcaagactggttgcctacaaaggacgcctgccccagggtgcaatcactagcccaacggtgtcgaacgtcgtgtttaaacctaaagacctgcagattctcaagctctgtgaacgttacggcctcacctatacacgttatgctgatgacttaacctttagtaccaacgacgaaattaattgggtggaattcactgacgaactggagaagatactgcagccagaataccggattaacactaagaagttaaagatctacgggcctaagcaggcccattatgtcctgggcctcattgtcaacagaaaggtgaatacccccaagtcttataggaggacgctgcgagcagctgtgtataactacttgaatggcaaagtgccctatggtgtcgaccctgtaaagtacaaagctacactaaaagccaagctgggctacgcgctttatatcaacgagataccgagccttcggcgcctgtacgagcaattaaagagatttgacccaaatgaggtaaagaattgggaacacatcgtcgtatga

SEQ ID NO: 11231 - RNA, 924 nt, synthetic construct
  source 1..924: mol_type = other RNA
atgaggttaataaagcagttggcgcaagaactcaacaagtcggaaatcgaggttagtcacttcctcctgaacgcgcctaaaaaatataaagtgtacaccatccccaagagaaccagcggccatcgcactattgctcagccctccagagaattaaaagagtatcagcgaaagtacctcgaactgcagcagcttcctattcacgatgtcgctatggcatatagacagggcgtgtccataaagcagaacgccatcgcacacaaaaataatccatatctcctcaagatggacttggagaatttctttaacagcatcagcaacattttgttttgggaagtatgggagtcaattcagccgctgccatccaaacaagacaagaaggttctcgaacaactgctgttttggtgtccctcaaagattaccggtggagccctgatcctttctatcggagcacctagttccccattagtgagtaacttcttcatgtacctattcgactgcgctctcagcgagaagtgcggagagaagaatattacttacactcggtacgccgatgacctgaccttctctacaaaaagtgagggggtgctttttgacattcccaagctggtagaggagctgctgcatgaaaagtttgggaatcatatcaagatcaatcggaagaagacaaaattctcatctaaagcccacaataggcacgtgacagggattacactgagcaacgatggaaaacttagccttggccgttctaggaagcgctacatcaaacacctggtccatcagatccaggtgggttgtctgtccgatgaggatatcttgcacctaaaaggcctgctagcctttgctgaacatatagagcctaccttcctccaagccctgaaaaagaagtattcagtcgagttgatcacgcagattataaaaggctga

SEQ ID NO: 11232 - RNA, 924 nt, synthetic construct
  source 1..924: mol_type = other RNA
atgggattaatcaaacagctggcccagaatctctgtaagagcgaagcagaggttgcacactttttgttgaatgccccaaaaatgtacaaggtatatacgattcccaaaaggacctccgggcatcggaccattgctcagccaagcaaagaactcaaggaatatcagaggaagtatctcgaactgcagcagttacccattcacgaagcggcgatggcttaccgagagggcatcggtattaagcaaaatgccatagcccacaaaaacaatccttacctgctgaagctggacctggagaatttcttcaactcaatcagtaacctgcttttctgggaagtgtggaaaagcattcaacccctccccagctccaaagatcagaaggccctggagcaactgttattttggtgcccgagcaagattacagggggccgtctggtgctatctattggtgctccatccagtcctctggtgtccaacttctttatgtaccagtttgactgtactatcagtgagatctgccgccataagaacatcgtgtacactcgctatgccgacgatttgactttttccaccaagattaagggcatcctgttcgatatgcctaacatagtaaaggaccacctatcactgcattttggcgacgcaatcaacatcaacaagaagaagacaaagttctcgtctaaagctcataatcggcacgtgacaggaataaccttgaataacgatgggaaactttctctcggaagggagagaaaaagatatatcaagcacttggtccatcaggttaaactgggctgcctcgagaatgaggataagcaacaccttgtcggactacttgccttcgtgaaacacattgaacctatgttcctcgagtcactgaaaaacaaatactctgtcgagcttatcacaaagatcatagaagggtga

SEQ ID NO: 11233 - RNA, 933 nt, synthetic construct
  source 1..933: mol_type = other RNA
atgagtctcatcaaacagttggcccagaagctgaataagtcagaaatcgaggtgtctcatttcctcctgaatgcaccgaaaaagtacaaggtttatacaattcccaagcggacatctggacacagaaccattgctcagccttcaaaggaacttaagaagtatcagagaaagtatcttgaactccagcaactgcccatccatgaggccgcgatggcatatcgcgaaggcattagcattaaacaaaatgctatcgcccataaaaacaacccttatctcttaaagctggacttagagaacttctttaatagcatcagcaattccctcttctggaaagtgtggaagagtatcaaaccactgccaccccgacaagatcagcgagcactagagcagctgctgttttggtgcccaagtaaaaccacgggcggttccttagtcttgagcataggggccccaagcagtcctctggtgtccaacttcttcatgtaccattttgatttcgatatctccgagatttgcagaaaaaaaggtatcacctacacaaggtacgccgatgacctgaccttttccacaaaaaacaaggagatactattcgagcttcctcagattgtcaaagaacacctggaggaacactttgagaactcgatcaagattaacaagaagaaaaccaggttctcttccaaggctcacaataggcacgtaactgggatcactctgaataatgatggcaagctctctttgggccggaaacgtaagcggtacattaaacaccttgtgcaccaggttcaaataggatgtttgagcgacgaagaccgcttgcatctgaaagggctgctggcttttgccaagcacatcgagcccatgtttctccagtcacttaagaagaaatactctgtggacctgattactcagataatcgaagactcaaacggatga

SEQ ID NO: 11234 - RNA, 924 nt, synthetic construct
  source 1..924: mol_type = other RNA
atgtcccttatcaagcaactcgcccagaagctcaataagtccgaagtcgaagtgtcaaggtttctgagcaatgctcccaagaaatacaaggtatacacaatccctaaacggacctccggccataggactatcgcccagccgtctaaagaactcaaagaatatcagcgcatatacctcgaagttcaacagtttccactgcataaggcagcaatggcctatagagaaggcatttcgataaaacagaatgctatggcccacaagagtaacccttatctgttaaagatggacctagagaacttctttaacagcatctcaaacaatcttttctggaatgtgtgggagaaaataaagcccctcccattgccacaggaacagctgattattgagaagttactgttctggtgcccttctaagactaccggtggaagcctgatcctgtccataggtgcaccttcaagtcccctgattagtaacttcatcatgtatcagttcgacaccgttataaaccagatgtgtgtcaacaagaatatcacatacacccggtacgctgatgacctgacattcagcaccaaaggcaaaggagagctgtttgacatccccaaagtcgtagaggaatacctgttcgagatctttgggaacgctatcaaaattaacaaaaagaagacggcgttcagttccaaagcccacaatagacatgtgacaggcattactttgaataataacggcaacgtgagcttggggcggcaaagaaaaaggtacatcaagcacctcgtgcatcaatttaagttgggatgcctttctgaggaggatcgcctgcacctgcgtgggctgttatctttttcaaagcacattgagccaatgttcctccagagccttaagaaaaagtattctgtggagctaatcgatcagattattcgaggatga

SEQ ID NO: 11235 - RNA, 933 nt, synthetic construct
  source 1..933: mol_type = other RNA
atgactctgatcgagcagctggctctggagctcaagaagtccgaagacgaagtggctcgattcctcctttctgcccctaagaggtacaaagtctatacaataccaaagcggacttcagggcaccgtgtcatcgcccagcccagtaaagaacttaaagagtatcagcggaagtacttggagcttcagcagttgcccatccatgattccgcaatggcttatagaaagggtatgtctattaagcagaatgcaatcgcccacaaaaataatccgtatctcctcaaactggatttggagaacttttttaactccataagcgacaaactattctggaaagtgtgggaatcgattctaccactgccaagcgaccaggacaagcaaactctggaaaacctcttgttttggtgtcctagcaagacaacgggaggcgccctcgtgctctcaatcggtgcacctagtagccccttagtcagtaacttcttcatgtaccaatttgattgcacactttctaaactgtgcgtggagaaagaaattatgtacacccgctacgcggacgatctgactttttctacaaagcataaagacagcctgttcaccctgcctgaactgatcaaggagaaattggctgttttatttggatcagctatcaggatcaataggaaaaagacccgcttctcaagtagggcgcacaacagacatgtaaccgggattaccattagcaatgatgggtccctgagcctaggacgggagagaaagcgctatattaagcacctggtttaccaagtgaagcttaataagctggacgccgaggatcggcaacatctgcgaggcctcattgccttcgcaaaacacgtagaacccgtgttcgtgcagtccttaaagagaaagtactctgccgagctgataacccagatcgttgaggagtccaacggctga

SEQ ID NO: 11236 - RNA, 933 nt, synthetic construct
  source 1..933: mol_type = other RNA
atgacactgattgaacagttggcgcttgagctgaaaaagagcgaagaggaagtaaataggttcctcctgtccgcaccaaaaaagtataaggtctacaccattcctaagagaacttccggccatagagttatagctcagccctcaaaggaattgaagatgtatcagcggaaattcctggaactgcagaatctcccaattcacagtagcgccatggcctaccgagagggcctgagcattaagcaaaacgctattgcccacaaaaataacccgtacttgctgaaactggacctggagaacttctttaattccattagtaacaagctcttctggaacgtgtgggagtccatccaacccttacccagcgagcaagacatgagaacactagagaaactcttgttttggtgtcctagtaagacgactggggggaccctcatcctatctattggagccccatcttctcctctgatcagtaactttttcatgtatcagttcgattgcatactctccggattatgttttgagaagggcatcgtgtacacacgctatgcagacgatctgactttttcgacaaagtacaagaacatcctcttcgatcttcccatcctgatcaaggagaaactgtcagatctttttggctcttcaatccgcatcaaccggaaaaaaaccaagttttcttcaaaagctcacaatagacatgtgaccgggatcaccataaataatgaaggttgcataagcattggtcgggagaggaaacgttacatcaagcacttaattcatcagagccagctgaatcgccttgacgccgatgacaggcagcacttgaggggcctgatagcctttgcaaagcatatcgaacctatgttcttccaatcccttaaacgaaagtattcggctgagatcattacccagatcgtcgaggaaagcaacggatga

SEQ ID NO: 11237 - RNA, 924 nt, synthetic construct
  source 1..924: mol_type = other RNA
atgtccttgatcaagcagctggccttttccctgaaaaagaacgaagatgaggttattaggtttcttctcaacgccccaaagaaatacaaggtgtatactatacccaagcgcactagtggccaccgggtaattgcccagccatctaaggagcttaaaatctaccagcgcgagtatctggagctccagcagttaccaattcacgatacagctatcgcttatagagaggggatctcaattaaagaaaatgccatcgcgcataaggataaccagtatctgcttaagctggacctggaaaattttttcaactccatctccaatcacctgttctgggagatttgggagtccatcattcctctgcctctgaaaagcgacaaacaaatcctcgataacttactgttctggtgtccctcaaagaaaaccggcggcaacctcgtgctgtcaattggtgcacctacatctccccttatcagtaacttcttcatgtacaagtttgacagcatcgtgtcaaaagcctgcttggaaaaaaatatcacctacacacggtatgctgacgacctaacgttcagcactaattacaaggatactctattcgaagtgcccttgtttattaagaaacaattgacagcactgttcggaaactcgattaggattaatcgaaagaagaccaagttcagtagcaaggcacataacaggcatattaccgggataaccattaacaatgacggaaaactctctttgggtcggaaacgtaagagatacataaaacacctgatccatcaattccagttaaatacgctggggaaagaggataagctccacctaaagggactcatgtcttttgctaaacacatcgagccgatctttatacagagccttgtcaaaaagtacagctttgaactgatcaccaagataatggaggaatga

SEQ ID NO: 11238 - RNA, 933 nt, synthetic construct
  source 1..933: mol_type = other RNA
atgacccttgtcgagcggctggcactggagcttaagaagagcgaaggggagatcacacattttctgcaatccgcgccaaagaggtataaagtgtacactattcctaagaggacaagcggacaccgagttatcgcccagcctagcaaggaattaaaagaataccagaggaaattcctcgagatacaacagttgcccattcacggctcagcaatggcgtaccgaaaagggatatccattaagcagaacgccattgctcataagaataacccctatctgctgaagctcgacttggaaaatttcttcaattccatcagtgacaagttgttttgggaagtatggggtgctatccttcctctgccgtcgaaccaggataagcagacacttgagaacctactgttctggtgcccatctaagatcaccggcggagcactcgtgttaagcattggagccccttcttctcccctgatatccaatttcttcatgtaccagtttgattgtgcactatcagagttttgcgccgaaaaaaagatcacctatacgcgttatgccgacgacctgaccttcagtactaagaataaagacaccctctttgttctgcccgagttcgtgaaagaaaaacttagtgaactctttggttcctcaattcgcattaacaggaaaaagacgaaatttagctctcgggctcataatagacacgtcactggcataactatcagtaacaatggcaatctcagcctcgggcgcgagagaaaaagatatatcaagcatttggtgcaccaggtcaagttatccaaactgaacagcgaggatcgccaacacctgcggggcctgatcgcttttgccaagtacattgagccagtgttcatcgagtctctgaagagaaaatactcagaggatttgattacacagatcatcgaggaaccaaacgattga

SEQ ID NO: 11239 - RNA, 933 nt, synthetic construct
  source 1..933: mol_type = other RNA
atgacgctgatcgaacggttggccttggaactgaaaaaatcagaagatgagatcacacactttctccaaagtgctcctaagcgctataaggtgtacaccatccctaaaagaactagcgggcatagggtcattgcgcaaccttctaaagagctcaaggagtatcagaggaaattcctggagatacagaatctgccaatccacgaaagcgccatggcttatcgcaagggggttagtatcaaacacaatgccatagcacacaagaacaatccttacctgctgaaaatggatcttgaaaacttcttcaactcaatcagcgacaagattttctggaagacatgggaatccatcctgcccttgccgagctcgcaggacaaaaagacattggagaatctgctgttttggtgcccctctaagaagaccgaaggagctctcgtcctatctattggagctccatcttcacccttagtgtccaatttcttcatgtaccagtttgattgcgccgtgagtaacttttgttccgagaaggagatcgtttatactagatacgcggatgacttaacgttctctaccaaacataaagacagtctttttttcgcaccatccatggtgaaggagaatttacgagagctttttggcggtactatccgaattaacaggaagaagactcggtttagctcccgtgcccacaatcggcatgtgaccggcatcaccattgcaaacaacggttctctgagcctggggagagagcgtaaaaggtacatcaagcacctcgtgcaccaggcccagctcaacaagctcgacattgagtcccgccagcatcttagaggactcatagcatttgccaagcatgtagaacccgtcttcctgaagtcgctgaaacggaaatacacatcagagctaataacccaaattattgaggaaagcaatggctga

SEQ ID NO: 11240 - RNA, 945 nt, synthetic construct
  source 1..945: mol_type = other RNA
atggagctagagatgactctcattgaacagttggcccttaaattgaaaaagagcgaagatcaagttgcccatttcctcctatccgcccctaaaaggtacaaagtttacaccatcccaaagagaacctcagggcacagggtgatcgctcagcccagcaaggagttgaaagaataccagcggaagtatctggaactgcagaaacttcctattcacgattctgctacagcatacagaaaggggaccggaattaagcaaaatgccttcgcccataagaacaatccctatctgctgaagctggacctggaaaacttctttaattccatcagcaacaaactgttttgggaggtgtgggagagcattctccccctaccaccagagcacgacaagcaggctttggagaggctcttattctggtgccccagtaagacgaccggaggtgcactcgtcctgagtattggcgcccctagttcaccactgatctctaatttcttcatgtaccagtttgactgtgccctgagtaagttatgcgttgagaaggagataatgtatacacgttatgctgacgatctgaccttttctacgaaacacaaggattcccttttcgcactccctgaactcgtgaaggagaagctggtggaacattttggctcagcaatacgaatcaaccgcaagaaaactagattttcgtctaaagcgcataaccgccacgtaactggcataacaatctctaacaatggtaatctctcattaggacgcgagcgaaaacggtacatcaagcatctggtccaccaggtgcagctgaacaaactggatgcggaagacagacaacacttgcgggggcttatcgcttttagcaagcacgtagaaccgctgttcgtgcaatccctgaaaaggaaatattccgccgagcttattacacagattgtcgaggaaagcaatgactga

SEQ ID NO: 11241 - RNA, 933 nt, synthetic construct
  source 1..933: mol_type = other RNA
atgacactcattagaaagctcgccctcgaactcgagaaatcagaagatgaagtggcaaattttttgctcaacgcaccaaagcgctacaaagtgtataccatacctaagaggacttccggacatcgggttatagctcagcccagtaaagagttaaaggagtatcagcgcaagtacctcggctttcagaaattgcctatccatgattccgcgctggcatatcggaaaggcattagtatcaagcaaaatgctctcgcccacaagaataacccctacctgcttaagctggaccttgagaactttttcaattccatttctgacaagttgttctggaaagtatgggcttcgttactgccacttccaagtagccaggatcggcaaacccttaaaaatctgttattctggtgtcctagcaagaaaacgggaggaccgctggtgttgtcaatcggagccccctctagccccctgatatctaacttctttatgtacaagttcgacagcatcatgtccaaattctgctcagagagggaaattgtgtacactcgatatgcggatgacctgacatttagcactaaacacaagggcagcctgtttcagctgcccgaggtggtcaaggagatgctatccgaactgttcggtggggcaataaggatcaaccggaaaaagacaaggtttagctccaaagcccacaatagacatgtcaccgggataaccatcaacaacaatggtgatattagtatcggccgtaagcagaagcgatatattaagtacctggtccaccaggttgaactaaatagagctgggagagaggacattgaacatcttcgcggcctgattgccttcgcctcacacatcgaacctatgttcatccaatctctgaagaagaaatacacaaccgagatcatttctaaaatcatcgaggggcagaacggttga

SEQ ID NO: 11242 - RNA, 933 nt, synthetic construct
  source 1..933: mol_type = other RNA
atgtccttagtgaaacagctaagcctgggtctgaatcggtctgaggaagaagtgtctagatttctgctcaacgctcccaaaaaatataaggtatacaccatcccaaagcgaacctcaggccacagggtaatcgcccagcctagcaaggagctgaagcggtaccagcgccagtatctggaaatccaaaagcttcctatccaccattcagccatggcctatagacaaggcataagcattaaggaaaacgccgcagcacaccagaagtccaggtatctcctgaagttagacttcgagaatttctttaactccatatcctctcacgtgttttggaaagtctgggagtcgatccacccccttcctagcgagctggaccgacagacattggaaaaattgctgttctggtgtccttctaagaagagcggagggccactagtcctgagtattggggctccctcgagtccgttggtgtccaacttctttatgtatcatttcgactgccacctgagtcagatttgcctagagaaagagattgtgtacaccagatacgcggatgatttgactttcagcaccaaccacaaagacattctctttgatctgccacttctggtgaaggagcagctcgtcacactctttggcggaactatcagaatcaaccgcaagaagacacgctttagttctaaggcacataatcgtcacgtgactggaatcacgatcaacaataatggtaaactctcactcgggcgggaaaggaaaaggtacataaaacatctggttcatcaggttaagctgaagaaatcagataaagaagaccgtcttcatcttcggggcctgctggctttcgctaagcacattgagccactcttcatgcaaagcttgattaagaaatactccgccgagctgatattaaaaatcgttgaagagcccaatgattga

SEQ ID NO: 11243 - RNA, 933 nt, synthetic construct
  source 1..933: mol_type = other RNA
atgaccgtagtggagcagctggcgctcgtcctcaaaaagtctccaacagacgtaacactttttttgaacaacgcacccaagaagtacaaagtctacaccatacctaaacggactagcgggcatagggtgattgcccaaccaagcaaggaattaaaaatctaccagcgcaagttcctggagttacaggaccttcccattcatgagtctgctatggcatatcgtaaggggctttcaattaagaataatgctaatgcccacaagaacaaccggtatctgctaaagctagacctggagaacttcttcaactcaatctcgagcgagctcttttggaaagtgtgggggtcaatcttgccccggccccctgaaaccgataaacgaacacttgaaaatctcctgttttggtgtccgtccaagacgaccggaggcaggctgatcctctccataggtgcccctagctccccactcgtgagcaacttttttatgtacaagtttgacggtgctgtccaagttctctgcgcagagagagaaattaaatataccagatacgctgatgatctgacattctccaccaatcaaaaaaatacgctgttcgaactgccgaggctgatcgagatccagttaatgactttgttcggcagtgaaatcagggtgaatcgcaagaagaccaaattttcttctacagcccataacagacatgttactggcattacaataagcaatgaccagaagctgagtctgggacgctctagaaagcgttatattaaacacctggtccaccagtatatcttgaacaaactggatcctgaacacactcagcaccttcgaggactgctatccttcgccaagcatgtggaaccatcattcctccacagtttggccaaaaaatacagtactgagctgattgtgaagatcgttgagtcccgggatgagtga

SEQ ID NO: 11244 - RNA, 933 nt, synthetic construct
  source 1..933: mol_type = other RNA
atgtctctgattgaaaaactcgcctcagctttgaaaaagagtgaggccgaggtgttaatctttcttaagaacgcaccgaaaaagtacaaagtgtacaccatcccaaaaagaacatccgggcacagagtcatcgcccaaccatccaaggagctgaaagagtatcagcggaagtatctggaattgcaggattttcccattcacaacagcgccatagcatatcggaagaatttctctatcaaggacaatgcgaatgcgcataagaaaaatcgctacctgctaaagttagatctggagaatttcttcaactccataagcaatcacctattttggcgcgtctgggaaagtattttacctatgcctcccgaggctgataaaaggattctggaaaatctcctgttttggtgtccaagtaaaacaatcggaggacggctcattctaagtataggggcaccttcaagccccttgatctccaactttttcatgtacaagtttgacgacgctatctatgagatttgcatggagcgtgaaatcaagtataccaggtatgccgatgacctgactttctctactaacaggaaaaacatactctttgaactccctcatctcgttgagacgctgcttttctctctttttggctcagccatcagaatcaacaagaagaagaccaagttctccagcacaggacacaaccgccacgtaacaggcattaccattagcaataaccagaaactttctctcggcagagatcgaaaacgatacatcaagcatctggtgcaccactacatgttggaaaaactgtccaacgaggacacccagcatctgcggggtctgctcagcttcgctaaacatgttgagcccctgttccttcactcgttggaaaataagtactcaactgggctgatccataagattgtggagggtagggatgactga

SEQ ID NO: 11245 - RNA, 924 nt, synthetic construct
  source 1..924: mol_type = other RNA
atgagcgtcattgagaagttggcccttgcactcgagaagtcagaagccaaagtaattgcttttttacggaatgcacccaataagtataagatttacaccatcccgaagagaacctctggccatcggatcatcgctcagccatccaaagagctgaaactctaccagagaaaattccttatgctgcagaagttgcccgtgcacaagtcagccatggcgtatagaaacggcctctctattaaagataacgccgaactccacaaacgaaacaggtatctcttgaagatggacttcgaaaacttcttcaattcgatcagttctgagctgttctggtcagtctggaagaatacaatcggcacacctactgatctggacaagtacacattggaaagactgctattctggaggccatcaaagaatactgccggacgcctgatccttagcgtgggagcgcccagcagtccaatggtcagcaactttctaatgtacaaattcgactgcctggtgcacgaaatatgcgctagcaaggaaatcacgtacacgcgttatgccgacgatctgacattctccacttgtcacaaagacgtattattcgaggttcctgcactcatagaggccaatcttgaacacctctacgacggtgcactgcggatcaataaaaggaagaccaagttttctagcatggctcataaccgacatgtgaccggggtgaccattaacaacaaggctagtctgtcccttgggcggtcccgtaagaggtatatcaaacatttgacacaccagtttgtgttagataaactgtcctctgatgatcgcctgcatctgcgcggtctgatcgcttttgcaaaacacattgagcctaccttttttcaatccctggttaagaagtacactgccgagagcataagtaaaattatagaggactga

SEQ ID NO: 11246 - RNA, 933 nt, synthetic construct
  source 1..933: mol_type = other RNA
atgtcttttatcaaacagctggcccagaagctgaataagtctgagtctgagatagaacacttcctggttagtgcccctaagagatacaaggtttatactattcccaagcgtaccagcggtcaccgggtaatcgcccagccgagcaaagagctcaaaacttatcaaagagcattcctcgacattcagtctctgccaatacataatgccgccacggcatacaggacagggctatcgatcaaagagaacgcattagcccataagaacaaccagtatctcttgaaactggacctggagaacttctttaatagtatctcctcccgacttttctggaaggtgtggcaatcaatactgccaaagctcgcttcagaggacaagactttgatggagaatcttcttttttggtgtccttcaaaagctacaggaggacccttagtcctgtcgataggggctccaagcagccctctgatcagcaatttcttcatgtaccactttgatatcgcaatcagtcagttctgctccgagaacaaaatttcctacacccgctatgcggatgacctgaccttcagcacaaaccagaaagatctccttttctcagtgcccacctttgtcggcgaacaactgaaaaatctttttggaaacggcatcaagatcaaccgcaagaagacgtccttcagttctaaggcgcataacaggcacgtgacaggcattaccattaataatgaaggcaaactgtccttgggtagagagcggaagaggtacattaaacatctcgtgcatcaataccagctgaataagctaaatcaggaagacatttttcacctcaaagggctgttggcctttgctaagcacattgagcccaagttcatcaacactttaaagagcaaacactctgatgaattgatcacccggatttttgaagaacagaacgattga

SEQ ID NO: 11247 - RNA, 933 nt, synthetic construct
  source 1..933: mol_type = other RNA
atggagctcatcaaaaaactggctacaaagcttaacaagtccgagtctgaagtcattaggttccttgccagcgcgcccctcaaatataaagtgtacaccattcctaagaggacaagcgggcaccgggttattgctcagccaagtagggaattgaaagagtaccaacgcgcattcataagcctgtacagacttaatatccatgacgctgcgatggcatatcgggagggcctgagcatcaaggacaacgccaagttgcattgtaagaacaggtatcttctgaaaatcgatctggagagcttctttaactcaattaccagtgagttattctggacgatatggcagcagcactacgaaatgccaaataatgatgagaaagtcctgatggagcgccttctcttttggagtccctcaaaatctagtacgggtaagctggtgctgtctataggagccccctcaagccctctcttgtccaacttttttatgtaccagttcgacgagctcgtgactcagcattgcgagtccttagagatcaagtacacccgatatgcagatgatctcaccttctccaccaaagcaaagaatgttctgtttgacatgcctcggtacatctccgatacattaacaaatctattcgggtcagccctgatcatcaatagacgtaagaccgccttctcttcgaaagctcacaatcgccatgtgactggtatcactattgacaacgaatctgatctgtccctgggccgggaaaagaagagatacattaagcatctggtgcaccagtatagactaaacaagctggacaaagaaaatgtcttccacttgaagggcttgctggcctttgccaagcacatagaaccgaagtttatcactagcctcgagattaaatattcggctgaggtaatcacacaaatttttgaagaacgaaacggatga

SEQ ID NO: 11248 - RNA, 933 nt, synthetic construct
  source 1..933: mol_type = other RNA
atggaatttatagcaacactggctgccaaactatcaaagagtgagccagaagtggtgtcatttctcgcttcagccccactgaaatataaggtgtataccatccctaaacggacaagcggtcacagagtcattgcgcaaccatcccgcgaattaaaggagtaccagcgcaccttcctctctatttacaagctgaagatccattctgcagcaatggcctaccgagagggacttagcattaaagataacgcccaggcacactgcaaaaacagatacctgctaaagattgacctcaagaacttcttcaattccataagtaacgaactcttctggaatgtttggcagcagcactacaccctgcctgccaagagggaaaaagtcctgatggagaggctcttattctggagcccttccaaaagcagcaagggcaagttgatacttagtatcggagcccccagctcacccttgatcagcaacttttttatgtaccagtttgacgagttagtgacacagcaatgtgagactctcaatataacttacacacgatatgctgatgatcttactttcagtactaatgagaaagacatcctgttcgatatacccaaagccgtcactgagtttctgacgctgttgtttggcaactctatgatcattaacagaaggaaaacggtattctcttccatggctcacaaccgccatatcaccgggatcaccatcaataataagtccgagctgtctcttgggcgggagcggaagcgttatattaaacatctggttcaccactatcagaccaaacagattgaccaggagacaatcctgcaactcaagggcttgctggccttctcgtcccatatcgaaccggacttcatcaagaggctggaggcgaagtattcttccgctgtgattagccaaatttttgaagaacagaatggttga

SEQ ID NO: 11249 - RNA, 933 nt, synthetic construct
  source 1..933: mol_type = other RNA
atgtctctgatcaagaaattggctaagaagctggagaagagtgaggctgaggtggccacctttcttgctaacgctcccttgaagtacaaggtgtataaaatccctaagcggacttctggtcaccgggtgatcgcccaaccctccaaggaacttaagaagtatcagcgagcatttatcagcctgttcaaactgacaatccataattctgccatggcgtatcgggagaagaggagtatcaaagataacgccaataaacacaaacacaacccatatttactcaagctagacctggagaacttctttaacagcatctcaagcgaacttttttggaaagtttggcaagcccattaccctatcccacagactgaggataaagtgttcatggaaaaactgctcttctggtcaccgtctaagagcgtatatggcaagctgatcttatcaattggagcccccacatcccccctgctatcgaatttctttatgtaccagtttgatcacatcatacatgatttatgcgtccatagagagataatatacacacgctacgccgacgatctgaccttctccaccaaacataaaggtgcactgtttaatatgcctgacctcgtcaccgaacagctgagaaagtgtttcggggaggcgataaacattaatcgtcgaaaaactgctttcagttccaagggccacaacagacacattacagggattactattgacaataatgacaacctctcactcggacgcgaaaggaagaggtacattaagcacctcattaatgagtacaagttcaacaaacttggcaaggaagacatcaatcacctgaaagggctgttggcatacgcaaaacatattgagccaagcttgatgacccgcctggaacacaagtattccacggagttgatgacgcagctctttgaggaaaactatgaatga

SEQ ID NO: 11250 - RNA, 933 nt, synthetic construct
  source 1..933: mol_type = other RNA
atgtccttcttggaggaactagccagcgtgttgcagaaaagcgaggctgaggttgaaggcttcctggagggagcacccaaaaagtatcggacgtacaagattcctaaacgcactagcggctttcggacaatcgctcagcctagtaaggagctgaaggagtaccaacgggccttcttgaagatacagtctttaccaatccataacgcggccaaagcctatagaaagaacctttcgatcaaggataatgctacagtccacaaatctagcagatactttctgagtatggacctggaaaacttctttaatagcatttcttccgatctgttctggcgcgtgtattcacggcactttgacagtttcagcgggcaggataagcgagtgatggaatcactgctcttctggtccccaggcaaaagcaataaacagggactggtgctatcagtcggcgctccctcatccccgctcttgagtaacttcttcatgtacacattcgatctgattatgtccaattattgtgacgaaaccaacatcctgtacacaaggtatgcagatgactttacgttctctactaatgacaagaacatcctgttttccgttcctgaggtggtaaagggatttttagagaaatgctttgggagggggattaacgttaacaaacgtaagaccgtattttccagtaaggcacataaccgacacgtcaccggaatcactataaataataacggtgacctgtctctcggtagggagcgcaagagatacattaaacaccttattttccagtacagcatcaacaagcttgaggaaggcatgctccaacacttacaggggcttctcgccttttctaatcatattgagcccatgtttatcttcaccctgaatgaaaagtataccaaagagctgatgctcagaatatcagaagaaaggcatgtgtga

SEQ ID NO: 11251 - RNA, 933 nt, synthetic construct
  source 1..933: mol_type = other RNA
atgtcatttcttcgggtcttagcaagtaaggtgaacaaaacagagacagaggtaatacagtacttggccaatgccccactgaagtacaaagtgtatactatccccaagcgcacaagtggcaatcgtgtgatagctcaacctaccaaagaactcaaagagtatcagagggcttttctgcagatcaagtcctttccagttcaccaggtcgccacagcctactgtttaggactgtctatcaaagacaacgcgctgagccataaggctaattcctacctgctcaaaatggacttgaagaatttcttcaactccattaacaacaacctgttctggaagatatgggccgtcaacaagaagcttccggaagccaaggacaaggagttaatcgaaaaactgctattctggagccccagcaagagtctgcagggcaaactgattctgtctgtgggtgctccttctagccctctgctatcgaatttcatcatgtattcattcgatgagcacttgtttaaggcatgcaacaagctgaatgtgacgtacacccgctacgcagatgatctcacgtttagcaccaacaagaaagacattttgtttaaagtgcccaacctggttgcagaacagctcagatttgaattcggctccagcattatcgttaacaggaaaaagaccaagttctcatcaaaagcccataacaggcatgtaactggaattactctcaataacaatcaggctatcagtctggggcggaaacgaaaaagatatatcaaacacctggtgcatcaactgctactcaataagctgactgtcgatgacataaatcacctcaaagggttgcttgcgttcgcaaagcacattgagccaacctttatcctttcccttgaaaagaagtattctctcgctaagattacccacatcttcgaggccgagaatgagtga

SEQ ID NO: 11252 - RNA, 933 nt, synthetic construct
  source 1..933: mol_type = other RNA
atggagatcgtacggtctttagcccaaaaactcaatattacggagcaggaggtgagttcattcctggcctcagcaccgttgaaatataaggtctacaagatccccaaaaggaccagcggttttaggattatagctcaacccagcaaaaaactgaaggaataccagcgggcctttatcgagctttttccactggcttgtcaccaggccgcatacgcgtatcgcgagggaatttctatcaaggataatgccctcattcataagaagtctaagtacctgcttaagattgacctggagaatttcttcaactccatcaccaacgaactattctgggacatttggcaaaaaaacagcgtccttccagatctgaatgaaaaggtgctgttggagcggctgctgttctggtcccccgataagaaaatctctagtcgcttaatcctgtccgtgggtgctccttccagtccatccctctcaaactttttcatgtacgactttgatgagagcctatctagatattgcctcgaaaagaaaatacgttatacccggtacgcagacgaccttactttctccacatacgaaaaggggattctgtttgaaatccctgattttgtcagtcacatcctcagacagctctttggagataaactgtcaatcaatcgtaggaaaaccattttcagcagcaaagcccacaaccgacatgtgactggcgttacattaagcaacgaagagagtctgtcgatcgggagacagaggaaaagatacattaagcatctcgtgcaccagtatctcctgaacaagctggaccaggacgatgtttcccatttgaagggccttttggcgttcgctaagcacatcgagcctgatttcttggaccgcctgaaagcaaagtattctgacaagacaatatcacagatactaggcgaacgaaatgggtga

SEQ ID NO: 11253 - RNA, 933 nt, synthetic construct
  source 1..933: mol_type = other RNA
atgggcatcattgagtcactcgccggcaagctggacaagtccccatcagcagtcaagaagttcctggcaagcgcgagtctaaagtaccgggtgtatacaattccaaaaaggacacatggatacaggttaatagcccatcctagcaaagagctgaagaaatatcagcgagccttcctcgaactgatgcctttggccatccacccttgtgcaatggcataccgtaagggactgtccattaaggacaacgcgcttgctcacgttgataagaagtatttgctgaagctggatctggagaacttcttcaacagcatagatcctaacatcttctggaaggtttatcaccttcacgaggaggtctgtgagccctcttctctgggtgagcgcttactcattgatcaattgttgttttggtgcccctccaaaagaaaaggagggaagcttgtgctgagcgtaggtgctccatccagccccatggtcagtaatttttgcatgctcttctttgatgtcgtgatctctaagtactgcaaaatcaatcacatctcctacaccagatatgctgacgacttgacctttagtacgaacgaaaaaggtgccctgtttaaaattccggaactcgttagggacactctgttcagcgagtttgggaatcgggttgtgctgaacaatgccaagactaaattctcttctagagctcacaacaggcacgtaaccggagtgaccctttcgaatagtgacacaatatcagtgggcagagaacgaaaacgctacatcaaacacctggtgcatgaatatcagctagggcggatgaattacgaggaaatcctacatctcaaaggcttactctcacatgtgtcccatattgagccagtgtttatcaatagcctggccaaaaagtacggccccgatgtccttaagcgcattcacaaggaatga

SEQ ID NO: 11254 - RNA, 942 nt, synthetic construct
  source 1..942: mol_type = other RNA
atgggaattgtcaagcagctggccagcgaacttgacaaatccgaggctgaaatcatggcattcctcagccgcgcgcccctgtactacaaggtgtataaaataccgaagcgcacacacggggagcgtacaattgcacagcctacccccgagctaaaaaatctgcagagaacttttctcctgcttaaccctcttcctatgcattccgcagctatggcttataggtccggtttaagcattaaggacaatgctaacgctcataagcgcaactcatacctattaaagctcgacttgaatagcttctttaattcgatcactcccgctattttttgggcagagtgggataagttttttgatccattggactctaacgaaaagacactgatagaacgactgctgttctggagtcctagcaagagtttgagcggctccctcatgctctcagtgggagccccatctagcccagcagtatctaactttgtcatgcacgggtttgacacaaaactggaccagctgagtcggaacaaaggcgtagtgtacacgagatatgccgatgacctaactttcagtactcgaaatcagggggttctgatgggaatgcccgagctggtgaccgacttactggttgagtgcttcggcgcggccctgaccgttaaccggtctaaaacaatcttctcttccaaggcccacaataggcatgtgaccgggatcaccctcacgaacgaggccaagctttcattgggaaggaaaagaaaacggtacatcaagcacctggtccatcaattcaccctccaacagctcggccttgaagatgtgaattatcttaggggactgctgtcattcgcaaagcacatcgaaccagatttcatctacgccttggagaaaaaatatggtgctgccgccctgattgccatatacgaggtgaatgatggcggctccaagtga

SEQ ID NO: 11255 - RNA, 933 nt, synthetic construct
  source 1..933: mol_type = other RNA
atggctattgtgtcctttctggccactcacttggacattcccgaagatcaagtggagagcattgtacagcgcgcaccccttctctacaaagtgtacaagattcctaaacgaagcttcggtaccagaactatcgcccagcccactcccgagttgaaaaagctacagcgtgccttcttactcaccaaaccgttgccagttcattctgccgcaatggcctatcaacctggcctttccataaagaaaaacgctctgcaccacctgcacaataagtacctgttgaagctggatttgcttaacttcttcaattccatcacgccggatatcctttggcaagaatggaaacagcattttgaaattcctcccccaaaagaaaaaaagcacatcgagaatctgctcttttgggccccacaacggaaaccaaatacacacttaatgcttagcgtgggagctcctagttctcctaatctctcgaactttatcctgtacaggtttgacgaacggttacagaatctgtgcaagaagctgaacataacatacacaaggtatgccgatgacctgaccttctccacaaacacaagatatgcgctgttcagtataccagaacaggtcgcaatgctgctcaacgaactgtttaccgggcgcattaatatcaacaagagaaagacgatcttcacctctaaagcccacaaccggcacgttactggagtgggcctcagttctgagaacaagctgagcctagggcgagctaagaagaggtacctcaaacatctggtccatcagtttaccctctcactgctggcagacgaggagatctcacacctccagggttggctagctcacgcgaaacatatcgagcccaccttcatagagtcacttacaaataagtatggccaggacattatccataagattttcgagactaaccatgattga

SEQ ID NO: 11256 - RNA, 1050 nt, synthetic construct
  source 1..1050: mol_type = other RNA
atggtagctattgtgagccctcccaacttagttccaagattgggaggggaaactatcgccagctccagcaaagagctgtctcctagagccaaaagctgggcctttctgtggactgtcctgatgggagtgattgagcagcttgctagtgcactgggcaagaaagacgaggatgtcattgacttcttggttaccgcccctcgcaagtataaagtgtacaccattcctaaaaggagcgtgggccacagattgattgcccagcccagtcaggagctgaagatatatcagaagaagtacatcgagcttaatccgctccccgtgcacgatacagccatggcttacaggcaagggctctctatcaaggaaaacgccaaggcgcaccagaaaaatagttacctactgaagatggatcttgagaattttttcaactcgatcacgacagatgtcttttggcaggagtggcttgctttctacccgcaaccatctgacgtggactccatcattctggaacgcctgctgttctgggctcccaacaaaaagctagacggcaagctgattttgtctataggtgcgccctcctcaccagcactctcgaattttattatgcatcgatttgacgaagccgtcgtaaacaactgcgtggcaatcggagtgaagtatacccgatatgcagacgatctcacattttcaagcaacaccaaggatatcttattcaccctccctgggctgattgaaaacattctgatgatgctcttcaacggagccatacgcgttaataagaggaaaacgatcttttcaagcaaggctcataatcgtcacgttaccggcgtgacaatcagtaatgacaacaacatttccttgggtcgggagcggaaacggtatatcaaacatctggtgtatcagtacatgaatgggaagttagagaaggatcaggtcaatcatcttcagggcctcctgtccttcgcaaaacacatagaaccaaatttcatcacttctctgaacatcaagtacactcacaaaatcatccattccataatgtcagacaaacaatga

SEQ ID NO: 11257 - RNA, 933 nt, synthetic construct
  source 1..933: mol_type = other RNA
atgaccgttctgtttggcttggtgaagacacttgggatctctgagagggaagctattactttcctgagtgacgccccaaaaaaatacaaagtgtacagcattccgaagcggtcatcggggcacaggatcattgcacagccaagcaagcgacttaaagaatatcagaccgcttttctaaagtgttgcttgctgcctgtacaccctagcgccatggcgtatcgccagggcctgtccataaaagataacgccaattatcacaaggataatcaatacctccttaagatggacttggagaactttttcaatagcattacccccaacattctttgggagagttggaataagaaagagctgttcattgatgacaacgacagaaagatcttgcaaagactcctcttttggtgcccctccaagaaaaacagtggtaaactggtcttatccataggcgcccctacctcaccagctgtcagtaactcttttctctataacttcgatgaggagttatacaacttttgcctgaagtaccagatcgcatacactagatatgctgatgatctgacgttttccacaaatcagaccggggtcctgttcactgtgcacgaaatggtgaaaaagctcctcatcaaacactttgaccggcagatcactctgaatcatggaaagaccattttctcttccaaggcccataatcgtcatatcacaggagtgacaatcacgaacgacggcaaactctctattggcaggcagaagaagcggtatatcaaacacctagtatatcagttcgagttaggggttctgtcaatcgaggacatatgttaccttcagggattgctggcattcgccaaacatattgaacccctgttcataccccgcctggtgcaaaagtacagcaaggaaacactgaagaatatcttcgacatcggtagctcatga

SEQ ID NO: 11258 - RNA, 1071 nt, synthetic construct
  source 1..1071: mol_type = other RNA
atgttctcacactctaaactggttagccttctgctgcccccgctggagtgcaaaaacattgcggtcttttctaaagaaccaatgagtaaactggtcacgtccctggggttcctgtcgcgtgctttgaaaatgaagaccatccttgagttcgcaagtcgcactgagcaatccccagatcaggtgatgaggtatctgaagtcagcctccaagaagtataaagtgtacagcatccttaaacggacacatggccggcgcattattgcacaacctgccaaggaattaaagcagtaccagaatatctttctcgacacacactcactacccgtgcatagttgcgcctacgcgtacaaaaaaggtgtaagcataaaggagaatgcacaacagcacgttgaaaataattacctcctgaagatggacctcgagaactttttcaattctattacccccgatatcctgtggaaccagtgggaggatcattttggttggaagtttcagagcatcgaaaaggtcctcctggagcagacattgttttggtctacctcaaaaaagctcaacaggggcaaactagtcctgtcggtgggagctccatcctcccctgccctgtccaatctgtgtatgtatagttttgatagggagctccaggagatctgtcagacttacggagtatcttacactaggtatgctgatgacttgacattctctactcaactaaaaggccgactcattaaattccccgactatgtcgagaacttactgaacaagcacttctcaaagaagatattgatcaataaccggaagacagtgttcaccagcaaagcccacaaccgtcatgtgaccgggataaccctcgctaacaacggcgtgatctcccttggcagaaagcgaaaaagatacatcaagcatcttatgcaccagttcattttggggaacattgatgacgaagaacgcatgcacctgagaggattactggcctttagtaatcacattgaacctagcttcatcagcacgcttagaaacaagtatgggaatgacgtggttcagcgggtgagcgaggttataaatgaaaagtga

SEQ ID NO: 11259 - RNA, 924 nt, synthetic construct
  source 1..924: mol_type = other RNA
atgaaaattatttctcagctggcgaaatacctaaataagccggaggattctatcgaggacatactgctgatcggacccgaaagatacaaattgtactatatccctaagcgtactcacggggtgagactgatagcccaaccatctcgcgaattgaaggagtaccagcgggcattcttatcattctacaaattcccaatccatgactgcgcaatggcttatcgggagggcatttctatcaaggacaatgccatcgcccataagaacaatagttatctcctgaagctcgatctcgagaatttcttcaactccatcaatcccataattttttgggatgtgtggcagaaactggaactcagcaacctttccgccaacgaaaagaaatggattgagaacctccttttctggaatcttcacggtgatcttgtactgtccgttggagctcctagttcccctaccataagcaacttttgcatgtacattttcgatagcatcctgacatatcactgcaacaacatcgggatcacttatacgaggtatgccgacgacctgactttttcaacaaacgaagagagggttctgtttaagatcccctccgtggtcgaaaccatgttatacgactgtttcgaaggcaagctgtgtttaaacaaaggtaagacagctttttctagcaaggcacacaatcggcacgtcaccggcattacattgaccaatgagggcaaaatcagcctaggacgaagcagaaagaggtacatcaaacataagattcaccagttttccctggggaaacttgataactatgacataatgcatctgaaaggcctcctctcgtttgctcgccatattgaaccaaaattctacgacagtttgctgaataagtactcaaaggagctggtgttgtcaatttttgaggccaattatgagtga

SEQ ID NO: 11260 - RNA, 924 nt, synthetic construct
  source 1..924: mol_type = other RNA
atgagtatcatttctctgctcgctcagactctaaaaaaacctgagtatgtgatagaagacattctgttcatcgctcccattcgctacaaaatctattatatcccgaaaagaacgcacgggtttagacagatcgcccaaccatccaaagagctcaaggaatgccagcgggcattcttacgtttttgtaacctgccaacccacaactgtgccatggcgtaccgggaaggtctatccattaagaataacgccatagcccacaaaaatcaggcctacctgctgaagcttgatctggagaacttttttaacagcatcacccccaatatcttctggcacacatgggagctcactggagctgaactccctacaaaggacaatcaacagtggatcgagaagctcctgttttggaatcttgaagacaagttagtgctgtcagttggcgccccctcctcgcctagcgtctcaaacttctgcatgctgatttttgatcagattttacaggaccaatgtcagaaccttggaataaaatatacgcgctacgcagatgatctgacctttagtaccaacgaaaaggacatcctgttcaagattcctgagagcgtagagaatatcttgtccaagtgcttcaatggtaatctcaggttgaacaagggcaagacaatattctccagcaaggcgcataatcggcatgtgactggaattacaatcaccaatagcggggagatttctctggggaggtcaaagaaacgatacatcaaacacaaaatccaccagttctctctggatctgttgaacaaccatgaagtgatgcatcttaaaggcctcatggcttacgcaaggcatattgagccaagttttcacgagtctttgataatcaagtatagcaaggagatcattgaaagaattttcgaagtccccaacgagtga

SEQ ID NO: 11261 - RNA, 963 nt, synthetic construct
  source 1..963: mol_type = other RNA
atggcacaagactcacatctgggaccatttcctctgggtaagttaatggggatcatatatcagttggccgaaaagctcgagatgtctgaactgactgtcaagaaatacttggcaaatgcgccgaacaaatacaaggtctacaaaattcccaagcggacgtacggatttagaattattgctcagcccgccaaagaactcaagaaattccaacgcgcttttttagacgtattcgatctacctgttcacaatagtgccctcgcctatagaaagtctatatcaatcaaggacaacgctatcctgcattgcaaaaatgcctacctgcttaagatggacttagagaacttcttcaactccattactccagacctgttctggaaggaatggaacaaaactcttaagatcctgccacgtacagaggcccagtggctggagcttctgctcttttggcggccgagcaagaaaagaaatggaaagcttatcctgtcaatcggggcacctagcagtccccacatctcgaatttctgcctgtttaacttcgatattatcatgagcacaaagtgtgaggcgctgggtatcacgtattctaggtatgccgatgacctcaccttcagcaccaacaagaaaaacatattgttcaccattcccaagtttgtggattccatcctgacagcttcctttgatggcaaacttacaatcaacaagaacaaaaccgtgttctccagtaaagcacataataggcatgtgactggcattactatcacaaatgacggaaatattagcatcgggcgcgagaaaaaaaggattataaagcacctcgtgcacaattataagattggcaccctcccacctgaggaaatagattacctgaagggcttgctagctttttccggccacatcgatcccacctttattgactctttgaagaagaacatccagcagcgactgagcaaaaaatacatttga

SEQ ID NO: 11262 - RNA, 942 nt, synthetic construct
  source 1..942: mol_type = other RNA
atgtcagtcattgaaaagctcgcactgacattggacaaagagcagagggaggtcgaacggtttctggtgaatgctccaaacaagtataaggtgtatagcatccccaaaagaacgcacggctcgcgcgtgattgcccaacctagtaaagagttaaagacttaccagagagcctttatcgacctgtacgaaaagtaccttcctatacacgacaatagcttctcttacagaaaaggggtaggcatcaaacagaacgcagacgtccacaagaagaatccctacctactgaaaatggacttagagtccttcttcaattctatcgttccttcaatgctgtgggaggaatgggagcgatctatcgggaacaccccaaatgctcgtgaaaaaatgtggatcgagagactgctcttctggaacccctccaaacgcagcgggggcaagttgatcctgtctatcggagcgccaagctctcccatgattagtaatttcgttatgcatagtctcgataaggtgctatcggtagaatgctccgagaagggcgtgtcctatactcgctacgcagatgacatgacattttcaactcggaacaaggacaccctctttatttttcctgagcttgtgtccaatatcattaagtctttgtttggcaatcgtatcagcattaaccggtccaaaacggtctatagcagcaaagctcataaccgacacgttaccggggtcaccctgacaaacgagggaaggcttagtcttggaagagatcggaagcggtatatcaaacacctggtgttcgaatttagggaaaagaggctggatattgataccttcaaccatctcaagggtctgatagccttcgccaaatacatagagccggacttcattattcgcttggagaagaaatactcaacaaggctcataaagaaggtgatggacggtgattatgattga

SEQ ID NO: 11263 - RNA, 942 nt, synthetic construct
  source 1..942: mol_type = other RNA
atgtcagtgctcgagaaattagccattactctgggaaaagagcaagccgaagtcgagtcgttcctgttaaacgccccaaataagtacaaagtttacagcattccgaagcgtacccatggaaaccgcattattgcacagcccagcagagaattgaagaagtatcagagagcctttatcgacctgtacgaggtgtattttcctgttcacaaaaacgcgttttcatacaaaaaggggatcggcatcaagcagaatgccgaggttcacaagaacaatccttatttgctcaaaatggatttggagaacttctttaacagcatagtgcctaacatgttttgggaggaatgggaacgctccatcggagataccccaaataagaatgagatcaagtggattgagcggatcctgttttggtccccctctaaaaaatctaatgggaagatggtcctgagtattggcgctccttcttctcccctcatatccaactttgtcatgcattcattcgacaaaatccttacgagcgaatgcgagaagaagggagtgtcatacactagatacgctgacgatatgactttcagtaccaaaaacaagaacaccctgttcagcctccccgaaacagtgtccaatgtgataaggggtgtattcggcaatagggtaagtattaacaggagcaaaacagtgtattccagtaaggctcacaataggcacgtgacaggggtcaccctgacaaacgaagggaaagtgtctcttggccgcgatcgaaagcggtacattaaacatcttatcttcgagtatcagaagaacaatctggacgcagaaaagtttaatcacctgcggggtctaatagctttcgcacggtatatcgagccatgtttcatcgatcgactcgaaaataagtactccgccagactagtcaaaaaggttatggacggcgactatgagtga

SEQ ID NO: 11264 - RNA, 933 nt, synthetic construct
  source 1..933: mol_type = other RNA
atgagtgtaattaatagattggcgaccagcctgcaccagaatgaacttgaagtgagagcctatttagagaatgcaagcggtaagtataaggtgtatagaatccccaaacgaacaactggattcaggatcattgctcagcctgccaaaatgttaaaggaataccagcgagctttcctgcagctttaccgattcccaatccacgactgtgctatggcatatcaaaaaggcaaaagcatacgtgataatgcgctgatgcacgcccacaacccttatctactcaaaactgacctagaggactttttcaattccataacgcccgatattttttggcaatgcgtagagcagaccagtgtcaatgtctccttgtttctcccggaggaccgccggtacgtggatcagattctcttttggaaaccaaccaagcggagtacacggttaatgctgtctgtgggcgcaccctcctcaccaatcatttccaacttctgcctgcatgagttcgatcagttgatccacgaaatttgtcggaacctggacatcgtgtacaccaggtacgccgatgacctcacattttcgtgcaacgtgagagacgttctcggttcactgccttccatgatagagacactgcttaataagctcttcaagaagaagctgaggcttaaccgtggaaagactatctttagctctatggcccataaccgccatgttacgggggttaccctgaacaacaaaggcaaactgagcttgggacgggagcgcaagagatttattaagcacctgattaaccagtacaggtacgggctgatagatgagtctgacaaagcctaccttgtcgggctgttggctttcgcatcacatatcgaacccgaattcatcatccgcatgaacaataagtattctactgagctgatggataggctcaggcgccaacagtga

SEQ ID NO: 11265 - RNA, 933 nt, synthetic construct
  source 1..933: mol_type = other RNA
atgtcactcatcaatcgcctggctacatccttacagcaaagtgagctgaaggtcaacgcatacctggaaggagccagtgggaagtataaggtctacaggatccctaagcggactaccggcttcagaataattgcacagcccgcaaaggccctcaaagactaccagagagctttcctgcagttatataggttcccaattcatgagtgtgccatggcctatcagaagggcaagtctatacgtgataatgctcttgctcacgccagaaacccttatctcctgaaaacagacttggaggacttctttaacagcatcacccccgatatcttttggcagtgcgtggagcgctcttcatctagcgaattgcaattccaactagcagatagaagatatgttgatcaggtgttgttctggaaaccaacaaaacgttcaacacgactcatgctgagtgtgggtgcgccaagcagccctgttatttccaatttctgtctttacgagtttgataccctgatcaatgagtactgcagggaattggacattatttacacgcggtatgccgatgaccttaccttctcctgcaacactcgcgaagtgcttaaaagcgtacccgccattatcgaaacgttgctgaacaagatattttccaagaaactccggttaaaccggggcaaaaccatattttcgtctatggcacataacaggcacgtcactggggtgactctgaataacgagggtcggctaagcctgggacgagaacgaaaaagattcatcaagcatctgatcaatcagtaccggtacgggatgattgatgaatcagacaaagcttacctggtgggacttctggcgtttgcctcccacatcgagccggactttatcctgaggatgaatgacaagtactcctatgagctcatggaccgcctccgcaggcagcaatga

SEQ ID NO: 11266 - RNA, 933 nt, synthetic construct
  source 1..933: mol_type = other RNA
atgagtgtaatcaatggcctcgccgggctgctaaatcagagcgaactggatgttgtgttatacctgcagagcgcctctcgaaagtataaggtgtataagatccccaaacgcaccacgggctttaggatcatagcgcagccagctaaggccctgaaagattatcagcgggctttcctgcagctttataggcttcctgttcacaaatgcgctatggcttaccaaaaaggtaagtctgtgagggataatgcccttgtccatgcccagaattcttttctcttgaagacagacctcgaagatttctttaattccattacccccgacattttttgggagtccatagagagatctcccagcgacacccctcaaattagtgcagaggataaagggtacgtggagcatctactcttctggcagccagcaaaacgctccaagagacttattttgagcgtaggagcgccctcatccccggtcgtctcgaacttctgtttatatgaatttgacaacctgatctccgagttctgcctcccactaaatatcgcttacacccggtacgctgacgatctgactttttcatgtaatactagggacgtgctgggagttctccctttgattatagagaaactcctgaacaagctgtataggcggaaacttagactgaaccgcgcaaagaccgtctttagctcaatggcacacaaccggcacgtgacaggggtgacaatcaataacgaaggcgagttaagtctgggaagagaacggaagcgtttcattaagcacctcattaaccaatacagatacgatatgatagacgaagccgacaaggcctacttggtgggtctgctggccttcgcaaaacatatcgagcctgagttcatcctgcgaatgaaccgaaagtatactacagaattgatggagcgcatccgtcgccagcagtga

SEQ ID NO: 11267 - RNA, 933 nt, synthetic construct
  source 1..933: mol_type = other RNA
atgagtttcatcaataagcttggcgttaacttcaatcagtccccactggaacttaaggtgttcctggaaaatgccccctctaagtacaaagtgtacaaaatcgctaaacgaactggtggctttcgtatcattgcacaaccggtaaaagccttgaaggtgtaccagcgggcttttctgcaactgtataacttccctgtccatggatccgcaatggcatatcaggaaggcaagtctatacgagacaacgccctgatgcacgcaaggaacccttatctgctcaagaccgacctagaggatttctttaattcaatcaccccagacatattttggaaatgcgtggagcttagcagcgctgacgctccacaatttagcgtggaggatagacggtatgtcgagaagattttattctggcagccggccaagagaagcaaaaggctcatgctctccgtaggcgccccaagttcacccgtgatttccaacttctgtctcctggagttcgataagctgatctcacatgagtgcagggaactgggaattgtctatacgagatacgctgatgacctcacctttagcagccgcatacctggggttctttctcccttgcccgcgatgatagagcagctgctcaaaaagctatacaaaagcaagttacggctgaacaggtctaagactattttctccagtatggctcacaatcggcacgtgacaggagttaccctgaataacgaggggggtctgtcccttggccgcgaaaggaaacgctatatcaaacatctcatcaatcagtacaagtatgacgccattgatgaatcggacaaggcgtacctgatcgggttgttggcctttgcatcacacatcgaacctgcctttattctgcgcatgaacgacaaatactctacagagttaatggatcgtttgagaagtcagcagtga

SEQ ID NO: 11268 - RNA, 927 nt, synthetic construct
  source 1..927: mol_type = other RNA
atgtccgttatcaacgacctgggccgctgtttgaaccaaagcgatttagtagtgaaggcctttctggagaacgccccaagcaaatacaaggtgtataggatcccaaagcgcacaaccggttttcgtattatcgcacaaccggccaaagagctcaaacgctaccagagagcgtttatggggacctaccgcttcccggtgcacgaatgcgctatggcctaccaggagggaaagtcaattagggataacgctcttgcgcatgcccacaacccttatctgttaaaaacagacttggaggatttcttcaattctatcacacctgcaatcttctggcagtgcattgagtcttgtcccgttgatgccccacagtttcaggatgaggaccgacgctacgtcgaacgactcctattttggcagcccgcgaagagaaacaagagattaatgctgtccgttggcgcaccatcaagtcctataatcagcaatttctgcctcctggagctggacagattcctgtgtgaggaatgcgagcggttgggtgtgtcttacaccaggtacgcagacgacctgaccttcagcacatctcttcccggggtattgagcgccatccctgccctgattgaatccctcctcaaacggctattcaattccaagctgcggctcaatcggaataagactcttttttcatcgagagctcataacaggcacgtgactggagtcactttgaataatgaaggggaactgtccctgggaagggctaggaagcggttcataaaacacctgattcacagatatgacaagctggatgaggctgataaagcttatctcgtgggccttcttgcatttgccagtcatatcgaacccgagtttataatccgtatgaacgccaaatatagtacggaagtcattgaccgaattcgtcggcaacagtga

SEQ ID NO: 11269 - RNA, 933 nt, synthetic construct
  source 1..933: mol_type = other RNA
atgtcagtcatttctgagctggctatgctgctgaatcagaacgaacaggatctcagggcattcctaaaaaatgcgtccagcaaatacaaggtctataaaatacccaagagaacgctgggcttcagaatcatcgcccagccggcaaaggctttaaaggagtgtcagcgcgcctttatccaacgctatcctttgcctgttcatgcgtgtgccttggcataccgtgagggtaaaagcattcgggataatgcattcatccacgctcagaattcatatctccttaagaccgaccttgaggactttttcaactccattacccctgaaatcttttggcaatgcgttgatgcatcccacgatggggcccccgtatttgacggatctgatagggtggacattgagcggatcttattttggcagccagccaaaaggagtcaacgactgatacttagtgtgggggccccctcaagtcccgcaattagtaacttctgcctctacgatttcgaccgactgctgtccgagagctgccagactatgggcgtggcttactcccggtacgccgatgacctgactttttcatgttccatgccaaacgtgctgcgaaccttgcctgctataatagaggctttgctgaatagactcttcaacaggcgcctcagattaaatcggggcaagacagtatttagctctaaagcgcataacaggcacgtcacaggggtgacactgagcaatgagggtctgcttagcctaggacgggaacgcaagagatatattaagcaccttatcaaccagtacaggtacgacctcttggacgaagaagataaggcctatctagtgggactgctcgccttcgcttcgcacatcgaaccagaattcattctgcgcatgaacgccaagtattcttctgagctgatggacagaatccggcgtcataaatga

SEQ ID NO: 11270 - RNA, 936 nt, synthetic construct
  source 1..936: mol_type = other RNA
atgagcgtgatctctggtctggctacccttctgcatcaatctgaaagcgatgtccggttgtttctggagaatgccccccggaaatacaaggtttaccggattccgaagagaacaacgggtttcaggataatcgcgcaacctgccaaacgcctgaaggaattccagagagctttcatgcaactctatttgttccccgtgcacgaatccagcatggcttacagaaagggcaaatctattagagacaacgcctccgcccacgctaacaaccagtatctactcaagaccgatctcgaggattttttcaatagtatcacccctgcaattttctggagatgtattgagatgagttccgagcaggcaccacagtttctcacccaggacaaaccctacgtagagcgcatcctgttttggcaacccgtcaagcgcagcaagtcgcggctgatgttatcagtgggcgcacctagttcaccagctatcagcaacttctgcctgtacgaatttgaccggcagatgaatgaggagtgccagaatctcgggattacatacacgcgatatgcggatgatctgaccttctcttgtaacatccaggacttactcaggactgtgccagcaataattgaggccctgcttaacaaacttttcaagaacgccttaagaatgaaccacggaaagacagtgtttagctccaaagcccataatcgtcatgttactgggatcacactaaataatgaagggaaactgtccttgggacgtgaacgcaaaaggtttattaagcaccttattaaccagtacaagtatggcttgctggatgacgcagacaaagcctatctgatcggactgctggcctttgcttcacacatagaacctgaattcatcactaggatgaatgagaagtattcaaacgagctcatagagcgaatccgccgacagaggtga

SEQ ID NO: 11271 - RNA, 933 nt, synthetic construct
  source 1..933: mol_type = other RNA
atgtccattatcaatgggcttgccaccgtattgcatagatccgaggccgatgtccgcagcttcctggagaatgcgccgaggaagtataaagtttatagaatccccaagcggacaactggtttcagaatcatagcacagccagcaaaggaactcaaggccttgcaacgagccttcttgcaactctactcttttcctgttcacgaaacatctatggcttatagaaaaggaaagagcatccgggacaacgctctcgcccatgtgaacaatccgtatctgctgaagactgatctggaggacttctttaacagcataacacctgacatcttttggcggtgtatagatactagctcaattgaaacgcctaaattttcggtgcaggaccgcccatacgtcgaacgcattctgttttggcagcctgtaaaaaagagcaaaaagcgcctcatgttatccgttggggccccctcaagtccagatatttcaaacttctgcctctacgaatttgatcgtaaactgtcagaggactgccagaatctgggtattacctataccaggtacgcagatgacctgaccttctcctgtgatatgagagacgtgctgcgaactgtgccagtcatgattgaggctctactcaagaagattttcaacaaggcccttaagatcaatcacggcaaaacagtgtccagttctaaagctcataatcgtcacgtgaccggcgtgacgttaagtaacgaggggaatttgtctctgggcagggagcgcaaacggttcatcaagcaccttatcaatcagtacaaatacggactgctagacgaagccgacattgcttatctgcgaggcctgcttgcgttcgcaaaccacatagaacccgattttatcggacgggtcaacaacaagtacagcatcgagttaatggagaggctcaggaggccctga

SEQ ID NO: 11272 - RNA, 936 nt, synthetic construct
  source 1..936: mol_type = other RNA
atgagtgtcattcgtggtctggcttccgtactgcggcaatctgattcagatatctcgacttttctggcgactgcaccacgcaaatataaggtgtacaaaatcccaaaacggaccacagggttcagagtgattgctcagcctactaagggcttgaaagacatacagagagcctttgttcagctttactcatttcctgtgcatgatgcgagcatggcctacatgaagggcaaagggattagggacaatgccgcagcccacgctggtaatcaatatttgttaaaagcagacctcgaagacttcttcaactccattacccccgcaatcttttggagatgcattgagatgagcagcgtgcagacacctcagtttgagcccctggacaagatctttatcgagaagatccttttctggcagcccatcaaaaggaggaagaccaagttgatcctctccgtgggggccccttcctctccagttataagcaatttctgcatgtacgagttcgataaccgcattcatacagcttgtaagaaggtagagattacctacaccaggtatgctgatgacctgacgttctctagtaatataccagatgtcttgaaagccgttccgtctactttagaggccctgctcaagaacctctttggaagcgcactacgtcttaatcatagcaaaacggtgttctcttccaaagcccacaacagacacgtgactggcgtcaccatcaacaatgaggaaaccctgagtctgggacgggaccgcaaaaggttcataaagcacttaatcaaccagtacaagtatggactgctggataacgaagacaaggcctatctgacaggccttctcgcgttcgctaatcacattgaacccggatttatcacacgcatgaacgaaaagtactcactggagctaatggaacgactccggggccaacgatga

SEQ ID NO: 11273 - RNA, 939 nt, synthetic construct
  source 1..939: mol_type = other RNA
atgcagattatcaaagcgttggcagccatcctgcgtcagagcgaatcagacgtgagactgtatcttcagaatgccccattgaagtacaaagtgtacaggatccccaagcgcactaatggtttcaggattatcgcccagccagccaaggctctgaaggaataccaacgtgctctaatacagctttatagttttcccgtacatgatgtggccatggcttataggaaaggaaagtctattcgggacaatgccattgctcacgccaataatagatatctgctgaaaaccgatctagaggacttttttaattctatcactcctacagtcttctggcactgtttcgagcaatgcagcgtggacactcctcagttttccacgcaggacaaaaactacgtggagaagattctgttttggcaacctgttaaacggtcaaaacataccctgatgctctctgtcggggcacccagttccccaactgtaagcaacttttgcctttacgaattcgaccgactccttagcgacgagtgcttgcgcttagatatagtgtatacacgctacgcagatgatctgaccttctcaacgaacacacctaacctgctgagactgctgccctcattcattcaggtcctcctcacaaagttatacaaaaatgcacttcgcctcaaccacggaaaaaccgtttttagctctaaggcctacaatcggcacgtcaccggcatcaccctgaacaacgaaggccagctgtccctgggtcgggagaggaagagattcatcaagcacttgatcaaccaatacaagtatgggctactcgacgaggcggatataggctatttatgtgggctcttggctttcgtgaaccatatagaaccggagttcattattaagatgaacgagaagtacaccgtttccctcatctcgtccatccatcgaagtaatcagtga

SEQ ID NO: 11274 - RNA, 939 nt, synthetic construct
  source 1..939: mol_type = other RNA
atgcaagtcatcaaggagctcgctgctatactgcatcaggacgagtccgacattagactgtatttgaaacacgcaccccacaaatacaaggtgtaccgcattcctaaaaggacgcatggttttcgtattatagcccagccagctaaagtacttaaagcctaccagaggacactgattcagctctatccctttccagtgcatgacgcagccatggcctatcgcaaagggaagtctattagggataacgctttggcccacgcagataatcggttcctccttaaaactgacctggaagatttctttaactccatcacgcctgaaatattttggcgatgcatcgagaggtgttcagtcgacgctccccagtttagtgcacaagataagagctacgttgagaagatactcttttggcaaccagttaagagatcgcgtcacactcttatgctgtcagtgggtgcgccaagctcaccgatggtaagtaatttttgcctttacgaattcgaccggctgttgtccgacgagtgtcagtccaccgggatcgtctacactagatatgcagacgatctcaccttctctaccaacacacccaacttactgaagctactgcctgcgttcatccaggccttattggctaagctgtataaaaatgctctcagactcaatcatggaaagacagtgttcagcagtaaggcgcataatcgacacgtgacaggcattactttgaacaatgaggggcagctgagcttaggacgggagcggaagcgcttcatcaaacacctgatcaatcagtataagtacggcctgctggacgatgttgatacctcttatctaaggggactgctggccttcgccaaccacattgaacctgaattcatcaccagaatgaacgagaagtacaccgccgcccttgtgggcagcatctaccgctctaaacaatga

SEQ ID NO: 11275 - RNA, 945 nt, synthetic construct
  source 1..945: mol_type = other RNA
atgtctgtcatcaaggagctggccacatttcttcaccaatctgaattcgacgtttccctgtttcttcaaaatgccccccgtaagtataaagtttatcggatcccaaagagaacctcaggattcaggatcatcgcccagcctgctaaggccttgaaggtatatcaacgcgctctcatgcagttgtacactctccccgtgcacgatgcagccatggcgtaccggaaaggcaaatccataagagacaatgctctggcccatgcccagaaccagtatctgttaaagatcgacctggagaacttttttaacagtattacccctaccctgttctggaactgtatagatgaatgtctggtgaatgacccgaaattttctagcacccaggataggatctacgtggaaaagattctgttctggcagcctgtgagacggagcaagaaaactctgttcctaagcgttggggctccctcaagccccgctgtctccaatttctgcctctataagtttgaccatctgctgaccgaggaatgccagacactcggcatcgtgtacactaggtacgctgatgacttgacattctctaccaacatcaaggatattctgaagctccttccagccctcatacagacacttctgaagaaactctataatagtgcactacgcctcaacaacggcaaaactgtgttctcctcaaaagcacacaatcgtcacgtcacaggggtgacgattaacaaccaaggtaatctttcgttgggaagggagcgaaagcgatttttgaagcatctgattaatcagcacaaatacggtctgttagacgatactgagttagggtacctacggggactgcttgcattcgcaaatcatattgagccacagtttataatgagaatgcgcgaaaaatacaccgtagatctgatcagcagtatcacgggcgcgattaacgactga

SEQ ID NO: 11276 - RNA, 936 nt, synthetic construct
  source 1..936: mol_type = other RNA
atggggatcattaaggagctttccattttcctgcaccaggatgaatccgacgtctctctgtacctgcagtctgctccccgcaaatataaggtgtaccgtattccaaaacggactaacggcttccgagtaatcgcccaacctaccaagaccctgaaggagtaccagagggcattcgtgcatgcctaccccttgccagtacatgaagccgctatggcctatagagtgggaaggagcattagagataatgctgaggcgcataccgccaatcagtacctcctcaagaccgatctggaggatttctttaactcaattacacccgcaatattctggcgctgtatcgaacagtgttccgctgaggtgcctacattccttcaccaagataaaatctacattgaccggcttctgttctggcagcctacaaagaggagtgcgcgcactctcatgttgtccgtcggtgcacctagctcacccgcagttagcaatttttgcctgtatgaatttgatcgactgttaagcgacgaatgcaaacgtttagatatcgtttacactcgctatgccgacgacttgacgttttcaaccaatacaaaagacctcttgaagatcctgccagcctttatacagagccttctgaaggagctgtataaaaatgctttacggctgaaccacggtaaaactgtgttctcgtctaaagcacataaccggcacgtgacaggggtcaccattaacaacgagggcaagctcagtctcggaagagagaggaagaggttcatgaaacacctgatcaaccaatacaagtacgggctcctggacgacgccgacactaattatttgagaggcctactagcttttgcctctcacatagaaccggagtttatcaccaagatgtccaaaaagtatacggatgcgctgatccgacggctttacagaagtaattga

SEQ ID NO: 11277 - RNA, 939 nt, synthetic construct
  source 1..939: mol_type = other RNA
atgcagatgattaagcaactggcagattcactccaacaggacgagagcgatattaagaagtttctgcagaatggaccccgaaaatacaaagtataccgtattcccaaaagaactaccggattccgcattatcgctcaaccatccaagaaactcaaagaataccagcgctatttcatagaattctatcctttgcccacacacaaagctgccctggcctacaggaaagggaaaagcatacgggataatgcactcgctcacgtgaatcagagttacctgctgaagatggactttgagaacttctttaactcaatcacgcccgcctttttctggcatagccttaccagctgtacatcaagtatccctcagtttaccgacgttgaaaagtcttacgtggaaaagatcctattttggcagcctatcaagaggtctaaaaacacactgatgttatctgttggggccccgtcatctccagtcatttctaatttctgtctgtatgagttcgacaggagactgagccaaatatgcgaggaatacggggtgatttatactcgctatgctgatgacctgacattctccaccaacattaaaaatcttctacctaagttccccagtatcatccacagcttattgcaggagctgttcaatggcatccttaaaattaaccacgcaaaaaccgtgtattccagtaaggcgcataacagacatgtgacaggaatcacccttaacaatgagggccagttatccctcggccgagagaaaaagcggtttatcaagcatatgataaaccagtacaagtacaatgtcctggatgacgaagataagaactatctgtgcggtctgctcgccttttccctgcacattgagccagaatttatcgtccggttggagaagaagtacacttcggagttgatcaaaaagctcactggtaagacgctctga

SEQ ID NO: 11278 - RNA, 1026 nt, synthetic construct
  source 1..1026: mol_type = other RNA
aagaagtatgtccattttgccgtgtccagtaaggaactgagccccagagtgctgaaattgctggggttctttgtagagcgttttatgaacctcgttcagcaactagcaaagcatctcaaaaagaatgagtccgatgtcattcggtttcttgtcgatgcccccaataagtaccgtgtgtataagatacctaagaggtcacatggacacagagtcatcgcgcagcccacgaaagagctcaaagagtaccaacgcgcctttatctcaatctttaaatttccggtacaccactctgctatggcttactgcgaaggtaagagcattaaggagaatgccttagctcatgttgagaactcttacttactgaaaaccgatttcgaaaacttcttcaactccattaccccagcaattttttggcagagtatcgagcactgtcgagtggacgcgcctattttcaccgcccaagagagaaagttggtcgaaaaactcattttctggtgcccttctaaggagaaaaatgggaaacttgtgctgtctgttggcgcccccacatcaccaaccatttccaacttctgtctttatgagttcgacaatctgatcagcaacgcatgtaatgcacaacagatcacatatacccgctacgctgacgacctcacattttccacaaataagcgggatattctgtgcactatcgtgtcctcaattcagcagttactcctgaccatcttctcgcaccacatcaagttgaactacagcaaaactgcattcagttcgcgggctcacaacagacacgtgacaggcatcactatcagtaacgaaagcaaactgagccttggccgagaacggaaaaggtatatcaagcatctgataaatcagttcaagtacaatctgctggacgactctgatataaggcatctccagggactgctagcctttgctcagcatatagaaccagtgttcatctctaggttgaagactaaatacacgaacgagctgatacagcgcatttatgaagccagccacgattga

SEQ ID NO: 11279 - RNA, 942 nt, synthetic construct
  source 1..942: mol_type = other RNA
atgaatctcgtgaagcaattggctcgccatctgcggaaaagcgaatccgaggtaatccgctttctggtcgatgcaccaagtaaataccgcgtgtacaaaataccaaagagatctcacgggcatagggtgattgcccagccttcaaaagaactcaaagagtaccagagagcatttttagccatctacacttttcccgtgcatcccaccgccatggcttactgtgaggggaaaagtatacgtgaaaatgcactggcccacgtccagaacaattacctcctgaagacagacttcgagaacttttttaactcaatcacccctgccattttttggcagtccgttggcagttgcaccgtagacacgcccatgttcacaacccaagagaagagactggttgaaaagcttattttctggtgtcccagcaaaactgaactcggtaagttagtgctgtccgtgggcgcccctacttcacctagcatatccaatttctgcctatatgaattcgatcgattcatgaccaacgtgtgcagcgatcagaagattacatatactaggtacgctgatgacctcacgttctccacaaacgagaagaacacccttaatacaatcgtcccagtcatacaacagttgcttgttgaatttttctcgtactccctgaagttgaatcactctaaaacagcgttttcttctcgagcccacaatcgtcacgtgactggtatcaccctgagcaatgaaagccggttaagtcttggccgggagaggaaacggtatatcaagcacctaatcaaccagttcaagtataacctgctggacggaagcgacatcaggcatctgcaaggactcctggcattcgctcagcatattgagccggtctttatttcacgcctgaagaccaagtatacttcggagttgattcagagaatctatgaggcgtctcacgattga

SEQ ID NO: 11280 - RNA, 939 nt, synthetic construct
  source 1..939: mol_type = other RNA
atgaacctcgtgcatcaattagctaaacagttaagaaagtctgagctggaggttatcagatttctggaaaatgcccctaacaaatatcgagtgtataagatcccaaagaggtcccatggtcatcgaattatagctcagccgacaaaagagctgaaagaatatcagcgcgcttttctatcaatctgcaatttcccagtacaccattcagccatggcatactgcgaaggtaaagggatcaaggagaatgctctggcccacgtcaaccataattacttgctcaaaattgacttcgagaacttcttcaattctatcactcccactctgttttggcaggcgatcgaaaatgccaaatgtgacattcccgcttttacgacccaggaaaaggagatagtcgagaagattgttttctggtgtcctagtaagctgaagcacggaaaactggtgttgtcagtgggagcccctaccagccccattatctcgaacttttgcctcaatgagtttgataggttcatcagtgacatctgtaatgaccaaaagatcacgtatacaaggtatgcggacgatttaacattctccactaatacccgcgatttgctttacaccataatccccagcattcaggatcttctagccctgatgttttcccacgatctgaagctcaaccactctaaaactgtgttcagctccagaggccacaaccggcacgtgacaggggtcactctcagtaacgacggaacaatctctctcggccgtgaacgcaagcggtacattaagcacctcattaaccagtttaagtacaaccttctggatgaaggggacacccggcacctgcaaggccttttggcattcgcacagcatatcgaaccagacttcataagacggctgaatgcaaagtacaccattgagctgatgaggagcattaaagaggccaacagctga

SEQ ID NO: 11281 - RNA, 942 nt, synthetic construct
  source 1..942: mol_type = other RNA
atgaatttagtcaagcagctggcccagcatttgggaaaaagtgaatacgaggtgagcttgtttcttgttgatgctccgaataaatatcgggtgtacaagatccccaaaaggacctatggccaccgtgtaattgctcaaccctctaaggagctcaagaagtaccaaagggccttcctagacatatatcctttccccgtgcattctgcagcgatggcctactgtgaaggaaagagtatcaaagataacgcccaggcgcacgtgcagaacgactatctccttaagactgacctcgagaactttttcaactccattacaccaacaatcttttggtcctgtattgaatcctgctcactggatactccttcctttactacccatgagaaaaagcttgtggagtccctcctgttctggtgcccatctaaaacaaagaacggcaagttagttctttctgttggggcacccagctcgcctaccatctcaaatttctgcctttatgagttcgacaggtacctcagcaccatctgtaactttcagaatatcacgtacacccggtacgctgacgacctgacattctccaccaagaaaaaggacatactctatacggtgataccttctttgcaggatctgctggtcaaactgttcagccaaagtatcagactgaatcactcaaaaaccgtctttagttcaagagcccacaatagacacgtaacaggggtgactctgaataatgaccgacgactgagcctaggtcgccagcggaagaggtacatcaaacacctcgtcaaccagtttaaatacgaccagctggatgaggtggatacacgccatctgcggggcttgttagcttttgcaaagcatattgaaccaactttcattaagcgcctgaaggataagtacagcagcgaactgattaaacgtatttatgaggccagaaacgaatga

SEQ ID NO: 11282 - RNA, 960 nt, synthetic construct
  source 1..960: mol_type = other RNA
atgaatttagtgagtaagctggcactgtatcttgaaaagtccgaatctgaggtaatccgcttcctctcagacgcacctaataagtatagagtgtacaagataccgaaaaggtcccacgggcataggatcatcgctcagccctctaaagaactgaaagagtatcagcgagcattcctggagctatacgaattcccagtgcacgattccgccatggcctactgcaaaggtaaaggtatcaaggagaatgccctggcccattctaaaaacagttacctgctgaagaccgacttggagaatttctttaactcaatcacaccacccattttttggcaatgcatggagaagtgcgcgtcgactgtccctcagtttacgaagcaggagaaagtcctggtggaaaagctcattttttggtgtccaagcaaagataggaatggcaaactggtcttaagcatcggggctccttccagccccgccatctcaaacttttgtctttatcagttcgacgatttcatgtccgatgtatgttacgatcacaaaatcacctacacacgctatgctgatgaccttaccttcagtacaaatgagaaggacctgctgcacactatcataaattctattcagtactccctcaactactttttctctaatagcctcaagctaaatcattcgaagaccgtttttagctctagagcgcacaatcggcacgttactggcatcaccataaacaaccatggacgtctcagcttgggcagggagcggaaacgatacattaaacacctggtgaaccagttcaagtacaaccaattgagcgaaagtgacattttccacctccaaggattattgtcatttgctcggcatatagaacccaagtttattttccgccttaaagacaagtatacaaacgagctggtgcagagaatttatgaagccggaaacgagcaacagaacaagaagcagtga

SEQ ID NO: 11283 - RNA, 1023 nt, synthetic construct
  source 1..1023: mol_type = other RNA
atgtacgagcattttgccgttagctctaaagagctgtctccaagggctccgctgctcttggggttcttcgtggaacggaaaatgaatctcgttaagaggctcgcacaccacctgggcaaatctgaaccagaggtcatccatttcttggcagatgctccaaataaatacaaggtgtacaagatccctaaaagaagttatggacaccgtgtgatcgctcagcccacccgagagttgaaactctatcagaaagcattcctggaactgtactcattccctgtgcactcaagtgccaccgcttactgtaagggcaagagcataaaagataacgcactaagccacgtcaaaaatcattatctgctcaaaacggacctggagaacttttttaacagcataacccccaacattttttggaagtcgattgaaaacgactccattgccacccctaaattctctacttcagaaattgccctcgtagagcggctcatcttctggcggcctagcaaactgcaggggggcaagctggtgttgagtgtgggtgccccatcctcacccactatatccaacttttgcctgtaccagtttgatgagtacttatccatcatttgcaaggaacaaaatatcagctataccaggtacgccgacgaccttactttttctacgtgtgataaggacgtactccatacagtcatcccgctgatccagtcccttttagattacttctttgcgtccgagctaaagcttaatcactctaagactgtcttcagcagtaaggctcataacagacacgttacagggattaccctgaataatgagggtaaactgagtctaggacgcgagcgaaagcgctatatcaaacacctggtgcactccttcaagtatggaaagctggataacacagaaattagacatcttcaaggcatgttgtcattcgccaagcacatcgaacccatctttattgaccgcttaaaggagaagtatacagacgagcttatcaagataatttacgaagcgggccatgagtga

SEQ ID NO: 11284 - RNA, 939 nt, synthetic construct
  source 1..939: mol_type = other RNA
atggatttagttaagaatctagctaacaacctgggtaaaagggaaagcgaggtcaggcggtttctagccgatgctcccaacaagtatcgagtctataaaatccctaaacgtagttatggacaccgggtgattgctcagccaagcaaagagctcaaagactaccagcgggcattccttcagctgtacacatttccagtgcacagagccgctatggcctattgtaaaggtaagtctataaaggagaacgcgcaggcacatgcatccaagaagtacttattaaagactgacctggagaacttcttcaattcaattaccccccggatcttctgggaggtggtaaggaagaataccgacttgatgaaggtgtttacatcccaagaagtcaagctggtggagaagcttctgttctggtgtccgtcaaaaactaaaagcggcaaactcattctctctgtgggcgccccaacctcccctaccatcagcaatttttgcatgagtgagtttgacaagcaactgtcccagctttgcaaagtaaaagacatagtgtacacacgctacgcagatgatctgaccttttccacaaatgaagagaacctgctgtttaagattattcccgaaattcagagcttgttgacgaagaacttctcattcaacatcaaacttaaccattcgaaaactgttttcagttcaaaggcccataatagacatgttacaggcgtcactctgtctaacaatgggaagatcagcctggggagagatcgaaagagatacatcaagcacttgattcaccaattcaaacacaatcagctcgatacgtctgaaatccaccacctgaggggaatgctcagttttgccaaacatatagagcctatcttcatcaagcgcctgtctattaagtacaccgacgaactcatccgcaatatatatgaagcgcagctctga

SEQ ID NO: 11285 - RNA, 942 nt, synthetic construct
  source 1..942: mol_type = other RNA
atgtctgttatcgaactcctggccaagaagttaaataaaagtgagagcgaggtcatgagcttcctgagcgacgctccgaaaaaatacagagtctacaagataacgaagcgttcacacggctacagggttatcgctcaaccaacaaaggaattgaaagattatcagcgcgcctttttaaccctctatacattccccctgcatgaatctgcaattgcctaccgagaagggttgagtatcaaagacaacgctctggtgcacgtagagaatcagtatctgctaaagactgatctggagaacttttttaacagcatcccacccagcgtgttttgggactctttgggctcatgtagtggtgttacccctcacttctccgtgcaggatcaacagtgggtggaaaagcttttgttttggagcccatccaagaaatccaatggaaagctggtgctttctgtgggagctccttcatcccctatgatttctaacttctgcctctttgagttcgatctctcactgtcgtccctgtgcaagaaacaagccatcagctataccaggtatgcagatgacctgacttttagtaccgacgaaaaagacgtgctatacaccatgataccctccgtcaaaaacgtccttttcaataacttcaaggaccacctgaaagtaaacaactccaagacagttttttcgtcccgggcgcataacaggcacatcactggggtgacacttaataatgagggtcagttaagcattggaagagaacgcaaacggtatattaagcatctggtgcatcagttcaaatacaatgagctcgatagctcagacatttcttacctgcagggcctcctcagtttcgccaagcacattgaacccgtcttcatcgagagactgaagatcaagtattctaacgcccttatacagtgtatttacgaggcaaatcatgagtga

SEQ ID NO: 11286 - RNA, 930 nt, synthetic construct
  source 1..930: mol_type = other RNA
atgtcttttatcgaacggatggccaaagagctaaataagcctcaaattgagatcgaggacttcctcttctttgcacctaacaagtataaggtctattcgatacccaaacgtacccacggctttagaactattgctcagcctactaaagaattgaaagattaccagagggcctttacgtcatgggtggaactcccagtgcacaactgcgcgatggcgtactgccaaggccggagtatcaaagacaacgcttatgctcacaagaagaacgcatacttattgaagttggatctggaaaacttcttcaattccataacaccagataccttctggcgagtctggtcttccaggtggaatcttcctaataagaacgaaagacagtgggtggaacgcttattgttttggaacaataaggagaagctcgtcctgtcagtaggggctccctccagtcccctaatcagtaatttttgtatggtgcagttcgacaaggacctgtatctgtactgtcagtctctgggagttacctatacaaggtatgccgatgacctgactttttccacaaacaaacgaaacatcctgttttcactgcccagcgatatcaatcaattccttgagaagcattttcagagcgacctcaagataaatccaagcaaaacggccttcagcagcaaagcacacaaccggcatgttaccgggattacaattaataacgacggcaagctgtcattaggacgcgagcgcaaaaggtacataaagcacaagatccaccagttcaaactcaatgtgctggatgcctacgagattcagcatctcaagggtcttctttcctttgcaaaacatattgagccgaccttcatcgagtccctggaaaagaaatacagcaagtctctgattgagatcatcttcgaagccaaatacgacgagagaaaatga

SEQ ID NO: 11287 - RNA, 921 nt, synthetic construct
  source 1..921: mol_type = other RNA
atgacatttattcagcggctggcgaaagagctgaataagtctagagatgaagtggaggactttctgttcttctcaccagaaaaatacaaggtgtacaggataccaaaaagaaagcacgggtttcgcgtgatagcacagcccacaaaagaactcaagacttaccaacgcgcatttatctcccttattcagttgcctgtacatgaatgcgccatggcctattgtaaagagaagagtatcaaagacaacgcagccgcccataagaacaacaagtatctgctgaaactggatctcgagaattttttcaatagcataacccccgagatcttctgggaggtgtgggcctcttttaccagcctgccatctgaggaagaccgaaaatggatggaaaaacttctattctgggacaaacagggaaagctggttctgagcgtcggagccccctcttctcctctgctctcaaacttttgcatgactaatttcgataaggaactgacgtcctattgtaagaagaaagatgtctcctatactcgatatgcagacgatcttaccttctccactaacaaacgtgacgctctcttctcctttcctgctgtgatcagtgagttccttgataagcactttagcagccggttgatgattaaccactcaaaaaccgcgtttagctcaaaggctcacaatcggcatgttacaggtattacgatcaccaatgaagggaagctaagtttgggcagggagaggaaaagatacattaagcataaggtccaccaatttaagatcgagaagctcgatccctacgaaattcagcatttaaagggcttattggctttcgccaaacacattgagccgaaattcatcaagtccctgaacaataagtactcgaaactgctcatcaagaagatcttcgagacaaacgacgactga

SEQ ID NO: 11288 - RNA, 918 nt, synthetic construct
  source 1..918: mol_type = other RNA
atgaagctggtggggcaactggctcatattctgtccatctcagagcaggacaccttgcggctgatcctgaacgcgccatttaaatacagagtttacaccatccccaaacggactcatggcaggcgagtgattgcccagcccactaaggtggtcaaaaagctgcagaagggttttatctccttgtacaattttcctgtacactcaaggtgcatggcttaccgcaagggactgagtattaagcataacgccgaaatgcacttagataactcctaccttctcaaaatggatctgagcgattttttcaactccctgacgcctaaaattttctggaacacatggaaagagttttggcagctccctgacggcctcgaacaacggttgatcgaatctatcatcttctggaataacaattccattctgacgttatcggtcggtgcaccgagctctcccgctatctctaatttctgcctgtatccatttgatgagaagctcgacaagtattgtatcgaaaagggcattgcctatacccgttatgcagacgacctgacattcagtactaaagagaacaaccttctcttcattctgccaagcatagtgagcggaatgctccacgatatattcgggggcagtctgaccatcaacaataagaaaactgtgtttagctctaaggcccacaatcgacacgttacagggataacaattaccaatgagggatcagcatctataggaagagagcgcaaaaggtacattaagcatctcctaaacaagtataagttcaacgagttgaacagtaatgatatcaatcaccttagagggcttctcgccttcgcttttcatatcgaacccgacttactaaccagcctttcaaataagtacacccacgaactactggagaaattgaaacaggagggcgaatga

SEQ ID NO: 11289 - RNA, 918 nt, synthetic construct
  source 1..918: mol_type = other RNA
atggagctggtggcgcagttggcccatatcttgtcaataagtgaacaggacaccttacgtctcattctgaacgctccctacaaatatcgcgtatacacaattcctaaaaggactcatgggcgccgggttatcgctcagccaactaaggccgttaaaaaactccagaaatccttcctgcatctatatgactttccagtccatagcaaatgtatggcctaccgcaatggaatttcaatcaaggataatgccgaaaagcacttggagaatccctatctcctgaaactagacctgtcggactttttcaatagtctcacacccaagatcttttggaatacctggcaaaagttccagcaagtgcctgatgccttggagcagagactcatcgagaatatcgtgttctggaacaacaattctaagctgaccctgtccgttggcgcaccgtcatctcctgtcatctccaacttctgcctttattttttcgatgagaagctggaagcttactgcttaaaagaggatatagtcttcactcggtatgctgacgatcttaccttttccacaaaaaagaataacgtgctctttaacctgcccaacatcgtgagtaagtaccttaatgacatctttgatggtgcactgaccctgaataacaacaaaaccgtatttagcagcaaggcgcacaacaggcacgtgacgggtataactattacgaacgaggggaacgcaagcattggacgggagcgaaaacgatacattaagcatttgctccacaagtataaactgaaccaccttaattacaacgacataaatcacctgagaggcctcctggcattcgccttctacattgaaccaaacttcgccacaacattatctaagaagtatactagggaacttctagagaagctgaatgaagaaagaggctga

SEQ ID NO: 11290 - RNA, 942 nt, synthetic construct
  source 1..942: mol_type = other RNA
atgaagattgtttccgtgctggcaggcgaacttgtggtatcagagcaggaaattctctccatcctccttggggcgtccaagaaatacaaagtttatcccatcccaaagcgaacacacggaattagactgatcgcacagcctacaaaaaaagttaaggtgctacagagggcttacgtcgatatgatgaattttcccgtccattccaacagtgtggcctaccgaaaaggctatagcataaaagataacgcccaattccatgcctcaaatccctatttattgaagatggacctctctaatttcttcaattcaattaccccgaagattttttgggggatgtgggaaaaattgtgggacctgcctgagccactagagaagcacttgatagagaacctcctgttttggaacatagataaaggcagctctatctcgcggttagtgctgagtgtcggtgctcctagctcgcccatcattagtaacttctgcctttatgaattcgacgagctgatgaccaaacattgtatcagcagggatatttactacacacgttatgccgatgacatgacttttagtactaagaaacgcaatgtactgttcgacatccctaactttgtgaagagcctcctgtatgacgtgttcggctcatctatctctgtcaactacaacaagactgttttcagctcaaaagctcataataggcacgtgacaggaataaccctgaccaacgatggcgagatctctttggggcgggagcgcaagcggtatatcaaacacttagtgaacgaatacagatacaacaagctctccagcgaagacttcaattacctgaagggtatccttagcttttccaagcacattgagccaaagtttgtcagatccctgattaataagtacggagaagacgtgatcacctctatatttagtggggatctgaatgagacgtga

SEQ ID NO: 11291 - RNA, 918 nt, synthetic construct
  source 1..918: mol_type = other RNA
atgaaaatcgtgatggccctcgcccagcagctgaaatatagcgaacccgaattgttgcagctagtccttaaagccccatataaataccgggtctacactatcccaaaaagaacgcacggacggcggaccattgcgcaaccgacaaaatcagttaaggagctgcaaagagagttcttgaagtacaaagtgtttcccttccatgcaagtagcatggcctacagaaagggcatgtctattaaagacaatgccgcctctcattccaccaactcctttttacttaagatggaccttgctaactttttcaattcactcacccctgatgtgttctggtcagtgtgggcggaccattgggagcccctgtcacctctcgagcaccgactggtggagaacattttattctgggataataaaggcaagcttatgctgagtgtcggtgcaccaagcagtcctacgattagcaatttctgcctcttcttttttgacgtggctatcacaaattactgttccggcatagacgtaacctatactcgctacgctgatgatttgacattttcgtgcaatactcccgggatcctgtccaccattccagctttcatctctaggatcctgaaagacaagtacaacgggaaaatctctattaaccaccagaagacaatctttagctccaaggcacacaataggcacgtaaccggtataacaatcactaatgacactaagctgagcatcggacgctatcgtaagaggtacatcaagcatctgataaaccagtataagtataagctgctggacagtgatagcatataccacctgaagggcatgatttcttttgcaaaccatattgaacctgatttcctcatttccctcaagaacaagtattcttcgaagctaatcaacgaaatcattggggttcacaaatga

SEQ ID NO: 11292 - RNA, 918 nt, synthetic construct
  source 1..918: mol_type = other RNA
atgaagattgtgtcagttctcgctcagcaactaaagtgttccgaaagcgatatcctgaaactgattctgaatgctccctacaagtatagggtatactcaatccccaagagaacacacggacgcagaattattgcacagcctaccaaagccgtaaaggagctccaaaggtcatatcttaagtacaaagacttcccattccatataaacagcatggcttatcgcaagggatttagtattaaggataacgccgaatcgcatcgactgtctgcatatttactgaagatggacttggccaacttctttaatagtctgacacctgacgtcttttgggatatctggcggcagcattgggaacccctgcagagccttgagcaccggctggtggagaacatcctgttctgggataattctggcaaactcatgctgtctgttggggcaccgtccagtcctgccatcagcaatttttgtctgtactttttcgacaatgcggtgtctgagtactgcgagaaaataaacgtcatctatacacgttacgctgatgaccttactttctcgtgcaacgatccaaatattcttcctaccctgcccgaattcataagccgagtcttgaaggaaaaattcagtggcaaaattctcgtgaatcaccagaagaccatcttctccagcaaggcccacaacaggcatgtgactggtataactatcaccaacgatgagaagttatcaatcggccgctacaggaaaagatacatcaaacacttgatcaaccagtacaagtataatctcctcgacgccgagacgatatatcacctgaaggggatgatttccttttctaatcatatcgagccagactttttaaacagcctacggaaaaaatactcctccaatttgatcgacgaaattattgaggtgaacaaatga

SEQ ID NO: 11293 - RNA, 921 nt, synthetic construct
  source 1..921: mol_type = other RNA
atggaactcataacctctctcgcacgggccatagagaaatcagaacccgataccctcaatctcgttctttctgctccttataggtataggcggtacacaattcctaagagaacacacgggcggagactgattgctcagcctaccaaggaaatcaaagcagtacaaaaggcctttgtgaagattcgaacttttccaatccacccggctgcgatggcttatcgcaaaggagttagtatcaaagataatgcacaggcgcataaactcaacagttacttgctgaagatggaccttaccgacttttttaattcgatcacaccctccgtcttttggagggtctgggaaaaagtgtggcccctgccagagcgtctggagatgttgctgattgaacggatcattttttggtcaaacgaggacgagctaatgctgtccgtgggtgccccaagcagcccagtagtgagcaatttctgcatgtatttcttcgacgattacatctctactctgtgcgaccagttcgacctggtgtacactaggtatgccgatgacctgacattcagcaccaacaaaacgaatctgctgtttgagatgcctagcatcgtcggagccgtccttaagactgagttcaatgatttccttgcaatcaacaagtcaaaaacgatctactcctccaaggcccacaaccgccacatcacaggcattacaattaccaacaacaatgagctgagtatcgggagagaaaagaagcgatacattaagcatctagtgcatcagcacttagtgtgtaaactctctattgaggattccaatcatttacgcggcttgttatctttcgttagccacatagagcccactttcataaaatcactgaagaacaagtactccgaagaaaccatcgacaagctcttgagaggcagttatgagtga

SEQ ID NO: 11294 - RNA, 942 nt, synthetic construct
  source 1..942: mol_type = other RNA
atgaatttaattacaaaactggcgaaggaactggaaactagcgagcccaatgtgctctctaccgtcgcatctggcccactgaagtacaaagtttactctattccgaagcgcacccgtgggcggaggatcattgcacatccctcaagagagttgaaacaggtgcaaaaggccttcttggcactataccaatttccgatccacagcagcgctatggcttataaaaaaggcgtgtcaatcaaagagaatgccgaatgtcatcggctgaataaatacctgctgaaaatggacttcgagaattttttcaacagcataacccccctcctattttggaaagtatggagcctgaattatccagagcctacattcctggagaaacgagtgatcgagaatattcttttttgggcccctagtatatccgagcgcgacaatttaatgctctctgtgggtgctccatcaagtcccacgatttccaacttctgtctgtatcagttcgacctcattatcaccaagtattgcgatgacaacgaaatcacttacacaagatacgcagacgatataacattctcctgcaacacacctaaggggctgtcgaagataccaaaggccgttagaaagacgctcaagaatctgtatggaacccagatcgaaatcaacaaccagaagaccgtcttcagtagtcaggcccacaacaaacatgttactggaatcactatcactcctgatgggaagctgtccattggccgggagcgcaagaggtatataaaacatcttgtacaccagtacaccctgggcgctcttgaacaagaggatattaaccacttgcgaggtttactctcttttgcgaagcacatcgaagtgtcatttttcaacagcttgattaccaagtactccgccgatgtcatgcttcagatcacaaggggaaacaatgaaaagaacttttga

SEQ ID NO: 11295 - RNA, 939 nt, synthetic construct
  source 1..939: mol_type = other RNA
atgaaccttctccagcgactgagcatcgaacttggcgtgtctgaatcccacatcttaagtataaccgcgagcggccccttgaaatacaaggtctattctatccccaaaaggacccatggccgacggataattgctcatccttccaaagacttgaaaaagctgcaaaagtccttcataaagctacacaattttccaatccatacaaatgccatggcctataaggagggagtgtccatcaaagataacgcttcttttcacaaaagcaacaaatacctgctgaagatggactttgagaacttctttaattcgataacaccggtcttattttggaacgtttggaaccagcacttccctaagtcatcctacttcgacaagaagattatcgagaacattttgttctgggccccaaacatacacgaaagggagcgtctgatcctgagcgtcggggcacctagcagtccaatgatttctaatttctgcctctttcagtttgactctattctgacacattattgcattgagcggtccattttcttcactcggtatgcagatgatctcacattttcaacggatactccagacctcctgaaaaccctgcctggcgtgatctcaaatctgctgagacagttatatgagggacagatcgagattaataaccagaagaccgtttttagttctcaagcccataacaaacacgtgaccgggatcacaataactcccgaaggaaagctgagtattgggagaagcagaaaaaggtacatcaagcatcttgtacaccagtacatcctcaataagctaaaaagctcagatttcaatcacttgcgcggtctgctcactttctccatgcacatcgaaccccagttcatcacgtcacttgagaacaagtacagcaccaatattattgagaacatcgtgcgcggtattaatgaacaaaattga

SEQ ID NO: 11296 - RNA, 966 nt, synthetic construct
  source 1..966: mol_type = other RNA
atgtcagtcgtgtcctatttgaccaacagttgccattgtaattcggacgacctgttccggctggcgatcaacgctcctcgacggtacaaggtgtattctattgccaaacgcacctctggctataggactattgcccacccaagcgcagagcttaagaaggttcagtaccagattatatccgcattcagcgaggggaataggcccctagctcagctgagtattcacagccaggctatggcatacaaaaccggagttgggattaaggaaaatgccaagatgcacagtcacaatagctacctgttgaagatggacttcgaacagtttttcaacagcatcactcctgagctcttctggcgttcttaccatgcactgaatcccgaaaccacattaagccgtactgataaaaagctcatcgaccttttcctgttttgggccccgaacaaatatgaccttagcagactggtgctctcagtaggcgcgccatcctcccctctgatctcaaatttctgcatgtaccaattcgacgaactgatccaccgcttttgccatgagaggaaaatcacttacacaagatatgctgatgatatcacattttctacgaatgttcctaacgtcctctttacggtgcccaagaaagtagatgagctgctgaaggagctgttcagtgggttaattatgatcaacaaccagaagacagtgtttagtagcagagcccacaacaagcacgtgacaggagtgaccatcaccccccaaggcggcttgtctctcggtagaaacaggaaacggtatatccgccatttggtgcatcaattcaccttaggtcgactggccactgacgatctaaatcacctccggggactgttgtcattttcccagtatattgagccatcatttgtcctttccctcaaaaaaaagtactcgataccaatagtcgattccatatctcgcggcaggtacgaatgttga

SEQ ID NO: 11297 - RNA, 939 nt, synthetic construct
  source 1..939: mol_type = other RNA
atggacctcgtaaagaaattagcttccgaagtgggcgtgactgaacgcgaaatcaaagcgttcttatatttggcccctcggaaatacaaggtatacacaattcccaagaggaagtccggggtgcgtgtgattgcccaacctacctctgagctaaaagagttgcaaagaaaatacgtgcagatgatggatttaccgtcacatgagtgttctatggcctataagaagggggtgggcatcaaggaaaatgctgaacggcaccagggaaatacatacttgcttaagatggacctagagaacttctttaactctatcactccagaggtgttttggggtacctggagtaatttttacgctttcccaaccagcatagagaagctttatctggaaaaactcctgttctggtgcccttctaaaaagaactcgaacaaactcatcctgagtgttggagcacccagttccccagccgtctccaatttttgtatgttggtcttcgacaacgtggtcagccagtattgcatttccaagcagatagtcttcactagatatgccgatgatctgacattttcaacccaacagaaaaacgccctgtttgaggttcccagcctcattcagagagtgctgagtgaaatctttggccgaaagctgacaatcaaccatagcaagaccactttttcttcaatggcacataataggcacattacgggtataacgattaataacgacggagagctctcaatcgggcgcgataagaaaaggtacataaagcacctggtcaaccagttcaattacaataaactcgacgagcaggatctttatcacctgcgaggcctgctggctttcgcaaagtatatcgagcccaacttcatcaatagccttaacaagaaatacagctccgacgttatgaacaagctgctgcggggcgggaatgaaaaaatttga

SEQ ID NO: 11298 - RNA, 939 nt, synthetic construct
  source 1..939: mol_type = other RNA
atggatctcgtgaaaaagttggcctcagaagtcggtgtgaccgagcaagaaatcaaagccttcctacaccttgctccccggaaatacaaggtttacactattcctaagaggaagagcggcgtccgtgttatcgcacagccaacgagtgagcttaaaaaactccagcgcaagtttgtgaagatagtgaactttccaacgcacgagtgttcaatggcctataagaagggggtcggtattaaacagaacgctgaaatccatcaggccaatacataccttctgaaaatggatctcgagaacttcttcaattctattagcccggacattttctggaaggtgtggtctgaatttaatcctctgcctacatcagtagacaagctgtacatagagaagttgttgttttggtgtccaagcaagaagaacagtaataagcttatcctgtccgtcggagcacccagtagccccaacatttccaatttctgcatgtccaaatttgatgacgtggtttctaaattctgccaagacaggaacattatctttactcgatatgccgacgatctgacattttccactaaaaaacgcgacgtactgttcgaggtgccttccttagtccagcacgcgctgtctgaggaatttggaagacggctaaccatcaaccacagcaagaccaccttctcttcaatggctcacaaccggcatatcacagggataaccatcaataatgagggaaatctgagtatcgggagagacaagaaaaggtatattaagcacttggttcatcagttcaagtataacaatctggatgagcaggatatctatcatctcaaaggcctgctcgcattcgctaaatacatagaacccagctttttaggctccctgaacgagaagtactcgttcgaggtgatgaaaaagattatcagaggcgacaacgaagaagtgtga

SEQ ID NO: 11299 - RNA, 912 nt, synthetic construct
  source 1..912: mol_type = other RNA
atgaagctgctttctgagaagtcaaatttgacagaggatcaaatcagccgaattcttgtgaacggatcccgcaagtataaagtgtacctgattccgaagagatctcacggcaacagagttatcgcacaccccgcaaaaaagctgaagctcctgcagaaggacttcttaaaaatcgtggactttccttaccacgagtgctcaatggcgtacgagaagggcactgggattaaaaagaacgccttcgctcattctaagaatgagttcctcctgaagatggatctagcggagttctttaatagcattaccccaacaatcttttggtcagccttctctaagtacttcaacattacacctaaccatatagacagttacttcgtcaataacctgattttttggttgaaggagggagataaagctgtcctgtccgtaggtgctccctcaagccccaaaatcagcaacttctgtatgttccagttcgatgaaatcgtctttcagtattgcaatgaatcgtttatcacttacaccaggtatgccgacgatatgaccttcagtaccaatgttcgtgagattctatttacgatccctagctttgtggaatcccttttgtttcagctgttcgggaccgcaatagccatcaactacagtaaaaccgtattttcctctaaagcccacaacagacacgttacaggggtgaccatcacaaatgaaggtgccctgtccctgggacggaagcgcaaacggtatatcaaacacctgactcatcaatttgtgacaggcgtgatcgacaaagaaaacatagcacatctcaggggccttttagctttctccaatgatattgaaccaagctttctcagtactctcgacaggaaatatggcccagggataactacgaagattatggagataaagtga

SEQ ID NO: 11300 - RNA, 909 nt, synthetic construct
  source 1..909: mol_type = other RNA
atggacaagaaggctatttacatagaacgattcttagtatacgctccgagaaagtatcgtgtttacaagatcccaaagaggaaacatggcagccgcgtcattgcgcagccaaccgcagagcttaaaaaactgcaaagagccttcataaaccgctcaaagatccccgtgcatgagtgtgcaatggcctacaaagacggtgtcagcattaaagataacgctcagcttcactcgaccaacacattttttctgtccatggacttcgaaaattttttcaatagcatcactcctgacctgctgtggggcgtgtttaataagtttgggaaggtgatcagtccaaatgagaaactgtggctcagcaaacttctattttggtgccccagcaagaaaaactcaaacaagctcatattgtctgtgggggctccctcttcccctaaagtgtccaacttctgtatgtacttcttcgatgagtatatcagtacttattgccaggatcgcaatatcacctacagtaggtatgccgatgacctctcattctccactaatgagaaggacattctatttcagatccccggcgttgtcaaggaaaccttattgaaactgttcggccgagacatcaccattaataacagcaagacagtgttttcttctaaggcccacaacagacacgtgactggtatcacaattacaaacgagggcgaattgtctctcggacgggagaaaaagcggtacattaagcatctcattttccggtttaaaaacggactgctggatgtttccgacgtgagttacctgaggggaatcctgagctttgccttctatatagaacctgcatttaagacgtccatggtaaaaaagtatacgaaagccaccatcgattcaattttcaatggggtcgatgacgggaagtga

SEQ ID NO: 11301 - RNA, 918 nt, synthetic construct
  source 1..918: mol_type = other RNA
atgttcattgctacactcgctcagaaaatggggaaaaacgatcgagaaataagagagttcctgattaacgcccccgaaaagtataaggtgttcacaatacccaaaaggaaacatggatatcgaattatcgctcagccttcccgggagctgaaagtctatcagaggcaactcgaagaccttatctcattcccagtacactacagggctatggcgtattgcaaagggcgtagcattaagatcaatgccctccaccacgttaagaattcttacttactgaagttggaccttgagaacttcttcaactcaatcacacctgacatattttggaaagtgtggtcgaagacatgggatcttccctgtgacgaggatcgcatctacatcgagaaactgattttttggagattccagggtacgctgagattgtccgtcggagccccatcttccccactcgtaagtaacttctgtatgtactatttcgatgagaagatcgaggagatctgcttgaacaataaggtcagcttcaccaggtatgcagacgacttaaccttttctagcaatgtgaagaacatcttgtttgagattcctcggctggtgcaggatactctcgaaaatcaattccacactggctttagcatcaatacctctaagaccatctttagttcacgcgcacacaatcgtcatgtgactggcatcaccctcgataacaccggtaaaattagtctaggacgggaccgcaagagatacataaagcataaggttcatcattacacgctgaatattctggacgaggacgaaatcaaccacctgcggggcctgattgcctttgccaaatacattgaaccggtgttttttcactccctggaagccaagtacactgcaaacatgatgagcaaactacttgaagggaaggatgagtga

SEQ ID NO: 11302 - RNA, 915 nt, synthetic construct
  source 1..915: mol_type = other RNA
atgtttacagaagctttcgctaggaaaatggggcgagatgagctggaaatcaccgagtttttaatgaacgcccctgacaagtataaggtctacgccataccaaagcggaagcaaggttaccggattattgcacagccctcgagagagcttaaacattatcagaggcagctccaggattttatcatatttcctaagcacaagtgtgcgatggcgtacaggaagggactgtcaatcaaaaacaatgccttgtcacacgtgaataacagttatctacttaagcttgacctggagaacttcttcaattctatcactccagatctcttctggtctgtctggagccgaacttggtccctgccaagcaaggaggaccagcttttcctcgagaaactaattttctggcggttccagggcagtctgatactgtccgttggcgccccctcctctcccagtatctccaacttctgcatgtattattttgacggggagatcgaggcaatctgcacgaaaatgaaaatcacgtacacaagatacgctgatgacttgacctttagcagcaacgtgagaaatattctgtttgaaatccctgtgctcattgagaacattctgaacgaacagtttaaggggctgctccggttaaattcaagtaagactatattctccagcaaagcccataataggcatgtgaccggaataaccttgaacaataatggcaagattagcctcggacgcgatcgcaaaagatacattaaacacaaggtacacctgtataccctcggtatgctggacgccacagaattaaaccacctgaaaggcatgatcacttttgcacgcttcatcgagccggcttttttcaagtcattggaaaccaagtacaactctaatgttatcttccgtctgacacaagaaaaaatttga

SEQ ID NO: 11303 - RNA, 906 nt, synthetic construct
  source 1..906: mol_type = other RNA
atgttgctgagcgcgctggcccagaaaatgggcatttccgaagacgtggctgaacagtttctgatcaatgctcccgagaaatacaaggtgtatagcattcctaaaagagggatcggattccgcttaatcgcccaaccatccaaggagctcaaggtttatcagaagacattgcttaatctgattgtgctgccaatcaacgataccgcaaaggcttatcggttaggtgaaagcattaaaagtaacgctctcattcacagcggaaacgcctatttgctgaaaatggacttggaagatttcttcaattctattaccccagacgttttttggtcagtatggcagagattttgggagctccccgatgagtacgatatgtccgtcatcgaatcagtgactttttggaagaaggataattcgcttgtactgtccataggcgcaccttctagtcccatgatttctaacttctgtctcttctttttcgacgaggagataaacaagttctgcgtcaagaataacattagctactcacgttacgccgacgacctgactttttcgacaaatattaggaatgtgctcttctccctaccgaaactgatcgccaaggtgctcaaggagaacttttctggggcactaaaaatcaaccgaggtaaaaccatctttagttctaaggcacataacaggcatgtcacaggcatcaccttatccaacgacggaaaaatatcactggggcgggccaggaagcgctacataaaacacaagatccaccactataagctgggccttctcgacttcgatgagattaatcatttgaagggccttatagcgtttagcaaattcatcgaacctctgtttttcgaaagcctggagatcaaatacagtaagatcacgcttatgaaactgatggagtga

SEQ ID NO: 11304 - RNA, 933 nt, synthetic construct
  source 1..933: mol_type = other RNA
atgggagtcatcgacaagctggcaaataagctgaatttcacgaagaaagatgtggcttttttcctcttcgatgcccccaagaagtataaagtgtacaacattcctaagagaagtttcggacaccgcgttatagcacagccatctaaggagctgaaagaataccaaagaacctttctggagctataccagtttcctcaccatgctaactccatggcctatagctccggcaagtccatcaaggataatgcggaggtgcaccggaaacagcgatacttgctcaagatggatctagaaaacttctttaacagcattactccagaggttttttggaatgcgtggggcaagtttaaagccctgcccgatgacaatgacaaggagtggattgaaagactgcttttttggcagccccgctcgacccgaagcaatgacctcaaactctccgtcggtgcaccaagctcaccgtccatatctaatttctgcatgtatctgttcgatgaagtcgtgacagagcattgtcagaaggaaagtgtgtactacacaaggtacgccgacgaccttactttcagtacaaacaagaaagacatcctgtcaagcatccccagtgtgattaaaactaaacttaaggagtgctttgaccacaggctggtaatcaatcagcggaaaacgaaattctcctctaaagcccataaccggcatgtaaccggcattacaatctctaacgatgagaagttgtcattagggcgggagagaaaaaggtatatcaaacacttagttcaccaattccagttgaacaagcttgaccagaaggatattcgccatttgcaagggctgatagcttttgcccgtcacatcgaacctatgttcataagctctctcaccaagaaatattcagaaaccctgatccagaggatcattgaagctcacaacgagtga

SEQ ID NO: 11305 - RNA, 930 nt, synthetic construct
  source 1..930: mol_type = other RNA
atggacactgctgactttctttctaagctgacaaataagagccgttcaagcattgtagatttcctaaggctggcaccaaataagtatcgagtctacactattccaaagagatcttatggctatcggacaattgcacatcccactgccaatctcaaatttctgcaaagaacattctcggaaaacttcgcctttcccacgcacgccgctgctcaagcttatatatccggaaaagggattaaatccaatgcaactcagcacaagaacaattgctacctcctgaaactggacctggaagactttttcaactccataaaacccgacctgttctggggagtgtgggataaggccttccaggagcttcctagtcctgcctccaaagagatgttggagcagctgctgttttggcggccttcccggcgcatcggacataccttggtcctctcagttggggcacctagctctccagccatcagtaacttttgtatgtacttcttcgatgtggcgataacgaatatatgcgagctgctggaggtgaaatacaccagatacgctgatgatcttacatttagcaccaatcagaagaacattctgttcgaactcccggcattaatcgagtcgacccttaaggaagagttcagtctacagctcaacatcaacaagaagaaaaccaaattctctagcaaggcgcacaaccgccacgtgacaggtgttaccatcaccaacgacagcaccctttccctcgggaggtcacggaaacgctacatcaagcacctggtgcatagagccactctgaagcagttgaacacagacgagctcaatcacctgattggcttgttatcatttgctcatgatattgaacccgactttttaactaggttggatgccaagtatggtgacggcagtatccagcgaatcaggagctctatctga

SEQ ID NO: 11306 - RNA, 939 nt, synthetic construct
  source 1..939: mol_type = other RNA
atgagggagattattaagtacgcagacagtctggaaatttcagtggagaacctgcagatatttctacttaatgccccgaagatgtacaaagtgtacaagatacttaagcggacccatggatatcgagtcatcgcccagcccgctaaacaactgaaggagtatcagaggaagttcatcaaaatcttttcccagtacttggtggtacacgaatacgcgatggcctatcagaagaataagaacattcagcagaacgcagagatccacaaaaataatagctatctgcttaagatggacttcgagaatttcttcaactctatcacacctgctctgttctggaatgagtgggaaaacattaaccccgatatcttcgacgaaaatgagaagaatctcttctcacgcctcctcttttggaacccaaatcgaaaacggactcagcgcgaaaatttaatactttcgatcggggccccaagttctcctttgattagcaactttgttatgtaccggttcgataaattgatcacccagtattgtctggacaaaaatatcaactacacaagatatgctgacgatttgacattctccaccaacattaagaacattctataccagatacccgtcgaagtgtctaagaacctgaacttactctttggtaataagctccgcatcaacaatagcaaaaccgtgttttcatccaaggcccataacagacacattacgggcataacaatcactaacaacaataagctgagcctggggagggagaggaaacgttatatcagagccctggttcaccaatataagtacgcacaactcgaaaaagctgatattcagtacctgaaaggactcttaaacttttgcaaatccatcgaggtcagttttattcattccctggcgcaaaaatacggcaatgaaactctgaagaatatcatgaaggagtga

SEQ ID NO: 11307 - RNA, 939 nt, synthetic construct
  source 1..939: mol_type = other RNA
atgcaggcttttctgaagttcgctgagagcctgaagatcagtgcaagagaactcgccatatttctgcataatgccccgaagatgtacaaggtttacaagataccaaaacgtacacacggctaccgcgtgatcgctcagcccactaagcaactgaaagaataccaacggaagttcattgaaattttctccactcagatgccagtgcatgagtatgctatggcgtaccagaaaaacaaaaacatccaacagaatgccattttccataaagacaatagctatctcttgaagatggattttgagaactttttcaactccattactcctgccatcctttggaatgagtgggaaaagattaacccaggggtcttgaacataatcgagaaagacttcttctctcgactactgttttggaatcccaatatcaagcgaaagaagcaagagaaattaatcctcagtattggggcacctagtagcccctccgtttcaaattttgtcatgtacgggtttgatgacctcattacccagtactgcaacgctagggagataaagtatacacgctacgcggacgatctgaccttctccaccaactctaaaaacatcttgtatcctattcccgccgaagtggataaaaccctgaaattactttttggtcacaatctgagggtaaacaatggtaaaacggtgttctcgtcaaaggcacacaatcggcacattaccggaatcacaatcacaaataacaataagctgtctctgggcaggaacagaaaacggtacatcagagcactcgtccaccagtatcagtgcgcccagctggacaaaaacgatatccagtatctaaagggccttcttaacttttgtaagtcagtggaaattgccttcataaagagcttgatgcgcaagtatggagaggagatcatcgagaatattatgaaagaatga

SEQ ID NO: 11308 - RNA, 939 nt, synthetic construct
  source 1..939: mol_type = other RNA
atgaaaaacataaccaaatatgcaaagagcctagacttaagtgtagagaatctgcaagagttccttttaaatgctccaaagatgtacaaggtgtataagatccttaaacggacttatggttatcggactattgctcagccgactaaacagctcaaagaataccagaggcagttcaccaacctgtttacccagtacctgccagtccatgactgcgcgatggcttaccagaagaataagaacattcagaagaacgccgagatacaccgtaacaatagctacctgcttaagatggatttcgaaaacttcttcaacagtatcacccccgacctcttttggtccgagtgggaatcagcaaattcagacatgctcgacaaggatgaaaaactcctttttagtaggttgctgttctgggaccccaatatcaaaaaaaccaagcaggagaatctgattctcagcattggagctcctagctctcccctgatctccaatttcgtgatgtacagatttgatgagctcatcaaggaatactgtgtgtgtattgaggtcaattatacaagatacgccgatgatctgaccttttctacgaataagaagaacattctgtacacgatccctgcagaggtgaataagaacctgaaaaacctgtttaacaacaagctacgcgttaacaattcaaagacaatcttctcctccaaagcccataacagacacataacagggatcaccatcacaaatgacaacaaactgtctctcggccgacaacgcaaacggtatattagggccttggttcatcagtataaatacactcaactggaaaaagacgatatccaatacctgaaggggcttttgaacttttgcaaaagcgtggagatttcgttcatacactctttggcccacaagtatggctatgaggtcttaaagaatatcatgaaggaatga

SEQ ID NO: 11309 - RNA, 933 nt, synthetic construct
  source 1..933: mol_type = other RNA
atgaatatcatacacttattggctcgttccctgaacgaggacgacattactattaagaactacttagcgaaagcaccactgaaatataaggtatttgctattcccaaacgcacccatggccatagaatcattgcacagcccgcgagagagctaaagcgataccaaagggcttttatcaactacatcgaattcccaatacatgattgtgcctccgcatacattaagaaccggagtataaagaacaacgccgagcaccataaagaaaactcatttctcttgaagatggaccttgaaaatttcttcaatagtatcacccctcagatcttctgggatgcctggcgcgagaattttcccctaccggacaaagagcaaatgtattacttcgagcgcctgctgttctgggatgtgggcaataatgaactcgtcctctctgttggagccccatcatcacctatggtgagtaatttttgcatgtatctcttcgattccacaatatattcgttttgcaagagcaggtctataacatacacccggtatgctgatgacctcacttttactacgaaccttaagtcaaacttgtttgacatccccaacgagatccaggtgatcctgaagaataacttctccgaccagattaaaattaaccggagcaagaccaagttttctagcaaagcccacaataggcacatcacgggcattacaattaccaacgataataagatcagcatcggaaggaatagaaagcgatacattaaacacctgattcaccagttctccatatctaaaatggaacagtctgacctttatcatctgaaaggtctgatcagcttcgccatgtatattgagcctgaatttttcaatgcactgacaaagaagtacgggagcagtatcatcaattgtatcatgtccaacaacaatgggaaaaacaattga

SEQ ID NO: 11310 - RNA, 939 nt, synthetic construct
  source 1..939: mol_type = other RNA
atggagattataaaaaacctgagcaagcatctgaatcggaccgaaagccatatcaagtcgtatctgatccaggctcccaacaaatacaagatttatacaatccccaagaggtcccacggggtgagagtgattgctcaccccgcaaaagaactgaaagagatccagtatgcttttctctcaattctcaagttccccgtgcacgaggccgcaatggcctacgtgccacagaaaagcataaagacaaatgcgcacgcccacaagaacaatcagtttctacttaagatggacttcgaaaatttcttcaacagtatcaccccaaatattttctggtaccattggaataatgcctttcctgtaatcgatgcggaagagcggttttggattgagagaatcattttttggaacaacaaggacctcaaatcaaacttgacactatccgtcggagcacctacaagtccaaccatcagcaatttttgcatgtacagttttgatgaggaagtcacaaaatactgtcgcgaaaaagatattacctacacaagatatgccgatgaccttactttcacttctaataccaagggaatcttgtttaacctgcctaagcatatcgacaaaaccctgaagaagctgttcttttctgctatcaacatcaacaacaagaagactaagttctcctcaaaagcccacaatcgacatattactggtattacgataaccaacgacgaaaaattatctattggccgcaaaaggaaaaggtacattaaacacttggttcacatgtatgttctcaatttactcgatcggaatgacttcgaacatctgaagggccttctgtccttcgtgtacgatatcgagccgacttacatataccgtctggagaagaagtatacgaaattcatcatagacaacatcaaggaggggaaatatgagcaaaagcactga

SEQ ID NO: 11311 - RNA, 945 nt, synthetic construct
  source 1..945: mol_type = other RNA
atgtcaaatatagatgtagtgaagcagctcactaagcactattccaagagtcccaaagagttgtttgtgttctttgtggatgcgccccgcaaatataaagtctacgagataccgaaacgtactagcggcaccagaattattgcacagccaacacccgaactaaaagattatcagcggtttatcatctccattctcaaggatcacctgccaacgcatgagtgcagtatggcctatatccaggggaaggatattaaacaaaacgctcagatgcatagtaagaacagctttttcctgaaaatggacttcattgacttctttacttccattacacctacccttttctggcatgcttgtgaaaggcaagagctcaattttgactggctggataaagaactgctggaaaaggtcttgttctggaggcctagcaaatattctaagaagcttgtgctcagcatcggcgcccctagctccccatacatctcaaactttctgatgtactccttcgatcaagagctgaacaattattgcaagcagaacggcataacatacacgaggtatgccgacgacctgaccttttccactaagaagtcgaaagtgttattcgacattcctgaatgtgtacgcaagtttctgatcaagttctacgggcagaagattcagatcaatcacttcaaaaccgttttctcttcaaagaaacacaatcgacatgttacaggactgaccatcaccaatgactcaagcataagtattggacgggccaaaaaaagatacatcaagcacctcgtccacagattcgtgaaagagaacatctctgtcgaggaccttaattacttgaagggttacctaggatttatccagtatgtggaacccaactttctgtactctttagagcggaagtacaccatctctataatcaacaagattcgagcagggcgcggtgtttga

SEQ ID NO: 11312 - RNA, 939 nt, synthetic construct
  source 1..939: mol_type = other RNA
atgtcaaatatcgatgtggtcaaacagctgactgaacattatagcgagagtcccaaagagctgtttgtgtttcttgttgatgcgccccggaagtacaaggtgtatgagatccccaaaagaacgagcggtactcgaaccatagcccagcctatacctaaattgaaggagtaccagcgtttcgtgatttccatacttaaggattaccttccgacacacgaatgttcaatggcctatctcaggggcaaggatattaaacagaatgcccaaatccatagcaagaattctttcttcttgaaaatggacttcatgaacttcttcaatagcatcactccaactctgttctggcacgcatgcgaacgccaggaaattaactttgactggctggacaaagagctgttggagaagattctcttctggcgcccaagtagatactccaaaaagctggtcctttccattggagcaccttcaagcccttacatatccaactttctgatgtacagctttgaccaggaattatccaactattgcaaccagaatggtatctcatatacgagatacgctgatgacctcacctttagtacaaataagtcggagatcttattcaacatccccgagagggtacggaaactgctgatcatcttgtacggccaaaaaattcagattaaccaattcaagaccgctttttcttctaagaagcataaccggcacgtcacagggctcaccattaccaatgagaattctgtgtctattggccgcgcaaagaagaggtatataaagcatctcgtacacaagagtatcgaggaggaaatttccgttgaaggactgaactacctcaaaggatatctagggtttatccagcacgtggagccaaaatttctgatggctctagaacgaaaatacacagaagccgttatcaagaagatcaggctggggtgttga

SEQ ID NO: 11313 - RNA, 939 nt, synthetic construct
  source 1..939: mol_type = other RNA
atgagccgcgtggagatcctagaaaagctgaaactcaaattcaacaagacgcccctggaactctttcagtttctggatgatgccccacgtaagtacaaggtgtatgagattcccaaacggactagtggaaccaggatcattgctcagcctatttccgagctgaaagattaccagcggtttgtcattagtatattgcagaccgatctcctgcttcacgactgttgtatggcctatgtgaaggggaaagacatcaagaagaatgccgaagcgcactctcaaaacagcttcttcttgaaaatggacttcatggactttttcaactcaattactcccagtctcttttggcatgcttgcgagcgccagaacattgattttgactggttcgataaagaactcctggagaaaatcctcttttggaggccgtcaaagtattccaagaagctggttttaagcatcggcgctccaagctcgccattcatcagcaatttccttatgtattcctttgacaacgagatctccgacttttgccgaaaaaataacatcacctacacaagatacgccgatgatttgactttctctacatccaatgcactagtgctgttctcagttcctaacttcgtcaagaaagtgttactgaagatctacggtcagaagatacagatcaatcagttcaaaacggtgttctctagcaggaaacataacagacacgtgaccggcctgacaataaccaacgagaattcagtatctattggccgggcaaaaaagcgatatataaagcatcttgtccacgcttttattgaacaaaaagttgacccccaagacttgaattatctgaagggatacctggcctttatacaatacgtagaacctaagttccttaacagtttagagcagaagtacacagcagccgtcatccaggagattagaatcgggaattga

SEQ ID NO: 11314 - RNA, 948 nt, synthetic construct
  source 1..948: mol_type = other RNA
atgtccaacattgatgtgacgcaataccttatagaacaccatatggagatccataagtccaaagagggtttcgagtcattcattaagggcgcttccaggaaatatcgcagttatgaaattcctaagcgaactagtggtacccgaaagatagctcagcccatgcgccagctgaaagattatcagcgcaccatcgtgactatattcgagacaacgtttttgatccacgactgctgcatggcatacatgaaaggaagagacatcaagaccaacgccttaattcatagcgggaattcctttttcctgaagatggacttcaccgatttttttaatagcattaccccaaagctcttcttcgaaggctgcgagaggcagaaaatcgacctgaattgggccgataaagagacgctggaaaaaatcctcttttggtgtgaaaacaagtattctaaggagcttgttttgagtatcggcgccccgtcttcgccctttataagcaatttcgtcatgtatagcttcgatgaggtgctaaacgagtactgtaaaaagaatgggattacctacactcggtacgcagacgatttgacattttcaacctctacttccgggatcctattttctgtcccagacatcgtgaggggaacactgcttcaattttacggtacaaagatccagattaaccagtttaaaacagcgttttcatcaaaaaagcacaaccgtcacgttaccggcctgactatcacaaatgacaataacatcagtatcgggcgggaaaagaagcggtacataaagcacctcgtgcataatttcattgaggagaagattacactggaagacctgaactatctgagaggctacctgggattcatcaaatatgtagagccttctttcttaatcagcctcgaacagaaatacactcagagcgtcattcaaaagattagactcggaaactga

SEQ ID NO: 11315 - RNA, 939 nt, synthetic construct
  source 1..939: mol_type = other RNA
atgtctcgtatggacatcgccgggcatctaactacacattattctaaaacacctcaggagctttttgtgtatcttgtggacgctcctaagaagtacaaagtgtatgaaatcccaaagagaacttccgggactcgaacaattgcccaacccacccccgagctcaagaagtaccagagcttcgtagtgagcatactgaaagagtatttacccatccataattgctgcatggcctacacagacggcagaaacattaagcagaatgcgcagattcactcacgcaattccttctttctcaaaatggacctgatggatttcttcaacagtatcatacctaagttgttgtgggaggcctttgagagggaaggtgttcaattagattggctcgacaaggagttcctcgaaaaaatcctgttttggaaacggagcaagtactctaaaaagctgatcctgtcaatcggtgctcccagttccccgttcatctccaacttcttgatgtatagtttcgacaaagttctggatgaatactgtgaaaacaatggcatcacctatacgagatacgcagacgatctgacattctccaccaaagaaaaagatgtcctgtttctcattccagatgtagtccgagaaactcttgtgaagttttatggacagaagattaagatcaaccacttcaagaccgctttttcgtctaaaaagtacaacaggcacgtgacgggcattactatcaccaatagcgacgagatctcaattggcagggcaaagaaacgctacattaaacacctagtgcacaagtttgttgaggaacgcatctcactcgatgacctgaattacctgcggggatacttgggatttataaaatacgtcgagccaaagttcctgataagccttgagaaaaagtatacccagaacgtcattgagaagattcggatagggaattga

SEQ ID NO: 11316 - RNA, 948 nt, synthetic construct
  source 1..948: mol_type = other RNA
atgtctaaagttgacatcatcgagtacctgatgtctaaacaagtccacaacttcgactccaaaatggattttttcaagtttttcggggaagcacctaagaaatacaaaagatatgagatcccgaaacggacaagtgggacacgaacgatagcccagccaatccgggagctgaaagattatcagcgagctctgattgatctcttccaggggtacttccccgtccatgatagctcaatggcttatgtgaaaggtaaagacataaagaggaatgctgaaatccactcccagaacatctactttctgaagatggacttcaccgattttttcggcagcattacacccaagatattttggaaggcgtgtgagcgcgccggtatagaattcgattggcttgaaaaagagattatcgagaagacgtttttctggaagccttcgaagtacagtaataaactggttctctcaatcggcgcccccagctctcccttcatttctaacttcatcatgttttccttcgactgcgagattgcccagtattgcgaagagcaggggatcacatacaccaggtacgcagatgacatgacttttagcacaaacactccaaatttactctttagcatgagtgataccgtgcgcaatgtgttaatcgagttttacggaaacaccatcaagatcaatcacttgaaaactgtcttttcatccaagaaacataacagacacgtgaccggaattaccatcaccaacgacgacgaactgtcaattggcagagcaaaaaagaggtatattaagcacctggtgcataagttcatcgaagagaagattagcctggaggacctatcctatcttcgcggatacctcggctttattaagtatgtagaaccgaacttccttattactttggagaagaagtacactcagaatgtaattcaacggatacgtgtgggcaattga

SEQ ID NO: 11317 - RNA, 948 nt, synthetic construct
  source 1..948: mol_type = other RNA
atgtccaaggtcgacgtcattgagtacctcatgtctcaacagattcacaacttcgattccaagatggatttcttcaaatttttcgatgaggccccaaaaaagtacaaacgatacgagatacctaaaagaacttcaggcacccgaacgattgctcagcccatcagggagctgaaagactatcaacgtgccctgattgacttatttcaggagaactttcccatccacgccagctctatggcatacgtgaaaggaaaggacattaagaagaatgccgaagtgcactcacagaatatttactttttacgcatggacttcacagactttttcaactcaataactcccaaaatcttctggaatgcatgcgaaagagctggaatcgagtttgattggctcgaaaaagaaattatcgagaagaccatcttctggaaacctagcaagtacagcaataacctggtattgtctataggggccccatcgagtccgtttatcagtaacttcattatgtactccttcgataacgaaattgcgaaatattgtcaggaacggaagatttcttataccaggtacgctgacgacttgaccttcagcactaagttgccaaatgtgctgctggatctgacccgggttataggcaacacactcatcggctttttcgggaacgctattaagatcaatcatctaaaaaccgcgtttagcagtaaaaaacataatcgccacgttactggtatcacgatcacaaataaagatgagctcagcataggcagagccaagaagcggtatattaagcacctagtgcataacttcatagaggaaaagatctcacctgacgatctgaactatcttaggggttatctggggtttatcaagtatgtggagcccaagtttctggcatcccttgaaaaaaagtacacacagaatgtcatccagaagatccttctcggatcctga

SEQ ID NO: 11318 - RNA, 948 nt, synthetic construct
  source 1..948: mol_type = other RNA
atgaagaatcttaatatcctgaaatctctggaggaaaaattcagcataccccagcacgaactgcaggagtttattaaaagctcccccagaaagtacaaggtgtatcagattccaaaaaggtcatccggaacccgtactatcgcccaacctaccgcagaactgaaggaatatcagcggcacctcgttagtatttttagccctatactgcctgtacatgagacatctctagcctatattaaggggaaatccatcaaagataacgcattaatacactgcaaaaacagatacttcctcaagatggacttcgccaatttttttaactccatcactccgaacatcttttggaactgttgggaagaatccaagaaccagaataaaatcaatgacctcgacaaggagatccttacaaacctcatattttggaagccatctaagtatcagaagaatctggtcttgtctatcggcgctccttctagcccacttatcagtaacttctgcatgtacaaattcgatattgctctgtcagagatatgtcacaagaagaatatctcctacactcgctatgctgacgacctgaccttcagcacagagtatgccaatattttatttgatctccccctgattgtgagcaaaattttgatggatctgtatggcgggtcactggaaataaatcatttgaaaactgcgttctcgtcaaagaagcataaccgacatgtgacgggcatcaccatcaccaatgaaggtaagattagtttaagccgcaagaagaagaggtacattaaacatctgatccacaagttcatctttggatctatcgagatcaacgagctcacgtacctgaaaggttacttctcgtttattcaacacattgagcccgacttcctaagtaggttgaaatccaaatactcagatgagacaattaaccttatccggagcatggagctctga

SEQ ID NO: 11319 - RNA, 942 nt, synthetic construct
  source 1..942: mol_type = other RNA
atgaacaatctgaacatcctcaagattctagaagagaagtttgatgtgcctcagcacgagctgttagagtttattaaatcctcaccacggaagtataaggtgtatcagattccgaagcgtaccagcgggacccggactatcgcccaacccacagctgagttaaaaaagtatcagaggtacctcgtgtccatattcacacctatcttgcccatacataaaaatgctttcgcctacattcagggaaaatcgatcaaggataatgcattagtccacagctcaaattcatacttcctcaagatggatttctctaacttcttcaactccatcacccccaatattttctggaatttctttgaggagacgaacgtcaagttttccggcctggaccgaattctgctgtcccaccttttgttttggaagccttccaaatatcagcagaacctggtgctgagtattggcgcaccctcttccccactgatctctaacttttgtatgtacaagttcgatgtggtaatcagtgagttctgcaagaataacaacatcaactattctcggtacgccgacgacctgaccttttctacaaacattgcgaactcgctctataatctgccacttatcgttagcaaatcactgaaggaactgtacggaaacagcatcgaaattaatcctttgaagacgagtttcagcagtaagaaacacaatagacatatcactggtatcaccataactaacgacgggaaactttcactctctaggaaaaagaaacgatacatcagacatctaatccacaaattcatgatgaagagcattgagactaatgaattgcagtatctccgcggctacttttcctttatacaacatgttgaaccagactttcttagtcgcctgattagcaaatacagcgaagagacaataaggctgatcagactcatggaaaattga

SEQ ID NO: 11320 - RNA, 939 nt, synthetic construct
  source 1..939: mol_type = other RNA
atgtctattctggaacacctcatatccaatacctcatattctcggaaggacctgttagagtttctcgaaaatgctccccgcaagtacaagatttaccatattccaaaacggacatatggcttcaggacaattgcacaacccataccggaactgaagaatctccagcgaataacgatcaaattcttggagaacgagttacctatccataatagcgctgctgcctacattaaagggaagtcaataaaacacaacgcactcagtcactgcaagaacaagtatttcctgaagctggacttcgagaatttctttaactccattaacaccactgtgttttggaagatgtgggatagttatacaaatgtgcaggttcctactcaggataagacctacattgaaaacctgctgttctggaggccatctaagacctccaaaaagctaatattaagcatcggggccccatcatctccctttatcagcaatttttgcatgtacgagtttgatcaggccgtggaagagatttgtctgaagcataaagtgacatacacccggtatgccgatgacttgacattttccactaatactaaaggagtcctttttgatttccccaaatatatcaacagcatcctccttgacgtatacgacggccaacttcgcttgaactcgttgaaaacgaaattctcaagtaaagcgcacaacaggcacgttactggtgtgaccatcacaaacgacaaaaaaatttcccttggaagagcaagaaagcgttacatcaagtcactgatcttcaagtacatcaatagcaacatcgatctcgaggacattagcaaactgaagggcctactgtccttttcttatagtatcgaacctaccttcatcctgtctctgaagagtaagtacagcgccgaggtcatcgacgagattttcgaaaagaccaaatcctga

SEQ ID NO: 11321 - RNA, 939 nt, synthetic construct
  source 1..939: mol_type = other RNA
atgtctattctggaacacttggtagaaaactcctcatactccagccaggaacttattgagtttctggataatgctccccgcaagtacaaagtgttccatattccaaaacggacatacggctttcgcactatcgcacagcctatcccggagttaaaagatctccagcggatcgctatcaagtatctcgagaaccagttgcccgtgcataagaatgctatggcctatctcaaggggaaaggcattaagcagaacgccaccaagcactgtaagaataaatacttcctgaagctggacttcgaaaacttcttcaatagtgttaacaccacagtgttttggcagatgtggagtctgtacagcgagttccaaatacctcttcaggagcaagccatcatcaataatctgctgttttggaggccttctaaaacgagcaagaaactcgtcctgagtatcggtgccccatcatctcccttcatttccaacttctgcatgtttcagtttgacgaagctataacagagctatgcctgatttatgatgtgacctacactagatatgccgacgacctgacattcagcactaacaccaaaaacgttctctttgattttcctaaacacgtgaccacgatattgctgaacatctaccagggacaattgcgacttaattccctcaagacaaagttttcaagcaaggcgcataatagacacgtcaccgggatcactatcaccaacgataaaaagatttcccttggcaggtcgcgtaaaaggtacattaagtctcttgtctacaagtatatggcatctgagctggacaatgaaaacctggcaaagctgaagggattgttaagttttagctattcaatcgaacccactttcatcttagcgctgaaactcaaatattccgccgagataattgacaaactattcgagaagacaaagccatga

SEQ ID NO: 11322 - RNA, 927 nt, synthetic construct
  source 1..927: mol_type = other RNA
atgggaataatctcccggatggctgtgcgccttaatatgtctgagccactgctcgtgagtcatctgaacggtggggccaggaaatataagctttttttcatccccaagaagagagggggcaagcgggctattgcccagccttcgaaggagatcaagtttctccaacgtgtctttttatcagccgtgcatctgcccacttccaacttcgtctattcctacaagcaggggaagaacattttccagaacgccagcctgcacaaaggcaacaagtactttctaaagttagacttcgataacttcttcaacagtattacgccaagaattttctgggaacaatggaaactggcctttcctgaacagaactacttaaatgcagtggacaaaatctgtctggaacagctgttgttttggcaaccctctgcttataaatccgatttggttttgagcgttggcgctccgtcttcacccgcgatatctaatttctgtctgctgagcttcgacaacgaaatccattcatattgctatcaaagaggaatcacttttagccgctacgccgatgacctcacattctctaccaatgagccgaatgttctctacgaggtgcttccttttgtgcaggaactgctgactcagaaatttaatggcgcaattaggctcaatccaagcaaaaccgtgttcacaagtaagaaacacctttgcaaagtaaccggactgatcatcacaccagaggggaagataagcatcggtaggaataacaaacggtacataaagcacttgacctttgagtacctgcagggccgactagaggaggaagatgtcatgaagctgaaaggattcctgtcgttcgcaaagtcaattgagcccagctttatccactcccttcagaagaaatatagtcctgtactcttgtccaagctcggtatttga

SEQ ID NO: 11323 - RNA, 930 nt, synthetic construct
  source 1..930: mol_type = other RNA
atgtgcctgatagatgacttagtgactgaattttcaaagagcaagaacgagattcttgaatactcttttgtggcaccgaataagtacaaggtgtataagattcccaaacgcaagaccggagagcgtgtgatcgctcagccaacaaaggagcttaagtcatttcagaggtacattgtcaataagaaactaaacatcctgcctatccataactgcgcctttgcttacgtgaaactgaaaaacatcaaggagaacgccaatcaacacaagtccaattcatacttactgaacatggatttggaagacttctttaattccattacccccagcttattctggaaagtctggggtaggattctgatcaatctgcccgaccttgaggatcggaaactttatgaaaacttcctcttctggaaaccaaagaaattcagtaacaaactgatcctaagcataggcgcaccatcctcgcctttcatttctaactttatcctctacgagttggatgatttcttgttcgaattctgtaagatcaactctattacgtactctagatatgcggatgacctgaccttttccactaacataaaagatatcctcttcagcattcctaatgaagttgaaagtaagatcctggaactgtacgagggcgccattaacctgaatacatccaaaacctactttagctccaaagcccgaaatagacacgtgacagggctggtcttgagtaacgacggaaagatcagtattgggagaagcaagaagaagttcgttaaacacttgatctttcagtatatgctcaacaggctgaatcatgaggagatacttttcctccggggctatctcaattttatcaaagacgtagagcccgagtatatatctatcctcaagcggaaatattcagacaatctgatcctgcgcattatggtagactga

SEQ ID NO: 11324 - RNA, 939 nt, synthetic construct
  source 1..939: mol_type = other RNA
atgagcctgatcgatgagctggcctttgagtttaacaaaagcaaggaggaaatcaggacctacctgctccaggctccatctaagtataaagtgtaccttatccccaagagaaaggttggaaaaagagtgatagcccagccaaccaaagacctcaaactaattcagcggtttatcttagccaagaaactgaaacatctccctattcatgatgccgcctttgcttatgtgaagaacaagagcatcaagaataacgcagcagtccatttatcgaattcctacctgttgaacctggacttagaagattttttcaactctatcacacccaagcttttctggagagtatggaagcggacaatagaccaggtacccgaggttgaggagcgccgcatatacaatcagtttttgttttggcagccaaaaaagaattccaagaagcttattctgagtatcggagcgccttccagtccttatatctcaaacttcatcctttatgagctagaccgttacctgacagtcttctgcaaaaacaactttatcagctactctcgctatgctgatgacctgactttctcatcaaatgtgaggaattccctgttcaaagtgccgaaagttgtggaagacaaactgttcgacctttacgaaggcgaaataaacctcaatcacagtaagacggtgttctctagcaaggcaaaaaacaggcacgttaccggcctggtgctgactaacgatgggaagatttctattggtcgggctaagaaacgattcattaagcacttggtgtatcgatttaagattggcgaactcgagcaaagttccttccaatacgtcagcgggtatctgaattttattcaggatgtcgagcccgtgttcttggaatcactcaagttcaaatacaccgaagaggtagtgaataagatcatgctcggtgtctgggagtga

SEQ ID NO: 11325 - RNA, 942 nt, synthetic construct
  source 1..942: mol_type = other RNA
atgaacttgctggatgaattggccatcaaattcaacaaatccaaggacgaaatccggacctattccctgaaagcacccgataaatataagatgtatctcatccctaagcgaaagaaaggtaaaaggcttatcgctcagcctacctctgaactgaaactcattcagagatacatcgtgatacacaagctgcaaaaactccccatacacccttgcacgtacgcctatagaaagaacatcagcattaaagacaacgcatccgtccatgtcaagaactcttatctcctcaacctggacttagagaatttcttcaatagcattacaccgcgtctattttggaaggtttgggagcgcacacttaataacctgccagacaaggaagagcaggagctgtacgaaaaccttattttttggcggccacgcaagtcaagtcataaaatgatcctcagtatcggagccccaagcagcccctacatatccaacttcatattgtatgagctggacagctttctgtcttcttactgtgacgaaaagtcaatcaactactcgcggtacgctgatgatttgacatttagcacttctaaacgcaatatcctctttgatattcccaacatcgtagaggggaaaatattcgagctgtacaacgggttgatttcattaaatgacgataagaccacctattccagtaaggcgcgaaatcggcacgtgactggacttgtgctggccaatgacggtaagatcagcatcggcaggagaaagaaaaggttcattaagagcctgatcttcaagtcaattaacaatgagttacctcttgagtccattagttacctatcgggctatctgagttacatcaatgatgttgaaccctcctttatttactctctggaaaggaaatactcctatgaggtgattcataagattatgggctcaaagaatgagaattga

SEQ ID NO: 11326 - RNA, 942 nt, synthetic construct
  source 1..942: mol_type = other RNA
atggatctcatcagtcggcttgaaataaagttcagcagcctgtcaagggtggacgtacgctcctaccttagcaaagccccagacaagtataaagtgtatccaattcccaagcgaaaaggcggtacgagggtcattgcccagcccgcaaaagagacaaagattttgcagaatttcgtcattgacgaaatcttctataactttccgattcatcaagccgcgatggcttaccggaaaaatcacagtatcaaaatgaacgcatctatccatgcatcccagaaatacctgctgtctatggactttgaaaatttcttccactctatcacacctcaactgttttgggacgtgtatgcacggctaatccaggagcctataacctttgaggataagaattactaccagaacctcttcttctggcgccctaaaaagcagtcagataagctgctactttcgatcggcgcgcccagtagtcccttcatatccaattttgtcatgtatgagttcgacacctttatttacgacttctgtaagtccgtgggaataaaatataccaggtacgccgatgacctcactttctccacaaaccagaaagatattcttttcgagataccacacttagttgccaagaagttggatgaactgtacaagaaccgaatcaacattaaccgtaacaagacttctttttcaagcaaggcccacaatagacatgttactgggatcgtgttaacaaacgaaaataagatcagcctgggaagaaaaaagaagcgctatatcaaacacttggtgcatgagtttaagctcgggaagctgtcaattgctgataaaaactatctctgcggctttctgaactacgccaattttatcgagcctgagtttattttgagcctggaaaataagtacaccaaagaaatcattgctctggctagaaggaacatcaatgagtga

SEQ ID NO: 11327 - RNA, 945 nt, synthetic construct
  source 1..945: mol_type = other RNA
atggatttgaagttgtaccagtacctcgagtcacagaacagcaatttcacaaacctgctgcgcgcgacccccagcaagcactacaaagtgtataaaatccctaaaaagcggttaggctttagaacaattgctcagcccaccccagcggttaaagttatacagaaacagattgtggactatctcatacctaaaacctcaatccatacctccgctttagcctatgtatctggcaaaggtgttaaggataacgccctccaacatgtcaagtccgactacctgctgaaagtcgatctggagaacttcttcaatagtatcaccccgaagatgctggtgaaagctctgaagcaccagggcattaacatatctcaaactgacattatggtgcttagccagttcctgttctggaatatcacaaagaaaactaacgggaagttggtactctccgtgggagcaccatcaagtcccttcgtttctaacttagtcatgtttgcctttgatcagagaatgagcaagttgtgcagatctacgggcattacttataccaggtacgccgacgaccttactttttccacaacacacaaaaacatcctgttccagcatctcaatgaggtccgaaaggtgctaaaaaaagaatttggggctaggctcgtgctgaatgaaagcaagactgtattcagcagtaaagcccacaatcggcatgtcacaggggtgaccctgacgaataacaataagatctcactaggacgagacaaaaagcgttacatctcctctcttattcacaagtttaagcttggactgttggatcaagaggatatataccatctgcaaggcctgatctcctatgccaagcacattgaggtgcggtttctccgcaacatgagcctgaagtatggtgcaaatgtgcttgactcgatcaggaagtacagtggggaagacgatgcatga

SEQ ID NO: 11328 - RNA, 945 nt, synthetic construct
  source 1..945: mol_type = other RNA
atggatttgaagctgtaccaatatctcaacgagcgtaacctcaattttaagagtttattggaggcaacgccctctaagcactataaagtgtataagatcccgaagaagcggctcgggttcaggactattgcccagccaacacctgctgtcaaaataatccagaaggaaattgttgactacctcacacccaaagtgtccattcatactagcgccaccgcttatgttcccggacggagcgtcaaggataacgctcttgtccacgtgaagtctaatttcctactgaaggtggacttagagaacttcttcaacaacatcacccctaagatgctgtttaaatccctcaagaaacagggcatcgtggttagtggcgtggacctgattgtgctgcagcagtttcttttttggaatatcagcaagaaacgctcaggaaaacttgctttgtccgtgggggccccaagctcacctttcgtatctaacgtcgtaatgctgtccttcgacgagagaatgacgaaactttgcaggaaatctggtattaattacagtcgatacgcagatgatctgacttttagcacaacccagaagggactgttgtttgagcacttatttgtcgtgcgaaaagcccttaaaaaagaattcggggcgaggctcgttctgaatgaatcaaagaccgtattctcttccaaggcccacaatcggcatgtgaccggtatcaccctgacaaataacaataagatctcgctcggaagagaacgcaagagatacatttcagcgctggtccataaattcaaactggggctgctggatgtggaagacactctacacctgcaaggcttgataagttacgccaaccatatagaggcaagctttgtgcagaaaatgagcatcaagtatggcgataatgtcctaacagagattatcaagtactccggcgagaacgacgtttga

SEQ ID NO: 11329 - RNA, 960 nt, synthetic construct
  source 1..960: mol_type = other RNA
atggacctgaaggagttgcacttgctgcagtatgtcatttccaaaaacatgcatacagtgagccttctggatgatcaccccagtctgcattacaaggtctacaaaatccctaagaaaaatatcgggttcaggactatagcccagccgacagcgccactgaagaagatgcagcgcgacattgtggaatatatgacccctcgggtttgtatccacaaaaacgctatggcatatattgaaggcgtaggcatcaaaaataatgctcttgcccacgcaaagtctacatatctgttgaaagtggatctggaaaacttttttaactctatcaccccagaaatgctgttccatagcctcaaaaatcaggggttcaaaataaactcaatcgattgggcttacttaaaagaactcctcttttggaacattgccaagaagaaaaacaaaggcaaactggtacttagtgttggcgcaccctcgtcccccctcattagcaacataatcatgtacaactttgacgtgcgtatgacctccctgtgcgagaaacagaacatcaactatactagatacgccgacgatctgaccttttctacgaaagacaagaatatcttgttcgagcacctcaagatcataaggaaggtccttgataatgaatttaagggtgagctagtgttaaatgagtcaaagacaatcttcagctctaaaggtcataaccgccacgtgactggcattacgctaaccaataataacaaaatcagcattgggcgggagaagaagcgatatattagttccctgatccacaagttcaagtaccaaaagttaaatgaggacgacatatatcatctgcaaggactcctgtcattcgccagccacattgagaaggactttatctacagaatgtcaaaaaagtacggaatcgacaccattaagaagattaaactcttctccggagataagaatgatcagtga

SEQ ID NO: 11330 - RNA, 951 nt, synthetic construct
  source 1..951: mol_type = other RNA
atggatattaagctctatgagcagctgaattctacaaacatcgggttcaatgaactgtttctccgaagtccatcgaaacactacaaggtatacaaaattcccaagcgtactctaggctttagaacgatcgcccaaccgaccccagctgtgaagcggatccagaagcagattgtgtcgatcatctctaaaaacgcaaaagtgcaccattgtgccacagcgtacgtgcgcggcaagggtatcaaagaaaatgctaacaaacacgtctgcagtgaatatatactcaaagttgacttggagaacttttttaacagcgttacacctaagatgctgttcaaggctcttaagaagcagaagatcgttttaagccagattgatgagaaggttatagagcaattcctgttttggaacatgtccaaaaaaatcaatggcaagttggtgttaagtgtcggggcaccttccagtcccttcatttccaatctggtaatgtattccttcgacaaaaagatggaagaatactgttcaaaggagagcattgtgtatacacgctatgccgatgatctaaccttcagcactaagtccaagggcattctgtttactcatcttcagtttgtcaggaagatgatcgccaaggaattctcttctaagcttatgttgaacgagagcaagaccgtgttttcttccaaggctcacaataggcacgtgaccggtattgtcctgaccaataacaacaaattgagcctggggagggaaaaaaagcggtacatatcagcactgattcataagttcaaactgggaaaactgctcatagatgacatataccacttaaaaggactcctctcccatgccagccatatcgaaagagacttcatcctgaaaatgtcagagaaatacggcgccgaggtggtccttgagatcaataaattctcatgcggagagtctaacgacgggtga

SEQ ID NO: 11331 - RNA, 939 nt, synthetic construct
  source 1..939: mol_type = other RNA
atggacctgcgcctctacaggcagctggagcaacggaaccccaacttcattagattattgaaccgttacccctctagacattacaaggtgtacaaaatccctaagcgcacatttgggttccggactatagcccagccgactccaaacgtgaaacaggttcaaaagctggtgatttcgcttctctccgagaaagtgaacgtgcatccctgcgctaccgcctacgtccaggggaagtcaataaaagacaacgcatcatatcacgtgaagtccgaatacctgctgaaagtagacttggagaatttcttcaacagcatcactcctaagatgttgtttaaagccctaaagaagcagtctattagcctaaccgaccaggacatgctggttctcgaacagtgtctgttctggaacatgagcaagaaactcaatggcaagctggtgctctcggtaggagctccatctagtccctacgtcagtaacgtcattatgtacagcttcgacaaaaggatgtcaaagatctgcgcaaagaataatatcaactatacgcggtatgcggatgatttgacatttagtacgaataccaagggccttctttttggacacctgaatgaggtccgaaaacttttaaagaaggaatttggcgccaaactcactctgaatgagtctaaaacagtcttcagctccaaagcccacaaccgccatattaccggtgtgaccatcaccaataataataagcttagcttgggtagggatagaaaaaggtatatatcagctctgatccacaagtttaaacattcccaactgagtgaggatgatatttatcacctgaaagggttaatctctcacgctctccacatcgaaagcaagttcgttcatcggatgattaagaaatattccaaggaaacactgaactccatccgaaagtatccttctggagcatga

SEQ ID NO: 11332 - RNA, 939 nt, synthetic construct
  source 1..939: mol_type = other RNA
atgaaatcaggcatctatggaattctaaaggctgagttctgcgactttgacgccttcctgtctagtaagcccccactgcactacaaggtgtacaagatccctaaaagaaccattggctttcgaactattgctcaacctacaccaaccctcaagaaaattcagaagaccctggtgggactgattgaacctcacgttaaaatccacccaaacgctgccgcttaccggatcggtaagggggttaaagaaaatgcgttatcccacgttaactcctcctaccttttaaaggtcgacctcgagaatttttttaactccatcaccccgcatatgctgttcaagacgttgaaacagcagcatatcgaaataaacgatgtggacaagtatgtgctggagcagatcttcttttggaaccgaagtagacgtaagaatggtaggctaatcctgtccattggagccccctcgtctccctttatcagcaatgtcattatgtcaaagttcgacaacgacattagcatcatctgtgacaaaaaaggcgtatcatatacaaggtatgcagacgatatgacgttctctactaaagagaaagatgtgatattctctgtcatggccgatgtgcggcgccttctgcgcaataacttcagcaataagatgaatgtgaacgagcttaaaaccatattcagcagtaaagcacataataggagggtgaccggtgtcacactgactaacgataataagatctccatagggagagataaaaagcggtacatttcagccctgacacataagtttaagttcggaaagctcgatattagtgacatttaccacctcaaagggctgatcagctatgcaagacacgtagatgtcgggtttatacgcaagttgcaaaaaaagtacggcgtgactacactcgaattgatcaacaagtattctagcgagggctga

SEQ ID NO: 11333 - RNA, 948 nt, synthetic construct
  source 1..948: mol_type = other RNA
atggacctgaacttatatcagcgcttggaaactgacaactgtaatctgaataagttgctctcatctctgccctcgactcactacaaagtgtacaaaattccgaagagaaccatagggttccggactatagcccagcctacttccgaaatcaaagacatccagcgcaagatcattgaaatcctgagccctaaagtgcagctgcatcccattgccaccgcgtatattaagggccaatccattaagtcaaatgccctgaaacacgtcaatagtgaattcctcatgaagatcgatctggaaaacttctttaactcaatcaacccagagatgctgatgaaagcactgtccaagcagaaagttgaaatctcatcggaggatgagaagattctgagggaacttctgttttggaacaggagcaagcgaatcaatggcaaagtcgtgttatccgtaggggctccaagcagccctttcatatctaatctgatcatgtacgagttcgatagtaagctagagtctatgtgcacaaaaaggaaggtgatatgcaccagatatgccgatgacctcacattttctacctgtgataaaggagagcttttctctctgttacccgagatccggaaactcctttaccgaacatttggtaaccgtttggtggttaacgatagtaagacggtgtttagcagtaagaagcataatagacacgtaaccggcatcacactaaccaacagcaatcggttgtccataggaagagagaaaaagaggtacatcagcgctctgattcataaattcaagaacaagaagctcgacgagcaagacattatgcatttgaaaggccttctctcttatgcagtccacatcgaggacattttcgttcaccgcatggggaaaaagtacggatatgaaacgctcgaggctattaagaagttttcccttggtgagtgcaatgaatga

SEQ ID NO: 11334 - RNA, 942 nt, synthetic construct
  source 1..942: mol_type = other RNA
atgcacctggaacttagtgacttcctgcacaaaaagatacctgagtttgatgccttcctacagtccagacctagcacacattacaaagtgttcaagattcccaagaggaaaattggatttagggtcatagcccagccaaccccgcaggtcaaggcagttcagagtcaaattgtgtcgttcctcgagaaaaagagtaaaatacacccttgcagcatggcttatcagaaggggtgttccatcaagaaaaacgcattagcccactccgatagcgaattcatcctcaaagtcgacctggagaatttttttaactccatcaaccccgagatgcttttcaacgcactcgaatctcaatccatagtgattagtgatgatgacaaattcatcttggaagagtgtttgttttggaatcgctctaagaaacgtactagcaaactgatcctgtcagtgggagctccctcgagtccatacctgtccaatatcgtaatgtatgactttgatcgcgtgatccacaagatttgcattaaccttaacgtaaactacacacggtacgctgatgacctaaccttttcaaccaaggaaaagaatgtgctgtcagaaatgattagcaagattagagaggctctcaagacattcttcaccagcaagattatcattaacgagagcaagactatcttttcttcaaaggcgcataatcggcacgttacaggcatcacgctcactaataataacaaaatctctgtcgggcgagagaagagaaggtatatttccgccctgatccataaatttaagaattccttgctggacgaaagcgacatatatcacttacagggcctgttctcttttgcctgccatatcgaggtggacttcaagaaacggatgaagaagaaatacggtgatgacgtggttcataatctgatcaaatactcatctcgcgagaactga

SEQ ID NO: 11335 - RNA, 963 nt, synthetic construct
  source 1..963: mol_type = other RNA
atgtccatcgatattgagacaacattgaaaaaagcctaccctgactttgaaattttactgaagtcacggccagcgacacattacaaggtgtataaaatccccaaacggaccattggctacagaattatagctcaaccgacccctagggtaaaagcaatccagagcgatatcatcaaaattctgaaggagtatgtgtacattcatgacgctgctactgcatatgttgatgggcgaaatattctcgacaacgccaaaatccatcagaactcagtgttccttctcaaactggacctcgtaaatttcttcaatcggatcactcccgaaattctgttcaaggccctgagcagacaggggctgcacatctccgatgacaacaagaacatactacggcaattttgtttctggaatcgtagtaaaaggaagaacggcgctttggtcctgtcagtgggagccccaagctctcccttcatttctaatgtggtgatgaagtcttttgacgaggagcttactagcttttgcgaatccaataagatcaactatagtcgctacgcagatgacctaaccttctccaccaatgaacgcgacgtgcttggtttggcccaccagaaagtgaagacaaccctttcacacttctttggcacccgcatcataatcaacaacaacaagatcgtttactcctcgaaggcccataacaggcacgtcactggcgtcacgctcacgaacgataataagctctctattggacgagagagaaaaaggtacatttccagtctggtcttcaagttcaaagaaggaaaattaagcggggatgacatcaatcacctcaagggtctgatagggtttagctttaacatagagcctctgtttattggcagattggagaagaagtatggtaaaagcaccatcaagagtatcaagaagtattctgaaggaggagttaatggcacagatctgactgagtga

SEQ ID NO: 11336 - RNA, 939 nt, synthetic construct
  source 1..939: mol_type = other RNA
atgtctatcgatattgaaactacgctccagaaagcttatcctgactttgacgaactgctcaaatccagaccagcaacccattacaaagtgtacaaaatacccaaaaggaccattggctatagaataatagcccagcccacctctcgggttaaggccattcagcgtaatatcattgagatcttacggcaacatgcacacatccacgacgctgcgaccgcttacgttgacggcaagaacattctgcacaatgcaaaaatccatcaaaactccgtgtacctgctaaaactggaccttgtcaacttttttaacaagattactcctgagatcttgttcaaggccctggcccgccagcaccttgacatatcagacgaggataagaacatactgaagcagttctgtttttggaacagaagtaagcggaaaaatggggccctggtgcttagtgttggtgccccgagcagcccattcatcagcaatctggtaatgaattcgttcgatgaagagatttcctcattctgcaaaaaaaacaagatctcctacacacgatatgcagacgatctgacattctcaaccaatgagagggatattctgggactcgcgcaccagaaagtgaagactacactaatccgcttttttgggacaaggttaatcatcaacaataataaggtcgtctacagctcaaaggcccataaccggcacgtaacgggagtgactttgacaaacaacaataagttgagcattggccgagacagaaaacgttatattacttccctggtgttcaagttcaaggagggcaagctctctaatgtggatattaaccatcttcgcgggctcatcagtttcgcttacaatatcgagcccacctttattgagaggttggaaaaaaagtatggtgatagcaccatcaaatctatcaagaagtatagtgaaggaggctga

SEQ ID NO: 11337 - RNA, 939 nt, synthetic construct
  source 1..939: mol_type = other RNA
atgtccatcgatctcgagtctgagttgaccgaaaaatttgctgatctgcagcaattactgaagtccaggccgtctacacattacaaagtctacaaaattcccaagcggacaattggcttcaggctcatcgctcagccaactaaaaaagttaaggatgtgcagagaatcatcgttgagaacttatcaaagattgcgctcgtgcatgacgtcgccaccgcatatattaagggccggaatatcctgtacaacgccagtttgcatcaagatagtgactacctgcttaaactggaccttgaggactttttcaacagtatcacgcccgatttcttctttaaggagttggagagacagtccatcagtctgagcataaacgacaaatttctcatcgagcagctgtgcttctggaaccggtcaaagaagcgtaatggcgcactagtactttccgtaggatctcccagcagcccttttatctccaacgttgtcatgtatagcttcgataagaagctgcacggcatatgtctggccgaaaaaataaattactcacgctatgccgacgatatgaccttttctacaaaggaaaaggattccctcaaattcattcacaatgaagtgaaggggttgctgcaggagtatttcgggaatcgcattctcattaaccagtcaaagattgtgtattccagcaaggctcacaatagacacataactggaattactctgaccaacaatgacaaactgtcaatgggcagggacaagaagcgctacattagcagcctggtgtacaaatttaagaacggtcagctggactttgacgatattcaaagtctcaaaggactaatcgggtacgcacgatctatcgaacctgtgttccttttacgaatacagaagaaatatggtccatcgatcatcgaggaaatcaataaatattctagcgaagagtga

SEQ ID NO: 11338 - RNA, 939 nt, synthetic construct
  source 1..939: mol_type = other RNA
atgataatcgatttaaagggtgagctttcagaaaaggtagatgacctgcaacagctgctcaaatcaagacccagcacacattacaaggtgtataaaatcccaaagcggagtattggctttcgacttattgcgcagcctacaaagaaactcaaacacatacagaagctaatagtggatctgttattgaataaggtgaaggtgcataagaacgccacggcttacatcaaggggaaaaatatctccttcaacgcatccatccataaaaatagcgagtatttgctgaagttggatctggagaacttctttaacagcataaagccaggaatgttctttaaggagctggagaggcagaacatccggttgagcaacgaggatacagccattctggaacaattctgcttttggaaccgaagtaaaagaaaaaatggggccctggtattgtcagtgggagctccgagtagtcccttcatttccaatgtcctgatgtatacatttgaccaggaactgtatgaattctgtgcttccaaaaaaatcgcctactcaaggtatgcagacgacatgacctttagcaccaaggaaaaaaacgttctcttaagcatccacaaacacgtcgactttcttctcatcaagtacttctctaagaatctaaggattaacgacctgaaagtggtctactcttctaaagctcacaatcggcacgtgactggcgttactctgaccaatgacaatgagatctccattggtagagataaaaagcgcctcatctctgccatggtttacaacttcaagaataattcgctaggccttgatgacacccatacgctccagggactgatcgggtatgccttctctattgagcctgattttattaagcgtctccaggcaaagtacggctccaccatacttgaagacattaacaagaacctgctgcgcacttga

SEQ ID NO: 11339 - RNA, 945 nt, synthetic construct
  source 1..945: mol_type = other RNA
atgaattatcttctgctcaagaacgtagctacagatattaagttcttcgagactttgtatagcagcccttctaaccattacaaggtgttcaaaatccccaagcggtcaattggatttcgtataattgctcagccaaccaagaacgtgaaggactaccagagaaagattgttcgggtgttggagccattaactgccattcattccgctgcgacagcctataagaagaatcaagggattaaggacaacgcgtttatccataaaaatagtgagtttctgctgaaactggatctggtgaactttttcaactccatcacccccgaaatgtttttcaatgccctgaacgtgcagaagattaaatacagcgagaacgatcggatggccatgtctgagtacctgttctggaatatcaacgagaggcgagcagacaataaaaaacttgttctgagtgtgggcgcaccttccagtccttttataagcaattttgtcatgttcgccttcgataaaaaaattagccaattttgcctcgccaactctataaactattcacgctacgctgacgatctgacgttttctacgaaggataaaaatgtcctcttcaatgttatctcagaagtgcagactaccctcaaggcctgttttggccacaagcttaaaataaataccagcaagaccatcttctcctccaaagcccacaacaggcatgtaactggaattacactgaccaacaacaatcagttgtccataggtagggagaggaagcgatacatctcggcactagtccacaaggcttcacttaatatgttgcccaaagaagacatccatcacttacagggcctcatcagttttgcacgccacatcgaaccgaccttcatccagagactagaacgcagatatgggaaggacatcatccacaacatcattaatacagacctggacaaattctga

SEQ ID NO: 11340 - RNA, 948 nt, synthetic construct
  source 1..948: mol_type = other RNA
atggagtttaagatcgttcaggccctgatcaaggagtttcctgagctgaaagagcttgtcaagaagacgccttccacccattacaaagtcttcaaaatcccaaaacgtacgatcgggtttaggactatagcccagcctacctcatctttaaaagacgttcaacggaaggttgtggatttactgctgccccacgttaaggtgcatcatgccgctaaagcctacataaaaaagtgctccattaaagacaacgcggctgtccacctcaatagccagtatctgttgaaactggactttgaaaatttcttcaactctatcactcccattatgcttttcaaagtgctcgcagagcagggagtgagtgtctctaagagcgatagcaagattttgagcgagatcctattctggaatcggtcgaagaagatcaacgcacccctcgtgctgtctattggtgcaccaagctccccgctgattagtaacatcgtgatgtacagttttgacagaaagatcgaagatatatgcaaagccctggacattaattattccaggtatgctgatgacttgacatttagcaccaacattaaatcagtgctcttcaatcttgtggacatggtcaatgaagccctccagattgaatttgagggtgagatcaatatcaactcatctaaaacagtgttctcttcgaagaagcacaatcgccacgtaactggcataacattgaccaactcaaacaagcttagtattgggaggattcggaagcgatatatctccgcgctggtgcataagttcaaaaccaaccaactgaacgatttaactgagattaaccacctaaagggactcctgggctttgcttactacatcgaacccaatttcatagtaagactcacaaagaagtacggctccgacattatgatccgcatcagaaagttcaatagcgaagatctgaaatga

SEQ ID NO: 11341 - RNA, 948 nt, synthetic construct
  source 1..948: mol_type = other RNA
atgaagctgtccgttctgagccatatctcaccagaagtgttcccagtcgaattcagtcactatctggctaaaaaacccagtggtcactacaaggtgtacaagatacctaaacggacttttggatttcgagttattgcccagcccactcccgagttaaaatgtatccaaagagccatcgtggaacagatgaaaccttatgtccagatccattcgagcgccaaggcctatattaacggcattaacattaaggagaacgcaagcgctcacgtagagtcttcttacctcttgaagctggacctggaaaatttcttcaattccctgaccccctctatgtttttaaaggcactcaattatcaggagattgagctagtcaataatgacattgagccgctgattgagctgcttttttggaaccgaaccaagaaaaagtcacctaatctcgtgctttctgtgggagctccaagcagtccgttcctgtctaactttatcatgtacgagttcgacaaaatcgtgacatcctattgcacaaagtcaaacataaactactcaaggtacgcggatgatctgacgttctccaccagcgaaaagaatctcctgttcgttatccctaaatatatcgaaaacaccttgcgtgatctcttcgacgatagaattaaactcaatcgctccaagacctttttctcgtccaaagcacacaacaggcatgtaacaggaatcacaatcagtaacaataacaagctgtctctagggagggacaggaaacggtacatccgggccctgttgcacaagtttagcatcagaagcctcgataatgaagatgacatagaacatttgaagggccttattggctttgctaaaactgtggagccaatattcatcgataagatgaagaaccgctatggtgagaaagtctttattgacctttttcgctactccgggggggactga

SEQ ID NO: 11342 - RNA, 948 nt, synthetic construct
  source 1..948: mol_type = other RNA
atgaagctaccaatactgagcaggatcagttccgaggtgtttccctccgaattcagtcactacctggccaagctgccatctagccactacaaagtgtacaagatccccaagaggacgtttggttttcgagtgattgcacaacctacaccagagcttaaatgtattcagcgggagatcgtaaagcagattaagccttacgtgaagatccacaacgtggcaaaagcctatgttgatggcgtcaatataaaagacaacgcttatgtccatgtgaaatcgaattatctgctgaagcttgatctggaaaacttcttcaattccctcaccccgtccatgtttctctcagccctgaactatcaggagattgagttggtgaacaaagaagtggaccctctgatcgagttactcttttggaataggactaagaagaagcgccctaatttgatactgagcgttggtgcccccagctccccgttcctgagtaactttatcatgtacgagttcgataagatagttatgaaccactgcatgaaattgaatatcaactattcgcgttacgcggatgatctaactttctctacatcagagaaaggcgttttgtgcatgatcccaaagttcattgaaaaagtactctgtgacctgcatgacggcaagattaaactcaactacagtaaaagcgtcttctcatctaaagctcataacagacacgtgaccggaatcacactgtccaataacaataagcttagcctcggccgggaccgaaagcgctatattcgggctctcctgcataaattttcaaccgagtctttacagtatgaggacgatattaatcacctgaaagggttaatcggatttgcaaagatggtcgaacccagcttctttgaaaaaatgaagaccagatacgggtctaaggtgttcgtcgaccttttcagatacgggggagaacattga

SEQ ID NO: 11343 - RNA, 948 nt, synthetic construct
  source 1..948: mol_type = other RNA
atgcaagtctctatccttagtagaatacccccagaagctttcccaaatgggttgtcacaatacctgggcgagaaaccgagctcacactacaaagtttataagatcccaaagcggacatttggctttagagtgattgctcagcctacccccgaactgaaggacatccagcgagcaatcactacgcagatcaaaccttttgtccagattcacagctctgcaaaagcatatgtagagggagtctcaataaaggacaatgccattgtccacgtgcagtccaactacttgctcaaactagatctggaaaacttctttaactcactcacccccaccatgttccttgacgctttaaattaccagaatatccgtctggttgacggagaggttgagtctctgatggagctgctgttttggaaccgcactaagaagaagacacccaatctgatcctgagtgtgggcgccccttcaagcccatttttgtccaaccttatcatgtatgagtttgacacaattgtgtccagtcactccgcgaaactcaatgtgaactatagtcgatatgccgatgatttaactttctctaccagcgagaaagatgtgctcttctcctttccgcagttcattgaaaacgtgctgaacgatctgtacgatgggagaatcaaactgaatcatagcaagtccgtgttctcttccaaggcccacaacaggcatgtgaccggcataacgctcagtaataacaataagattagcctgggacgggacaagaagaggtacattcggagcctcctgtataaattctcggtacaggccctccaagatgaggaggacattaagcatttaaaggggctaataggtttcgccaagacagtcgaacctagcttccttgaacgcatgaaagctaggtacggtatctctatcttcaaagatttgtttcgctacgacggcgacgactga

SEQ ID NO: 11344 - RNA, 948 nt, synthetic construct
  source 1..948: mol_type = other RNA
atgaaattgcctatcctgtctagaattcccccagatatctttcccaaggggttcaatgactacctggcatccaatccttcggcccactacaaagtgtacaaaattccgaagaggacattcgggtttcgtgttattgcacaacctacaccagagctgaaaaatattcagaggtctatcatcaatcgaattaagcctctcgtgcgcatacacaattccgctaaagcctatgtggacaacgtgggtatcaaagagaacgccagcgttcacattaagagtaattatctcctgaagctggacttggaaaacttttttaacagcctgacacctcccatgctgctcaatgccatcgactaccagaacatcgaactagtggatgaggagatctatccattggtcgaactcctgttttggaatcggactaagaagaagacacccaatctggtgctatccgtaggggctccaagttcaccgtttcttagcaacttgataatgtacgagtttgatcgcattgtcaccgagtactgcggactgaacgatgtgaactattcccggtatgccgacgatctcactttctccacccttaataagggagttctctttaacattccatcattcattgaagagtgtcttcacgaattattcaaaggcaagatcaagctgaaccgcagtaaaactaccttcacctctaaagcgcataatcggcacgtcacgggaataaccctggctaacaataacaagatttctttaggccgagaaagaaagagatatataagggctcttcttcataaattctcaacgaacagcatcaaagataaggaggacatcgagcatctcaaaggcctgataggcttcgcaaagtatatcgagcccagcttctttgacaagatgaaagtaaaatacggtgaaaagctgatcttcaagttgttaaagtacgacggcatctcatga

SEQ ID NO: 11345 - RNA, 948 nt, synthetic construct
  source 1..948: mol_type = other RNA
atgcagctctctattctgtcatgttttactcctgaggactttgaaaccgaccttaatcagtatctggctgagaaaccatcacatcactacaaagtgtacaagattccaaagcggactattggtttccgcgtaattgcacaacccaccccgaaattgaaatccatccagagaaagattgtggagaagatgatgtcgtacctcgtcgtgcactccgctgcaaaagcctacgtgaagtcttgttccataaaagacaacgctttagttcatgccaactctaacttcctgcttaagctggacctggaaaatttcttcaattccttgacgcccgatatgttgaagagagcggtgcagtaccaggggttttccatcgtcgagaaggaagccaacgctctcaacgaactgctattctggaacaagtctaaaaagaagaaagcgaacttgtatctgtccgttggcgcccccagttcccctttcttgagtaacgtgatcatgtttgagtttgatgaagcagtaactaaactatgcaagcaactcgggattagttatagcaggtatgcagatgatctgaccttcagcacatctgtcaaaaatgtcctttttgaagtgccaaagataatcgaagagatcttactccagatgttcggtggaaaacttaagctaaattacagcaagacaaggttttcaagcaaggctcataaccggcacgttacaggcattacccttacaaataataacaagctgagcttagggagagagcgcaaacgatacatcaggtcactgctgcacaaatttagcaattctctgctcagtgaggatgacatcaattcgctgaagggactcataagcttcgccatgaacgtggagcctgccttcatcgccaaaatgaaggcacactatggcaccgccctgtttgacgagctgaaccgttataactgcggaaataattga

SEQ ID NO: 11346 - RNA, 948 nt, synthetic construct
  source 1..948: mol_type = other RNA
atgcaactctcgattctgtcacggatctcccaggaggatttcaattctagcctgaatcagtatctggcagagagcccaagtactcactataaggtgtacaagatcccgaagaggtcatttggatttagggtaatagcccaaccaactccccagctgaagaatattcagcgcaagatagttggcgaaattaaaggctacatgcatgtccactctgccgccaaagcatacgtgaaagactgtagtattaaggacaacgccatcgtgcatgtcaactctaactatttgctaaaactcgatcttgagaacttctttaacagccttacacctgcaatgttagcccgggccctgaagtatcaggggttgtcattactggaatccgaagtcgctgctctcaatgaactgctgttctggaacagaacgaagaaaaaatctcccaatcttgtcctttccgtgggtgctcccagctccccattcctctccaatgtgatcatgtacgaatttgacgaagccgtgtctaagttttgcagcgagtctgggctgagttattcgcgatacgctgatgatctgacatttagcacatcaatcaaagacatcctgtttgaggtgcctaaattcatcgagagtattctgttccagctcttccagggcaaattgaaactgaactactccaagacaaccttctcaagcaaagcccataataggcacgtaactggcgtgaccctgaccaataacaataagctatccctcggccgtgagagaaagagatatatccgcgctatgttgcacaaattcagttgtgaagagctgtgcgactatgacgttcaagcgttgaagggattaattagctttgcacttaacatagagcctacctttgttgacaagatgaagggtcggtacggggcgaagctcttcgacgatctattcaagtacaataacggagataactga

SEQ ID NO: 11347 - RNA, 954 nt, synthetic construct
  source 1..954: mol_type = other RNA
atgaagcttagcattttgtcccggatatcccaagaggccttctgtagtaatttaacacaatacctcgccaaaaacccaagcaagcactataagacatacaagatccccaagcgccgatttggattccgtatcattgcacagcccactcctcagttgaagctgattcagcgcaagatcgtagagatgctcaaagtacaccttaaggttcatccggcagctaaggcgtacgtcaaaaactgctcgatcaaagataatgccgaagtgcacgtgaactcaaattatcttctgaaactggatctggaaaacttctttaattccctcacacctgacatgttagcgaaatcactcttttatcagggagtcatgttctccgaaaacgaggtggctgggctgaatgaactgctcttttggaaccgaaccaagaaaaagaccccaaatctggtcttgagtgtgggtgctccctcctcaccatttctgtctaatatcatcatgtacgagtttgacgacattgttagcgcccggtgctctgaactgcaggtgagctattcaagatacgctgacgatctaaccttcagtacgttggagaaagggatacttttcgacatctctgagcttattgagagcgttctgttcgagctgtatcagggcagggtgaagctcaattacagcaagacaactttttctagtaaggcccacaaccggcatgtcactggcattaccctcaccaacaacaacaagctctctctaggaagggagaggaaaagatatatcagggcattgttacataagttctccaacgaggccctgtctgattatgatatacaagtgctgaaagggctaattggttttagcagatccattgaacctatgttcatcgaaaaaatgaagatacgctacggcatcgaactgttcgcaaaactgtacaaacagacgaattcgaatggcgacacttga

SEQ ID NO: 11348 - RNA, 945 nt, synthetic construct
  source 1..945: mol_type = other RNA
atgaaactgaatattgagaaagtcctggccgaaaaaaatccaaatttgaatatcggcgagctcctagctagtataccgagcaagcattataaggtgtataagattccgaagcggactatcggttttagattgatcgcgcaaccaacacccaaaatcaagaacatacagcggtccattattgccgaactggcccctctgctcaagattcataaatctgcaacagcgtatatccagggcaagtccattcttgataatgcccgcgttcacagggcctcaaactacctgttaaagctggacctggaaaatttctttaactctataacgcctgacatcttcatcaatagtttgaaaaaccagggcatcgagctcagtgctaagaattcaaacctactgatccaactgcttttttggaataggagccgaaagagaaatggaaatctcgtactgtcagtgggggctccttcttctccattcatttccaacattatcatgtacgacttcgacaaaaaactgtaccagtactgcaagtcgatcggagcaagctacaccagatatgcagatgatctcacttttagtgcaaaggaaaagtcggtgctccagcgcatccccaacgaggtgaaaaggttgctgttcaaagagtttagcaacgaaatccggcttaacaactccaaaaccgttttctctagcaaggcccataaccgacacgtgaccgggatcaccctttccaataacaacaagctgtccctggggcgggatcgcaagaggtatatatctgccctggtccacaagttcacactctcattgttagatgaggacgacattttacacctcaaaggcctaataggacttgctaaatttattgaacccgagtttatcgagagacttgagagcaagtacggcaatagcttcattctgaacctgaaccgttacctcattaaagattga

SEQ ID NO: 11349 - RNA, 957 nt, synthetic construct
  source 1..957: mol_type = other RNA
atgagcctcgacctccattcgtacctgtcacagtttgatagtgacttggacgcatttctcctgaccaggcctagtaagcattataaagcctacaagattccgaagcgcaaagtgggttttcgggtgatcgctcagcctaccccaaaggtcaaaatgctgcaaaggaaacttgtgaaacagttatctacaatcctcgacgtacacgacgcggcatatggctacagagtggggagaggcataaaacagaacgccgaaaagcacgtggacagcgaatatctcctgaaaatggatatcagcaacttctttaactccctctcaccaaatgtatttttcgatgccatccactctcagaatattcggctttcaaaacaagacagggagattctgcgcgaaatatgcttttggaatcgtaccaagcggtcaacggggaagttggttctctcagtgggggctcccagtagtccctttatcacaaacgtgatcatgttctccttcgacgagaaggtgagcaagtactgtgagaagatcggcgtcacctataccaggtatgctgatgatctgacattcagcagtaaggaaaagaatcttctgcagaaggtgcgtgagcagatagtcagagacttagaatccctgtactctggtgttttagtgattaacgaggccaaaactatattctccagcaaaggcaataacagacacgttactgggatcgtattgactaacaataatagactgagcattggacggcgccgaaagaggtacctatccgctctagtccataagttcaagtgcaacgagctggatgcacttgattctcgaatgctgcagggatggttgtctcaagcccgccacatcgaaccttccttctatgagcggctggaggttaaatacggaaaggagattctgaaacagatttcctctttcaatatcgaagtcgaagatgagcccggcacatga

SEQ ID NO: 11350 - RNA, 954 nt, synthetic construct
  source 1..954: mol_type = other RNA
atgaagattgaaatcccatatcaggatataggaattagcaggatcaaactcgcctccactgctagacgctcgccactgaagtacaaagtgtataagatccccaaaaggcgctcaggcgtccgagtgattgcccaaccaacccctgaggtcaaagatctccagagaaagcttgtcgactttttgcggacccagcttacagtgcacagttgtgcgaccgcctacgaacctgggaaaggcattcgggaaaacgctcagcaacatgtgaataacccctacctgttaaagatggacttcagtaacttctttaacagcatcactcccgagattttcaaaaatgctctgttgcacgattccgttgagatcgacgataacaccctcatgttgcttatcaacatattcttctggtgccctgggaagaaactgtctggaaaactggtcctctcagttggtgccccttcctctccgttcatatccaattacgtcatgaagaagtttgatcagctcctgagcgttctgtgcgaacaggctggtattacctatacacgatatgcagacgacatgacgtttagtacacaaagagagaatgtactgttcacactgaaagagcagatcgccacgctgatagtgcagagtggctatgaaaacatcaccatcaatgaatccaagacagtgttttccagcaaggcacacaatcgccatgttactggggtgactctgaccaatgataaccagctctcagtgggcaggaaaaataagcggtacgcaagctcactaattttccgttttaagttaggcgaattgtctacagacgagactcttatgctaaaagggctcttagcccattactttcacatcgaacccgagttcaagctgtctatgcaaaagaagtacggagtagagattatcagcgacattgtgaactatcaggagctgatcaacgagtctgacagctga

SEQ ID NO: 11351 - RNA, 954 nt, synthetic construct
  source 1..954: mol_type = other RNA
atgaaaattgacattccctataaggatatcggtatcaatgaaaagaagttattcctaacagcccatcggattccgctcaaatacaaggtgtacaaaatacccaagcgccactccggagttaggataattgctcagcctacccctgaagtgaaagaaatacagcgcaaactcgttggcttcctgcggacccgtctgagaatccataactgcgcaacagcatatgaggccggcaagggcattaaagagaacgctctgaaacacgttaaaaaccagtatttgctgaaaatggacctcgcgaatttctttaactccatcacgccagatatctttcagaatgccttagcccacgattcagtggaactggacgagactacctggacaactctcgtcaatgtgtttttttgggctccaggtaagaaattgactgggaaactggtactcagcgtgggagcaccatcgtcacctttcatctccaactacatcatgaagaggttcgatgagcaggtatctgacctatgcgagaagagcggtgtcacttacacccgatatgcagacgatataactttcagcacgaaccaacagaacattctgttctcccttaaagagaatatcgggagtctgttgcaagcgaatggctataagtcaatcaacatcaacgagagtaaaaccgtcttttctagcaaggctcataataggcatgtgacaggagtgacccttacaaatgacgggaagttgagtgtcggccgagataagaagcgctatgccagctctctcatctttcggttcagattagccgagctttgtcatgacgacattctttttctgaagggactgctggctcactacttccacatcgagccctccttcagattttctatggaaaagaaatacgggaagaacattattcacgccctgatgaagtaccagggcgatgtgcacgaacccgacaattga

SEQ ID NO: 11352 - RNA, 939 nt, synthetic construct
  source 1..939: mol_type = other RNA
atgcaattagagcgaaagttatgtgagtctttcaaccttacccctctgcagctgagcgtgttgagttccaaagcaccaaagaagtatagggtctactatatcccaaaaagaacatcagggcttcgcgctattgcgcagcctactaaagagttgaagaatattcaacggtttctggctagtgaactcgatgcctactgccctatccatcccgccgcaatggcttaccgaaatgggaagtcaatcaaagacaacgctgaatgtcacaagaataacccgtacctgctaaagatggacttccagaatttctttaacaagataaagcccgacattttcttcgaaaagcttaacgccctcgatgtgaagtatgatggaaaagacaagaaacacctacgtaattttctgttctggaaaccaggtcagaagcgctccataacacatatcctcagtataggcgcaccttcctctcccttcgtgagcaactttgtcatgtttgacttcgattttgagatctcgaaatggtgcgccgaattcgatattgtttacaccagatatgctgacgacattactttttctacggcccggaagaatattctgttcagcgtccccaagattgtaaagaacatcttgagcaaacatgcgtcaggcattaccatcaacgaagcaaaaacaatcttcacgtcaaaagcccacaatagacacgtgaccggagttacaatcaccaacgatggaaaactcagcatcggcaggaagaaaaagaaatatctgttctccctggtgtttaaatactctattggcgagctgactagggatgagatcttttacgccaaggggctgatgagccattgcatgcacatcgagaagaatataatctcccggatgaagaataagtatggagccgacgtgattaacaaatttctcaaagaaggtggcgacgagtga

SEQ ID NO: 11353 - RNA, 984 nt, synthetic construct
  source 1..984: mol_type = other RNA
atgctggccgccatctctgctgctagcataagtgagatgaatatcatgcaactggagaggaaattatgcgaaaaatttgagttgaccccactcagactcagcattctgagctcaaaggcgcccaagaaatatcgggtttactacattccaaaacgcaactctggcttgcgggcaattgcccagcccactaaagaacttaaggacatacagcgatttctgatctccgaattggagccatatctgcctgtgcatcctagcgccatggcttaccgcaaaggtgtgagtattagagataacgctgagtgtcacaagaataatccatacctcctgaagatggatttccagaacttcttcaacaagataaaaccgaatgttttcttcgataagctgaatgacttcggctttgagtacgactataaggacaagatttacctccacaactttttgttctggaagcccggccagaagcggtccatcacctacgttctttctgtcggcgcccctagtagtccctttatctccaactttgtgatgttcgagttcgatatggctgtatcaaaatggtgcgcagaatttaatatcatctataccagatacgcagatgatgtcacattcagcacttccaggcgaaatatcctcttttccgtacctaaaatggtgaaaaatatgcttgcccaatatgcatctggaattacaattaacgaagcaaagacggtcttcacatcaaaagcccacaacaggcacgtgaccggtgtgactattaccaatgatgggaagttatcaataggacgcaaacgtaagaagcacctattcagcctgctgtttaaatattccatgggggaactgacaaaagacgagattctgtatgcgaagggcctaatgtctcattgtatgcatatcgaaaagaacatcatcgccaggcttaagatgaagtacggatcggagctcatcaacgacttttttaaagacgggggggacgagtga

SEQ ID NO: 11354 - RNA, 984 nt, synthetic construct
  source 1..984: mol_type = other RNA
atgctggccgctatagttgcggctagcatctttgagatagacattatgcaactggctaaaaaactttgcgagaagtttagtctgacaccattaaagctttccatgctgagcactaaagcacctaaaaagtaccgggtctattatattcctaagcgaacaagcggctttagggccatcgctcagcccactaaggaactgaaggaaatccagaggtttttggtgtcagaactcgaacccatactaccgattcattcatccgccatggcatacagatgtgggatctccatcaagaacaatgcagagaaacacaaaaacaacagcttcattctcaaaatggacttccaaaacttcttcaacaagatcaaacccggaatcttcttcgagaagttcaataatctggatatccagtgcaattctcatgataggtatctacttcacaacttcttgttttggaagcccggccagaagagaagtgtcacccacattctgagtgtgggggctcctagcagcccattcatctcgaatttcgtaatgtttgacttcgattcagccatttctgaatggtgtgcaaaatttgacatcgtgtacacccggtacgccgatgatatcactttcagtacctccagaaagggaatcttattttccgtgccaaagattgttaagaacatgctcgcggagtatgcatctgggatcaccctgaacgaagccaaaacgatttttacctccaaagcccacaatcggcacgtgactggagtaaccatcacaaccgacggcaagctgtcaattggccgcaagaaaaagaaatacctgtactctctcgtctttaaatatacaaaaggtgagctcacgaatgaagaaatattgtacgccaaggggttgatggcttattgcattcatattgagcgtaacatcataactcgccttaagaagaaatacggctctgaggtgattaatcagtttctgaaggagacaggtgacgagtga

SEQ ID NO: 11355 - RNA, 936 nt, synthetic construct
  source 1..936: mol_type = other RNA
atgcaaattgaaaagctactgtgcgagaaacataaggtaaccacgttgcagctgtcggtgatcgctgcgaaagccccaaagagatacagggtgtactatatacctaagagaacgaccgggtttcgggtgattgcacagccgacaaaaaagattaaggaaatccagcgtactctagtcgcctacctgaaggattttctcccagtgcattcctccgccactgcctatcagaataacatcagcattaaggacaacgccaatcggcacaaaagaaacgactacctgctcaagatggactttcagaacttcttcaacaaagtgaagccagagcttttcttcgcaaaactgaataagctggactttaatatcacacggaaggatgaatccctcttgcgcgatttcctgttttggaagcctggtcaaaagcggtctaaaactcacatactgtctgttggcgctccctcttcacccttcatcagcaactttgttatgtacgagttcgacaaagctatgcatgagttttgtgtttcaatgggagtcgtgtacaccagatatgccgatgacataacattcagcacttccagtaagggcatgctttttgtcattcccaggattgtgaaggcacttctcgcggaacatgccagcggccttaccgtcaatgagtctaaaaccgtattcagttcaaaggctcacaataggcacatcacaggcgtcacaatcactaacgaaggtaagttgagcataggaaggaagaaaaaacgacatttatcaagtctgatcttccgctattccttaaacgagctgaccgaggaagaggtgttaaatgcaaaagggctgctcagctattgcatccacattgagcctgatttcattctccgcatgaaagtgaaatacgggcacgatctgatcaataaatttttggctgaaggagcccgatga

SEQ ID NO: 11356 - RNA, 945 nt, synthetic construct
  source 1..945: mol_type = other RNA
atgactgtccaaatcgaaaaaatcctgtgcgaccacctggactaccccacatacgagctgacttctattgccattagggcacctaagaagtatcgggtttactacattcccaagagaaatggtggcttacgcgtcatatcgcagcctacaaaacagctgaaaaagatccagcgcgtactggtggcccacctcactaatctgctccccgtgcactcttcagcaatggcttatcggagggggatctcaattaagcataacgctatcctgcacaaggagaatacgtttcttctgaagatggacttccagaacttctttaacaagatcaagccggacttcttctttagcaggctaaacagtatcgacatcaatcttgtcgccaacgatgcgttcctcttaaagaactttctgttttggaagcccggccaaaaaagatccgtgacctatattttatctgtgggcgctcctagttcaccatttataagcaacttcgtgatgtacgagttcgatgaggccattaatgagtggtgcaaaaatcacggaataacatattcccgatacgccgatgacatcaccttctccaccaacaaaaaagatcttcttttcagtgtaccaaagattgttaagagctttctggctaagcatacacagggcatgaccattaatgaagccaaaaccgtgtattcaagcaaagcacataaccgccatgtgactggggttacgatcaccagtgaaggtaaattgtccgtgggcagaaagcgaaagaaacatctgtcctctctcctgcacaaatatagcctcaacttgctaaacccagaggaaattttgcgggcgaaggggttgatgagccactgtatcaatatcgagaaagatttcctgctcaggatgaaaaaaaagtacggaaaggatatagtcgacaattttatgcgtgaaggaaattacgactga

SEQ ID NO: 11357 - RNA, 933 nt, synthetic construct
  source 1..933: mol_type = other RNA
atgcagctaacctccaagataatcaaaaagttcaactacgagcgccttgcctttgagcagctgttaaacgaagccccgaaaaagtacaaggtctactacattcctaagagaggagccggttttagagttattgctcagccaacaaaggaactgaagaacgtgcagagatttatcgtctctcttcttgaacctattctccccgttcaccacaaagcaatggcgtatcaactcaacaagtcaatcaaggataatgcctacctccacaaggataattcctatgtactgaagatggatttccagaatttcttcaacaaaatcaagcctgacctgttcctcaccaaaattgaagcaagcaacctggagttggagtccctggataagttcgtgctgcggaatctcctgttttggcggcctggcaccaaacggtcaatcaccttgatccttagcataggggctcccagctctcccttcataagtaactttatcatgtacgacttcgaccgaaatgtggacgactggtgtctgaatcatggcgtggtgtactcgcgatatgctgatgacattactttttctacgaacaccaaagatctgctcgtgagtgtcccaaagatggtgaaaaaaatgttgtctgagtatgttcccggtctgacagtcaacgagtccaaaactatatttacgagcaaggcacacaatcgccatgtcactggggtgacactcacaccagaaggcaaactgtcagtgggaagggaaaggaaaaggatgctgtatgccaaaatgcatcaatattacctagggatgttgagtaccgaggacatcaacaaggttcgtggattagtaactttcgctaattacattgagggcgactttattttcaggcttaagaagaagtatggcaatgagttaatcgatcgctttctgaaagaagggtgctga

SEQ ID NO: 11358 - RNA, 936 nt, synthetic construct
  source 1..936: mol_type = other RNA
atgcagctgacgagtaagatcattagcaagttcaactacaatcggctggcttttcagctcctgttgaacgaagctcctaagaaatacaaggtatattacatccccaaaagaggcgccggatttagagtcatcgcccagccaactaaagaactgaagaacgtgcagcgttttattgtgtctctcttgcaacctaaactccccgtccaccataaagcaatggcatacgaatataagaagtctatcaaggacaatgctctcctacacaaggataacaattacatcctgaagatggattttcagaacttcttcaacaagatcaaacccgacatatttttctctaagcttgagaacacgggcctgaagctggactccttcgatgagaataccctccgcaatttgctcttctggcggcctgggaaaaaacgctccacaaccctgatactttcagtcggggccccatcatcaccgtttatttccaactttgttatgtacgacttcgataagtctctagatgattggtgtaggaataacggtattacatatagtcgctatgccgatgacattacatttagcaccaatatcaaggacatcctctgcagggtacctaaggtggttaaaaagatgctgagcctgcacgtgcccggcctttcgataaatgagtccaaaactatcttcactagtatggcgcataacagacacgtgactggagtgaccttgacaccacagggaaatcttagcatcgggcgagacaggaaacgaatgctgttcgcaaaaatacataagtattccttgggcttactgagtagcgaagagattaacaagaccaaaggcatgattgccttcgctaactatctggagggtgactttttacttcggctgcaaaaaaagtacgggtgcgagttaattaccaaattcctgatggaaggaaataagtga

SEQ ID NO: 11359 - RNA, 936 nt, synthetic construct
  source 1..936: mol_type = other RNA
atgcaactgacatctaagatcattagcaagttcaattacagcaaccttgcgttccaccttctcctggccgatgcccccaagaagtacaaagtgtattacattccaaagcgggggtccggcttcagaatgatcgcccagcccaccaaagaactgaaacatgtacagagattccttgtaagcttactcgaaccaaatttgcctgtgcactataaggctatggcctaccagaagaataagtccataaaggataacgccctgctgcacaaaggcaataactacattctcaagatggacttccagaatttcttcaacaagattaaacccgagctgtttttctctaagctgcaaaacgctaatatcaccctcgagtccggagatagggctgttttacgcaacctgctcttttggcggcccggcacaaaaaggagtatgacactgatcctctctattggggcgccatcgtcaccgttcatcagcaactttgttatgtacgacttcgatcgcaaaattgatgactggtgcgagtccaataatattgtctacagtcgatatgcagatgacatcactttttctacaaacagtaaggacttactatcgtctgtccctaaagtcgtgaaaaagatgctggcaactaacgtgcctgggctgagcatcaacgagtcaaaaactatatttaccagtatggcccataacaggcatgtgaccggagtgacccttacgtcagacggtaaactgtcaatcggacgcgacagaaagcggatgttgtatgcaaaaatacacaagtatagcctgggactcttgtcctccgaagagatcaataaagttcgagggctaatcagctttgctgattacttggaagaggactttcttctgcgtctaaggaagaaatatggtcacgacctgatagataagtttatgaaggaaggcggcttgtga

SEQ ID NO: 11360 - RNA, 930 nt, synthetic construct
  source 1..930: mol_type = other RNA
atgacaatacgcaaagagctcagtaagaaactggaactgcctgagttgcagatcgttctcttctgtattaatgcgagtaaaaagtacagagtgtactctattcccaagcggaaggtcgggcggaggattattgcacagcctacaaaagagcttaagaaatatcagcgtgtgttggtcgagatcttacagccgtacctgaaagttcacgaatgcgcatatgcgtacaaaaccgacatcagcattaaggataatgctgaacaacacagaaggaacacttatatcctgaagatggatttccagaactttttcaacaagattaagcccgagctgtttttttccaaggtggattcggtcagcataaaattatctagagaagatcggagtctgctgatggacattcttttttggaaacccggttccaagcgatcaacggccctcgtcctttctgtaggggcacctagctctccctttatcagcaacttcatcatgttcgattttgacaaggccatatttgaatactgcaagaacatcggtgttacatatactcgctatgctgatgaccttaccttcagcaccaataaaaaggacgtgttgttcggggtgcctgtagtggtgaaggccgctctgtccgcacttgccccaggaatgatcattaacgactccaaaacagtgttcagctcaaaagcccacaaccggcatgtgaccggagtcacgatatctaatgagggcgaactcagcctgggaagaagtaagaaacgatatatatcctcactcatccataagtactctctgggcaccctgccagactccgagatcgactacctaaggggcctcctgtcctatgcccaacacatcgagccaatgttcctgactaggctaaagaataaatacggcgagaagttgattaatcatatccgctcaggcgcttga

SEQ ID NO: 11361 - RNA, 939 nt, synthetic construct
  source 1..939: mol_type = other RNA
atgagtatctccattctgcttgctaaaaagcttaacatcaccgaacatcaacttcattcattctgtctcaatgctccaaagaaatacaaggtgtatacaatccctaagaggtctatgggaaagaggattattgcccagcccactaagaccctgaaacgtgtccaaagagaggccttgggaattcttttgccctttctggaggtgcacttctctagctacgcttataagaaagggctggggattaaagataatgccatgctgcacaaagataattcctatttgctcaagatggacttccagaacttcttcaacaagataaaacccgacgtgtttatggccaaactgcggaacaagatcccagacatctcgtacagcgatgaagaattgctgaagaacgtttttttctggaagccggggctcaagaaaagtaaaaccttgatcctctccatcggcgcaccttcaagccctcacatctcaaatttcgtgatgtttgaatttgactctgagattgagagcctatgcaggggtttaggtgttgtctacactcgctatgctgacgatctgacttttagcacaaacaaaaaagacgtgctgtttcagctgcccaagattatacggggactcctgtccacatgcatgccatctttaacgatcaacgacagtaaaacggtttttagcagtaaggcacacaatcggcatgtcaccggcgtaacaataaccaacgacggcatgctgtcactaggaagaaaaaagaaaagatacctttcctcgctgatcttcaagtattccctcaatcagattaattacgaggatttctctcacctccgagggatgctgggtcatgcaaagtacatagagcctgcgttcgtatttcgcatgaaggccaagtatggcgccgagctggtggataagatcattttaggcgaaagctacgagtga

SEQ ID NO: 11362 - RNA, 936 nt, synthetic construct
  source 1..936: mol_type = other RNA
atgtccatttataatcagctatgcgagaagatgaaagttgaccctgctgatctggactttttctcccacaatgcccccaaaaagtacaaggtttactccattccaaaacggactgtgggccacagactgatagcacaacctacatccgaattgaaggaataccagagagcactggtgtctatcctcgagaaatcattgccgattcatgagtccgcctacgcatatcggaaaaacatcggcataaaacagaatgccctgaagcatgtcgctaattcatacctgctgaaaatggacttccagaacttcttcaataaaatcaagccagagatcttcttcagcaaactcctcaaagccaatattgaaattagcgacgacgatcgcaagattttaaagaaccttctcttttggaagccaggactgcgtagaagcgtaacccttgtactgagtgtgggcgctccatcaagccccctgatcaccaactttgtcatgtactactttgacgaacacatgacgaactggtgtaaaaaaaacaagatttcctacacacggtatgcggatgacataaccttctcgacaaacaccaagtctattttgtttagcgtgccctctatagtcaggactatcttgaagcaagagattcctggaatgtcaatcaacgagagcaagaccattttcagcagtaaggcccataaccgccacgtgactggtgtgactttaaccacggataacaaaatctctctcggacgaaagaagaagaaagaaatcagtgcccttttacaccgctttacactgaagatcctccctcccgaggatatctctttccttatcggtctgctgagtcacgctaagaatatcgaaccgatatttctgtctaggatgaaatccaagtatggggaggatacattttataatctaaggggggactatcatgtttga

SEQ ID NO: 11363 - RNA, 936 nt, synthetic construct
  source 1..936: mol_type = other RNA
atggaaatcctttctgctgtgagcaaagagttgggcgtcaatgtaaatgagctgcggaggctaagttcagtcgcaccaaaaaaatacaaggtgtatactatccccaagcgccaatcaggctttcggcttattgcccagccgactagcgaaattaagcgcatccaacgagaagtggttaaaatcttggcatctaagctgattgtgcatgatgccgccaaggcctacaaggttagcatcggcatcaaagacaacgctaagattcatatggctaattcctatctcctgaaaatggactttcagaacttcttcaacaagataaagcctgccctgttgtttgataagctcagatcacagggagttgtgctctctggtgaggacaaggaattccttgaagggatattgttttggaaacctggaaaaaaacgctctattaccctggtgttatccgtcggtgcccctagtagccccttcgtgtcgaatttcgttatgtacgacttcgacaactacataaacaactggtgctccgtaaggaacatctcatactcccggtacgccgatgatattaccttctctaccgacgagaaaaatatcttatttgaagtgccaaaggtggtcagattcgcgctatcgctgtgtgccaaaggaatttctctcaatgagagcaaaacagtgtttacaagcaaagctcacaataggcatgtcacgggcgtaacactgactgtcgatggggagctgtccctgggaagacagaaaaagcgtatgatctccagtctgcttcacaaatataccctggggctcttagcaaaggaagatgtgatcagcctgaagggttttgtgggccacgcgctctatatagagcccaagtttatcgcacgaatgaagattaagtatggcaaggaggttattcacgctctgttcagtgaggaggggatgtga

SEQ ID NO: 11364 - RNA, 948 nt, synthetic construct
  source 1..948: mol_type = other RNA
atgaacatcttaactactctccgtgagcagcttctcaccaataatgttattatgcctcaggaattcgaacggttggaagtaagaggtagccacgcttataaagtatattctatcccaaagcggaaagctggccgccgtacaatcgcacatccatcctccaagttaaaaatttgtcagcgacatctgaatgctattctgaaccctctgctgaaggtgcacgactcaagttacgcctatgtcaagggaagatcaattaaggacaatgccctggtccattcccacagcgcatacgttctgaagatggatttccagaactttttcaactcgatcacccccacgatactgaggcagtgcttaattcagaatgatatcctgctcagtgttaatgagcttgaaaagctagagcagctgatattttggaatcccagtaagaaaaggaacgggaagcttattctctcagtggggagtcctatttctccactgatttcaaatgccattatgtacccctttgacaagatcatcaacgatatatgcaccaaacacggcatcaactacacgcgctatgcagacgatatcaccttctccactaacataaagaataccctgaataagctcccggagatagtggagcaattgatcatccaaacatacgccgggagaattatcatcaacaagaggaagaccgtgtttagcagcaaaaaacacaacaggcacgtgacaggaattactctaacaaacgactccaagatctctattggcagatctcggaaacgctatatttcttccctcgtgtttaagtacatcaacaaaaacttggacatcgatgagatcaatcatatgaaaggtatgttggccttcgcgtataatattgaacccatctacatacaccggcttagccataaatacaaagtgaacatcgtcgagaagatactgcgaggaagcaattga

SEQ ID NO: 11365 - RNA, 948 nt, synthetic construct
  source 1..948: mol_type = other RNA
atgaacattctgacgaccttacgggaacagctgctggcgaataatctgctaatgccacaagaatttgagaaactggaggctaagggctcccatgcctataaagtatattccatccctaaacggaaggccgggagaaggactatagcacacccgtcaaagaaattgaagatatgccaaagacagttatctcatattttgtcccccttactcaatatccacgatagctcttacgcatatattaagggccgatcaattaaggataatgcactggtacatagccactgcgactatctgttgaaaatggatttccacaactttttcaactcaatcacaccttctattctcaggaaatgtcttgttcagaatgagatcctgattaccgagtacgacatcaacaaaatagagcagctcatattctggaacccttcaaaaaagcgctatggtaagcttatactgagcgtcggatcgcccatcagtccactcatcagcaatgccatcatgtatccctttgataaagtgatctctgaaacctgtaccaaaaacgggatcaggtacacaaggtacgccgacgacattacttttagtacgaatcgcgacaacgtcctgcacaatatccccgaacttgtggagcacgtcctaaacaagatctactttggacagatcattatcaataagcggaagaccttctttagctccaagaaacataatcgacatgtgacaggcatcacactcactaacgacaataaggtgtctattgggagaagccgtaaacggtacattagtagtttggttttccgttacattaacaagaacctcgatattgatgacattaatcacatgaagggtatgcttgctttcgcttataacatcgaaccaatgttcatccacagactgtcccataagtacaaggtgaacatcgtggagaaaatactgcgcggacacgactga

SEQ ID NO: 11366 - RNA, 948 nt, synthetic construct
  source 1..948: mol_type = other RNA
atgaagatcgtgcccattcttcagcagcagctgacaaaacggaaaaccgtgagcgacgcagactttaggaaattgcttgctctgggatctcatgcgtacaaggtgtataccattcctaagagaaaggccggtcaccgccttatcgcccacccatctaagagcctgaaagaatgtcagaggcaactgaccagcattctggagctctatttacctgtctcagactctagttacgcttatatgaaaggcaggtctataaaggataacgccctggttcatgttcactcttcctatattctcaagatggacttccaggacttcttcaattcaatcactccggagatctttcgacagcatctggagcgtaatgacataattattagcgagacggaatttaagatccttgagcaactcatcttctggaatccttccaagcgcaaatatgggaagctaatcttaagtgtagggagtcccatctcaccattcatttccaacacgatcatgtattacttcgacgagtacatcaacaacctgtgtagccaactaaatatcaattactcacggtacgccgatgatctgacatttagcaccaaccagaaggatatactctttagtctgccacagtttgtgtcggatattttgcacaaagaattctcagggagaatagtgattaaccaccggaaaactgttttttcctccaaaggtcacaaccgccacgtcacaggagtcactataaccaaccagaataaactgtccattggcaggaaaagaaagcgatatatttccagcctggtattcaattgcatcaacaacaatctcagtaatgaggaaatcatgcatttgaagggcttgctggcatactgctacaatatagaacccatgtttattcatcggctttctagaaagtacaagttcaacatcatcaagaacctcgtgaaaaaggatgactga

SEQ ID NO: 11367 - RNA, 990 nt, synthetic construct
  source 1..990: mol_type = other RNA
atgtgcttggggtgtttctatgttggcgggaagctgaagatactgcctctgctggagcagtccctggcaaataacgaagtcgtgagcaacagcgatttcagaaagctgcaaatgctggggtcacacgcttataaagtctacaccattcccaagagaaaggcaggaaaacgggtgatagcgcatccaagcgttaagttaaagaagtgccagtccaacttagtgagcatcctggaattgtatctacctgtgcatgacagtagttacgcctacgtgaagggtcgatctattaaggataacgccctggtacacgctaaatctgactatttgctgaagatggacttttacgactttttcaatagcattactcctcccctgctttctgagcatctcgataaggttggacttacagtagacttatacgaactggctaagcttaaccagctgctcttctggaaccccagtaagaaaaaacacggaaagttgatcctgagtgtgggcgccccatctagccccttcatatccaatacgatgatgtacttcttcgacgaaaaaatctccaagctctgtgcaaagaataacatcaattattcgcgctacgccgatgacttgaccttttcctctaataaaaagggcattttgttcctcctcccagatgtggtgaagaaaatcctcaagcaggagttcaaggacaaaatcgtcattaatgactccaagaccatctttagttcaaaaaagcacaatcgccacgtgacaggactaactataaataacaacggctcaatttctctgggcagaaaaaggaaaaaatacatctcaagcctggtttttgagtaccttaataataggcttgatgagggtgaattttatcacctgatcggtctactcgcctttagctataacgtcgagccgatgtttcttcatcgtctctcccggaaatacaaagtgaacgtcatcgattcaattctcaaaaaagggaggctgaacgagtga

SEQ ID NO: 11368 - RNA, 954 nt, synthetic construct
  source 1..954: mol_type = other RNA
atgaaaatcctgtcaatactcgagctgcggctgtctgagcgggagaagataagttacgcagatttcttgaaactgcagaacctgggaagccatgcgtaccgcgtttactcaattccaaaacgcaaagcagggaatagaacaattgctcacccttccagcaagctcaaggagtgccaacggcagcttgtgagcatcctcgagatgtatctgcccgtacacgagtccgcttatgcttatatgaaaggcaggagcattaaagataatgccctggtccattccaagtctgcctacttactgaagatggactttcaggacttcttcaactccatcacccctgaaaccctcgaaaggcacatgcggaagttgggccttacattacctatcaacgaacagaaggccctggagcaattagtattttggaacccatctaagcgtaagtatggcaaactcattctgtccgtgggatctccgattagcccctttattagcaacagtgtgatgttctttttcgatcagaaaatgttcgacatctgtaccaagcacaatatcaattactcccgttatgccgacgatcttacttttagtactaattccaaggggctacttttcagtatccccgagctcgtgaagcaggccataaaacaggaattcaatggggaattggtcattaacgattctaagacgatatttagctcgaaagcacataacaggcatgtcaccggtatcactatcaacaataacggccagatttcactaggccgacaaagaaagagatatgtgagttctctggtttaccagtataccaaaaacgaactgagcgaggaggaaatcgaccgcttgaagggtttgctgtcattttgccacaatgtggagccctacttcctgtcaagactcacacgaaagtacaaactgaatatcgttgacgaacttctaaggaagggaacaaagaaatga

SEQ ID NO: 11369 - RNA, 945 nt, synthetic construct
  source 1..945: mol_type = other RNA
atggagtctaagctgtttcatacactgtgtacaaacttgaaccttagtacctctgaattaatggagttcattagtaatgcccccatctcctacaaagtgtattcaattccgaaaaagaacggcggaagacggacaatagcgcacccctcaaagaagctaaaaaagatccaacgggaactgctcgtcctacttgagaaaactttacagattcaccagtctgccttcgcttacatcaaggggaaaaacatcataaacaatgccgagcttcacaagaataataaatacctcttgaagctggacttctatgatttcttcaatagcatctccgacgtgatttttatcaattatctggacaagatcgggctgagcctgtccgaactggactccaaattagtgagccatatctttttttggaacccaaataacaaggataagacccataaaaagctcatcctgagcgtaggctcaccctctagccctatgatctcgaacgctatcatgtatttcttcgacagcgagatcaaaattcactgcgattctatgtccatagtttatactaggtatgcagacgacctgagtatcagcggaaatgacaaggataaactgaaagagatcacccagtttatacgctctcgcctgtacgacctctttaacgggaaaattatcctcaatgatctcaagaccattcttgtctcacctggctacaataagtttattactggtatcacccttacaccacagggaggattgtccattggtaggaagagaaagaagtacattttcgggttgatctacaagtacataaagaacgaactgaaagatgatagcattagtcacataaagggcatgctctcatttagttattccattgaaccttcgttcattcgacgtctggagttgaaatacggcaaagatacgatcagaaggataattaacgagaaatga

SEQ ID NO: 11370 - RNA, 945 nt, synthetic construct
  source 1..945: mol_type = other RNA
atggaatctaaatttttccacaccttgtgtaagaagctgaacctgagtactagtgagctgatggaatttatttcaaatgccccagtgtcctacaaaatctattccatccctaaaaagaacggcggcagaagggtaattgcccaccctgccaaaaagctgaaaaagattcagcgagagctgctcctcctgcttgaaaaggatctgaagatccatcagtctgcgtttgcatacatcaagggcaaaaatatcatacagaatgctgagccacacaagaataacaagtacttactcaagttggatttctacgatttcttcaacagcatttcggacgacatctttattaactacctcgacaaaattggactggtgcttaatgagctggataaagagttggtcaaacacatctttttctggaatccgaacagcaaagacaaaaggcacaaaaagcttatcttatctgtcggaagccccagctcgcctatgatcagcaatgcaattatgtacttcttcgactcagagattaaaacgtattgcgacagcatctctattgtgtatacacgctatgccgatgacctgagcatctcagggaacgacaaggataacctgaaggacgtgatcatgtttatccggtccaagttgtatgatctatttaacggccggatcattctcaatgatctcaaaaccacattgatctctcccgggtacaataagttcgttaccggaattactctaaccacacaaggcggtctttccatcggcagaaaacggaaacgttatatattctccctggtgtacaagtacatcaagaacgaattaaaggaagacgctgtcctccatatgaaggggatgatatccttttcacatctggttgagcccagtttcataataaggctggagagtaaatatgggaagaacataatcaaccgcattattaatggtaagtga

SEQ ID NO: 11371 - RNA, 957 nt, synthetic construct
  source 1..957: mol_type = other RNA
atgaagagtaaacggaaattcgaactgttttataagctccacgagggcgagcgttttagttccaagcttaatgagctgatcgctttaacacctactgctcccatctcatataaggtgtactcaatcccaaagaagaaaggcggccgaagaactatcgcacaccctaccaaaaagctgaaggaaatccagaaaaaactgctggagcttttacagctccaaatccacaaatccgcctatgcgtacagaaaaggacggaatattgcccagaatgccgaaacccataaagaaaacaagttcttgcttaagctggattttcacgacttcttcaatagcataaacaacatcatcttcacccgccatctggataagattggaatccactataatgaggacgacaaatggctgataaaccatatcttcttctggaaccccaacaagaaggataactcccacaagaaactgattctctctgtgggagccccaagtagcccaactatatccaatgctgtcatgtactttttcgataaggaaattgaggagtactgcgagtccaaatcaatgaagtactcaagatatgcagacgatattagcatcagcgggaataacaagaacgagctgaagacaatcattcctgtcatacgcgagaaattgaacgaactgtttaacgggcgaatcattctgaatgaactaaagaccgtaatcataagcccgggctataataaattcattacagggatcacactcacgtctcagggctcgatcagtattggtaggaagaggaaacgctatattttttccctggtgtacaaatacaagatcaatgagctctctaaggacctcatcccccatttaaaaggtctactgctctttagcaagaacattgaaccctcttttattgttaggttggagttgaagtacggaaaggagataattcggaggattcttgacgaaaaatga

SEQ ID NO: 11372 - RNA, 1038 nt, synthetic construct
  source 1..1038: mol_type = other RNA
atgcagagtcccgctttcgttccttgccctggggcggctccatttgcaagttttagcaaagagtcctatgcccagggactgccgtgggcactacagctcgaggccatgatgctgttttcagatcggatttgtgacgaactcggctactccaagcgtcagctcaactcatttctgaagaatgcaccccgcaaatatcgggtgtactccatacctaaaaggactgtgggatacaggacaattgcacacccctctaaaaagctcaaggagatccaaagagtgtgcgacgctctactgcaggatattttacctgtgcatcattgtgcatacgcctataaaaagggttgcagcattaaaaagaacgccatgcttcacgtctctcaatcatatctgctgaagatggatttctctaatttcttcaacagcatcactccagatatgttctggtctaaggtagacggtttcaagattgggataaataaaaaggagagaggaaaattgaccaaggctatgttctggcagcccaaccgccacgactccgacaagttgaaactttcaatcggcgccccaactagtcctctgatcagcaattttgtcgcgtacgagtttgattgtttcctcagcgaatggtgcatttcccaaggaatcatctacagcaggtacgccgacgacttgacattttctaccttcaatgccggcattttattctccgttcccagagtggtaaaggcctttctgaacaagtatttcgacggcatcacaataaacgaggctaagacgaagtttagttcaaaaaagcacaacagacacgtgaccggcatcaccctgaccgatgatggtcggatcagccttgggcgaggggagaaaaggcgaattttccattttgttcatgtgttttccctgggcgaactggatccggatctcctgccaaaactccgcgggaaaattgtcttctatgaacacatccagccaggctttatcaaacggcttagtgacaagtacacagaagagttgatatcttcgttactgaatggagactga

SEQ ID NO: 11373 - RNA, 939 nt, synthetic construct
  source 1..939: mol_type = other RNA
atgctgttgatcgagaagatcatcaaggaatctaagctctctaggcctgaactgacaattctcagccataaagccccgtatatgtacaaagtttatgccattcctaagcgccgaagtggctaccgcatcatagcccatcctgccaaacccctgaaattaattcagaggctcattctccagctgctggaaccctctgtgaagattcacgacaacgtccatgcttacgtgaaaggccggtccattattactaacgcaacagtgcataagaaaaataagtacttgctgaagatggacattaacaacttcttcaacagcatcaaacctgaattgttctggtcttccctgaacaaacaggacatcatgcttccaaaaatacaccaaaagaccattgagagattaatcttttggaatcccagcaagaagaaagatgggaaactcattctaagcgtcggggctccaacctccccattcatctcgaatatcgtgatgttttcattcgacagtaagctcagtagcgtatgcgataagctggggatctcatactctagatacgccgacgatctcaccttttcaaccaagaagaagaacatactgttcaatctgccccacatcgtgaagatccttttgcaagaagagttctccggagcaatgaccataaatgagcagaaaactgttttttcgagcaaggctcataacagacacgtgactggtattacaatcacaaatgacaagcagctttccataggacgagctcggaaaaagtatatttatcacctgatccaccaggccacgctgggcaacttggatgatgagcgtatgaatcaccttctgggactgatatccttttgtaggtcaattgacgcaaacttcttagacaagatcgcgaataagtatggtagcagttttgtcaaagatctaatcaaacgggagcttaaatga

SEQ ID NO: 11374 - RNA, 951 nt, synthetic construct
  source 1..951: mol_type = other RNA
atgctccagaggctttacagtaagctgcagaaaaagttggagatccccagatacaaaatagaatccttcagtagttcagcaccgaacaggtataaggtttacacaattccaaaacgcacatcgggtagacgtgtcatcgctcatccttccagagaattgaaaaaataccagcgggcgctcgtaagcatcctgactccccttctctctgttcacaaatgctcattcgcctacaaaaagggcgtgagcatcaaagaaaatgcacttgagcatgcaaaaaatagctatctcctgaagatggactttaatgactttttcaactctatcgatcctgaactgttctttttgatgaataagtccaatggggtcgagttttctgacagtgaaaagaagctgattcaaaacctagtcttctggaacaagaccaagtcctatgagcagaaactcgtcctgtctgtgggggccccatcaagccccttcatcagcaactttgtgatgttcaagttcgacgaactgatcgagaagtttagtaagaagaacaacatcacatacacccgctatgctgatgacattaccttctctactaataagcggaacgccttattcttgattccagaggaggtaaataatattctgagagagcactacggctatcgcataacagttaactccaccaaaactgtgtttagctcaaaggcccacaaccgacatattactggaattacgatcaacaatgaaggacaactgtccataggtagggataggaagcgaatgatctcttccctaatacataagtactcaatcaaagtgcttgacatctcggatttccagtatttacagggcctgctcagctttgcttctcacgtggagcctcggtttctggattccatgacccggaaatatggacacgagacgattaccaatattgtgaaaggggatttttacgacagctga

SEQ ID NO: 11375 - RNA, 945 nt, synthetic construct
  source 1..945: mol_type = other RNA
atgatgtttaaattgtacttcaagcttagcaagaagttggaactgtctcgcagtcgaatcgaatcatttagtaaaaatgcacccaacatgtacaaggtgtatacaatccccaaacgtacatccggaagacgggtaatcgctcacccaagcagggagctgaaagtctatcaaagagcgctggtcgagatccttgcctcaagtttcgaaccgcaccattgtagcttcgcttaccgtaaacagctttcgattaaagagaacgcactggtccactcaagaaatagctatctactcaagatggacttttcagaattcttcaattctatcgagcccgacatgctgttttctgctgccaaggttcgcaacatcggactgagcgatgccgagaagagactagtggaaaatctcgtcttttggaataagaccaaatcccataacaccaaattggttctctccgttggggcccctagtagcccactcatatcaaatttcatcatgttcgagtttgacaggctcatgtatgaattctccaagaataacagcatcgtgtataccaggtacgcagatgatattaccttttccacgaaccggaagaatactctgttcgatgtgcctaacgaggtgaaccgagtgctgtcgaaattttacgactaccgcatttctataaactccacgaagactgtgttctcctctaaagctcataacaggcacatcactggcgtaacaataacaaatgacgggaaactttcaattggccgctcccggaaacggatgatctcaagcttaattcatcagttcactctgaagaagatagatagctgcgacttttcttacctgcagggcctgttaagctttgcctcccacattgagccttctttcatcttctctatgaagagtaagtatggtgatgagattattacccagatcattaagggtgactttagttga

SEQ ID NO: 11376 - RNA, 987 nt, synthetic construct
  source 1..987: mol_type = other RNA
atgttgcagctgtccgccgcccctttctccctttctcgtgccatgttcaagttgtatttcaagctggcccagaagctggatgtgtctcggcggagaattgatactctggcatctggcgccccaaataagtacaaagtctacacaatacccaagcgcactagtggattacgagtgattgcacatcccagcagagaggtgaaagtctaccagagggcacttattaagatcttgcaggacgttctcagggtacaccattgcagttatgcctataagaagaagctatccataaaggacaatgcgttaaggcatgcttctaatcggtacctcctcaagatggactttaacgactttttcaacagcatcacccctgaagtctttgaggatgcactgaaccacgtggaagtggatttcagtgaagctgaaacgaagctcatcaagcacctagtgttctggaacaaaaacaagtcatttccaccacatcttgttctgtcagtcggtgcccctacctcccccctgatctcaaacttcataatgtatgagttcgataaggctatgtacgacttctgtgaagagaatctgattacctacacccgatatgctgacgatattaccttttctaccaacgttaaggatattctcttcaaggtaccgaataaagtgaataagatcttggaggagaaatttaacggagcgatttccatcaaccaaagtaaaactatcttcagcagtaaagctcacaatagacatattacaggcattacaatcacaaaccagggttcacttagcatcggcaggagccgcaaaagaatgatatcctcgctgatccacaaatttatgatcggcgagatcgactattctgactttaaatacctgcagggcctgctcagcttttcgagccacatcgaacccagctttatttcctcaatgcgcaaaaaatacggggaggggataatcggacaagtgattaaaggggacttcaatgagtga

SEQ ID NO: 11377 - RNA, 963 nt, synthetic construct
  source 1..963: mol_type = other RNA
atgctgaaaatctttctaaagctgcagaacgaactcgcttcttcaaaaaatgacggtgtgctgcccacacgagccagaatcgaaagtttcgcgaggagagctacaaactgctataaggtatatagcattcctaaacgcacgagtggagtgcgggtcattgcacaccctagcaaggaactgaagaattatcagcgggcactgatttcaatccttgagcagcaacttgaaccccattccgcgagctacgcttaccaaaaagggaagtccattaagctcaacgcccagaaacacacgaagaagaaatttctgctaaagatggacttcaacgatttcttcaacagcattaccccacagatattcctcacagaattacgctatcgacggatttttttaagtaaggccgaagagaaattgctgattaacctgttcttttggaataagaccaaaagcgaggacaaaaagctcgtgttatctgtaggcgcaccttcctccccgatgctgtctaacttcattatgtacaggtttgatgagttggttagtaagtacgctaaggagaatagcatcgtctacacccgctacgccgatgaccttaccttctcaactaacattaaaaacgtcctgttctcggttccagaatatatcaaaggaatattgcgcgacctctaccagcactatatcactataaacgactctaaaaccatctttacatccatggcccacaatcggcacgtgaccgggattactataactaataactttgagctgagcatcggaagagagcgtaaacgtctcatttccgccatgatccataagtttaagatcggcgttctgaatgaggatgatctttgttacttgcagggcctgctctcatttgcaataaatatcgagcccaatttcatcaataggctgtctagaaagtatggtaaagagatcgtgcatgtgatcaggaagggcgggttgtga

SEQ ID NO: 11378 - RNA, 957 nt, synthetic construct
  source 1..957: mol_type = other RNA
atggcccagaagctgttcagtaaactgatagacattctgcccttagtgagcgctagccggtcaaagatcgaacgcttttctctgacagcccccaaccggtataaagtctactccattcctaagagaacctccggccgccgaatcatcgcacacccctcaaaagaactgaagatataccaacgagccttgctgtcttctctcgagtacctcttagattctcacgatagcgcttacgcgtataagaaagaccggaacattaaagcaaacgctaaaagacatgttaggaaaaagtacctgctgaagatggatttcaacgatttcttcaattctatcactccagatatgctcttcacccagtttgtaaaagaagaagtcattttctccgaggccgaaaagaggctgctaaagaacctcttgttctggaataaaactaagtcctttgacggaaagatggtgctttccgttggggccccaagcagtcctagcgtgagcaatttcatcatgaaggagttcgatgagtttgtgtatcggtatagtaaggagaagagtatcatctacaccagatatgctgacgaccttacgttcagtaccaataaaaaagacacgctatttgacatgccgaattttatcaagaaggtgcttggcgaggtgtttgagcataaactcacaattaatgagtccaaaaccatttacacatccatggcacataataggcacgtaacaggcgttactctcactaacaagtcgacactctcaattggtcgtgagaagaaacgcttaatctcattgctggtccacaagtacaagataaacgagatcgatgaatccgacttcaactatcttcacggactgctgagcttttcgcatcacattgaacctagctttaccaaaaggttgtctaaaaagtatgggtcagacatactgaaaaatattatcaaggggatctactgcgaatga

SEQ ID NO: 11379 - RNA, 933 nt, synthetic construct
  source 1..933: mol_type = other RNA
atgaggattaagctctttagtaacctgcagacgaaactcaattgtagccgcaaaaaaatcgagactttttctgagaaggctccctataagtataaggtgtacaccatccccaaaaggtcatccggactgagggtgatcgctcaccctagcaaagaactgaaggtgtatcagcgagccctactctcggtactgggggatcacttgatcagccataagagttccttcgcctacaaactcaatacaggaattaaggacaacgcataccagcatatgcacaattcttaccttctcaaacttgactttagtaacttcttcaacagcatcgttcccgatatgctcctggccgcactaaactttcgggggatcgaagtttctgatgccgaactgcgattattgtccaacctgctcttttggaataagacaaaaacgtccgataacaaactagtactgtctgtgggagccccgtcatcacctgcgatatccaactttatcatgtttcggttcgataaagtggtctttaagtattgcaaggagaagtctatcatttacacaagatacgccgatgacttgaccttcagcacaaatataaaggacgcacttttcgagcttccacgttatattaacggcttattgggtagtatgttcgaccaccgcattatgctcaatgaacgcaaaactgtgtttagttctaaggctcacaaccgtcatgtcaccggcattaccatcaccaacgagaataatctgtccgttggccgggctagaaagagaactgtgtccagcctggtccacaaatatagcctgaataagttagaccaattcgagttcgagcagttgcgggggatgctgtcattcatactgcatatcgagccacatttccttcacagactggaaaagaagtacggtaggagcctgctgataaaaattcgctcatga

SEQ ID NO: 11380 - RNA, 984 nt, synthetic construct
  source 1..984: mol_type = other RNA
atgctcctgatctccttgcaggaatttagcctgaccatccggctttataaagcctttgaagacgaactaggtgtaactcggagccgtctcatgaatttcgccaaaactgctcctaagcgatataaagtttacacaatccctaagagaaccagtggatatagagtcatagcgcatcccagcaaatcgctgaaaaagatccagaagttcctggctgggtttttggctgacatcttcattactcacccaaattccttcgcatataagaagggggtgtcaattaaggataatgcttcggtgcatctcggcaccaaatatctgcttaagatggacttctctaactttttcaacagtattaccttcgacctgctggtgtcctcctgcaaagaatgtgaggtgaaaatttcactggcagagctccgcttactcgaggggctgttattttggaacaaaaccaagaccattaacggcgacttggtgctgtcagtgggagcccccaccagtccacttgtttctaacttcgtcatgtacaagtttgatatcttcatctccgactactgcaagatcaacaacattaactacagccgatacgccgatgacatcacattttccactaatgacaagaataagctctttggtgtcacaagggtagtgaaagatatactcagcgagcactactcaaataagataactgttaacaacgtcaagacaacattttctagcaaagcacataaccggcacatcaccggcgtcacattaacgaacgataataagttgagtgtcggcagagagaggaaacgcctgatttctaccctaatccacaagtacgttattaatgacatagagaagcaagatgtgacttatctgcagggaatgctttctttcgccatccacgtggaaccggatttccgcgggaaaatgagcaagaaatacggctctaatgtagtgacggagattctgaaactgagggtggagaatgatgaatga

SEQ ID NO: 11381 - RNA, 960 nt, synthetic construct
  source 1..960: mol_type = other RNA
atgactattaggctgtatcgcgccttcgaggaagactttggtattactagggcgagattgacaacttttgcaaagaccgctccaaagaagtataaggtgtatacaataccgaaacgtagctcgggataccgggtcatcgcccatccttccaaatcactgaaggagaagcaaaaattcctcgtagcctttttgtcagattttttcgtttctcacagcaattccttcgcgtacaagaagggagtgggaatcaaagataatgccaggatgcatcttggcaccaaatatctgctgaaaatggatttcagcgacttcttcaacagcatcacagtcgacctgcttgccctagcatgcgacgagaatggtatcaaagtcagttcggctgaactcaagctgttggaatccctccttttctggaacaagacaaaaactatccggggctcccagaacctcgtcctgtccgttggggcccctacctctcccctagtttccaactttgtgatgtacaagtttgatactttgatgagtgactactgtagtcagaatgagatcaactattcacgatatgctgatgacattacgttcagcaccaataaaaagaatcacctgtttcaggtgacacgcgtagtgaaggatatactgtctgaccactacagtaacaagattacagtgaacaacatcaagactgtgttctctagcaaagcacataataggcacgtgacgggcatcaccatcacaaacaacaataagttatcagtggggcgagagagaaaaagactcatatccaccctcattcataaatacaccataggcagcatcgacatcgatgacacggtctacctgcagggcttactttctttcgctattcacgtggaacccgattttcgggtgaaaatgtctaataagtacgggtttgaggtaattaataccattctgaagctgcgcgttgaaaacgacaaatga

SEQ ID NO: 11382 - RNA, 951 nt, synthetic construct
  source 1..951: mol_type = other RNA
atgaaacttaagctgtacagggctctgtatgaatcactttctataactcgatcttcactcaataggtttgccgagagtgctcctaaaaagtacagagtgtataccatccccaagcggacaagtggccagcgagtgatcgcacatcctagtaagcagcttaaggccgtgcagaaagagctggtgaagatcctagtctttcctctgaagtcccacgagacagcttatgcatacaaaaagggattgagcataaaagacaacgcagaacagcatctcaatacagcctacctattaaaaatggacttcagcgactttttcaattccattactccagcggtcttattcttgatttgcgagaacaacaacataaagtggtcagatgccgaaaagcgcctgctcaagaatctgctgttttggaataagaccaagagctttaatgggaaacttgtgttgagcgttggagccccatcttcccccctcatctccaatttcgtcatgtatgactttgatgtgaagatttccgacttctgtaagaagaacaaaatcaactacactcgttatgccgatgatataacattctcaaccaatgttaaggagatactgttcgaggtcccgaaattagtaaaaacgctgctgaacgagatttacaataacctgatcaccattaacgacctgaagactatcttttcttctaaaaggcacaatcggcacgtcacaggcgtaaccattagcagtgaaaacaaactctccatcggtcggagccgcaagcgcatgatctcatccttgattcacaaattcaagatcaatgtgatctctcaagaagatacgtgctatctccaagggctgctggctttttcgatcagcgtggagcccattttcatcgagagaatgaagaacaaatacaccgagagcgttatccataacattctcaaaattagagtggaaaacgaatga

SEQ ID NO: 11383 - RNA, 942 nt, synthetic construct
  source 1..942: mol_type = other RNA
atgcaactgcatctctataagaatattacggagatgttgtcttggagccgaagtcagataacaagctttgcccgtaacgcgcctaataagtacaaagtgtacactattccgaaaagatcttctgggcagagactgattgctcatccatctaggaagttgaaacttctgcagcgggcgctagtggagattctgtcaaacaatctgatcccacatgagtgcgcttttgcctaccgcaacagtatttccattaaggaaaacgcacagtatcatctcgacaaccagtatctgttaaagatggacttctcggatttctttaactccataacaccagacatcttgttctccgtctgcgaaatcaaagaaatcacgctgagcgaagccgagaagtggcttctccaacgggcctttttttggaataagacaaagagtcacgatggcaagctcgttttatctgtcggtgcccccagcagccccctaatctccaatttcatcatgtatccgttcgatgaggctataaacctgtattgtacccagcacagtatatactatacacgatacgctgacgacctgaccttctccaccaagattaaaaacaccctgttcaatatacccgatatcgttaaatgggccctgaaaaagcactacgcaagtcagattagcatcaatgagtttaagactgtgttctcatcaaaagcacacaatcggcacatcactggcataactatcaccaacgataataagctttccgtaggaagggaaagaaagaggatgatcagctcacttatccacaagtataaaattgggattgtgaacgaagaggagaaaacctacttgcaaggactcctctcattctctttccatattgaacccatgtttaaaatccgcatgtccaagaaatacagccctgagatcattaacgagatcctgaagtttcgcaaatga

SEQ ID NO: 11384 - RNA, 942 nt, synthetic construct
  source 1..942: mol_type = other RNA
atgcagctgcatctctatagatcaatcatcgacaagttatcctggtcacggagtaggattacgagcttcgcacggaatgcaccaaataagtacaaggtgtatactatccctaagaggagttctggtcagcgccttatagctcacccatctaagaaccttaagctcatccaaaagaaatggattgagatactgtccgacatatttgtctcccatcaaagcgcctttgcctacaaagataacatggggatcagggagaatgcccagcatcatatgaaaaaccagtatctgctgaagatggacttcaccgactttttcaattccatcacaccggaaattttcttttctatttgcctgaagaaggaaataatcatgtccaacgccgaaaaatggctgctgcagcagaccctgttttggaacaaaaccaaatcttatgacggcaagttggtgttgagcgtcggagcacctagctcacctctcgttagcaattttgtgatgttccccttcgacgagatcattagcgagtattgtaacagtcaccacattaaatactctcgatacgctgatgacctgaccttctcgacagatgagaaaaattgcctattcacgatccccaacttggtgaaaagtgctcttcagaaaatttacgcctaccagatctctatcaacgagttcaaaactatcttttcctcaaaggcccataatcgtcacatcacaggaattacaataaccaacgataatgatctcagcattggcagagggaggaagcgcatgatttccagtctcattcacagataccgaataggtgtaatggacgatattgaaaaggctcacctgcaaggctttctggcgttctcgttctatattgaacccttatttaagactcggatgatcaagaaatactcaagcgaggttatcactgatatcctaaaatttcgcaagtga

SEQ ID NO: 11385 - RNA, 1143 nt, synthetic construct
  source 1..1143: mol_type = other RNA
atgtcctcccgggcccttagacaaacacaaatctactggggcaccataccagtggcggttaagaacttcccccgagctggcgttcggacaagtcaccctgatcgggggaaattctccaccgccagctttagcaaaggtgaaagtccggtgttgtcctttcagtacagacacttttatctcagaatctgcacggatatgcaccagaagttgtactctaaactggtagacaaacttgacagtactaggagtactatcaacagcttttcaaaaaacgcgcctaataagtacaaagtctacactatccctaaacggacctctgggcatagggttatcgcacatcccagtaaggagctgaaaaagtatcagagggccctggtcagtatcctgtctgatattcttaacatacacccaacctcttatgcatacagaacaggcttttcgatcaaggataatgcatataagcacaggaagaatcagtacctgctgaagatggacttttccgacttcttcaacagcatagagccaaagctgctgttctttgtgttcgacgaatgtgaaattcatttctcatcatctgagcttcgcctgctggaaaagctgctcttctggaacaagaataagtccgtggacgcaaaattggcccttagcgtaggagctccaagctcacccctcatttcgaatttcatcatgtgtatcttcgacgagaaaattaactacttttgcgagaaaaacggcataacttatacgcgatacgctgatgatctcaccttttcaagcaacaagaagaatatcctgttcaatgtgcccaatattgtcaagaacctactcaaggaggagtataaaaatctcatcttagtgaacgacctgaaaacatgtttttctagcaaggcccataaccgtcacatcaccggggtgacaatcaataatgacgctgagttgtccattggaagagatcgcaaaaggttaatcagcgccatgattaataactataagaagggcattctcctgtccgaggattttgactatttacgcggaatcttgtcattcgccaataacattgaacctgatttcatttctcgcatgaaacgtaaatacggtaaatgcattctgctaaagataaagaaggggctaccgaacgaatga

SEQ ID NO: 11386 - RNA, 948 nt, synthetic construct
  source 1..948: mol_type = other RNA
atgcgccagcagttatacagcaagctccaaatcaagctggggcgcagccgaagtagcatcaagagctttgcaaacaatgctcctaacaaatataaggtctacaccatacctaagcggacctccggcagaagagtaattgcacatccttcaaaacttctgaaagactatcagcgggcactgacagatatcctcaagccagctctaaccgtgcaccccgctgccttcgcctaccgtactggatttagcataaaagataacgctcagatgcataagaaccatcagtacttgttgaagatggacttcaatgacttctttaactccattgatccagagctgttcgaagatattctcattaggcggggtattaggtttagtaacgccgagatgtcactgctaacccgtctgcttttctggaataagactaaaagtcacgacgaaaaactcgtcttgtcagtgggggcaccgagctcccccctgatatctaacttcgtgatgtccatcttcgatgccaaaatgaaactgcattgcctcaagcggcagatcacatacacgagatacgctgacgacctcacgttttcgacaaataaaaaagacgtgctgtttaacatcccccagttggtgaaagacacactcactaaggattactcacacaagattctgatcaacgagcttaagaccatctttgcctctaaggcccacaatcgccacatcactggagtgactatcaataatgcctctgagctgtccatagggagagaacgaaagaggttgatcagtgcgttagtccataagtatacagttaagcaactggataccgacgacattcactatgttcagggccttttaagctttgcgcaaaatattgaaccacacttcgtagatcgcctttctaagaaatatggcttcgatgttctgtctaaactgattagggacaaaggtgatgagtga

SEQ ID NO: 11387 - RNA, 945 nt, synthetic construct
  source 1..945: mol_type = other RNA
atgcacaataaaatattctccaagcttcaggcctcaacaagtagagcaaggagcaccatcgaatcttttagccgtaatgccccgaataagtataaggtgtactccatacccaaaagaacctccggttctcgaaccattgcccacccctctaaagaattgaaatattaccagagggcactagctatcattctcaggcccattctgacagtgcacatccgggcttacgcctacagaaccgggctttcaattaaagacaatgccgcgatacacgccaagaataagtacttgctcaagatggactttaacgacttctttaattccatcacaccagtaatgtttttcaaaatatgcgacaagcgtaagatcaagttcagcgctagcgaacaacgcttattaactagaatgctgttctggaacaaaagtcgatcagctaacgagaaattggtgctgagcgtgggagcccctacgagtcctctggtcagcaacttcacaatgagtctattcgattttctgctccacgatgaatgtctttctcgcggcatcacttattctaggtacgcagatgatatcactttttccaccaaccacaagggtattctgtttgatatccctctgtatgttaaagctgtccttgcggagcggtatgactacggaataacaattaacgagtcaaaaaccgtgttcagttcgaaggcccataatcggcatattacggggatcactattaacaacgagggcaagttatctctgggccgcgagagaaagcgcgttatctcaagcctcgtccatcaatttaaactgaacaagctcgcaatcgaggacttcgcatacttgcaggggctgctggccttcgcgcagcatattgagccagcttttatcatccggctgaaaaacaagtatggcgaatccactgtgtccaacattaataagggactcaatatctga

SEQ ID NO: 11388 - RNA, 954 nt, synthetic construct
  source 1..954: mol_type = other RNA
atgcaccataagatctactctaagctgcagctgaaattgaagaccagccggtcctccattgataactttgccttgaatagccccaacaagtacaaggtttatactattccaaagcggacggcaggttttagagtcatcgctcatcccagtagagagttgaagtgttatcagcgccatcttgttgagattctcacaccccacctgaagaatcacagtagcagtatcgcctatacaaaagagaagagcattcgtgaaaatgccctgatacatgtgaggaacgactacttactcaaaatggactttaatgacttcttcaacagcatcaccccagaactgttcttccacatttgcagagtgcaggaggtattcttctcgcaagccgaggagaggctgctgaccaaactgctattttggtccaagtctaagtccaaagatgagcatctcgtgctgagtgttggggcaccttcaagtcctctgattagcaattttacgatgtacacattcgacgaacttataacatcaatatgccacgagaatggcatctcatacaccaggtacgcggatgatattaccttctccacaaaccgaaagaacattctcttttctatcccgtctttggtgaaatccattctcctgaacaagtacgagtataagatcactatcaatgactcaaagactgtattctcatccaaggctcacaatcgccacgtcaccggcatcactcttaacaacgaagggcagttatctctcgggcggaaccgtaaaaggatgcttagctccatgattcacaaagaaaaaatcggttctctgagcttagacgattttacttatatgcgcggactaatctcgtttgcaaaacatatagaacctgcttttatcttccgaatgagagtgaaatatggaaacgaaaccgtggataacataatcaaaggcgtccggaatgtgacaaattga

SEQ ID NO: 11389 - RNA, 948 nt, synthetic construct
  source 1..948: mol_type = other RNA
atgtatcaaaagctctacagtaaactgcagaacgagcttaagcggtcccgttctagcatcgagtccttcagtaaaacagcacccaacaggtataaagtttacacgatacctaaacggactagcggacaccgcgtcattgctcatcctagcagagaattaaaactttttcagaaagccctgaacaccttactgctggatacattgaagacgcatttctgttcggtggcgtacgccaagggcctctcgataaaagataatgcccttaggcacgctggcaatagctatctcctgaagttggacttcaatgacttcttcaactcaattgagcctgacctgttttttgttatctgtgatctgcaggaaatcaatttctccaacgccgagaaacggctcctgacacagctctgcttctggaacaaaaccaagagcaacaatactaagctggttctctctgtgggtgctcccagctctcccatgatttcaaacttcgtgatgaccgtatttgatgagctgatgtataagcattgccgagtccaaggcattacctatacaaggtacgccgatgacttaacattcagcaccaataaaaagaacatccttttcgacatcccaacttttgtggaagcggtcctagtggcatattacgcctccaagatttctatcaatccggagaagacatgctactcctcaaaaaaacacaataggcatgtgactggaattaccatctctaatactggggaactcagtttgggccgcgagagaaaaagaatgatctccgcaatgctgcacaacttcaaggtagggcgattggattcagatgactacgcatacctgcagggactactgagttttgctcgccacatcgaaccaaagtttgtggacaagtttagaaagaagtatggggacggcctgattgacaccataaccaagggtaactttaatgagtga

SEQ ID NO: 11390 - RNA, 963 nt, synthetic construct
  source 1..963: mol_type = other RNA
atgagactccacttgtatgctaaactcacagaaattcaatcacgcaataggaggcagatcgacaacttcctgtataacgccccaaaccgctacaaggtctattcgattcctaagcgcaatgggggggagcgggtaattgcacagccttctggcgaattgaaggattttcagcacaacctgatcaatatcttagagagcaatttcctcatacattccagtgctgtggcgtataagaagggattcggcattaaacataacgcagctatgcatagtggtaatccgtacttgcttaagctcgacttcactgacttttttaacagtataacgccagagctcttttttatggcgtgcgtgtggaatagatatgatctgtcaacagccgagaagcgggtctttacaaaaggactcttttggaataaagccaaatcccagtccggccgtctttctctgagcgtgggtgccccctcctctcccttagtttccaatatcatcatgtacctgttcgatgaggaattttctagacgatgtgaaaagaggggcatcgtgtacacgaggtacgctgacgacttgactttctcaacccaccataaaaacagcctgtttagcctgcctgacgaggttagggtgttcctgaacaaaaactaccataaccggattaccctaaacgagaggaagactattttcacatccagagcccacaatagacacgtaaccggcgtcacccttactactcaaggagggctcagtgtggggcgcgaacggaagcgattcataagctctctgatccacaagtacaccttgggtatccttgagcccgatatggcatactatctacagggcctgttaagcttcgccatttacatagagcccgaattccggacccgactgagcaaaaaatattcacaggaaacaatcctggagctgctgaagcttcgtaaggaggatggaaccgagaatgaatga

SEQ ID NO: 11391 - RNA, 987 nt, synthetic construct
  source 1..987: mol_type = other RNA
atgcggttaaacctctacgctaaactgaccgagatacaatcaagaaatcgaagacagattgacagttttttgttcaatgcccccaatcgatataaggtctatagcattcccaagaggaatgggggcgaacgcattatagcccatcctagttcagaattgaagtcctttcagcactctctaattgacatcctggaaagcaatttccttattcacaaatccgccgtagcgtataaaaaaggctggggaatcaagcacaatgcggcactccacagtaacaacccctacattctcaagctggacttcacagatttcttcaactctatcaccccggacctgctcctgatggcctgtgcctggaatggatacacgctgagcatcgccgaggagagagtgttaactaagagtctgttctggaacaaagctaagtcacaatcaggtaggttgtccctgagtgtgggagcacctagctctcctctcatctctaacatagtgatgtacttgtttgatgagacattctcatccttatgcgaacagcgggagattatttacagcagatacgcagacgatctgacctttagcactcagcataaaaatatcctgttttccctgccagatgaggttaggacctttcttaacaagaactatcacaaccgtatcacacttaatgagaggaagacagtgttcacctctcgcgctcacaaccgccatatcacagggatcacccttacgactaaaggcaccctcagcgtcggccgcgagagaaaacggtttatttcgagcctgattcataagtacaagctaggccttctggaaccagaaatgacttattacttgcaggggctactctcctttgctatctatattgaaccagagttccgtacacggatgtccaagaaatactctcaggagataatcctggagatcatcaagctgaggaaagaagatggtacctacaaaaagctcaagatctatcagactcatatatga

SEQ ID NO: 11392 - RNA, 963 nt, synthetic construct
  source 1..963: mol_type = other RNA
atgaggctgaatctgtatgcgaaactcatagagatacagagccgctctcggcgcgcaatcgactcattcctctacaatgcacccaaccgatacaaagtttatagtatacccaagaggaacggcggagagagaatcatcgctcatccctctagagaactcaagaccttccaatacgatctgatcaggattttagaacctcactttcgcattcatacatcagctgtcgcttataagaagggcagtggcattaaacagaatgccgccatgcactcccacaacccatacattctcaagatggactttaccgacttttttaacagtattactccggacctgttgttcatggcatgtgcttggaatgaatgcaatctctctgcagctgaacagcgcgtgttgactaagggcctgttttggaataaggccaagtcccagagcggacggctctccctttctgtcggtgccccaagtagccctttcattagcaacatcatcatgttcctgtttgacgagacgttttcgagattgtgcgaacagcgggggatagtttatagcagatatgccgatgacctaacattcagcactcaccataaaaacatcctgttcacgctgcccgatgaggtacgcatcttcctaaacaagaactatcacaatcgtattactctgaacgagcgtaaaacggtgtttacctctagggcccacaatcggcatattaccggcatcaccttgacaactcagggttcattaagcgtggggcgagagcgaaaaaggttcatctcctcccttattcataagtacacactgggaatcttagaacctgagatgacttactatcttcaagggcttctgtcatttgcgatccacatagaaccagagttcaaaaccaggatgatcaacaaatactccaccgatgccgtgatggagattatcacactgcggaaaaaggatgagacatacagaacctga

SEQ ID NO: 11393 - RNA, 966 nt, synthetic construct
  source 1..966: mol_type = other RNA
atgaggttaaacctgtacgcaaaactcgtcaagattcagccgcgcaatagacgccaaattgactctttcctgttcaacgcccccaatcgctacaaggtctataccattcctaagcggaacgggggcgagcggattattgcgcaccccagcagagagttgaagacattccagtacggtctgataactatactggagactcacttcaggatccacgaatctgccgtggcgtataagaagggcctcggaatcaaacagaacgccacactgcatagcaacaatccatatatcctgaagatggatttttcggatttcttcaattctatcacccccgacctgctgttcatggcctgtgaatggaatgattatgaactgtccagcgctgagaaaagggtgttgacaaaagggcttttttggaacaaagctaagaaccagtccggacggttgagtctctcagttggcgctcctagctccccactgatcagcaacgtgataatgtatctctttgacgactcctttaccaacttttgccagcaacgcgagataacatattcacggtacgcagatgatctcacttttagcacccaccacaagaacgccctatttgatcttccaaatgaagtgcgtcatttccttaataaggagtaccaaaatcgtattacgctgaatgagagaaagaccgtattcacctcacgagctcacaatcgccatatcactggagtgactttaaccactcagggtagtctgtctatcgggcgagagcgaaaaaggttcatctcctccctcattcataagtacaaattaggcctcctggaccctgacacatcatattacctgcagggcttgcttagttttgccatctacatcgaacccgactttagagttaggatgtctaaaaagtacagtacaaacaccgtcacggaaattatcaaactaagaaaagaagacgaggcataccggaagcagtga

SEQ ID NO: 11394 - RNA, 966 nt, synthetic construct
  source 1..966: mol_type = other RNA
atgcggcttaacctctacgcgaaactgatcgagattcagcctaggtcacggaggcagattgaccgcttcctggccaacgcacccaataaatacaaggtctacaccatccctaagcgcgatattggtgagagaattatcgctcagcccagtcgtgaactcaagaaattccagcactatatcataagcatcctcgaatccttgttcgaaatccacacctccgcaatcgcttataggaagggcacggggattaagcagaatgctaatatgcattcagccaacccgtacatacttaagatggacttcagcaattttttcaactcgattactcccgacttatttttcctggcgtgtaagtggaacaactattctctctccgccgcagaggagcggttattgactaaggctcttttttggaataagtctaaaacacaggatgggagactggccctgtccattggcgctccaagtagcccactcgtaagcaatataatcatgtatctgttcgatgaggagttcaacaccctgtgcaaagacaatggtatcgtctactctcgatatgcagacgatctgacgttcagcacctctcacaaaaacctgctgttctccctaccagacaaagttagggcctttctgtttaagcattataacaatcggatcactctgaacgaaagaaaaacagtgtttacatcaaaggcccacaacagacacattacaggagtgaccctaactaatgagggcacactgagtgttgggagggagcgcaaacgattaatctctagcctggtgcataagtacaagctaggccttttggaacctgatatggtgtactatctccaaggattgctttcatttgcatcctacattgagcccaattttcgctttcggctggctagaaagtacagtgccgaaaccatcactaaactcataaagttgcgtaaagccgatggaaagttcaagaaacaatga

SEQ ID NO: 11395 - RNA, 963 nt, synthetic construct
  source 1..963: mol_type = other RNA
atgcgtctgaacttgtacactaagctggtgaaaattcagccccgaaatcgtcgacaaatagactctttcctgtataacgctccgaacagatacaaagtgtacagtatcccaaaacggaatggcggcgagcgaattatagcacacccctcccgcgagctgaaaaatttccagtacaacttgatagacatcctggaacctttactcaagatccatcctaatgccctagcgtacaggaagggactaggtataaagaaaaatgccagcttgcacgcccagaattcgtacatcttaaaactcgacttctccgacttttttaattcaattacccccgatctgcttttcaccgcatgtactaagaatgaatatgaactgagttccgcagaaaaaagggtcctgacaaagggactcttctggaacaaggctaagtcacagtcagccagactctccctttctgtaggggccccaagctctcctctgatctccaacattatcatgtactattttgacgagacgttcacggatatctgcaaccagagggagatagtgtatacaaggtatgccgacgacttgacctttagcaccaataagaagaacatcctctttaatttgcccgatgagattcgcttctttctgaacaaggagtacaaaaacctcattacactgaacgagcggaagaccgtcttcacttctagagctcataaccggcacattaccgggattacaatcacaactgagggtagcctaagtgttggccgggaacgcaaaaggctgattagcagcctgatccacagatacaccctggattctctgtcaccagatatgacttattacctccaagggttacttagttttgctatctatatcgaacctgacttccgggatagaatgtccaaaaagtatagctcgcatatcatcaccaagcttattaaacttcgcaaggaggatggaacatactgcgaatga

SEQ ID NO: 11396 - RNA, 963 nt, synthetic construct
  source 1..963: mol_type = other RNA
atgcatctgaatttatacgccaagcttgatggagtgcagtcgctcacgagaaagcaaatcgattcattcctggccaatgctcctgaccggtataaagtctactctattcccaaacggaacggaggtgagaggataatagcgcaccctgcaaagcgattaaagcagtttcagtaccacattgtagacattatggaagaagtttgtgagatccatccctgcgcaatggcctatagcaagggcaaaagcatcaaagagaatgcactgagccatgccgataaccagtatatcttgaagcttgacttttccgatttcttcaactctatcacaccagagatgctcttcaaagctctgaccgacaataacctgaacgttactaaagcagaagaacgcgccttgtctaagtccctgttctggaataagtccaaaaccgtgaacagtcgactggccctatcagtgggcgcaccttcaagtcccctcatcagcaatattgtgatgtactcctttgacgctttcttcgccaacttttgcaagcagcacggcatgcactttactaggtatgctgatgatttgaccttctccacaaatattaagggggttttgttccgtattcccgacatggtccggaagtatctcaacgagtactacaaaaacaacatcacactaaatgagaggaagactgtgtttacctccaaggcgcacaacagaagagtcacggggataactattacaccgcaaggtaccctgagcctgggcagagaacgcaaaaggctgatcagtgtgctgatccacaaatatacacttgggatcctcgaatcagacaccttaagctatctccagggaatgcttgcctttgctttccatatagagccagtgttttacgagtctatgaaacgcaagtacagttctgaaaccatttacaatctgatgccaatccggaagaaaaatgtagagtcgactagctga

SEQ ID NO: 11397 - RNA, 951 nt, synthetic construct
  source 1..951: mol_type = other RNA
atgaagctgcacttatatgcgaagctcaccaaagatctggacaagtcaagaagcgccgtagagcggtatatctataatgcacccatgaagtataaggtgtacactattcccaagaggacatcaggacagcgagtgatcgcgcatccagctaggaaacttaaggtgtttcagagggctctaattaaggtcattgagccacactttaatttacacataaaggccatggcataccgcaatgggatcgggatcaagcacaatgctgccatacatcagaacaataactacctgctgaaactcgacttcaacgacttctttaattcaattactcctgacctcctgtttacacacttcctcaagaaagagattttgttgtccgatgccgaaaagaaactgctgactaacacctttttctggaacaagcctaaaaaaaaggacggcaagctagtgctgtccgtcggagccccgagtagtccattcatttctaacttgatcctgttccctttcgatgagctgatcgacgactattgctcgaaaaaaaacattagctactctcggtacgccgacgatctgaccttcagcacctccgagaagaacatcctatttcagttgcccagccttgtcaaacggcatctgtcgagcatttacaagaacaaaatcaccattaacgagttcaaaaccgtgttttcttccaaagcacataatagacatgttacaggcgttacgatcacaaacaccggggagctgagcattggtcgtgaaagaaaacgcttgatcagctccttaatacacaagtttaagatcggtgagctcaatcttgatcttactaggtatctgcaaggacttctgtctttcgcttcagatatagagcccagtttcaagagtcgaatggaactcaagtactctctctccacgatcgaaaaaatcatagaatttcgcggcgaaaatgaatga

SEQ ID NO: 11398 - RNA, 963 nt, synthetic construct
  source 1..963: mol_type = other RNA
atgaagctgcacctgtatgccgagctgacgaagaaattgaataggtcacgcaattctgttgagcgattcatcagcaacgctccgatgaaatacaaggtctacaccatccccaaaagaacatccgggcagcgcgttatcgcacaccctgccaaaaaattaaaggtgctgcaaagagcattggttgccgtcctccagccacacttttctattcatgacaaagccatggcgtataggaaaggccttgggataaaacaaaacgccacattacatcagaagaatgactacctgctgaagctcgatttcaatgattttttcaactcgatcacacccgaaatttttattaagtactgcacccagaaggagattgaactgagtgacgctgaaaagaaactcctgatcaagacattcttttggaataaaacgaagaagactgatggaaaacttgtattgtcagtgggcgcaccaagtagccccttcctcagtaacgtgctgatgttcggatttgacgagttcatcgaaaactactgttcccagaaaaatataagctatagtcggtacgccgatgacctcaccttctctacttcagataaaaatgtcctcttccacatccctaagttagtgaaaacccaacttgggctgatgtttttcaaccagattaccatcaacgaatttaagaccgtgttttcctccaaggctcacaataggcacgtaactggcgtgacactgaacaacaatggtgaactatctattggccgcggccgaaagagattgataagctcccttatccataagttcatgcacggtgagctagacattgagctgactcgtcacctgcagggactccttagctttgcttccgatattgaacctatattcaagtcacggatggagattaagtattctcataagctgatcgagagcatcgtgaaatttcggggggaacatgagcaggagaaccagtga

SEQ ID NO: 11399 - RNA, 960 nt, synthetic construct
  source 1..960: mol_type = other RNA
atgaagttaaatctctatgctaagctcacagacaaactcggccggagccgaaatactgttgaacgctacatctcaaatgggcctatgaagtataaagtgtacaccattccgaaacgtacctccggacaacgagtgattgcacaccctgccaagaagcttaaggtgatacagagggccctagtcagcgttctggagccccacttgaaaatccatcataaggctatggcttataggaaaggcctgggaataaaggataacgccgtcctgcataaagagaacgagtatttgctcaagctggatttttcggactttttcaattccattacacccgaactgttcatcaactactgcatgcagaatgatattacactttctactgcggagaagaacctgctgatcaaaacctttttctggaataagacgaagaaaaacgatggaaagctggttctaagtgtgggtgcaccaagctctccattcatctctaacacaatcatgtacttctttgacgaggccatcgacaagtactgtatcactaaaaacattacctactccagatatgccgacgacttaacgttctccactcctgataagaatgtgcttttccatattcccacactggtaaaaaaacagctcgggattatcttcagtaaccagatcaccattaacgctttcaagaccattttttcatcaaaagcccacaaccggcacgtaactggcgtcacaatcaataacgatggcgagatatccattggtcgcgagagaaaaagattgatatcaagcctgatacacaagtttatcttgggccagctggacatcgaacacattcgctatttacagggactgcttagctttgcaaccgacattgaacccaaatttaaaagtcggatgatatccaagtactctaatcaggtgatcgagaacctcatcaagttcagggggagcgatgaacaaaccaattga

SEQ ID NO: 11400 - RNA, 951 nt, synthetic construct
  source 1..951: mol_type = other RNA
atgaaactgcacttgttttctaacctggtgaaagagactaaattctccagaaacgcgattgagcggtacatatataatgcacctatgaagtacaaggtgtacaccatccccaagaggtcttccgggcaacgggttattgctcatcccgccaagaaattgaaaatcctccagagggctctggtaagtatcctaatgccttttcttaatatccacgaccgcgcaatggcttaccgaaagggtattggaataaaacataatgcgaccatgcacaaaaataacgagtacattctgaagattgacttcaacgacttcttcaatagtattacgccagatatgatactggaacggttttctaagaacaacatcgaattatctagcgcagagaagaaacttatcatcaagtgctttttctggaacaaaacgaaaagaattgacgggaagctcgtgctatcagtaggcgccccctcgtccccgtttctgagtaatgttctgatgtttgatttcgatgagttctttagcaactattgcaaagaaaacagcatcgtgtactctaggtatgcagacgacatcacatttagcagctcaaaaaagaatgtcctcttcattattcctgatcttgtcaagaaacagttggccatactgttcaagaacaagatcaccataaatgagtttaagaccatcttctcatccaaagcccacaatagacatgtgaccggcgtgacaataaacaataacggtgaactctctctcggacgcgagcgaaagcgcttcattagcgccctgattcacaagtttactttgaaaacactgtcccttgatcaggcccaacagttacagggcatgatttcctttgctagtgatatcgagccatcgttccgtctgagaatggaaaagaagtattcagagggaatcatctgtaagatcgtcaagttcagggggagctatgaatga

SEQ ID NO: 11401 - RNA, 948 nt, synthetic construct
  source 1..948: mol_type = other RNA
atgtctgtacacctctacaagcgccttagcgaggctatggcaacccctcggaacactattgatagctatatacgtaacgccccgatgaaatacaaagtgtataccattcccaaacgaacatctggtcaacgggtaatcgcccacccagcgatacgcctgaaaaagattcagagggccctggtcgtgctgctccaggagtacatgttcatccaccaaaaagccatggcatacaaaacagggtctagcataaagaaaaatgccgaactacatagaaccaatgactacattttgaagatcgatttcaacgactttttcaatagtatcacaccagacctctttgttaattactgtaataacctagggctgaaactgaccagtgctgagatgaacgcactgattaagatcctcttttggaacaaaagcaagaaaaatgatggcaaactggtcctgtctgtgggcgctccttcctcacctttcatctccaatgtgatactttacagtttcgatgaaatcgtggacaattattgcaacgaacggaacattgtttactcaagatatgcggatgacttgtcgttctccactaaagagaagaacattttattctcagtgcccgagttcattaagaagcagctcaacaagctgtttagcaatgctatcaccatcaatgaactgaagactacgttttccagtaaagcccacaaccgccatataacgggagtcacaatcgacaacgatggaagactttcaatcgggagggaaaggaagaggtatatctctagcctcattcataagttttccttgaagaagcttgagtttaacgatgctaagcacttgcagggcctgttcgccttcgcctgcaatattgaaccccgatttaaggcaagaatggagaagaagtattccaaactgatcattgacgacttaatcaagctcaaagagttactgtga

SEQ ID NO: 11402 - RNA, 954 nt, synthetic construct
  source 1..954: mol_type = other RNA
atgcagatttacgagtttctttgtaaggaactgctggtcagcaaacaggaaattaatgagtttgtgctgagcgcaccaaaaaagtacaagcggtacacaatccccaaaaggacttctgggaaacgtgtgatcgcacagcctgcgaagaggctcaaagactatcagcgcgctcttatcaaactgctggagcagatattgcccgttcatgacgcagccttcgcttacaagaagaacatcggtatcaaggagaatgcccggaggcaccagaaatccagttacctactgaaaatggacttcagagactttttttactccattactccggatctgttctttgctatactgaagaagctagacatagtattcagccctcaggattgctatctcttaacacaggtgttgttcttcaatccaagcaagaagaccggaggtaaactgatcatgtctattggcgcgccttcgtctccctttatttccaactcaatcatgttcttcttcgacaaggctatttatgagtcttgtctgaagaagggcatatgctacaccagatacgccgatgatttgaccttttcctccaacaagaaaaacgccttatttgagttacccgtcctggtaaagcaactcctcgtcgagcatttttgcggctgcatcacgattaacgaaagtaaaacggtgttctcaagcaagagccataacaggcacgtgaccggaatcacaattaccaacgacgatagattgtcaattggaagacagcgaaaacgatatatcagtagtctgattcacaaattctctctgaatcaacttgccgacgaagatatcaattatcttcaagggctcctcgcctttgcttgtcacatcgaaccaaatttcaaacaacgcatgatcgacaagtattccgcagaaacaatctcacagatagtgacttgtgttcgccggggggatgagaaggcctga

SEQ ID NO: 11403 - RNA, 942 nt, synthetic construct
  source 1..942: mol_type = other RNA
atgcagatatacgatttcctctgtaaggagatatcggtatcaaaacaagagatttatgacttcgtgagttccgctcccaagatgtacaaagtttataccattcctaagcggactagtggcaaacgcgtcatcgcccaacccgcgaagagattgaaagactaccagagagccttggtcaaactgctagagaaagtcctgccagtgcatgatgccgcctttgcatacaagaagcaagtgggaatcaaagagaacgcaatgaaacaccagaagtcttcatatctgctgaagatggatttccagaacttcttttatagcattacaccgaccctgttcttcagcattctttataagctgaacatagatctgtcaagtgaagaccgttacctccttacgcagattctattcttcaatccttccaagaaaacaggaggtaagctggttctctccataggggctccatcttcccccttcatcagcaatagcattatgtatttcttcgacatgtccatctatgagtactgtatcaacaataacatcaactacacgcggtatgcagacgacctcacatttagttgccagaagaaggacatcctctttgccgtgcctacacatgtaaaacagcttttggttgaatactttgatggcaggatcaccatcaacgaaagcaaaactgtgttttcttcgaagtctcacaataggcacgtgaccggtgtgacccttactaatgataacagactgtccatcgggcgacagaaaaagcggtacattagcagcttaatccatcagttttctctcaatcagctggccgacgaagatatctcatacttacaaggcctgttggcatttgcttgccacattgagcccaattttaagcagcgaatgattgacaaatactctgcggaaataattgctaagatcatcactcgcaagaggaccctgtga

SEQ ID NO: 11404 - RNA, 960 nt, synthetic construct
  source 1..960: mol_type = other RNA
atgcaactctatcagttcctctctaccgagctttcaacatccaagcaggagattgacaaattcattctctcagcacctaagatgtacaagatctacactattcccaagaggacaagcggaaaacgaactatcgcacatccagctaaaaaactgaaggaataccaaagaaccctgattagtctgctcgaacagtctctgccagtccacgatgtcgccttcgcctataaaaagaacacaggcatcaagcagaacgctgcgcagcatcagcaatccaaatatctgctgaaaatggattttcaggatttctttcactcgatcaaacccaaactttttctgtccattctcgaaaagctcaaggtggacctgactcaagaagataggtacctgttaagccagatcttgttctggaatcccagcaaaagaagtgggggcaagctgatattatcaattggtgcaccttcctctccgtttatttccaacgttatcatgttcttcttcgaccaggctttgtatactgagtgccatcggcagaatattacctacaccaggtacgccgatgacataagtttttctaccaatacgaagaacactctttttgagatccctcacctcgtaaaaaagctgttggtgaaccactttaatggagccatcaccgtgaatgagtctaagacagtttttagctctaaagcccataatcgtcatattaccgggataacgctgaccaacgagaataaattgtcgatcgggagacagaagaaacgctacatcagtagcctaatacaccagtttagcttaggacaactgccaacagaagacatccagtatctacaaggcctgcttgctttcgcctgtcacatagagcctgagttcaagcagaagatgatcaagaagtatagcttcgaaacaatcaaccagatctccacttcagtggaaggtgaggacgagcccattcgccggtga

SEQ ID NO: 11405 - RNA, 951 nt, synthetic construct
  source 1..951: mol_type = other RNA
atgcacatatgccaggccttgtgcgctgagctcaagcttgacaaaactcaggtgattgattttgcattagagtccccaaaaatgtacaaggtatacgccatcccgaaaagaacttctggcaaacgtattatcgctcacccagcaaagcgcgttaaggtggcccagcacgctcttttgaggcagatgaaggttatcttccccattcaccattgcgcctttgcgtatcaggagggtttaagcattaagctgaatgcccaggagcattgtcataaccagtatcttctgaagatggacttccagaatttctttaactccatcacagcgccactgttcgttcggatgctagacaaactctccattaagatctcgccccaagatacctttctgatcgaacatctcgcattttggtgtcctagtaaggaaactggtgggaaacggatcttgtccgtgggagcccccagctcaccttttatatcaaactggataatgtacgggttcgacaaaatcgtgttcgaactgtgtcggaaagaaaacattgtgtacacaaggtatgccgacgatttgaccttcagtaccaataagaaaaacgtcctctacaagatccctaagcagatcaagtctattcttcgcgagcaactggatggcggcatcgtcataaatgatgtgaagacgatattcaccagtaaaaagcacaacagacatgtaacaggcattacgttaactaatcagggactgctgtctatcgggagaaagaggaaacgacacatctccctcctgctgcacaagttttcactcgggctgctgggaaccgaggatattctcagcctgaggggccttctaacctttgctaaccacatcgaaagcgacttcaaagcacgaatgacaaagaaatacagctctcaagtgattcaacagctgttggcttatgaccgcgtccacaatcatgagtga

SEQ ID NO: 11406 - RNA, 951 nt, synthetic construct
  source 1..951: mol_type = other RNA
atgctcatctgccagagcctttgcacggagctgaatctcaaccaaacacagttgatagattttgcaattgaagctcccaagatgtacaaagtgtatgccataccaaagcgaacctctggcaagcgtattatcgctcatcccgcaaaaagagtcaagattgcccaacgggccttactcacacagatggaaactatttttcctatccacaggtgcgccttcgcatatcagcaggggctgtccatcaagctgaacgcccagcagcattgtgacaaccaattcctgctcaaaatggacttccagaacttctttaattccataaccgcgcctctgtttgtgtcaatgcttgataaactctctatcaacatctccagccaggatctgttcttgatcgaacatctggctttttggtgtccaagcaaagaaaccggaggaaaaaggatcctgtcaattggcgcgcccattagtccgttcataagcaattggataatgtacggtttcgacaaaactatctttgacctatgccggaaagagaatatcgtctacacaagatatgccgatgatttgacgttctcaactaacaagaagaatatcttacaccggatgccaaaaaaaattaagtcaatcctcagagacgagctgggggggaacattgtgatcaacgacattaagactatcctgacatctaagaagcacaatcgccacgtgacaggtataaccattaccaatcacggcgacctctccgtaggccgcgataggaagcggtacatttctctacttatccacaagtttagccttggactgctgtccgaggaagacatcgctagtttatgtggcctgttcagtttcgcaaatcatattgagcctgattttaaggaccgaatggttaaaaagtacaccgcccaagttattcagaagttgttttcgtacgatcgcgtgtataaacatgagtga

SEQ ID NO: 11407 - RNA, 936 nt, synthetic construct
  source 1..936: mol_type = other RNA
atgcacttggcacactttctgagcaccagcctgagcatttccaaccaggaaattataaccttttcctcttcagccccaaaccgctacaaggtttactcaatccctaagaggactagcgggaagcgaacaatagcacatcccgcaaagaaactgaagctcgtgcaacggctcctatcgaaccacctgtccacgatccttccagtgcatgagtccgctttcgcgtaccggaaaggcctggggatcaaagataatgcgcagtaccacatgaacggacgatatctcttgaaaatggacttccagaatttctttctgtctatcgtgcccgagctattattcatcacactgaaaaagaacgccatcgaattcagtgaagaggacgagtttctcatgtcccggctgcttttctggaggccttccaaatcaagttctggcaaacttgtcctgtctataggtgcccccagctcccctctgattagcaatttcatcatgttccagtttgaccaggagatggcagccaagtgcaagtctaagggcgtgcgctactcaagatacgctgatgatctgacttttagtacaaatgtgaagggtgccttgtttgacctgacttccctcgtcaaggagctgctcgaaaagcaccttctcggatatattgctattaacgagacgaaaacagttttttctagcaaggcccataatagacacgtaaccggcgttaccttaaccaacgatgggcagttaagcattggacgtcagaggaagagattcatcagctctcttatccatcagtatagtctagggaaactgcccgctgaggacttgtcatatctccagggattgatagcttatgccaatgacatcgaaccggtattcgtcaaacgcatgtcgaagaagtacagtccacaaactatggatcaactgattaaaggcgtgaaatga

SEQ ID NO: 11408 - RNA, 945 nt, synthetic construct
  source 1..945: mol_type = other RNA
atggattttttcgagagactggctcgcgacctggatattagcgaacaagatgttcgcgggtttgccttgactgcgcccaaccgctacaaaatctacaggatccctaagagaacctctgggtcccgggtgattgcgcatccttcgcggatgctgaaggcctatcagcgattgatcattagctacgtcactgagttgctcccagtgcacagttgtgcctacgcataccgacagggcgttggaattaaggacaatgcacgtgtgcatgccaaaagcagctatctgctgaagatggacctacagaacttctttaactccataaatccaagtctcttctttgacgtggttgagaaggtcggactggaagtcgctgatcgggataagtggttacttacaaaactcctgttctggtcacctaataaatcttcttccgggcgtcttatactcagcgtcggggccccgagttcacccttagtgtccaatttcatcatgtatccctttgatattaggatgtctgagtattgtttcgcaaacggcctgaaatacaccagatacgctgacgacataaccctctccaccaacaagaggggttgcttgttcgatctgccagactacatcaaaggcgtgcttgccaatgagtatcagggtaagttgtccgtaaatgaaagtaaaaccgtgttcagttccaaggctcacaaccggcacgtcacaggtatcacaatcactaacaaaggctcactatcaatcggaagacagagaaaaaggtacatttcgtctctgatctatcaattttctagcgatcagctcgaccccgacgatacgctgcacctgaagggcctcttatcatttgcatttgacgtggagcctgaccttcggaggcgcttcgaaaagaagtatacaagcaaggtaattcatcagatactgacgtgcgaaaaaggaaatgattga

SEQ ID NO: 11409 - RNA, 945 nt, synthetic construct
  source 1..945: mol_type = other RNA
atgaagatcgtggagtttctgtccaataaaacaggcaagaacatccaggctctaattcgtctgatcgatcaggcgcctagaatgtacaaagtctacaagatcccaaaaaggtctgttggcttcagggtgattgctcagccgtccaaagagataaaggaactgcagcggtttaccgtcgaaatgctggaaaaaattctgccagttcacgagaaggcgatggcctatcaaaaaggaaaggatatccggtcaaacgccctgctgcacgtgaagaatgactatattctcaagatggactttgaggatttcttcaattctataaaccccgaggtattccacaagtctttggaaatagatgagatcagcattaacaataccgaactgtatttcctcaccagactgctgttctggaaccccagtaaaaggaagaacgggaaactcatcctttcagtcggagctcccagcagtcctatcatctctaattacataatgcaccgattcgactgcgcaatcgaggagttttgtaattccaacgcaattatgtactctagatacgccgatgatatgacattctctacttccaaaaagaaccatctgtttagcatacctgaaatcgtgcgaaagaccttacgcaataagtactataaacgcatctccatcaaacaaagcaaaactatcttttcctcaaaggcccataatcgccatattactggggtgacgctcaataacgaaggaaagatatcaattggtaggagcagaaaacggatgcttagttcgctaatttttaaggccagcaaaaatgctattgacgacgagagtctttccagcttgacaggtcagctcggccaggccttttatattgacaacttcttcaaggagagtatgatcaaaaagtacggggagagcttgattaagtcaatcttaggcaagaaaaacgaaaaggcatga

SEQ ID NO: 11410 - RNA, 945 nt, synthetic construct
  source 1..945: mol_type = other RNA
atgtacattgttgagtatttaagcaagaagaccgggcgcggaatgcaggagctctcaagactggtggatcaggccccccgcatgtacaaagtctacaagattccaaagaggtcagccggctttcgagtgattgctcagccctctaaggacattaaggagcttcagagatttgccgtagagatcctaaagcagatactgcctgtgcacgataaagccatggcttatcaaaagggtaaggatatcaaaaccaacgcactgctccatgcgcgcaacgattatatcctgaagatggacttcgaagacttctttaactctatcaacccggaactgtttaacatttctgtcgagaaggacaaaatcaacataacaaagaatgagctgtactggttgactaggctcctcttctggaacccttccaaaagaaaaaatggcaagctgattttatccgtgggagcacccagttctcctctggtgtccaactacataatgtatagattcgattgcgctattgaagaatactgcaatagcaatagcatcacctacagccgatatgcagacgacatgacgtttagcaccagcaagcggaatgtgttgtttatgattccagagatagtgaggaaaatcctgaagaacaactcatataagcggatcagtatcaagcaatctaagacagtcttcactagtaaagctcataatcggcatgttactggagtcacaatcaataatgaaggcaaagttagtgtcggcaggagccgtaaacggatgctaagttctctgatcttcaaagcctccaaaaatgaactcgatcacgaggtactttcctcattgacagggcagctggggcaggccttctacattgacgtgtgtttcaaggagtccatgatcaaaaaatatggcgcgtcgataattaagtccatcctttcaggtaaccacgaaaaaacctga

SEQ ID NO: 11411 - RNA, 945 nt, synthetic construct
  source 1..945: mol_type = other RNA
atgaccattgtcaaatatctgagtgagaaaacaggcactgaaatccaagaactgaataaactcattagccaagcaccccggatgtacaaggtgtacaaaatccccaaacggtccctgggtttcagagtgatcgcacagcccgccaaaagcatcaagaaactgcaaaggtttgcagtcgagattcttgagactattcttcctgttcacgagtctgctatggcttatcagaaggacaaggatattaagaagaacgctcttctgcacgtaaaaaacaactacatactcaagatggactttgaggactttttcaactcaattaatccggaactctttattaagtcactgaagaaagacaagatcctcatcagtaagatcgatttaaaccacctgaccaaattgcttttctggaatccaagcaagagaaagaatggaaagctgattctgtctgtcggcgcgccttcctctccattgatcagcaattatatcatgtacaggttcgattgcgacatagaggaatattgccagctcaaaaacatcacttattcacggtatgccgacgatatgaccttttccacaaaggaaaaagatcgtttattcgagatacctgggttcgtgaagaaaaccctaaagaaacagagttacaagaagatcagtatcaagcagtctaagacgattttttcttcgaaagcccataaccgccatgtgaccggagttacactgaacaatcagggcaatctgtcaattggcagggccagaaagcgcatgttatccagcttcatctacaaagcctgtaagaatgaattgaaccaggaagagctgctgagcctcgtgggacagctagggcaggccttttacatagataagatcttcaagaagtccatggagcgaaaatacggcttgctcacaattaaatccatactggggggtaacaatgagaaaatctga

SEQ ID NO: 11412 - RNA, 945 nt, synthetic construct
  source 1..945: mol_type = other RNA
atgcaaatcgcggaatatctaagtacaaagactggcaagtctgtccatgatattgggagtctgatttctaacgcccctagaatgtacaaagtgtaccgcatccccaaaaggacaggcggttaccgagttatcgcccaaccaagcaaggtgattaaaagcttacagcggcatgcagtcgagatgctcagagactacctgcccgtgcacctccatgcaatggcgtaccaaaaaggaaaggatatcaaactcaatgctcaggtccactgcaagaatgaatatatactgaagatggacttcgaagacttttttaactccattaatcctgagctgtttaaaaagtgtctgaaacttgatggcttgcacttcagtgagtctgatatcaacctccttattaagctgctattctggaatccctctaagcgaaagaatgggaaacttatcctcagcgtaggagccccatcctcgccgctgattagcaactatatcatgtaccggtttgactgtgccatcgagaagtattgcaaacaggagaatattacctattcaaggtacgctgacgatataaccttctccacacttaaaaaagaccagctgttcatcatacctgacattgttaataagaccctgaaacagaactcctataagcgtatatcaattaagctctccaagaccgtgttttctagcaaggcccataataggcacgtgactggagtgactttgaacaacgacggggatatctccatcggccgggctagaaagcgcatgttgagttccctgatatttcaggctatgcacggaaaactggacaacgatgagttgtcatctttaaaggggcagctgggtcaggcattctatattgatagcaagttcaaggcctcgatgcacaaaaagtacggcatcagcattatcaacaaaatcatcggcggaaactcagaaaaaacgtga

SEQ ID NO: 11413 - RNA, 957 nt, synthetic construct
  source 1..957: mol_type = other RNA
atgaatctgctagatctgctaaatagggagttaaataagactaccttcagcatctcagagagcgacatactgattttctctatgaatgcccccaagaaatatagagtttatagcatcccaaagcgatccgctgggacgcgtatcattgcacatccctcaaaagagttaaaagtctaccagaggcacctcgtagacctctttaaaaacatcctccctacgcaccacaccgcctatgcttatcgacagggcctctctattaaggagaacgcggaatgtcacaagaagaacaaatatctcctcaagatggatttcgagaatttcttcaactccatcaatccgctgattctgaaaaacgagctggtgaagaacaagatcaaattcaccaaggaagatttcaagctgcttgaacagctctgcttctggtgcccctccaaaaagataggcggcaaattgattcttagtgtcggagcaccttcgtctccctccatctctaactttatcatgtaccagtttgacgagatagtcgaaaattggtgtaagcagcggaaaattacatacacacgctacgcagatgatatcagtttttctacaagcctgaaagacgccctgtttgaagtgcctaaattggtagagagtacccttactagcaactttggaaagagaatctcggttaaagcctctaaaaccgtgttcagctcaaaggctcacaatagacatattactggtgtgaccattactaatgaaggggagctgtcaattgggcgcgacaggaagcggtacattagttccttgatccataagtttaagctgaacatgctggctcaacaagacatcgagcaccttaaaggcttgctgggtttcgcctttcatgtggaaccagtgtttcgcgagcggatgatcaacaagtacagcaagaagacaatggatgaaataaaccagttcaggtccgagtcctga

SEQ ID NO: 11414 - RNA, 927 nt, synthetic construct
  source 1..927: mol_type = other RNA
atgagtatcctcactctgctctcgaatgacctgggcatctccgaaaacgaactgaaagctttattggtcaatgcccctagaaaatataaggtttactcaatccccaagaggactggaggacggagaaccatcgcacagcctattccagcattgaagcaagcgcagcgcagctttaataagtgcatcaacctgaatgtgcacgaagctgccatggcctaccggacagggctgtccattaaggagaatgccaatatacaccggatgaacccttaccttcttaagatggatctggagaactttttcaatagcatcacaccctctctgctgtggctgaaccttaaaaagcagaacatcgagttcaacttgtatgataatcactacctggagaatctgctattctggcgcccccgcaaaagcagcaagattatattatccgtcggggctccatctagtccgtacgtgtcaaactccctaatgtataactttgacataacagttcacgaactctgctctaacatgcacattaagtactccaggtatgccgacgatctgactttcagtaccaaggagaaaaatcatttgtttgaagtgcccaaagctattaacaacctgctcctgaaggaattcggtaacaacttaaccattaataccagcaagaccgtgttcagttctaaagcccacaaccgacatgtgacgggtgtcacaattaataatcaggggaatttgtccctaggcagggagaaaaaacgatacatcaaacacctcgttcataagtttagctttgatctccttgatgactcagaggtgccatatctgaaaggactgctctcacatgcaaaccatattgagcctgacttcatagtacgtcttcagaagaagtattctgacgagatcatccaatgtctcgtaaatggcacgaacagatga

SEQ ID NO: 11415 - RNA, 933 nt, synthetic construct
  source 1..933: mol_type = other RNA
atggatctcattgacgccttgtctagctctcttaagatcaacaagtcaactcttcaggatttctgtaccttagctccaaataagtaccggatttatagcatacccaagaggaattccgggtataggataatagcgcatcccagtaaagagttgaagaagtatcagagaactctgaatgacctgatcaagaacatcctgccggtgcattccagcgcttttgcataccgcaacggtctagacattaaaaagaacgccctaagacacgccaagaatccctacttactgaaaatggattttcacgatttcttcaatcgcattacaccagacgtgttttggaaacaagttggaaacaaattcctgagcctgaccagaaaggatgccgatattttcgagaagttgattttctggaaccggagcaaaaaaaatgacgggaaactgattctttcagttggtgcccctacctcacctctcatttccaattccgtgatgtataacttcgactgcagcataagtgaatggtgtgtcaagaatgacatcacatacacgcgatatgcagatgatatcaccttctcaacccgtaaaaagaatatcctcttcacagtgcctgaaaagatcaagaacgagatcattatgcactttgggaacgctatgctgatcaacgacggcaaaactatcttttcttccaaagcacacaatcgacacattacaggaatcactataacgaacgagggaatcccatcgctcggcagggagaagaagcggtacatctatcatctgctgcatcagtacagtcttaacctgttagaacacgatgacatcctccacttgaagggccagtttagctttagttgctacattgacaaatctctgatgcatcgcgctgaaaaaaagtattcctctgagctggtccaaaaactcatccactacgtatga

SEQ ID NO: 11416 - RNA, 948 nt, synthetic construct
  source 1..948: mol_type = other RNA
atgcagttgattgacttcctgtcaagcaagttggagaagacgccccaggaaattgaaaagttcgcgctaaccgctcccaagatgtacaaaatttacaccatccccaaaaggaaggccggccacagaattatagcacacccgagcaaaaacttgaagtcataccaacaccttgtgatagactatattaagatcaagcttccaatccacggcgccgcccaagcatataaaaccgggcattccattaaaaccaacgccctggcccacatcaacggagaatacctgttaaagatggacttcaataacttcttcaactctattacaccagagctattttcattagagtgtgcgaaaaggaatatagatctgactcggtccgaactgtctttgatcaagaaactcatcttctggaatccatctaaaaaaaaaggcggaaagttaatcctgagcgtcggtgctcccacttcccctctgattagtaactttgtcatgtatggattcgattatcttctgtccgaatattgccacaagaattacatttcgtacacaagatatgcagatgacctgacatttagcactcgcaagaagaacaatctgtttcagatccctagtatagtgaaagatttcctctccgccgaactcaacaagcgtatctcggtgaatgagagcaagactatctttagctctaaggcccacaaccggcatatcacgggcgtaaccctgaccacagagaacaagctctccgttggccgagagagaaaacgctatatctactctctcctgcacagcttttccctggggaacatggcaaagcctgatatagagcatctgcaggggctttttagtttcgcttgccatatcgacgagacatttaaatctcgggctgagaataagtactcaaaactcatcattagtcagcttcatgagggtaggctcaataatgaaaaatga

SEQ ID NO: 11417 - RNA, 1014 nt, synthetic construct
  source 1..1014: mol_type = other RNA
atgactaccctgagacaacatttactcacttcccctctcgttgccgagctggccttctcgctcctgtcttcttcctctaaaaaagttaccaaacccgacgtggataagtggttgattctgtcactggctaaggtgatgcttagtggccctaagatgtatagagtctacacaatacctaagaaaaacggcgggaaacgaacaattgcacatcccagtaaagtgctcaaagtgtttcagaaagggcttgtggaatttttgatcaataaactaccagtgcacgatgccgcgtatgcttatcggaagaacatctcaatcaaggacaacgccttccagcacgtaaagaattcatattttctgaggatggacctggctgatttctttaattctatcgacacgagtctgttcgaggaacagatcgagaagcataaagtccagcttgccgactcagacaaggtcttacttcgcaggtccgctttttggtccccaaagaagattaactctggaaacctgatactgagcgtcggagcgccaagctctcctatgatctccaatttcatcatgttctcgtttgacgaaacgattaccagcatttgcgagcccctgaagattaaatacacccgatatgcagatgatctctttttcagcaccagtcataaggatgtcttattcaaaatgccgaaactgatacaatacgtgctctactccgagttcggtaagaagattactatcaatgaggtgaagacatctttctcaagcaaagcacacaacagacacattgcagggataacaatcactaataacgacactttgtccctgggacgggaacgcaaacgtacaattagtagtatgattcacaagtacagcttgggcaattgtaccgatttcgaacttgccaagctccagggcctgttgagctttagcaagcacatagagcccctgtttatcgagcggatgaaaaagaagtactcagtttccctaatcgacgtaatcatcagcggtcagtggaggaagtga

SEQ ID NO: 11418 - RNA, 1017 nt, synthetic construct
  source 1..1017: mol_type = other RNA
atgactacactgcgccaccacctcttaacctcaccgctcgtggcagaacatgccttcagcttactatcatcctcgagctctaagaaagttaccaagtctgacgtggagaaatggctgactattagtatagccaccgtaatgactagcggccctaaaatgtataaggtgtacacgatccccaagaaaaacgggggcaaacgcactatcgcccacccttccaaagttctgaaagtttttcaaaagggcctggtcgagttcctcgtgaataagctgccagtccacgatgctgcatatgcctacaggaagaacatatctattaaagacaacgccctgcagcatgcgaaaaatgcttattttctgaggatggacttagccgacttctttaactcaattgacgtgaatctgttcgagaaacagatagagaagcacaaaattgagttggctgcggccgacaaagcacttctccgacggagcgctttctggtcgccaaagaagatgagtagtggcaatttgattctatccgtgggtgctccttctagtcccatgattagcaacttcatcatgttctcctttgatgaaacaatcacgagtgtgtgcgatccccttcgtatcaagtacactcgctacgcagatgatctctttttctctaccgagcataaaaacatcctgttcaagatcccctctctgattcagtatgtcctgacctctgagtttggaaagaaaattgccatcaatgaagtgaagacctccttttcaagcaaggcccataacaggcatatcgctggggtaacaatcacaaataatgataccctcagtttgggaagagaacgaaagagacttatctcatccatgattcacaagtacagcctggggaactccaatgacattgagcttgcaaaacttcagggactcttgtcatttagcaagcacatagaaccactgttcatcgacagaatgaaggagaagtacagcatatccctggtcgaaaacatcatcacaggtcggtggcggaagtga

SEQ ID NO: 11419 - RNA, 1017 nt, synthetic construct
  source 1..1017: mol_type = other RNA
atgacaaccctgaaacatcatttactcacaagtcctctggtggccgagcaggcattcagcctgctctcgaccagcagctctaaaaaagtgaccaaactggatgtcgaaaaatggctgacagtcagccttgccaaggttatggtgtccgggccaaaaatgtatcgggtgtatacaatacccaaaaaaaacggaggaaagaggacgatcgctcacccatccagagccctgaaggtaattcaacgaggcttagtggagtttctgaatgacaagctgcccgtccatgacgctgcctacgcctaccgcaaaaacatctcaatcaaagataacgcgctccagcacgttactaatccctattttctacgcatggatctcgctgacttctttaacagtatcgacgttaaccttttcgaagagcgtattgaaaaacacaaaattcagctcagtgcagcagataaagcactgatcaggaggagcgccttttggagcccgaaaaagactaacactggaaccttgatcctttctatcggggcccccagttcccctctgatcagcaatttcattatgtttagcttcgacgagacaatttcttccatctgcgccccactgaagatcacttacactcggtatgctgatgacctgttcttttcgaccaagaataagaacatactgttcaagattccttccttgattcaatacgtactctctaccgaattcggcaagaagttgaccataaatgaggtgaagactagtttctcaagcaaggctcataatcgccacattgcaggtgtgacgataacaaataatgacaccctgtctctcgggagagagaagaagcgaatcatttcatctatgattcacaagtactccttgggcaagtccgatgatatagagcttgcgaaattacagggtttgctgtcattttccaagcacatcgagcctctatttatcgaacggatgatgaagaagtactctgtgaaccttgtcgacaagattatctcaggccagtggagaaaatga

SEQ ID NO: 11420 - RNA, 1023 nt, synthetic construct
  source 1..1023: mol_type = other RNA
atgaaaaagctgactatcttctttgccagttccccatttatagaggcctggctgcacattgtgaaacccagcgatgaagaaaactttacgagtgaacagaagattgcccacatcaagcaatcaattgccttgataatgcggagcggcccaaaaatgtacaaagtctatagcatccccaagcgaaatgggggcaaaagggtaatcgcacaccctgcagccatgctgaaggcattccaaagagatctctgcttgcacctcgctaacctacttcctgtgcattccgccgcaacagcttaccagcctgcctcatctgtgaaaatcaatgcccttgcgcacgcctccaaccattacctggtcaaaatggatctcgctaacttcttcaattcgatcgatgttgacatatttgcggccgagctccgccggcacaaaatcgctttgaccctgaaggagctgtcatttatcagacaatgtaccttctggagcccatccaaaacaagcactggtaggcttattctaagtgtgggagcgcccaccagtccgctgatttccaacttcgttatgcatgcattcgatgacatcatccagaagatttgcgagccactggctgtcacttacacccggtatgctgacgatctctttttttctactaatgtgcgcgacatttcttttaaaatccccgacttagtggcttatgtgttggcaaagacatacgagaaccacttctctataaatcaggccaagactagattttccagccgcgcccataatcgacatgtaaccggtgtcacaatcaccaatgaaggcgccttatctgttgggaggcagcgtaagaggattatttcaagccttatacacaagtacaccctgcagaaaatcaacctggctgaaacaaagattctgcaggggctgctcagttgggcattctgtattgagcctacgttcgtcatttctatgcggaagaagtattccgacaacgtgatccagtcaataatcagcggaaattggaacaacgacagagcttga

SEQ ID NO: 11421 - RNA, 1014 nt, synthetic construct
  source 1..1014: mol_type = other RNA
atgaagaagatcacaaatttcttcgttacatccccttttgttgatgcctggctccagaccacagttccctccgtgggcgagctgtcgaccgaacagagggtcgcctgtatagggcacaatctggccctgatcacccggagcggtccgaaaatgtataaggtgtattctattcccaagcgaaatggtggaaagcgagttattgcccatcccgccgccatgctgaaggcatttcaaagagatctcaacctccacttagttagtcttctgccagtacacaacgctgctactgcttaccgggtaagcagtagcgtaaaaactaatgcaaaggcacacgcgagcaatccatacctgctcaaaatggacctgtacaatttctttaactctatcgacgtcgatattttcgtcgctgaattaaggcgtcatcggattactctggcagtgaaagagttgtcatttatccgccagtgcaccttctggtccccttccaagacatctaccggccggcttatactatcagtgggagcccctacttcccccctcatttccaactttgtcatgtatgagtttgacaacattatccacaaaatctgtgaaagtctctctgtgacctatacgaggtacgccgacgatctgtttttcagtacaaacgtgcaggacgtgttattcaaaattcctgatcttgtgacctatgtgttgacgaacacgtacaacgggaaattctcaaccaatcaaaccaagactagattttcaagcaaagcacacaacaggcatgtgaccggcgtgacaataactaatgaaggcagattgtctttggggagacagcgcaagcgtatgatttcagctctgattcatcagcattgccttaagaagatcaatctggtcgagactaaaaaactacagggcctgctgagctgggcgtccaacatcgagccaacattcgtgatctctatgcgcaaaaagtacagcgataaggtcatacaaagtatcatcagcggaaattggaacgacgactga

SEQ ID NO: 11422 - RNA, 1017 nt, synthetic construct
  source 1..1017: mol_type = other RNA
atggcaaaacttatagagcagcttatacactcaactcccgttacagcttacgccaatagcgtcctttctgaatacactgataagtttacagccaaggacattgagatcatcgccactcaaacactaaatgacgtgaaggcaaggggacctaaaatgtacaaagtgtacaccattccaaaacgcaatgggggaaaaagattgattgcacatccatccaagcctctgaaggccacccagcgggctctggtagagcttttgcagaaacaactgcccgtgcacgaggccgcttttgcttatcgcgatggggtatcaatcaaggataacgctttcgcgcattcaaagaacccgtattttctgaaaatggatctctccgacttctttaatagcatcgataccgaactcttcgaggaccagctgaagtctcactctatttttatccggaataagaaactgcttcacaataccatcttctggagccccgcgaaagaactcaacaataagttaaagctcagtgtgggtgccccctcttcccctctgatatccaacttcatcatgtacaacttcgatgaggcaatcagcacgatttgccactcctcaaacattaaatatacgagatacgccgacgatttatttttcagcaccaataccaaaaacctactcttcaacattcctagtttggtcaactatctcctggagaagcagtatgacaacaaactgtccgtgaacgaaagcaagacatcatttagttctaaggctcataacaggcatattactggagtcaccataactaatgacaacaatctgtcgatcggcagaaaaaagaagcgatacatttccagtctcgttcataaatacaagctgggcagcttagacgttgaaaatatcgaaacactgcaggggctgctgggctttgcaaagcacgtggagccaagcttcatgataaggttgtgtaagaagtatagtcagaacacaatcgactctatcacccgtggtgcctggaaaaataatgagaagtga

SEQ ID NO: 11423 - RNA, 1014 nt, synthetic construct
  source 1..1014: mol_type = other RNA
atggctaagctgatcgaccagttaatcaactcgagttttgtggtgagttacgcgtatagcgtcctatcagcctgcacagggaaatttactcaggaggacgtcaagttactcgcaacacagaccattaacgatgtaaaagctcgggggcccaagatgtataaggtgtataccatccccaaaaggaacggcggtaagcggcttatagcccaccctagtaaaccactgaaagccacgcagcgcgctctcgtcgaagtgttacaaaaaaagcttccagtacatgaagccgcgtttgcatacagaagcggattgagcatacgtgacaacgccctggttcactccaaaaacaggtacttcttgaaactcgacttgtccgacttcttcaatagcatcgatgttgatctttttgaaagccaactggcatcaaatcgcattttcatcaggaataagaccctgctcaaccagattattttttggtccccgactaaggatctgcagtctaaattgaagctgtctgttggggccccctcttcaccactgatctccaacttcattatgtaccggtttgacaaagatatgtccaaaatctgtgactctctcaacgtgagatataccagatacgcagatgacctgtttttttcgacgaatatcaaggatatcctgttcgacatacctgaactcgtgaactacatacttgataagcgatacgacaataagctactggtgaataaaagcaagacatctttctcctcaaaggctcacaataggcacattaccggagtcactattacaaatgagggaaagctcagtatcggccgaggaaagaaacgctacatcagttcactggtccacaagtataacctgggcttgctggagtatgaggatatggaaaaactccaggggctgctaggcttcgctaagcatattgagcctagcttcattatcaaacttagcaagaagtattcccatcaatctgtggagtacatagccaaaggtggctggaagaataacgagtga

SEQ ID NO: 11424 - RNA, 1020 nt, synthetic construct
  source 1..1020: mol_type = other RNA
atgactaagctgaagaatcaactgataaattccacatccgttcgcagctatgcttacgatgtcctttcagaacagagtaccagaattagtgaggacgacattgaagccttggcacagaaaaccgtgcacgacgtctgggataatgggccaaagatgtacaaggtgtatacaatccctaaaagatccgggggacgacgcacaatcgcccatccatccaagcccctgaaggcagtccaaaaagctcttgtggaactgtgggaagcggagttgcctattcatagcgcagcgttggcttaccagaaagggaagtcgattaaggagaatgccgagtgtcaccggtataacaaatttctactcaaggtggacttatctgagttctttaattccatcgacattgaggtgttcgaaagccagttactgggcaacaacataaaatttgacaagagggattctcgactgataagaaacatcctgttttggtcgcctcagaaatccctgtctagtaagctcgtgctgtccgttggtgccccgtcctctcccttcattagcaactttgtgatgtatacgtttgactcattaatctctgaagtatgcgaatctttgaacattatctacactaggtatgccgatgatatgtttttcagtacccaggttaagaacactctcttcaaagtcccagagattatctcattcctgctgaaaaacaagtacaacaataagttgctcatcaacgaatctaaaaccattttctcaagcaaagcccacaatcgccacgtcacgggaatcaccatcacaaatgataacaaactgtcactcggcaggagccgtaagcggtacataagtagcatggtgcataagtataaactcggcatgcttgattttgaggacatcgagcagctgcaaggccttctgggattcgctaagaatatcgagcccgagttcctagtacggctcaaaaagaaatacagcagcgagactgtgaacatcattcttaatggtaagtggaagaatgaaaagtga

SEQ ID NO: 11425 - RNA, 1029 nt, synthetic construct
  source 1..1029: mol_type = other RNA
atgacaaaaatcgcaaaacagctcctgagctcgccttttatccattcctatgcctataaggaacttgatgaactgatggacaacgtaacccagaaagatattgactcattcgtggaactgactgtggatgatgcgattatcaacgggcccaaaatgtataaagtctacgcaattccgaaacggaatggcgggcgacgtatcatcgcccacccctctcaaccattgaaggcagtacagcgagacttgattgaaatcttaaagtcccagctgcctattcatgacgccgcctttgcctaccagcaaggcaagtctataaaaggcaacgccgaggtccacaggttcaataagtttttcctaaagatggatctgtctaacttctttaacagcatcgatgtcgacctcttttataatcacttggacctgaactcagttaatatcgacattgaggacaagagcacgatcaaaaacattatattctggcgccctcagaagaacgagactggagagctgcgcttgagcgttggcgctccctccagtccactcataagtaacttcatcatgtacaagttcgattctattatcagtgaggtgtgcgcttcctttaagataaaatacacaaggtacgctgatgacctgttctttagtacgaccgtgaagggtgtgctttttaagatacccgatatcgtggaattcattttgaagagcaagtacgacgatgtgctcaccattaataagagcaagacctccttctcttcaaaagcccacaacagaaatatcactgggattaccattacaaatagcaatgagctctccctgggtagaaatagaaagcggtacataagtgcgttagtccacaagtatcggattggactcctagacgataatgctacagagtccctgcagggccttctggcatttgctaaaaacatcgagccaaagttccttatgaggctgaaaaacaaatatagcaacgacgttatcgagtctatcatctcaggacgctggaaaaatcatgaatcagaggaatga

SEQ ID NO: 11426 - RNA, 984 nt, synthetic construct
  source 1..984: mol_type = other RNA
atggaaaacatcttcaattacctgctgagctcgcctaacgttgtggatttcagcaatgaaagcaagaaaaccaagcaacctaaactccctcaggacattctgcatgatgttctgctctacggccctaagatgtacaaggtgtataccatcccaaaaaaaaatggcggcaagcgagtgattgctcaccccagcagggggctgaaggtggttcagcgcgacttggtagtgtttcttgaaaaaatcctccccgtccataattctgcctacgcgtatattaaaaaccgatccatcaaggacaatgcccactatcattccaagaacagataccacctgaagatggacctctccaacttttttaacagcatcgacaccgaactgtttttcacacaacttgatactaatggggtaactttcaacagtgatgagatgtaccttttacagaggagcctgttttggagtccaactaagtctgagattggaaagctcattacgtccgtaggagccccgagttcgcccctgatatctaactttatcatgaacacgtatgacttcatgataagcgacatctgcaaatcattagaggtcaaatactcacgctacgcagatgacatgttcttcagcaccaatatcaaagatatactgttcactcttccaaacattgtggattacattctcgacacaatctattcaggcaagttgagagtgaacagtgcaaagaccaaattctcatccaaggctcacaatcggtatatcacaggactcgtgatcacaaatgacgccaaagtctctatagggcgttctaggaagcggctgatttcctctttagtgcacaagcatcagctgggcctgctagagccagactcagttagttccctgcagggtttgttggggtttgtgagatccgtcgagcccgaatttcttgatcgcttggtgaagaaatacggtgattatgagatccagcggattataaaaggactagtctga

SEQ ID NO: 11427 - RNA, 1011 nt, synthetic construct
  source 1..1011: mol_type = other RNA
atgaagaagctgctaaactatctggcttcccccgagacggcagataacttgaaaaaatatttcgagctcgcctatccacaaattaagtacgatgaggatgttttcaatctgatggcgaagcaccacattgagacactccttaaaagtgctcctaaaatgtacaagatctacaccattcccaaaaggaacggcggaaatcggacaatcgcgcacccagcaaagggcctgaaagccactcagcgtgaccttagtaaatacctggttgacattcttcctgtgcattcatgcgcttttgcatacaccaagaacaaaagcataaaggataacgccctcgtgcattccaagaataaatttcttctcaagatggacctggtcaactttttcaacaacatcaatgacactctcctgaataatgaactggttgagaatgacatcccgctaactaccctggagataactcaggtcaataaactgtcattctggtgtcctacaaaggacgacgatggaaagatgatcttgagcgtgggtgcccctatcagccccttaatctcgaacttcatcatgtatagattcgatagcaagttatctgagttggcagtcaacaacaaagtgaagtattctcgctatgccgacgatatcttcctttctacaaacgctcccaacgtgctgggcttgttcgtgaatgtggtggagctgctcctgctggaattatacgggggtaagctggtaatcaataaaaccaaaacggtcttttcctcgaaggccaacaatagacatgtaacaggcctcaccatcaataattccggggaagtatccctcgggaggaaacggaagcgagtgatttcttctttggtccacaagtttagcattggcattctggatagcagcgaaattgaaagtctgcgcggacttctctcattttcctcatctgtggaaccagaattcataaccagattggagaaaaagtacacctttaagctaattgacaagatagttagggggctgagttga

SEQ ID NO: 11428 - RNA, 1002 nt, synthetic construct
  source 1..1002: mol_type = other RNA
atgaaaaagcttttagactatctcaccagttctgataacctcaaaaactaccttaaactgacatatccccaaatttcctatgatgacgatgtctttcttatcatgggaaagtaccacctatcttctctctacaaaagcgcccctaaaatgtacaagttctacactatccctaaacggaatgggggacgtcgcgccatcgcccatccatctaagaaactgaaggtaacacagcgcgatctgtcaacttaccttgagaaaattctgccggtccacgactgtgcattcgcgtatagaaagaataagtccatcaaggataacgccctgatccacgtggggaataagtttttgctgaagatggacctggttaatttctttaactcaatcacccccaaaatgctcattaatgagataaaggagtcagatctgtcatttgaggagtccgaactcgactacatcaaaaaattagctttctggtgccccagcaaagaagataacggcaaactgattctaagcgtgggggctccaagctctcccttgctcagcaacttcatcatgtatagatttgactccgtcctgagcgaggtagccaagtctaataaggtgaagtactccagatacgctgacgatatctttctgagtaccaatgtgccaaatgtcctcaagctgttcgttaacattgtgaaaatcatcttgaaggagatgtatcatgatgagctgataatcaatgaaatgaagacagtgttctcaagcaaggcacacaatcggcacgttaccggtattacgattactaacgacaacaagataagcttgggtcggcagaataaacgaatgattagttcgctggtgcataagtactccttgggcgtgcttgacacaagtaaaatcataaggctaaggggcctcatctctttcgcatccagtattgaacctgacttcataattaggctggaaaacaagtatacctttaacctgatcaacaagctgattaaaggattagactga

SEQ ID NO: 11429 - RNA, 1020 nt, synthetic construct
  source 1..1020: mol_type = other RNA
atggaggaactgcagaagtcactgttagcatccaaccctgtcaaagaattcttttctcagaaggcatctcatatattcggagagagcggtcagaagttgcccatggctgctgagtctttggcactggccgccctccaaaacgttaaagtgcagggctttaagatgtataaggtttacaccatcccaaagaggtcaggcggaaatcgagtgatagcacatcccagcaaagaactcaaagctttccaaagagggctcgtcgatatcctggagagtgaactacctatccacagctgcgctcacgcctatgttaagcgtaaatccattaaatcgaacgccatggcccatgccaaaaatcagtacctacttaagatggacttccttaacttctttaactcagtggatatcgagttactggccaaagcctgttccggcaacaagaaaatcgaagaagttgggttgatgcagttcgcgaatctggtcttttggagtccgacaaagcagagagatggaaagctcgtactgtctgtcggtgctccaaccagcccattgttgtcaaactttgtgctgtacgagttcgacaatctcattagtctggtgtgtaactccatgcatgtgacatatactagatatgccgatgacctcttctttagcacgaacgaagcagatattctcaagtccgttcccaatatcgtgaagtacttcctggactacatttacggcgataaacttcgggtgaatgacgcgaaaactgccttttcctctaaggctcacaatcgccacgtgaccggtctagtaattgcgaactccgggcgcatcagtctgggacgagaacggaagcggtttatcaagagtcttgtgtacaagagcacaaaaaatgagctggacgtggaggagttaaactcacttatgggcctgctgtctttcagccaacacgtagagcctgacttcataatgaggctggtctgcaaatttggccaggacgcagtcgattatattgtgaatgctcagtggagggggtga

SEQ ID NO: 11430 - RNA, 927 nt, synthetic construct
  source 1..927: mol_type = other RNA
atgaacattatcgagattatctccaaaaagacaatgctcgcttcctccaacgtaattacgtttattcatactgcaccctatagatacaagaagtactacctgccgaagaacaacggcggttccagggaaatcgctcaaccttctagggaactgaaaatcatgcaacggttgattcttcagctgctgctaccatatttacccgttcacgaaaatgccttcgcctacgtggagggcaaatccataaagaggaatgccctgatgcaccggaacaatgagtactttctgaagatggacttttcagatttcttcaactcaatcaaacctatcgacctacgaaatgttttgttgaagaatggttatgagactattcccctcaatttaaacctcatagacaatctgttcttctataagaagacaaagaagagcgggcttagtttaagcgtcggagctccttcatctccattgataagtaacgcggtactgtacgactttgacgtccgagtgagtgaattgtgtaagcaggaagacatcacctatacaagatacgcagatgaccttactttctcttgcaacgagaaaggcaaacttctcgtgtttcagaaggagatagccaagatcctgcgcaaaattcagagtccaaagctgaagctgaacgataagaaaaccatctacgcttcaagaagcgttagccgccgcgtgaccgggattgtgataaataataatggcgagctgagcctgggaagacataagaaaaggatgatctcctcgcttgtgcaccggtacaccctgggaaaactcatccccgatgacatccacaaactgaaagggtatctcgcctatgccaaacatattgagtctggctttatcgtgtctatgcgtaacaaatacggggcagatgtcattgatagcatcctcaagtataactga

SEQ ID NO: 11431 - RNA, 927 nt, synthetic construct
  source 1..927: mol_type = other RNA
atgaacattatcgagatcatttccaagaaaactatgcttagttccagcaacgtgattacctttatccacacagctccataccggtacaaaaaatactacctcaagaagaactcaggcggtgtgcgtgaaatagcccagccttcaagggagctcaagatcatgcagaagctcattttggagttactggtaccgtacttaccagtccatgaaaatgcattcgcttatgttgagggcaaaagcattaaaaggaacgccctgatgcatcacaagaacgagtattttcttaaaatggacttcagcgacttctttaatagtatcaagcccctcgatctgcgcaacacgttgaccgacaatggatttgaaacaatacctgtgaacctgaatctgatcgataagttgttcttctacaagaagaccaaaaagtccgggctgagtctatccgtaggcgcgcctagctctcccctgatctctaacgcagtcctttacgattttgacatcaaagtcactgaactgtgcgagagacaagatataatttacactcgatatgcagatgacctcacattctcgtgtaatgagaagggcaagctgattggatttcagaaagaaattgtgaggattctgagaaaaatgaagagccccaaacttaagatcaacgacaagaagaccatttatgcctctcgagctgtttctcggcgcgtgactgggatcatcataaataataacggcgatctgagtctgggtcggcacaaaaaacgcatgatttcatctctcatccacagatataccctgaatcagttaaataacgacgacatcctcaagctaaaggggtatatatcctatgccaaacacatcgatattaacttcgtgtccagcatgaacaaaaagtacggagccgagacattgaattcaatcaccaagcataattga

SEQ ID NO: 11432 - RNA, 927 nt, synthetic construct
  source 1..927: mol_type = other RNA
atgaacattattgacattatctcgaagaagacactcctcccatcaccgaatgtgatggtgtttatcaataccgcaccctacagatataagaaatactacctgcctaaaaactcaggcggagtgagagagattgcacagccaagtcgcgaactgaaggttatgcagaggattatcatcgaaaagattgccgattttctgcccatccacgaatccgcctttgcatatgtgaaagggaagtcaatcaaggagaacgcccagaaacacaaaaggaacgagtactttcttaagttggatttctccaacttcttcaattctataaagcctagcgatctgcggcgggtcctgatcaagaatggatttgagaataacactttcaacctgttgctcatcgacaagatcttcttctacaaaaaaaccaagaagagcggactgactctcagcgtcggtgcccccagtagccctctaatatctaacgccgtgctatatgaatttgatgtgaaagtcacggagttgtgtaataaggaggggattacatatacacggtacgctgacgatcttactttttcttgcaacgagaaaggtaaacttataggcttccagaaatccatcattaaaatcctcaggaagataccatcaccccatctgagactgaatgacaaaaaaaccatctataccagtaagtccgtaagccgacgtgttactggcatcgtgataaacaatgatggccaattaagcctggggcgaaagaacaagcgcatgatttctagtttaatccaccattacacactgaataagttgaacgctgaggacgtttacaagctgaaggggtacctttcttatgcgaagcatattgaaacgaccttcataaactccatgaccatcaaatatggcgtagacaccattaatgctattctcaaatccaattga

SEQ ID NO: 11433 - RNA, 927 nt, synthetic construct
  source 1..927: mol_type = other RNA
atgaacatcatcgacataatctctaagaaaactatgctgccttcgtcaaatgtcataacatttatcaacaccgcaccttatcggtacaagaagtactacctgaagaaaaacaatggaagtcttagggaaatcgcccagccttctcgggagctgaagatcatgcagaaactgatcctcaatattctgtcggaatttcttccagttcatgagaatgctttcgcctatatcgaagggaaaagcattaagctgaatgcactcaaacacaaggaaaacaaatacttcttgaagatggacttctccgatttttttaattccatcaaaccgatagacctgcgcaatatcctcattaagaacggcttcgagagtaatatgtacaacctcaaactgatcgacaacctgttcttctataaaaagactaagaagagtgccttgagcttaagcgtcggggcaccatctagccccctgatttcaaatgcggtgctgtaccagtttgatattgaactcagcgagatttgcaggaacgagaatataacatacacgagatatgctgatgatctgactttctcctccaacgagaagggaaagcttattgattttcccaaagtagtctacttgatccttagaaaaatgcatagccccaagataaaagtgaataactcaaagaccatctacacctctaaagccgtgtccaggcgcgtaacagggattaccatcaacaaccagggcgaattgagcctgggccgacacaaaaaacgtgtgatttgtagtctaatccataagtttctccaaggagagttagacaatgacgaaattcacaagttaaagggttatctgtcatatgctaagcacattgagatcaacttcattaagtctatggagaagaagtatggtgtggagctcctaaactccataaaaaaagtggtttga

SEQ ID NO: 11434 - RNA, 933 nt, synthetic construct
  source 1..933: mol_type = other RNA
atggacatcataaaaaaaatagcggatgagacacttatgcccgtatcaaaggttagcgcatttatttttaccgctccttatcgctataaagtctacccaatccccaagaggaacggaggctttagggagatcgcacagccgtcgcgcgcccttaaattcatgcagcggatagtgatcgctgaattggagaaagtgttgaaggtacatgaaaacgcgtacgcctacgtcaaaggccgatccattaaagacaatgtggagaagcatcaacggaattcttatattcttaaggtcgatttctgcgagttctttaactctatcagtccctgtgacttggaactctgcctcaaaaacaacggtttagattccctgttatcttccaaggagctgctgaacaagctcttcttttacaaaaagtccaaaagaagtgccctgtctatgtccattggggctccaagcagtccatttctgagcaacgccatcatgtacaacttcgattccgtgatcagcgacatgtgtagcaataagaacattacttacacccggtatgcagacgacctgacgttcagtactaatgagaaaggcattctgtatgagtttatccatgaaatcgacaaagtcctggaaggcatagatagccctaagctaaaactcaacgacaaaaagaccatattcgcctctaagaagtgcaatagacacatcacaggcattgtgatcaataatgagggagaactgtcgatcggtagagataagaagcgttacctgtcatcacttgtgcacaaattcagcctaaatgccctcaatgaggaagagattgaacacctcaagggatatctggcttatgttaacaagatcgaaccttcctttatctcagggatgaagaggaagtacggggttgaggtggtgaactctattattacattcaatcccttgtga

SEQ ID NO: 11435 - RNA, 942 nt, synthetic construct
  source 1..942: mol_type = other RNA
atggtcatagacgattgcataaccaagatgctgaaaaatcaacttctgctgagcgatgctgagttactctattttgcgtccactgctcctcaccggtacaagaagtacttcattccaaaaagaaacggggtggacctacgcgagattgcgcacccttctagccagttgaaatatgtacaaagactgctggttgagtctatggtaaagactttcccaattcactcaagtgctgtggcatatcggaaaggcatctctatccgtgataacgcaactctgcatcttaagaacaattacttgctcaaaatggactttgagaacttcttcaataacatcacacccgaaatcttcttcgacgcttgtgaagacaacaatattagctactccgagaaggacaagaacctccttaagaacattctgttctacaagaagagacgcgcaagtggactgagtttgtcaattggtgccccgtcgtcccccttagtctccaactttatcatgtatcagtttgacgttcttgtgtctgacttttgcgccgcccggaatatcgtgtatagtaggtacgccgatgatctcttcttttcaaccaggaaaagcgatgagctctcccaggtggccgggttcataaaggaaatcctccgaacaatgtacaggggaagactgaaaattaatgacgcaaagacaatccataccagcaagaaaaataagaggcttgttacgggcgtggtcttgtcatctgaggacaaactgtctatcggacgagaaaaaaagcggttttacagcagcatgatccacaaattcaccctgaagctgctggatggggatgagatccataagctccagggttatctgtcgcacgccaaaaacatagaacccctatttatttcccgcatggaaaaaaaatacggccataaggctttagccgagattatgtcctataattga

SEQ ID NO: 11436 - RNA, 951 nt, synthetic construct
  source 1..951: mol_type = other RNA
atgagtttgcttgcatttctgtcggacaacctgatgttccattcttctgagttgaaaaagttcatctccacagctccacatcgctataagcactatccaattccaaagcgctcagggaacggcttccggataatcagtcagcctagcaaggaactcaagtttatccaaaaaattctggtagagcacctcgaagaggtggtgatcattcaccacaaagcgttagcgtacagaaaagggctcagcattaaagacaatgccctcctgcacaaggccaatccctacctgttgaaaatggacttcaaggactttttccctagcatcgtccctgagctgttctttgacgccctactgaagcaggatatccatttttctaagcaggactacgcactcctccagaaggtgttttttatgaagaagactagaaagagcccctttatactatccattggagctcctagttccccattaatcagcaacgcagtgatgtttgaattcgataaacagatcgatgaactgtgccaaaaacggaatattacctattcacggtacgctgacgatctagtgttctcatcgaaaatcgatggtgcactctttgacctgcccaaactcgttgagggcgttcttgacaaagattactttggcctgatccgcataaacaaggataaaacagtcttcagctctaaagcccataaccgacatatcaccggagtaaccattacgaatgacaacaagctgtccattggtagggataagaagaggttgttgtcctctaaggttcaccgatatagtcttaaccagctggaggccgaactggccgccaagctttccggagagatatcattcgctatattcatcgagccgagctttaaagctttcctgattagaaaatacgggagggatgtggtcgagtctttactgcgtttcaatttcgaaaatactcccgaactttga

SEQ ID NO: 11437 - RNA, 936 nt, synthetic construct
  source 1..936: mol_type = other RNA
atgaacctcattaagtttctcaaggaaactacgttaatccctgaagatgaattactcaagtttgcctccaccgcgccccataggtacaaggaatacgacatcccaaaaaggaacggtaaaggggtccgccatattgcccagccctcaaaagagctgaaattcttccagaagatcattgtgaactatctgagcgacattctgccggtgcacgaaaaagccacggcttataagcaaagagtgggcatcaaggaaaatgcactgtaccactgtggaaacgagttcattttgaagatggactttgaaaacttcttccctagcatcacaccagacgttctctttcacctctttaaacggcttgatatcaaatttgacaagactgatgagttcttcctggagaagttgttgtttaaaaaaggcaggcgcgatcgtaacagttatctgtctattggttcaccttccagcccctttatttccaattgcatcatgtacttcttcgacatagaggcagaccgcgtgtgctggaacagaggcattacatattctaggtacgctgacgatatcacccttagtaccaagaagcggaataacctgtttgatatgcccaagctactcaatgagatgctgactagagagcttctgggcttcattaaggtcaataaagacaaaaccgttttctcaagcaagcgccacaatagacatatcaccggagtaacactgaacaatgacggagatatttccttgggccgagatcgtaaacggcttatctcgtccatgatacaccgatttaaatctggacagctggatagcatacaaacagccgagctgcaggggtttatctctttctcatactatatagagccactattcctcaacaggttaaagctgaagtatgggactgatatcatcgaccggataaagagttacaatctgttgtga

SEQ ID NO: 11438 - RNA, 936 nt, synthetic construct
  source 1..936: mol_type = other RNA
atgagtatctatgtcttcctttctgactcactccttattagcgaaagtgatttggagaaattctcttcaacagcaccttatcgctataaagtctatgatattcccaagcgcaatgggaaaggcttcaggaccattgctcacccctcgaaggagttaaagctgattcagcgcttatgtgtgcagtacctggagaataagctatacgtgaatgatgccgctacaggctacagacggggactgtccataaaggataacgcagccgcccacagcaaaaataagtacttgctgaagatggactttgaggacttttttccatccatcaagccacttctgtttttctacatttgcaaacagcgagagataaaattcaccgtgaaagaaaaggctttcctcaggtatatcctgtttaggaaaagcagaggagaagacgttttccgtttaagtatcggtgctccgtcttcccctctgatctccaattttgtgatgagcacattcgacgagatcgtgctgaagtattgcatcaacaacaagatcacctacactagatacgccgatgacctcgccttctcaactaatgtacgtaacagccttttcgacgtacccaagaccatacaggagcggttgcatgatgcaacaagaggaaccatcaaggtgaactcttccaagacggttttttcatctcgaaaacataaccggcatataacgggcgttactctaacaaatgacgggctgctctctctgggacgcaaaaagaagagggagatttcgagtctggtccacaaatttagcatcggtactctcgaacaaaccaaaatttccaacttgcaaggccagctgagcttcgcctatcacatcgaacctgaatttctcatacggctgcagaaaaagtacggccaggcgatcattgataagattaaggggaaaactgacaaatga

SEQ ID NO: 11439 - RNA, 930 nt, synthetic construct
  source 1..930: mol_type = other RNA
atgaatatagaagaatacttaactgagctcttgtacgtgggccccgacttactctataagtttgcgagtacatcatctcggagatataaaacctaccagatcaaaaaacggtctggaaaaggcgttagaaccatagctcatcctagtaaggaactcaagtacatacagaggctgctggtcgagaaactggaacagctactgcccgtcagcgataacgcctacgcatacattaaggggaagtctatcagagataacgctcagcagcatgtcaacaacaagtatttcctcaagatcgacttttccgattttttctatagcatcacaccggacatttttttcttcatgctgaagaagcacaagatagagtattcccaaaaggaccagtttctacttaagaatctgctgttctggcgaaaagaacgggatggcggtctgactctttctattggcgctccatcatccccattgattagcaacttcgtgctttatgacttcgacaaaagcattaactcatggtgccagggtaataagatcgtgtatacgaggtacgccgacgatattagcttttcaacaaataaacgcaacgccttgtttgacgtgctcgccaatgtaaaaaaaaccctcaatgactgtgggctggagaacatcaagattaacgattccaaaaccatcttttctagtaaggcacataatcgacacatcacaggggttactattaccaatgataacaaactgagcatcggacgcgagaagaaaaggctcctgagttccatgatccaccacttttcccaaggaaacctgcctaaggagaagtacgaggaattatcgggccatctggcccacgcattcttcattgatcccgacttcaagaatttcgtgatcaagaaatacggaaatgaggtgcttaaaaacttgtttcaacgtaagtga

SEQ ID NO: 11440 - RNA, 933 nt, synthetic construct
  source 1..933: mol_type = other RNA
atgataatcgaacatttgagtgagacgttattcctcgccgaacatgatattgttcgatttagcctgtcctcacctcaccgctacaaggtttatgagattcctaaaagaaactctagcaaaacccgcactattgctcacccctctaaggagctgaagttcatccagcgggctcttgtggagttcttgtcaaaaatcctccctatccatgaggcagcattcgcatacaagaaaggcatgggcataaaggataatgcaaaacagcattcgaaatccaaatacctactcaagatggacttcaaggatttcttcccaagcattacgccagaccttttttttagggtggccgaggattacggcatcgaatttaatgagaatgacaggattgtgctaacaggccttctgttttggaaaccgaagcgctccgatgggctggtattatccatcggagcccccacctctcccctgatctccaacttcgtcatgtttgagtttgacaaaaaggtaagcagtgactgcctgaacaagaagattacatataccagatatgcagacgacatcaccttcagcactcgggtcaaagatgccctgtttgaaataccacccttcattagctcggtgttgaatgaaactgtgaagggtattgagctgaaccctgaaaaaacaatctttacctctcgagcgcacaaccggcacgtgactggggtcacactgactaacgacggtgagatatctgttgggcgtgagaaaaagagactcatctcatcaatgatccacaagagtaagtacagtaaactgtcttccgaagctgctgccaatctgctcggacttatctcctatgcgacccacattgaaccagagttcatggataggatgatcaagaagtacggagccgaagtgatccaagctataaaggccagggccattggcagctga

SEQ ID NO: 11441 - RNA, 933 nt, synthetic construct
  source 1..933: mol_type = other RNA
atgatcataaagcacctgtctgatacactcttcctcgccgaacacgatattgtacgcttctctttatccagcccccatcgctacaaagtatatgagatcccaaagaggaatagtaaaaaaacccggacgattgcccatcccagtaaggagcttaagttcatccaacggaccctggtggattacctgtctaagattttacccgtgcatggcgcggcttttgcatataaaaaggggataggtatcaaggacaacgcaaggcagcacgccaagtccaagtacctcctgaaaatggacttcaaagattttttcccatccattactcctgagttgtttttcagcgttgccaaggcccacggtatagaattcaacaaggaggataggattgtgctgaccggcctgttgttttggaaaccggaaggctcagatggcctcgtgttaagtatcggggccccaacatcacctctgattagcaacttcgttatgtatatctttgaccagaaactctctgacgagtgcctcaatagaaaggtcacttacacacgctacgctgacgacatcacctttagcactaggatcaaaaatacactattcgaactgcctcatctaattacttcgttgcttaccaaaaccgtcgatggagtggtcattaatcccgataaaactgtgtttacttcccgggcgcataacagacacgttacaggcgtgaccttgaccaatgagggagagctttctatagggcgagagagaaagcgactgatctcgtcaatgatccacaaaagtaagtttagcaaactgagctccgaagacgcatctaacctgctcgggctgatctcatacgctacgcacatcgaatcccagttccttgaccgtatgacaaagaagtatggagctgaggtcctgcaggcaattaaggacagagccgtgggaagctga

SEQ ID NO: 11442 - RNA, 933 nt, synthetic construct
  source 1..933: mol_type = other RNA
atgatcatcgagtacttgtccgaaagtcttttcatggccaaatatgacatcgtaaatttcgccttaacaagcccccatcgttacaaggtctacgaaattcccaaaaggaatagtaaaaacactcgcaccatagctcatccttctaaagaactgaagttcatccagcgggagcttctgaagaaattgatcgaaatcttgccagtgcacgatgctgcctttgcttatcaaaaagggatcggaattaaggataatgcgaataagcatagcaacagtaagtatctccttaagatggatttcaagaactttttccccagcattacccctagcctgtttttttctatagctgagaagaacggtatcgtctttgacaaaaatgatcagctggtgctgaagggccttttgttctacaaatccaaagccaacaaggagctcactctatcagttggtgcacctacctcaccactgattagcaatttcctcatgcacatttttgaccaaaagatttcctacgaatgttccctgaagaaagtgacctatacacgatatgccgacgacatcacgttctcgacgaacattaagaacatcttatttgagctgccggagattatcatgcagctgctccaggagacagtggtcggcgtggaaataaatccagagaagaccattttcacatcaaaagcacacaatcggcacgtaactggcgtgacactaactaacgagggggggctgtctattggaagagataagaaaagactgatctctagcatgatccacaagtctaaatttaataccctcgcaaacgacgatgcatgctacttactcggcctgatatcccacgcgagtcatattgaacccgagttcctggaaaggataatcaagaaatacggactcgaggttatacagaacattaagctgtcagccatcacttcctga

SEQ ID NO: 11443 - RNA, 933 nt, synthetic construct
  source 1..933: mol_type = other RNA
atgattatagagtatttgtctgaatccctgctgattgccgaacatgatttgacgtcattcgccttgaccgctcctcacaggtataaagtatacgagatcgcgaaacggaattccaaaaaaacacgtacaatcgcacatccatctaaagaacttaagttcatacagcggtctttggttgagctgtttgagaagagcctagacattcataaggcggcctttgcatacaaaaaggggttcgggattaaagataacgctaaggcccatattaactcgaagtacttactcaagatggacttcaaaaactttttcccttcaattaccccctcactcttttttaccgtggccgagaagaagggcgttgtatttacagctgccgatagggccatccttacgggcctggtgttttggaaacctcagggaagggacgatctgatcctgagtatcggtgcacccacttccccaatagtgagcaacttcgtcatgaattattttgatgaggccgtgttcgatctctgcattaaccgcaaaataacatacacccggtacgctgacgatattaccttctccaccaagctgaaagacaatctctttgatcttcccaagataatcgagactattctgaatgagacagtccagggtatcgaggtcaattccgaaaaaaccatcttcacctcaaaagcccacaatcgccacgtgacaggagtgactctcactaacgacaatcacatcagtgtgggaagagacaagaagcgactaatctctgcaatgatccaccaaagtaagttcaagagcctgactccggaagacgctagccacatcctgggccttattagcttcgcgattcatatcgaaccagaatttctcgacagaatcctgagaaagtatggcgccgaggttttaaacaacatcaaggctaaggcaggcgggatttga

SEQ ID NO: 11444 - RNA, 933 nt, synthetic construct
  source 1..933: mol_type = other RNA
atgattatcaattacctctctgacagtctgtttatgtccaaagatgatatagtgcggttcagtctaacggcccctcacagatacaaagtgtatgagattcccaagcgaaagtccggtcagaagcgcgtgatagcccatccttcaaaagaacttaagttcatccagcgctctctgattgacattctgaaactctacctccctgtccatgatgcagctttcgcttataggaagggaatcgggattaaggagaacgcaaagcagcacttgaactccaaataccttctgaagatggactttgagaactttttcccctcaattaccccagccctcttttttaaaaccttagaagagcatggattcgtcttggatggcgacgacaaactggttctctctggtctgcttttctggaaaaagaaggattttgacgggttgactctgtctataggtgctccgacaagtcccttggtcagcaatagcgtcatgtacctgtttgacaaaaagattagcgagatctgtctttcaagaaagataagctacacgaggtatgctgacgacatcaccttctctaccaacattaagaacattttgttcgacatcccagaactggtgtcttccgttcttaacgagctagtggatggcgtgaaactgaattgcaagaagactatcttcacaagcaaagcccacaatcggcatgtgaccggggtaacactgactaatgatggcaagctgagcatcggccgagaacggaaacgtctgatttcatcgatgatccaccaaagcaagttctgcaatctcacaatggatgaagcatccaagttactgggactcatcagtcatgccgagcacatcgagccaggatttctgaagaggatgatccacaaatatggcgaggaagttttaaacaatatcaaatccagagcgtccggggtatga

SEQ ID NO: 11445 - RNA, 936 nt, synthetic construct
  source 1..936: mol_type = other RNA
atggacattcttcaacacataagtgacttgctcctcacaaagaaaagtgagattatatccttcagcttaacagctccataccgatacaagatctacaggattgctaaacggaatagcgataagaagagaactatagcgcatccctccaaagaactgaagtttattcaacgtgccatcactgagtatctcagcgataagctccctgttcacgaatgcgcctttgcatataaaaaggggtcaagcataaaaaccaacgcacagattcatctacacaccaagtatctgctgaagatggactttgaaaacttcttcccatccatcacccctaggttgttcttcagcaagctccgacttgcaaacattgacctgacggcggacgacaaagtcatcctggagaatattctttttttcaagtccaaacgcaactcaaacctaagactgtctatcggagcccctagttcaccgctgatcagtaacttcgtgatgtatttttgggatatagaagtgcagaagatttgttcgaaaatcggcgttaactatactaggtacgccgatgatctcacattttccaccaataataaggacgtgttgttcgatatccccgatatgctggagaatatcttaccaaaatactctctgggtaagatccggatcaatcatgagaaaacagtgttttcctctaaggggcacaatcgccacgtcacgggaattactctgaccaacgacaacaagctgtctatcggccgcgagagaaaacggaagatatcagccatgattcaccattttatcaatggtaagctgcccgctgatgaatacaataagctgattggcttattggccttcgctaaaaacatcgagccctctttctacaagagcatggtaattaagtatgggcctgacaacatccataaacttcagaaacagaaagacaaatga

SEQ ID NO: 11446 - RNA, 960 nt, synthetic construct
  source 1..960: mol_type = other RNA
atgaatatttctaagcacctgtgcgagaaattggtaatggatgaggacgagatctttaagtttagtataactgccccctacagatacaaagtgtatgagattccgaaaaggaattcgccaaagaaacgcactatagcccaaccaagcaaggagcttaagttcatccaacggattattatctccttactgaaggacgtgctgcccattcatgctagctgctatgcttaccggaagaatttatctatcaaacacaacgcacttgttcatctgaataccaagtacctcctgaaaatggactttgaggattttttcccctccatctcccctcatctgttctttgaaatccttaaactcacaaagatccagttcgaagataatgacctcatcctcctcgaaaagctgttgttttttaagccaaaacgtaactctactcttaggctcagtataggtgcccctagttcccccttcatcagcaatttcgtgatgtattttttcgacattgaggtgcagagtctctgtgacgctcacggcattaactattcacgatatgccgatgaccttacattctcaacgaacaacaaagatctgctgttcgacatgcctattatcgtgtctgacattctgtctaaacattcctttgattccatcaagatcaacaacagaaagaccattttttcaagcaaaggtcacaaccgacacgtaacagggataacactgaccaatgaatccaacttgtcagttggcagagagaaaaagcgcctaataagcgtcatgatccactatttcgtcaccgggaggttggatgtggacgatgttctaaagctgcagggaatgctgagcttcgcacggtttgtggaacctaagttctacttgagcatgtgtaagaaatacggcctggtcaatatcaagaagctgaacagtttacagattgcgtctggagataaaagctcatacatctga

SEQ ID NO: 11447 - RNA, 915 nt, synthetic construct
  source 1..915: mol_type = other RNA
atgagcaagcccgaaataattcgattctgcttaaccagccctcacagatataaaacgtacaagattcctaagaggaactcagatcaaaaaagaacaatcagccacccaagtaaagagctcaaatttatacagcgtgtgctgaacgattatctgcgcgaaaaactgccgattcatgactgcgcctacgcctataagcagggactgaatattaaagacaatgctgaagttcatgcctctaccaaatatttcctcaagatggacttcgaagacttctttccatcaatcacccccgatttcttttttacaatgctggacaaagcggggctcgagattaatgaaatcgatagtatccttctgaagaacttcatcttctgtaaagcaagtcggaagtcaggcctttttctgagcatcggggccccttcctcccccctaataagcaacttcgtgctttttgggtttgacgagaatatcaaaaggttttgcgcagagaaaaacattaattacactcgctacgctgacgatttgactttcagctccaacatcaagaattccctatttgaggtgcccgagatcgttaaattctacctggacaaggagactaatggcaagattaagatcaataagaggaagaccgtattctcttctaaagctcacaatcggcacgtcactggtgtgaccttaacaaacgatgagaagttgtctgtcggcagaaaccgaaaacgcctgatttccgcaatgatacaccattttaagtgtggtaagctcgatccaacagagattgataagctgaagggcctcatgtcgttcgtgaactatattgaaggagacttttacaggcggatgatcatcaaatacggatcagaaacgatcgacaagttgaacaactataaacaggtcaagcgggatgccaagtga

SEQ ID NO: 11448 - RNA, 924 nt, synthetic construct
  source 1..924: mol_type = other RNA
atgaatattttcgagcaactgagcgacatcttatgtgtggacgccaatgagctaatggatttcgcttctacctcaccacatagatataaggtgtatactatagcgaaacggaatagcaacaagcgccggttgatagcacacccttcaaaagaattgaaattcatccagaggattctgatcaagattctcgagccaaagctgaaagttaataacgtggcacatgcctatattaaggacaagtccattaaaaccaacgcaatgcagcacgtaaactctaagtatttgcttaagatggacctggaaaatttcttcccctctattaccccaaatcttttttttagctgcctcactaagtctggcgtcgagatcactgaaagagataaggaactcctgacagggtttctgttttggaaacccaggcacagttacaaattgcttctctcaataggtgctccttcctcccctctggttagcaattttatcctgaactcgctggacgaagagctatccgtatactgcgagagcaataagattaagtacacacgctacgctgatgacctgacgttcagtacaaacgtgaaagatatcctcttctccctcccggaggttgtcagcgagagtctgtataataactacaacggagacatcaaggtgaacaaggataaaaccatcttcagcagtaagggatttaatcgacacgtcactggcatcgtgttaaccaacgacaacgtcctgtctatcggtagagaaaaaaaacgtgtgatatcatccacgattcacaaactcaagcttggcgccttggatgacaacgaggtgaatcagctgcagggaatctttgcccatgcctgtttcattgaacccgatttttacaataggatgctgaagaagtacggggctgagacattaaacaaaatcaaaaagtga

SEQ ID NO: 11449 - RNA, 930 nt, synthetic construct
  source 1..930: mol_type = other RNA
atgaagattgtcgatgtgctgagccttaaactgctgatgtccaacaccgacattgttaaatttgccaataccgcaccacatcgctacaaagtgtatcagattcccaagaggaattcttccaagaagcgcacaatcgcccagccttctaaggagctgaaattcctacaacggatcttgtgcggtattctggaagatatcctgcccatccacaattcggcttttgcctacaagaagaacattggaatcaaacagaatgcagaatttcacagcaagaacaaattccttctcaaaatggatttcaagaactttttcccgtcaatcaatcctaacctttttctccggcaaatagagtcacacgctatttctctggacgaggtggataagaagttgctaataaacctcatcttcagaaagccctaccgagagggaattctggagttatccattggcgctcctagctctccactcataagcaacttcatcatgtacaatttcgacaaggccatcagtgaaaagtgtaacagtatgagtatcacttacacgagatatgcagacgatattaccttttctaccaactccgttaacattctgttcaatatccccaaaatcgtggaaagtctcctccatgatatatatcagggggacatctccttaaataaagagaagacagtctttagctcaaaggcgcataatcgtcacgtaactggcataacactgtccaacgacagcaaattgtcaatcggcaggtataagaaaagggtgttaagctctaaaatccaccattacttgctgggtcatctcaaagaagacgagattcagaaattgaagggagaactggccttttccttccacatagaaccaattcttaaaaagcgattcatccggaagtatgggaaagagtgctttctgaagctggacaaggagctttga

SEQ ID NO: 11450 - RNA, 927 nt, synthetic construct
  source 1..927: mol_type = other RNA
atgaaaattatcgagctgttgtcttctatgttgcttatggaaaacagcgacatcatcaaattcagtaacagtgcaccatatcgatataaggtttatcagatccccaagcgcaactcactgaaaaagcggactatagcacaaccctccaaagaactgaagttcatacagaagttgctctaccaaatactgggcaaggaacttcccgtacacaagagcgcctttgcttaccagaagtatataggaatcaaacagaacgccgagcagcacgtgaagaataggtttctcttaaagatggacttcaagaacttctttcctagcgtcaatcctgagctgttttttatagagattgagcattacggcatcgagctggacaaaattgataagtccctactcaccaatttaatcttccggaagccatatcggaaagggggtctggagctctctattggggctcctatttctcccctcatctcgaattttgtgatgtacagattcgacgatttcatttccatcaagtgcaatgaaatgaacgtgaagtacaccagatatgccgacgatctgaccttttcatccaactgtaaagacatcttattcgaaattccaggcatagtcgagaaagcgctgtttgatatctacaagggtaacatcgttatcaacaagagtaaaaccattttcagctcaaaggctcacaatcgtcatgtgactggaattacactcagcaatgacgattctctatccattggaaggaataagaaaaggattcttagcgcaagcctgcattattacacactggggagattgacgaaagaagagatccagaagctgaaaggctacctcgccttttcattctacatcgaaccgaacctggagtccaaacttattcgcaaatacggcaaagagtgccttgataatctgatgaaggaatga

SEQ ID NO: 11451 - RNA, 924 nt, synthetic construct
  source 1..924: mol_type = other RNA
atgaacattctttcttccatcagcgacaaattactcatgaataattcagacctgctggagttttcaaggacgtgtccccatagatataaaatctacacaatccctaagcggaactctaagaaaaaaagggtaatcgcacagccaagcaaagaactgaagtttattcagcggatacttatacagaatttggaaaacaagctgcccatccataacatggcgtttgcctatagaaaggggattagcatcaagaacaacgctcagaaacacttgtacaacgactatctgctcaagatggacttcaaagatttctttgagtccattaccccgaagatcttttttcgcgaactggagaagcacaagatcatcctctcatctgaagatattaagtttcttacaggagtcatcttccgaaaggagaaaaatgagctcctgctgagcattggctcccccatttccccactaatcagcaatttcgtgatgtttagtttcgacaagatagtctacgaactttgcctcaaaaaagagataacttacaccagatacgccgatgatattaccttcagtactaatcgcaaaaacatactgttcaacatcccttcgatgatcgaagacgtgctgttagcaaattacgaaggagagatcatcctcaataaagaaaaaaccagattcaccagtaaggcccacaataggcacgttactggcgtgacactgagtaatgagaacaaattaagcatcggccgtacaaagaagcgagagttgattgtggccttgcactacttcataaacaataagctggacatcgactctattgagaaactgaggggggagctcgcttttgctttctatattgagcctgatttcaagaaccggctaattaagaagtatggtcaaaactccctggatcgcattcggcataataactga

SEQ ID NO: 11452 - RNA, 930 nt, synthetic construct
  source 1..930: mol_type = other RNA
atgaatatcgttgattaccttagcgacttaatattgatggatcgccgcgaactgttgaaattttcttctacatcaccgtaccgatataaagtgtatgagattcccaaaaggaactcgaatggaaagcgaactattgctcaaccaagtaaagagctgaaatatatccagagggccctcttgaaattctttgacggggtcattccaatccacgatagtgtgttctcttacaaaaagggaatatccatcaaagacaacgcctgctgtcatgtaaactacaaatacctgctcaagatggatttcaaagacttttttccttccattaccccctcgatcctgttcaatgagtttgagaaatataagctgtacttcaatgacgacgacaaaaagctgctatctggtctgcttttttggaagaagaaccggaagaatgatttcttacagctcagtattggcgcccctaccagccccttcatttccaacttcatcctctactcattcgacaaggccatcagtgatatatgcagcgaaaagaacgtggtgtattccagatatgcggatgacatcacattttcaagcaatgtcaagaatgtgctcttcgaatttcctaagatcgtcatcgaactgctgtaccagctatacaacggcaacattaagatcaacaaagacaagaccgttttttccagccgggcacacaaccgtcatgtgactgggattacgcttagcaatgatgggttcctgagcatcggcagagaaaagaaaaggaagctgtcttcctgttttcactactacattacccggaaattatcaaagatcgagatagacaagctgaagggcgagctggcattcgctttttatattgagccagatttcaagaatcgcctcatgggaaagtatggtgaaaaaacattggagctccttatgagagagtga

SEQ ID NO: 11453 - RNA, 930 nt, synthetic construct
  source 1..930: mol_type = other RNA
atgacaatcctcgatatcctgatggacactctgttgctcgatatgcaagaattgaagaagttcgcctctacatccccctataggtataaagtgtatcagatccctaagcggaacagcaaaaaaaagagaaccatcgcccacccatccaaggaacttaaattcattcaacgggctcttaatggcattctgagtaatattcttccagtccacgaggccgtgttcagctacaaaaaggaagttagtattaaggacaacgctcagaagcatctcaagtcacagtacctcctgaagatggattttaagaacttctttcctagcatcactccagaaattttcttcgaccagctggacaaaaataatatttcatactccgtggaagacagagagattatcagtcgcctgttattttggaaaccctctcggtataaagaatacttaagtctctccatcggagcaccctcttcaccgctgatatccaatttcattatgtacagctttgacaagaagataaacgactactgcaacaatatcaacgtcacgtatacccgatatgcagacgatattactttcacgaccaacgtaaggaatatcttgttcgatatccctaatgagattaaaaagatcctactggaggagttttccggtaagatcatcataaacaacaagaagaccatctttagctctaaagcgaataatagacatgttacaggcatacgtctgaccaacgataacaagctatctataggcaggaataagaaacgcgtgctgagcagcaaggtgcatcactactcactcggaaaaatcaacgatgacgaagccaaaaaattacagggggagctggctttcactttttatattgagcccgagtttgagtcgaaacttattaaaaagtacgggctggagacactgctcaagttgaacaaaatatga

SEQ ID NO: 11454 - RNA, 930 nt, synthetic construct
  source 1..930: mol_type = other RNA
atgagcatagttgattacgtgtgtgatgccctttgcatcgaaaaaatgcagttaatgcactttgctgtaacagctccccaccgatacaagaagtacgagatcccgaagagatccgggaacggcacccggaccattgcacaacccagtaagcaactcaagttcattcagcggatcatcatctctgagctcgaaaagattcttactcctcacccatctgccttcgcgtacattaaggggatcagcataaaggacaatgcggagatgcatgttaaaaatcgttacctgctcaaaatggatttcaaagacttctttcccagcattacccccgacctgatgtttcaggagtatgctaggtttggtgtcacattcagccctgaggatagtgcactgttgtcaaacatcctgtttttcaaacttaggaagaatagtaagctgaaactgtccatcggcgcaccatcatcacctttcatctccaacataatcatgcgccactttgacgccgtgatatcagaactgtgccagcataaaaagatctcctatacccgatatgccgatgacatcacgttctccagcaatattaagaacgttctatttgagatccctgaggccattactgtcgcactcaaaaaggaggggtataaatgcattaagatcaacaaggagaagacggtcttcagttccaagagaaacaatagacacgtgacaggtataaccattagcaatgaagacaaactgtctgtgggacgcactaaaaagcggattctcacagctgccgtgcacaaatttagcctgggatatttgtcggaatctgacatcgagaagctgaaaggcgaactatcttttgtattcttcgtggaaccagcctttaaggacaggttaattaaaaagtacggatacgatgtgtgtcataaattgtggaaacatgcttga

SEQ ID NO: 11455 - RNA, 930 nt, synthetic construct
  source 1..930: mol_type = other RNA
atgagcatcatcgactacgtgtgtgacgccttatgtatcgaaaagactcagctcatccaattcgccgtcaccgcaccccacagatataaaaaatacgatatccctaagcggtccggaaacggcacccgaacaattgctcagccaagcaagcaactcaagtttattcagaagatcatcttgctcaaattggagaaattactgacacctcatcagtccgcatacgcgtacgtaaagaataagagcattaaggataacgctacagtgcacattaataaccggtatcttctgaagatggatttcaaggactttttcccatcgatcaccccggagctgatgtttcaggagtacgcacgcttcggaattatgttctcaaacgatgaacagactctgctctcaaacatactgtttttcaagctgaggaaaaatagcaaactgaaactgtctatcggagctccttcttctcccttcatatctaacattgtgatgcgtcattttgacaccgtggtgagtgagctttgcgagaataaaaagatcaagtataccaggtacgccgatgacataacctttagcagcaatattcgggacgtcctgtttgaatttccccagatcattgccaatactctaaaaaacgaaggctatcatgatatcacgctgaacatagagaaaacgatcttctcctccaagcgcaacaatagacacgttactggggtcactctgagtaatgatgggaacttatccattggccgcgacaaaaagcgattgctttcagcctcaattcacacattcagtctaggtaagctctgcgaaaaggacattgagaaacttaaaggtgagctggcttttgccttctatatcgaacccgagttcaaaataaggatgctcaagaagtacgggtccagtacatgctctagattgtggaaagttgactga

SEQ ID NO: 11456 - RNA, 933 nt, synthetic construct
  source 1..933: mol_type = other RNA
atgaacattgtatcctacgtgtgcgataccttgtgtattgacgagaaacagttgatgctgttcgcagccacgtctccacaccgatataaaacctatgaaatccctaagcgctccggaaatggaactcgtacaattgcccacccctctaaacagcttaaatttatccagcgcctggtaatctcccaactggagaagatcgtgtctccacataaggccgcagttgcttatattaaagggctcagtatcaaggataatgcgatattacatgctaagaacagcttcctactgaaaatggacttcaaggattttttccactctatcacccccgaactgatgttccaaacttacgagcagctgggggtttccttcagcatcaaggagcgagaattcctctcgaacattctgttttataaggtgaggaagaatagccacctcaggctttcaataggcgctccgtcaagtccttttatcagcaacatcgtcatgcaccacttcgatgacagtatgtctaaatactgctccgaaaaagagatcatttacacaaggtatgctgacgatttgactttcagcagcaatataaagggtatactgtttcatctgcccgatgaggtgcggtttcacctagacgaaacaggctacaagtcaatcgtcgtgaacattgagaaaaccacttttacaagcaagaaacacaatcggcatgtgactggcattacgatctctaatgattccacaacctcaatcggtagacagcggaaaagaaaccttagtgccgccattcataagtttagtctcggcaatatgaccgaagacgagattgaaaaactgaaaggcgacttatcatttgcattctttgtcgagcctgacttcaagctcagaatgaagcagaaatacggagagaagatatacgggatgctgttcaagaagaactcctga

SEQ ID NO: 11457 - RNA, 939 nt, synthetic construct
  source 1..939: mol_type = other RNA
atgagcatcttcgatagtatcgtggactctctgtgtacgtcacccgaacatcttcgcaactttgccgcgacttccccttatcggtacaaagtctatgacatcccaaaaaggagcgggtctggaaaacgtaaaatagcgcaccccgcaaagcagttgaagtacattcagcgattagccgtgcacgagctggaaaagttcttcaccccacacgaatccgccttcgcttatgtgaaaggcaaatctatcagagacaacgctaaggttcacgtaaggaacgagtatctgctcaagatggatttcaaagacttttttccgagtattacaccagaactgttctttgcacaggtggaaaaattgggcactaccttttgcgatgaagacaaggttttcctgtccaacattctgttctacaagttgcgatcttactcaaagctgaggttaagcatcggggcacctagctcccctttcgtgagtaatattgtcatgcgggaatttgacatcaaaatatctgagttctgcaaaaccaagtccatcgcctatagcagatacgccgatgacctgtgtttttctacaaacatttccggtctactgttcgagctgcctaaactggttaccaaaacactcaagtcgaatggctacgccgagctcaaaatgaataggagcaaaaccgtgtacagctccaagggacataatagacatgtcacgggcgtgactctgagtaatgatgagaagctatcagtcggccgtagtaagaagcgcgagactatagctcgcgtacatcactatctcaacggtagactcacacccgaacaagtggagagccttcaggggtatctttcatttgtctttcacatcgagcccgagtttaagatccggttgcataagaagtacggaaatgaagctattgagatgctcctttcagagcggaagattgattga

SEQ ID NO: 11458 - RNA, 933 nt, synthetic construct
  source 1..933: mol_type = other RNA
atggtaaagatagtgaattttatctcagagtcactctgcattgaggagtccgaactgatctcctttgcacacaccgccccccacaggtacaaaatctatacaataccaaagcgctcaggaaacggccgaaggacgatcgctcacccctctaagcaactcaaatttatccaacgcctcacccttcggcttctgcaggacgtcttacctattcacgaaagtgctctggcgtacaagaagagtatcagcattagagataacgccaatatccatcgtaagaaccagtacttactgaagatggactttaaggatttctttccatctattacaccgagcctgttgtttagagaactagagcgaaagaatatcattgtctcagacgaggacaaaaatttcctggccagcattctctttttcaagcttagatcgaattcttctctcaaactgagtatcggggcaccttcctccccattgatttccaacttcattatgcaccactttgatcagatcttgagctcagagtgcaaaaagatgaagatctgttatacccgttacgctgacgatattacctttagcactaacatcaaggattctctgttcaaaatccctagcatagttaagaacatccttaagaacgagaaataccccgagctaaaggtgaatgaggaaaaaaccgtgttctcttccaaagcccataacagacatgtgacgggaatcacaattacaaacgagggcgcactcagtgtagggcgggaaaagaggcggctgttaagtgcctccctgcataggtatattgagggcaaaatagacggtgaaactaagaatactctgaaaggtcagctgagcttcgccttcttcattgaaccccagttcaaaatacgcctgcagaaaaagtatggggaacgggctttggagaaactcttcagcaatgaatga

SEQ ID NO: 11459 - RNA, 936 nt, synthetic construct
  source 1..936: mol_type = other RNA
atgaacatcctcaatagcgtgtctaaggagagtggcctttcagttaccgacctcctggcattcagcaaaacctgccctcaccgctataaggtctattttattgccaaacgcaatagcgacgctaaacgggttattgctcagcctagcaaggaggtgaagtacctgcagggggctgtgataaagattttcaagagctttgacctggtacatgaggcggccttcgcttacaaggatggcataaacatcaagcaaaatgcccaggtccatgccaatcagaaatacatcttgaagatggacttcaaagacttcttcccgagtatcaccccagatctgctattttcacaactcaatatcgcgaaggtgtttcttagtgaaaaagacaaagagtttctctccggactccttttctggaaacgacgaaggaactcaaaattacggttatcaattggagcaccaagttcccccttgatgtccaacattgtgatgtacttcttcgattcctatatagaaagctactgtagactgaatagaataaggtacacgaggtatgccgatgacctgtgctttagttcttcgatggcaggaggacttgactccgtgaaagatactgtgaacaaagccctgcgctcattttttgggcgcaaaatcagactgaacaccgctaagactattttcgcatctaaggccatgaatcggcacattacaggcatcacactgactaacgatggtaagctctccgtcgggcgtgacagaaagagggagattattgccgcagtccacaaagtgagccagggcaacagccccgattgttctttgaagacactggctggtctgatctcttatgtacattctgtggaaggggattttaaagaccgtctaatcaagaagtacggcgaagttatcgtccagaagatcttcgattccttgcgggagtga

SEQ ID NO: 11460 - RNA, 948 nt, synthetic construct
  source 1..948: mol_type = other RNA
atgatcgaactgaacttgcttaaatcgctgaatacagattttcccctaggcgaggacaacatactctctttcgcacgaactgcaccgcataggtacaagacctatgaaatcctcaaacgagacggtgtgagcaagaggaaaatcgcccagcctagcaaggaagtcaaattactgcagagaagcgcgctgaaagtgttggaaccaatactgcctgtgcatcccctcgctttcgcctatactaaggcaaggtctatcaagcacaatgcgcttatccacaaggagtccaaatttatcctgaagctcgacctgaccaatttttttaactccattactcctaagctcctgcttgagaagtttcataccgctaatattagtctgacgcacaacgaccaggacctgattagtcacctgtttttctggaaggagaaacgcaatgagtctccaaaactgagtgtgggggctccatcatcacccctcttatccaacttcatcatgtacaactttgacacgaagattatcgaagtatgcaaaaaaaacggctgtctgtacagccgctacgccgatgatattaccatttcctcaaccgaaaacttctatcagctcaatctgccattcatcatagccaaaattctacgggaggaattcggggaatccatcaccttgaataacacaaagacaaagtacattagcagtgcctatcggcgtcaagtcactggtgttatactcacaaatgatcaggatatctctatcggacatcgcaaaaagcggcttttgtcaagcaaaattcaccacttcaagatccagagactgttggatcccaatgagattcagaaactaaagggagagcttgcttttgccttctatatcaaacctgagttaaggaagaaattcgagataaagtacggccaaaacaccatcacaaagattctgaagtacaagagactgtga

SEQ ID NO: 11461 - RNA, 942 nt, synthetic construct
  source 1..942: mol_type = other RNA
atgattgagctgaatcttctcaagttccttaacatcgagtttcccctcggcgaggaaaatattatcagttttgtgaataccgcccctcatagatacaaaacctatgagattctcaagaaagatggcaaaaacaaaagaaagatcgctcagcccagcaaagaggtaaagctgttacagcgttcagctctgaaactactcgagccgatactcccaatccatgacctcgcctttgcatacaccaaaaatcgaagcatcaaaaacaacgcgatgatccaccaaaattccaaattcattctgaagactgatctgtcaaattttttcaactcgataacacccaagattttgctcgagcagatacgcaagaccaacatatcagtttcaagtaagaatgaggaacttgtgtccaatttattcttttggaaggaaacacgcaaggacggactgaagttgagcattggagcaccttcgtctccactgttgagcaacttcatcatgtacaactttgacaacaaaatcgtggaggtctgcaagcagtatgactgtgcctattccaggtacgcagacgatatcactatcagctctagtaagaacttttatgaactgaacttcccactgatcattaaaaagatcttgctggaagaattcggtgaatctattaagctgaatagcaacaagacgaagtatatttccaaagcctaccaccggaatgtcactggcataacaatcacaaatgatgggtccattagtattgggagcaataataaacggctgctatcttctaagattcaccacttcaaaaacaacaagataaaggataccaacgagatcttcaagttaaaaggtcagctttccttcgcttttcatatcaggcctcaactgaaggagcagtttgaaaaaaaatatggaaaggacaccatctacaaaattctgaagtacaagtga

SEQ ID NO: 11462 - RNA, 948 nt, synthetic construct
  source 1..948: mol_type = other RNA
atgaaggagctgaacttgctcaatctacttaatctcgaattccctctgggacaggataacatactgagttttagcaggaccgcaccccatagatacaagacttatgaaatcctgaagaaagatggaatctctacacggaaaatcgcccaaccctccaaggaagtcaagcttttgcaacgaagcgccataaaaattctcgaatcaaattttccggtgcactacagcgcatttgcctatgttaagaatcgctccattaagcagaatgccataatacaccagaactcgaactacattttcaagaccgacttgagtaacttttttaactctataacgcctctgattttcctcgaaaagatcaagcagaacaacatcattctttccgacaaaaattcacagctcatcacacatctgttcttttggaaagagaatcgcaatgactcactcaaactatccattggcgctccatctagtccctttatctctaacttcatcatgttcaacttcgatgagaagattctggagatttgcaaaaaacacaactgtgagtactcaagatatgccgacgacataactatttcttcccggaataatttcttcgaattaaacttcaccagcatcatcacagcgttacttaatgaagagtttaagggcaacatcaagctgaatacgaagaagactaagtacattagtaaggcttatcatcgtaatatcactggtattaccatcaccaatgaccacaacatcagcattgggcataggaaaaaaagattgctgagcgccaagatccaccacttcaaaaacaacaagatcaaaaaccagtccgatattctcaaactgaaaggcgagctggcattcgctttttatatcatgccacatttaagggagaagttcgagaataaatacgggaatgataccattctgcagatcctgaagtttaaaacagattga

SEQ ID NO: 11463 - RNA, 1008 nt, synthetic construct
  source 1..1008: mol_type = other RNA
atgagtaactttctacagaaactgaagcagttcgtttaccagctctttaactctaaatctgagaagaatgtgctgaaaatatcgtaccctaccaatatcaaccagcagaagtttaagaacaagaagtcctttttggatttcgcctattctgccccctacaaatataagaactactacattcccaagaggaatagcacccaaaagcgtttaatttcccagccaaccgcagagttaaagtttgtacaaaaggacgtcatcaatcagttgtcagctttcctcccgattcacaactgcgcctatgcatacgtgaagaatcgcaatattaaagacaatgctgaactgcatcggcatagcaattatgtgctgaagttagacttcaagcatttcttccacagcatcagaccaaaaatcctctttaatcagctggaacaccaccagattaagctgtcagaaatcgatcagaccatactgagctttattttcttctggcgagaaaagaaagacagtccccttaaattgtcaattggagccccctcctccccagtcctgagcaactttataatgtatcggtttgacgagatgctgaaccagctgtgcgagaagcaccagtgtatatacagtcggtatgccgatgatatcacaatcagctccaaatatcatttctacgacctaaactttcctcaacatgtgcaaaaccttctggatcaggagttccaaggcaagattaagctcaatacacagaagacaaaataccttacgcgcaaacatagaagatttgtgactgggatcactctgactaacgatgctaaattgtctatcggccgacaacaaaaaaggcttctcagtgcgaagattcaccacttcaagataaacaaactgaatgacgagcagcagatcctgtctctcaagggacagctggcattcgctttctatatccagcctgagcttaaagttcagttttcaaggaaatacggtgaagagctcttgcacaaaatcatgtccgactga

SEQ ID NO: 11464 - RNA, 906 nt, synthetic construct
  source 1..906: mol_type = other RNA
atgtcagattcagagttgtttgacctcgcaaaaacctgccctcacagatacaaggtgtatgagatcgataagaaaaatgggggaaagaggctcattgcccatccatccaaagagttgaagtatatccagaaactcatccttgacattctgaaagcaaacctgtcaatacaccattcggcatacgcctacgtcgccgagaaaaatattaaggagaatgcctctcttcacgtaaacaatagttacctgcttaagatggacttcaaggatttctttccatccattaccccgggcctattcttcgacgaatgtgaaaaacataacatcttcttctccaaagaagacaaggatttgctggccaatattctattttggaagaagaagcacgctaaaaagttggtcctctctataggtgcgccctcttcaccctttatctccaacttcatcatgttctcttttgatgctctcatcagcgagtattgcaatactaacggcatcaaatacagccggtatgctgacgacttaacatttagcaccaataagaaagagaagttaagcaaactgcccaaactgatctccgaaaaactgaattcgctgtaccggaagagtattcgcataaacattgaaaagaccacgtttgttagcaaggcttgtagcaggaaagtgactggattagtcatcactaataacaacacaatctctatagggcgcgaacgaaaacgtcagataagtgccatggtgcaccagtatagcattggtaagatgacaaactccaaggatattgaaaaactggtgggactggtgaattttgcgatctacattgagcctcaattcctgaacttcctccttaaaaagtatggcagagagatcgttaatagtatctacaagctgaagaacaagaacaagtga

SEQ ID NO: 11465 - RNA, 939 nt, synthetic construct
  source 1..939: mol_type = other RNA
atgaacattgatatcaagaggcacttgagaaataacctctttatttcagacctggagatattcgaactgtcgaaaacctgcccccatcggtacaaggtctatgagattaataagaagaacggtggtacgcgcacaattgcccacccctctaaggaacttaagtacattcagaccttaatcatcaatgttctgaagacgcaactacctatccatcggtgtgcatttgcctatgtagctggcaaaaacataaaggagaacgctttgttgcatgtcaaaaatccgtatgtcttaaagatggacttcaaagatttcttcccttccataacacccggcctttttttcaatgagtgcgaaaaacactcactctacctgtcaaaggaggatcagcagctgatcgcaaactttctgttttggaagaaaaagagagcgcacaagcttattctgagtatcggagccccatcctctccattcattagcaacttcataatgtactcctttgatgtggtggtgaatgagtattgtagcgaaaaaggcatcatttacagccgctacgcagacgatctcacattttctacaaaacaggctgggcttctgtcccacctccctaaaattgtgtcagagaagctgaattccctgtacaaaaagtctatacgaattaacagcgagaaaaccactttcgttagcaaagctcacagcaggaaggtgactgggctgatactgaccaaccagaataacgtaagtatcggaaggactaaaaaacgtaacatttccgccatggttcatcaatataagatcgggaaaatcatcgataagaaggaaatcgagaagctaattggactcgtgaattttgccgtgtacattgaaccagacttcctcaatttcttgatcaaaaagtatggcaaagacactatcagtaagatctataagatcgacacctga

SEQ ID NO: 11466 - RNA, 906 nt, synthetic construct
  source 1..906: mol_type = other RNA
atgtccgaaaaagaactgttcaatttctcaaagacctgtccacaccggtacaaagtatatcccataccgaagaaaaatggtggcgagcggatcattgcccaccccgcaaaagagctaaagtatattcaacgagtcattgtcaagatactcaagaccaaactatctatccatcacagctcctatgcttacatgaataacatctcaatcaaggacaatgccgcattgcattccaataacgatttcatcctgaagatggatttcaaagagttttttcccagcatcacacctctgattttttttaacgcactcaatacgcagaatatccacttatccaaaattgatagtgcccttttagcgaatttcctcttttggaagccctacagaaagcaaaaactcgttttgtcaattggcgcccccagctcgcctctgataagcaattttgtgatgtacgaattcgacaatcagatcagttctctttgccgtaatctgaacatcacatacagccgctatgccgacgatctcacctttagtacccaggaaaaaaacgtgctttacgtgcttcctaaacagatccaacagattttgaacactacttacaagaagggaattcgcatcaacccagagaagacatctttcatttcaaaggcttttcagagaaaggtgacgggactcatactgactaacgagaataacattagtatcggcagggacaagaaaaggctgataagctccatgctgcacaagtataagattgggctgaacacccagaaagaggatatcgaaaaactgactgggttgctgtccttcgctttctatatagagccacattttaaggagtctatgatcaggaaatacgaaatcgacacaattaacaaactgttcaagaacaaggagaacccttcttga

SEQ ID NO: 11467 - RNA, 939 nt, synthetic construct
  source 1..939: mol_type = other RNA
atgtccctcctacaattcatcgctaatggcctgtacatcacggaggatgaagccattcggtatattgtaaccatcccccgcagatataagaagttcaacatccggaaaagaaattccaatgagttcaggctcattgcacagcccgccaaacaggtgaaaagtatccagcgaattgtgctcaagtatgttatcagtgattttcacgtgcatgaacgcgcgtttgcatatgaatcatacaaggacataaggaagaatgctctcgttcaccacaataacgactacattctgaaaatggacttcaagaactttttcccgtccatacggccatttcacttgatgaactgtttcgccaatatgaacattaaactggacgagatggattttttcgtcatcgaaaaccttttcttctggaaaccccgtcgcaactcgcctttgcagctgtcaatcggcgcaccttccagccctaagatctctaacgtaatcatgtactcttttgactgcgagatcttttctagatgtaaggagatgggaattgagtattcaagatatgctgatgacctgacttttagtaccacaaaaaagggcattcttttcgatataccaaagatcgtgagggaaattctaaatgaggtcaatctgaaaagcataaagatcaaccatgagaagacaatcttttccagcaaaaagtttaaccgccatgttacaggaataaccatcactaatgacggtggccttagcctggggcgtgagaagaagaggatcttgcgatcaaagattcatcactacatttgcggggtgttaccagatgtggaaatcctgaaactgcggggtgagttagggtacgctaaatttattgaacccagcttcttcaaagccatggtgaataaatacggatatgacgtcatagatagcattgccaagtacggcaactgctcttga

SEQ ID NO: 11468 - RNA, 939 nt, synthetic construct
  source 1..939: mol_type = other RNA
atgaatctgcttcaattcatatccaatggcttgtatctgacagatgatgaagcaatttcttacatcatgaccatcccgaggaggtataagaagttctatattaagaagcgcagttcacaggaatatagacttattgcacagcccgctaggcaagttaaatcactgcagaaggtggttctgaaacatatcgacaaacactttcacgtgcacgaaaatgcctttgcctatgaatacaacaaagacattcgaaagaacgcgttactacactctaagaatcagtttatcctgaagatggacttcaaaaacttctttctcagcataaaacccattctgctgaagaaatatttcaacgagattggcatcgagttggataagaaggacattatcgtgatagagaatctgtttttctggaagctgcgtcgcaatagccctctccgcctcagtattggggctcctagttcgcccaagatctctaacgtggtgatgtacttttttgattgcgagatctccaaaaagtgcaaacagttaggaatagaatactcaagatacgccgatgacctgacattcagcacgaacatcaacaacatcttatttagcattccaaagatcgtgagagagacactaaaccaggtcggactgaacgacattaagatcaatcacaagaagactgtcttctccagcaaaaagttcaatcgacatgtaaccggcgttaccattactaacgataaaaaactgtcacttggtcgggagagaaagcggttgcttcggtccaaaatccatcattacacctgtggtatcctcagtgaaacggagatattgaaactcaggggagagctcgggtttgccaaatttatagagccaacattcttcgaaagcatggtaaataagtacggctacaaagtcattaagtccatcaccacttatgggaatctgtcttga

SEQ ID NO: 11469 - RNA, 933 nt, synthetic construct
  source 1..933: mol_type = other RNA
atgaatctgttacagtttatcgccaatggactatatctgactgaagacgaagccatgagatacatcgttacaattccacggcggtacaaaaagttttacatccggaaaaggaatggcattgactatcgtctcatagcacagcccgctcgccaggttaaatttctccaaaaggctacattgaagtatatggggaagtatttccatatacacgagtccgcgtttgcttataaatctggcaaggacattcggaagaacgctctcgtgcactgtaacaacgaatacattctcaagatggactttaagaacttcttccttagcattaagcctatccaccttaaaaattacttcagtaggatggggataaccctcgatgagaaagatatctttgtgctggagaacttgttcttctggaagttgcgcaggaactccccgttacgactgagcatcggtgccccttcaagtcctatgctgtcgaatgtagtgatgtatctgttcgatgtagagattaacaatcagtgcgaagccttagatgtgacatataccaggtacgccgacgacctgacgttctcatcaaacgttaagggaatcctgtttgatatccccaaaattgtgaaagaggtccttactaaggtcaatatgaagggcatcaaaatcaaccgcgagaagacagtgttttccagcaaaaagttcaacagacatataaccggggtgaccatcactaacaatggtaccctgagtcttggcagagaaaggaaacgtttgctacgctctaaaattcatcactacatctgcggactgctgccagatgtcgaaattctgaagctgagaggagaactcgggtacgcaaaatttattgagcccaagttcttcgagtctatgatgtcccgatatggttacgagataatcgagagcatcgcaaagtacggcaattga

SEQ ID NO: 11470 - RNA, 933 nt, synthetic construct
  source 1..933: mol_type = other RNA
atggaactgctttcttatatatccaagggactgtttctctccgaggaagaggccaagcggtatattgtgaccattccccgtcgatacaaaaaataccccattgcgaaaagaaatggtaatggataccggctgatcgctcaaccagcaaggcaggtgaaggcactccagaaagcagtcattaaccacatgctggccaatctgaaggtgcacgaaaatgcattcgcctatgaagccgacaaaagcattagaagcaatgctttgatgcattgtaacaatgattacctgctgaagatggacttcaagaacttttttatgtcaatcaagccacataacctattgtccgtcttgaaagaatatggcgtagagctgacgggcacggatatcttcgtgttagagaacttattcttctggaaacttagacgcaactcaccgcttcgactgagtgtcggggcgccttcttctcccatcatatcgaataccgtgatgtattttttcgatgaggagattagtaagagatgcaaggaactcgacataacctattctcgctatgctgatgaccttacattttccactaagattaagggtgctctgtttgatgttcctaagttagttcgcgaagtactgaacatcgtgaatttgaggaatatcaaaatcaaccacgaaaagacagtctttaccagccgtaagttcaaccgccatgtgacaggcgttactattactaccgaggggtacctgagtctggggagggaccggaagaggctccttaggtccaaaattcatcactacgtgtgcggggtcctaagcgagaaagaaatcctcacactcaaaggagagctgggctacgccaagttcatcgagcacaagtttttcctcagcatgatcaaacggtacggcaacgccgtgatctcagagatctcaaaatacgagatatga

SEQ ID NO: 11471 - RNA, 933 nt, synthetic construct
  source 1..933: mol_type = other RNA
atggagctgctgaactatattgcaaacggtttattcctcagcgacgaagaggcaaggaagtatatctcaacaattcctaggagatacaagaagtatcacatcctcaaacgaaatggaaaagcctttcgcctcatcgcgcagcctgcccgacaagtgaaaagtctgcagagcgctgtgttgaatcacatttccgacgtgctgcaggtacacgagtccgcgtttgcatacgagagcagcaagggcattaaagccaatgccctgatccactgtagaaatgactatctgctgaaaatggatttcaagaacttcttcttgtcaattaagccgtttaactttctgcgtaacttgaaggagtttggcattgagctgaatgaaacagatgtcttcgtgatcgaaaacttattcttttggaagctgcgccggagttcaccacttcggttatccataggggctccctctagtccgaaaattagcaatgtcgtaatgtacttcttcgacgaaaaaatgaccaagaaatgcgccgctctcggaataacctattcaaggtacgccgatgatttgacgttctccactaaggtcaagggtgtgctatttaacgtgcccaagatcgttagagaaatcctgaatgaagttagtctccggaacatcaagatcaaccatgagaagactgtttttagctcctctaagtttaacaggcatatcacaggagtgaccatcactcccgacgggcatctttctctagggagagagcggaaacgtctgcttcgctccaaaattcatcactatgtgagcggcgtgctctctccaaaagaaatcctgacccttaaaggcgagatgggctacgctaagttcatagagcactcgttctaccagtctatgattaatcgctacggagtcgccgtcatagatgcaattgctaagtacgaaatctga

SEQ ID NO: 11472 - RNA, 933 nt, synthetic construct
  source 1..933: mol_type = other RNA
atggagctactgtcattcatatccaacgggctgctcctgactgaagccgagacaaagaagtatatctccacaatccctagacggtataagaagtaccaaatccccaaacgtaacggacacggcaatcgactgattgctcagccggccaaacaggtcaagttgcttcagaaagccgtgctaaatttcatatgcgaacacctgcaggtacacgaaagcgcttttgcgtacgaggaaaataagtcaatacgggctaatgctcttatacattgttctaaccagtacctcttaaaaatggacttcaggaattttttcctgagtatcaagccccacaatttgattaactacttccaaactaagggagtcgtgcttacggagtccgacatcttcatcatcgagaacttgtttttctggaagcttagacgcaatagtcccttgcggctgtccattggggcaccatccagcccaaagctgagcaacgtgatcatgtataactttgacgagaaaatctctctcaagtgcagcaagatgaacatcatctattcacggtatgcagatgatattaccttctccagccacgtcaaagggagcttattcgaaatccctaggattgtgagagagactctgaatgaggttaacctcaagaacatcaaaattaaccatcagaagactgtgttttcatctcgaaagttcaatcgccatattaccggagtgacaataaccacggaaggtcatttatctctgggtcgtgttcgcaaaaggctgctgaggagcaagattcacagattcattaatgagaaactcaccagtaaggaaacagccagtctcaaaggcgaactgggctacgcaaaatttatcgagtactcgttttatcagtctatgattgacaaatacggctttgataccatcaacaagattgccaaatttcctcaatga

SEQ ID NO: 11473 - RNA, 933 nt, synthetic construct
  source 1..933: mol_type = other RNA
atgaatcttctccagtacatcgcaaatggattgtttctcacagaggatgagacaaagaggttcataataacagctccccggcgatacaagaaatttacgattgcaaagaggaatggccttgaccgcagattaatcgcgcagcctgcacgacaagtgaagtctatacagagagctgtgttgaaacacattcgtgaaaatatcaaggtacatgagcacgcctttgcctacgaaaaggagagggacatcaagaaaaatgcctcactgcacaaagatcatgattacttgctgaagatggacttcaagaacttcttcctgagcataaagcccgttaacctactcaacgtgatcaagatgcaggggatctcgttagaaaacgacgatgtcttcgtgcttgaaaacctatttttctggaaactgaggcggaattcccctctgcgcctgagtatcggagctccatcttccccattcatttctaacgccgtcatgtttttctttgatacggttatgtcagaaaagtgcaaaaaaatcgaggtcacttatactcgctacgccgatgacctcaccttcagtaccaacaggaaaaatgtactcttcgaagtgcctaggttggttcgggagattctgaatgaaactagcctccgaaacattaaaattaaccatgagaagaccgtgttctccagcaagaaatttaatcggcacgtcaccggtgtgaccctcgccaacaacggagtgctttccctggggcgtgaaagaaaaagactgctgagatcaaaagtggactattaccggaaggggctgctgagccccgaggaaattctgaccttaaagggtgagctgggcaacgctaagtttatcgagccggaatttattgagcgcgtcgagagtaaatatggctctgacgttatccgcgagatccaaaagtataatatttga

SEQ ID NO: 11474 - RNA, 933 nt, synthetic construct
  source 1..933: mol_type = other RNA
atgtcacttttgaaatatatcgccgacggcctattcttgacagaggaagagacaaagcgcttcataattaccgtacccaggaggtacaagaggttcacaatagccaaaagaaaagggttagagagaaggctgatagcccagcctgctcgccaggtgaaaagtatccagagagcagtgctgaagtacatccgggatgaaattaaggtacacgaatgtgcttttgcatacgagatcgatcgggatataaaaaagaacgcttttttgcacaaggacaatagctatctcctcaagatggacttcaagaatttctttcttagcatcaagccaatcaatctcctgaatgttattaaaaggcatgggatagaactagagggaaacgatatctttgtcctggagaacctgttcttttggaaacttcgcagaaacagtcctctgagactgagcattggggccccctcctcaccattcatttcgaacgcagtcatgttcttttttgacaagatgctttccgagaaatgcgagcaaatgggtgtggtgtatactcgatatgcggatgacctgaccttcagcacgaatcgcaaaaacatcctctttggaatgcctcggctggtccgtgaagttctgaatgagacgaatctccggaacatcaagattaaccatgagaaaaccgtcttctcctctaaacggtttaatcgtcatgtgaccgggttaactctggccaataacggcgtgttgtctcttggccgagaaaggaaacgcctcttgcggtccaaagttgaccactacaaaaagggcttactgtctcccaaggagattctgattctgaagggagaactcggttacgctaagtttatcgagccggtgttcatcgaacgagtcaagcagaagtatggcagagatgtggtgcaccagatccaaaagtacaacatttga

SEQ ID NO: 11475 - RNA, 939 nt, synthetic construct
  source 1..939: mol_type = other RNA
atgaaactgcttgagattatatccaaaggcctgtatttgacggaagacgaagcaaaacgttacatcgccactatgccaagaagatataagaggtaccatatagcaaagagaaactctgataagaagagactgatcgctcagcctgctcggcaggtcaaaagcattcaacgcagtgtaatttcaatcattcacgacgaaatcttgatacacgagaatgcttacgcctatgcctccggacgggatatcaaaaagaatgctgaaatgcacaggaaaaacaaatacatcctcaaaatggacttcaagaacttttttctgagcataaagccgcacaatctctttcatgtgttcgaacgtcagggaattattctcgatgacgaggacttttttgtttacgggtgtctattcttctggaaacagcgaaggaactctcctctgagactgtcgattggggcccccagcagcccattcattagcaacgccattatgttcttttttgacgatgtgatttccaataagtgcaaagagatggacgtgtcatatacacggtatgccgatgacatgactttcagtaccaacaataagggaatactgttcgatttacccaaactggtccgaaacacactcaacgacgtgggtctgaagaacataaagatcaaccatgagaagacagtcttctcctcaaagaaatttaataggcacgtgaccggcgttactatcaccaatgatgaggcactttctatcggtcgcgaaaagaaaaggttattgcgcaccaagattgattattaccgcaagggcctgctcaatcccggagaggtgatgaagctaaagggcgagcttggctttgcgaaattcatcgaggaagggtttatcgaacggatgattaagaagtacgggatcgaactgatcgagagtatcaaaaagttcgagatcaatgagtga

SEQ ID NO: 11476 - RNA, 936 nt, synthetic construct
  source 1..936: mol_type = other RNA
atgagtttgctggaaaagatcagtaatggcctaatgctgagcaaggctgatgcaaagaattatatttctactatcccccgccggtataaggtctacaccatcaagaagaggaattccgaagaaaccagactaatcgcccaccctagtaaacaggtgaagtccctgcaacgagcgatgctgacttacttcaaagacaagctgccagtgcattcctctgcctacgcgtacatttcaggcaaatcgattaaagagaatgcagaacgccacgtcaacaatagctatatcttgaagatggacttccggcatttcttcttatcaatcgagcctctgcattttatcaacgtgatttataaccacgggtttgagctcaatgaggaagataaattcgttatctggaacctgttcttctggaaaaggagatctaatagcccactgcggttgagcgtcggtgcaccttcttcccccttcatctctaatgccataatgtacttctttgacgaagccatcagcgagacttgcgccaaaatgaacgtaacatatacccgttatgctgatgatcttacattttccacgaacaacgaagatatactctttaacataccccgcatggttaaaggaattctgaaggccaacggcttaagcaaaattaaaatcaacgaggctaagacagtgtacagcagtaaaaagtttaataggcacgtgaccggggtgacactttctaatgacggctgtatctccctcggtcgagaaaggaagagacttctgtcaagtaagattcatcacttttcccagggcagactcagcgacgtagaggttcttaagctcaaaggggagctgggattcgctaaattcattgagccgttgtttatagagcggatgtcaattaagtacggactcgacattataaaccacatccagaagtttaacccatcatga

SEQ ID NO: 11477 - RNA, 936 nt, synthetic construct
  source 1..936: mol_type = other RNA
atgaccctcttggagaaaatcgcaaacggtctgatgctgtcaaaggatgacgccaaaaactacgtgtcaacaattccaagacgttacaaggtttacacaataaacaagcgcaacagtgaagaaaaacgattgattgcgcaccccagcaagcaggtgaaggccctccagcgggcattcatgtctggattcaagaaaaatatccctatccattcatctgcctacgcctatgaaaacgagcgggacataaagaagaatgcccttcagcacgtgtccaatcccttccttctgaagatggatttccgacatttttttttgagcattgagcctaggcacctgatcaaagtcatgaatgaccacggctttgagctgaatgacgaagataagttcgtgatttctcatatgttcttctggaagcgccgctccaactcgctgttaaaactgtctatcggagcccccagcagtccttttatctccaatgccgtgatgtatttttttgacgaggctctcagtattgcttgcaaggatatagatgtcgtatatacgagatatgctgacgacctcactttttcaacctgtcaaagcggggttctattcggcgtcccgaaaatggtgaaaaatatcctgaaagctaacggcctgagcaagattaagatcaacgagaagaagacagttttcagcagtaaaaagttcaaccggcacgtcaccggagtgactctcaataatgagggcgcagtctccctaggcagagaaaggaaaaggctcctgtcctctaagatacatcacttttgcaacgaccttttagatgaagacgagactttgaaactgaagggggagcttggttttgcgaagtttattgaaccatccttcgtagagaagatgaaaaacaaatacggggtggatattatcatggcaatccagaaatacaatccaaactga

SEQ ID NO: 11478 - RNA, 930 nt, synthetic construct
  source 1..930: mol_type = other RNA
atgaaaatcgtaaacttcatctcagacaagtttttcatgccagagcaggaagtacggaactatttgcgcaccgttccaagacggtataaacagtttaccatagacaagaggaatggtgagccccgcttgattgcacagcctgctaagcaggtgaaagcattacaagtgtcagttctgtctgaactcaagcgatacattcccatccatgagtgtgcttacgcttatcaatcaggtcggaatattaaggccaacgccttgcttcatgccaagaacagctatctccttaaaatggactttaagaacttcttcctgagtattaagccagaagtctttctcaatgttctgagtaagcacggaatcgcagtctccgaggacgatgccctgtctattgccaatcttttcttttggaagcttaggagaaattccccgctgagactgagtatcggcgcgccctctagtcctttcatctctaacgcaacaatgtactttttcgacagctatctgtccgctgaatgcaagaaaatagatgtggactattcaaggtacgccgatgatcttactttttccaccaagacgaagggcatactcaaggatattcccttgctggtcaagaaagcgctagagatgaacgatctgaaaaccatcaagatcaacaatagcaaaacagtgttctcctcgaaaaaattcaataggcacgtgacagggattactctgaataacaacggagacattagcctgggccgcaacaaaaaacgttttctctcttcccgaatccactactacagcttaggcctattaaacaatgatgacatactggagctcaaagggctgctgggattcgccaattacatcgaacctatctttctcgagagaatgaaggtgaaatacggcgatgacttgatcgtgagcatacagaagtatattgggtga

SEQ ID NO: 11479 - RNA, 933 nt, synthetic construct
  source 1..933: mol_type = other RNA
atgaatctgtttgggatcgtgtctaactcactgttcttaagcgatatggaaataaggaattacgtctctacgatccctcgaaggtataagcggtacagcattcctaagcgcaatggaattgagtttcggataatagcccagccagcgaagcaggtgaaggtgcttcaaagaatagtgctgccttttctgcagcagattattcccatccatggcaatgcacacgcctacgagaagaacaagtcaattaagaccaatgcactggtgcactctaaaaacgagtatctccttaagatggactttaagaacttcttcctctcgatcaaaccgaacgacttcattgacatcatgaaaaagcacgagattaagattaccgacgacgataagttcattatcgaaaacctgttcttctggaaactaaccagacggtccccactccgtttgtcaataggggctcccagttctccctttatctccaatgccgtaatgtatttctttgacgagatcattagccacgagtgcgaggccctggatgttaaatacacaagatatgctgatgacctgacattctccaccaatgtcaaagacattttgttcctcgtgccaaaaattgtcaaaggcgttctcaaatcctccggcttgaagaatatcaagatcaacacgaacaagaccgttttcagtagcaagaaatttaatcgacatgtcactggaatcactctgactaacgatggtgaagtgtcattgggccgtgagaggaaaagggtaataagcgtgcggatccattactttacactcgggcttctaagtacagatgacatcctgaaactgaagggcgatttagggttcgctaagtttatcgaacccgaatttatctatagaatggaacgcaaatacggactggagaacatcgaaaaacttcgcaagtttatgggttga

SEQ ID NO: 11480 - RNA, 933 nt, synthetic construct
  source 1..933: mol_type = other RNA
atgaccatcgtggagtacatttcccagggactgtttatctccgagtcagagtttgtgtcctataccaatactatgcccagacgttacaaacagttctatatcaagaagcgaaatggagaggatcgactcatcgctcagcccgcaaagacagtgaaaaacttgcaacttacagtggtggggctgctgagggacgaactcaggatacacccagctgccatggcttacgttaagggaaggtctattaaagacaatgcccaaaaacacgtacacaatcagttcctcttaaagatggacttcaaaaacttcttcctgagcatcaagcctgcaatgtttttaatgtgcctcaaaaaacagggcgtgaaccttgatgagagagacgaacacgtgatttcaaacatctttttctggaagcttcggcggaattccacactgcgcttgagcataggcgccccctctagccctttcgttagcaatgtagtgatgtactactttgacgaggccgttgagtctctatgtagaatgctgggagtcgtttacacccggtatgcagatgacctgacgttttcaactaacaagaagaatgtgctattcgaactgcctagtgtcgtgaagaacgtcctgaacgatgtggggttaaaggctattaaggtcaacaaggataaaactgtgttttcgagcaagaagtttaatcgtcatgtcacgggtgttacactgaacaactctggcgagctttccctcgggagggaaagaaaacggaccatcagtgccatgattcaccatcataagttgggtttgctgaataacgaagatgtaactaagctcaaaggctatctggggtttgcgaaatatgtcgaaccactcttcctgacccgcatggaacgcaaatacggtgagcagctgattagtcaaatccagaaattcataccgggctga

SEQ ID NO: 11481 - RNA, 930 nt, synthetic construct
  source 1..930: mol_type = other RNA
atggatattgttgaatttctggctcaggctgtgtttctatctgagaaggagtttgtgtcctatgtgaataccatgcccagaagatacaagcagttttacatcaagaagaggaacggagacgacaggctgattgcccagccggcgcgtaccgtgaaaacactgcaactgaccgtcgtaggtatgttgcagcatgaccttaaaatacatgacgccagcatggcctacgtgaaaggcaaaagcatcaaggacaacgccctccagcatgtgaataaccaatacctactgaagatggacttcaagaacttctttctgtcgattaaaccagagatgttccttacctgtgtaagaaaacagggtctgaaactgtccgaacgcgattcactcattctggcaaatctctttttctggaagctgcgccggaattcttcattgagactttccatcggcgcccccagtagccctttcgtcagtaacgttactatgtattacttcgatgagatggtcagtgatatttgcaatgagtacggaatcacctatactaggtacgcagatgacttaacatttagcacgaataagaaagggattctgttctcactccccccactcatcaaagattcattaaagcaaactgggttgaacgacataaagataaacaacaagaagacggtcttttcttccaagaaattcaaccgacacattacaggcgttacactttctaacgatgacaaaatcagcctgggccgagagaggaaacgcatgatctccgctatggtccaccacttcaagaatgaagtgttagaagtggatgaaatctataaactcaagggatatttgggcttcgcaaattacatcgagcctatgtttatcgctcggctgaaacggaagtatggggagaatgtgattatgcagatccagaagttcatagtttga

SEQ ID NO: 11482 - RNA, 930 nt, synthetic construct
  source 1..930: mol_type = other RNA
atggacattgtggagtaccttgcgcagggggtgtttctgagcgagaaagactttctgagctatgttaatacaatgcccagaagatataagcagttcactgttaaaaagcgtaatggagaggacaggttaattgctcaacccgcccggacagtaaagacgctccagatggtagtcgtgagcttactgaagaatcacctaaacatccatgaagcagccatggcatacgtgaagggcaaaagtataaaggacaatgcaaacgcgcacgtgcagaacaaattcatcctgaaaatggatttcaggaacttctttctctccataaaacctgatatattcttggcctgtatcgaaaagcaggggctgattctttctgatcaggacaaaatggtcttgtcaaacctgttcttctggaagcttagacgaaactccagcttgcgcctttcaatcggcgctccatcttcgccgtttgtgtccaatgtgaccatgttctttttcgacgaactgatttccaagatatgcaaggataaagggattgtttacacacgctacgccgacgatctctcattcagtactaaccaaaaagacatcctcttctccatcccagctctagtgaaagaatctctgaaagtcgttggcctgaagaacatcaaagtcaataatgccaagaccgtcttctcaagtaaaaagtttaaccggcacgtgactggtatcaccttgtccaatgagggcgtagtgagtctgggacgcgaaaggaagcgatctatcagcgctatggtgcatcattttaccttagggctcctggataaggagtctatttacaaactgaaaggctatctcggttttgccaagtacattgagcctagctttgtgctgcggctcaagatcaagtatggagacgaggtcgttctgaagattcagaagtttaacgattga

SEQ ID NO: 11483 - RNA, 948 nt, synthetic construct
  source 1..948: mol_type = other RNA
atgaatatcctgaatcagcttagcaacaccctcttcatggataaggattctctgaagtcatttatttccactgccccacgacggtacaaaaagtacactatccctaagaggaacggcgatggggtaaggatcatcgctcagcccagcaaacagatcaagtcactgcaaaggtatgccgctaatctgcttagtaaacacctacgggtccactacgctgcacatgcttacgtgagaggcaaaggtattaaaaccaacgcagccgcccatcgcaactccaactatatcctgaagatagacttcaaggatttcttccattctattacccccgacattttcctgaagaccctggaaaccaacaacaacatcattgagaacgaggacaaatttattatctcgcacctgttcttttggaagcttcgggggaattccccgttgcgattgtcaattggagcccccactagcccaataatcagcaatgccataatgtattgcttcgacgaggagctcacaaactattgcacagagattaatgtgacatacactagatacgcagacgatttgacattctcttcctttcactccctgagcctagcgacaattcagtccaccgtgcagaggttactgataaagcactataagagaaagatcaagatcaaccgtgaaaaaaccatctattgcaataaggcaatgaatcgcaatattacgggagttatcctgaacaatgaaaatgaactttcactcgggagaaaaaaaaaacgcatgataagtagtctcgtccacaaatttagttacagcctgctcaaccaaaaggagattaactacctcaatggaattttaggtcatgcttctcacattgagcctcagtttatcgagcggttgaaagaaaagtatggccatgacgtgatcgcgaaaatcaagaagtctataacttacgcccacatcacgtga

SEQ ID NO: 11484 - RNA, 948 nt, synthetic construct
  source 1..948: mol_type = other RNA
atgtcaattctgaaccagttatccgccacactgtttatggataaagatagcctcaagagtttcatcagtaccgcccctagacgctataaaaagtacactattccaaagaggtctggcgacggggtaagaattatcgcgcagccgagcaaacaaataaaatccctgcagcgcttcaccgccaacctcttaagcgagcatctgaaggtgcattatgccgcccatgcatatgtccctgggaagggtattaagactaatgctgcggctcacaaaaatagccagttcatccttaagatcgatttcaaggactttttccactccataacacccgatctctttattaaaactctggaagcaaatgaagctaatatatcagaggaagaccggtttatcatcgcacacctcctcttttggaagttacgtggcaacagtccccttcggctatctataggggcaccaacatcgcccctaatcagcaacgctattatgtactgcttcgatgaagagttgaccaactattgcactgatttgaatgtgacatacacgaggtatgctgacgacctgaccttttcctccttccatggcctttctctggccaccatccaaagaacagtgcagaccctgctgataaagcactacaatcgaaagatccggatcaacagggacaaaacaattttttgtaacaaggccatgaacaggactattaccggcgtggtgttgaataattctaatgaactctcactgggacgaaaaaaaaagcgcatgatcagttctctggtccacaaatttagctattccctcctgaaccaaaaagagattaactacttgaacggaattcttggtcacgccttccatatcgagcctcagttcatcgagagactgcaggttaaatacggacacgatgttatcgacaagatcaagcagtcaattacgtacgacgacattacctga

SEQ ID NO: 11485 - RNA, 948 nt, synthetic construct
  source 1..948: mol_type = other RNA
atgtccttacttgagcagttctccagcgccctgtttatggaccgggcaagtcttaaatcgtttatttatactgccccaagacggtacaaacgctacgcaattcctaagaaaaacggaaacgggttccgaacgattgctcagccttctaagcagatcaagagcctgcagcggttcggcatcagcctgctcgcgatctttctgaaaacccattactctgcacacgcctatgtggaaggcaagggcatcaaaactaacgcagccgcccaccagggttcggaccatcttctgaagatggatttcaaggacttctttcactccattacccccgacattttgatgaatacactggacaaaaatggcggcaaggaaattttggatgaagaagatcgtcacattatctcccacctgtttttttggaaattgagaggtaattctcctctgcgcctaagcatcggggctccgacctctcccataatctcaaacgctatcatgtacgattttgacgaagagatcgccgattattgtgcggagctgaacgtcaaatacacacgctatgccgatgacctcacattctcctctaaggacagggagtcactgaccacgatccccaacgaagtcaatattgtgctcaggaagaatttcggaagcaaaattcggatcaataaagagaagactctgcactgcaataagtctatgaacaggtcagttaccgggattgtgttaaataatacaaacgacagtctcagcttagggagaaagaagaagaggatgatctccagtttcgtacataagttctcatttagcttgctcgatcaaaacgaaattaactatctgaacggaatcctaggacatgctgcccatatcgagccacaattcatagagcgacttaaagagaaatacggtcaggatgtgatagcaaagataaaggctagtatagagtacctctga

SEQ ID NO: 11486 - RNA, 945 nt, synthetic construct
  source 1..945: mol_type = other RNA
atgtccttgctagatcacctgagtgaggtctttttcatggataaggccagcctgaaatcttttatttttagtgcgcccaggcgctacaaaaaatatcccatccctaaacggaatggcgaaggagatcgtatcatcgctcagccgagtaaacaaatcaaaagcttacagcgtttcaccattaaccttctcatagactatttaaaggtccaccacgcagcccatgcctatgtgtccggtaagtcaattaagaccaacgcggccgctcacagaaagaactcgtacatcctcaagatggacttcaaggactttttccattcaatcactccagatctgtttctgaaggtactgagcgatcgagataatgacggaaaacttacagaagaggacagcttcctcatatccaatctcttcttctggaaattgaggggtaactctcccctgcgactgtccattggggctcccacgagtccaattatcagcaacactatcatgtacgactttgacgaagagctaaccaattattgccttgagctcaacatcgtgtacacaagatatgccgatgatctgacattttcgtcatctgacagggaatctcttagcatcattcctatagcagttcggagggtgctgatcaagaacttcaaccgcaaaatcagaatcaattccggcaaaaccatcttttgctcaaaggcaatgagccggaacattacaggcgtggtcattaacaataattgtgagctgtcactggggcggaaaaagaagagaatgatttcttccctggttcacaaattctcctattccttgttaacccaggacgagatgaattacctgaatggaattttgtctcacgcccattacatcgagcctgcttttatagaacgcctcaagagtaagtacgggtctgatgtgattgacaagataaagcatagcattactttcccatga

SEQ ID NO: 11487 - RNA, 942 nt, synthetic construct
  source 1..942: mol_type = other RNA
atgacgaatctgtttgaaacccttcaggaacagctaagtctctccgatgacgaattgctgtcttacctacatacagtccctttgcgttacaagagatattacatcgataagcgaaattctactgaaaagcgcttaattgcgcagcccagccgaacagtgaagatactgcaaaagtacgttgcttctgagctcgaggaagttattcctgttcatcagagtgctatggcttactgtaagggacgggggataaaggaaaatgcaaagaagcacgcacacagtcgctatctcctgaaaatggatttaaagcggttcttcgatagcatcacaccgaccattctgtcagacgtgattatgaaacacggaatcgaattgtcagagaaagactatatcctggtatcgcagctttttttttggaaactccggcgtaatagccccctgaggctgagtataggagccccaagctcacctttcgtcagcaacgccattatgtatttctttgatgaggagatctctaaacactgcgaagaattgaacatcgtgtatactaggtacgcagatgacatgacctttagcaccaataaaaaaaacgtgctgttcgagctcgagaggacagtagttaaactgcttagacttaacttcggcaaggacataaaggtgaacaaagagaagactgtccattcctcaaaagcccacaacagacatgtgactggggtgaccttatccaacacaggcaagctctctattggcagggagaacaaacgcaatatcagggtgtccatccatcggttcattaatggtaagaccaatgatagagacgtgcaaaacctcaaaggtaacctggggtttgccaaacacattgagccagagttcgtcaagtccctggaggaccgctacggcgtcgagacgatcaagaagatccagacttttgacatcctgccctga

SEQ ID NO: 11488 - RNA, 933 nt, synthetic construct
  source 1..933: mol_type = other RNA
atgttccagctgttcgacactttccgagaacagctggccctcagcaacgacgagctatcaagttaccttcacaccattcctttcagatacaagagattctacatcgacaagaggaactctgatgagaaaagactgatcgcacagccagccaaagctgtaaaaactttgcagcggtatgccatttccgaaatagaagacgagctgccgatccacagttctgccatggcgtattgcaaaggacgtggaataaaggagaatgcactagtgcacgctaaatcccgctatctcttaaaactcgacctgaagaacttctttgagtctatctccccagagattctgttatccgttattagcaaacatagcattgaactttgtgacaacgataagttcctgatctcaaacctctttttttggaagctgcgcagaaatagtcatctgaagttgtctgtgggtgcaccttcttccccctttatctccaacgtgataatgtacttctttgataaggaccttgcggaaaaatgcaacgaaatgaatgtgagctacacaagatatgcagatgatatgacattcagcacgcaagatagcaatatactctacaagattgagactatcgtgaggaagcttctcaagtttcatttcgacaataaactcaccatcaacaggtcaaaaaccgttcacagttcaaaggctcataaccggcacgtcacaggagtcaccttggataatcacggccgtatctcgttgggcagggataacaaacgcagccttcgggccggcgtgtataattttacccaagggcggctgaataaggatgaggctatgaaactgcgcggtaagctggggttcgccaagtacattgaacccaaatttatcttacgactggagaagacatttgggaaggacgtcattgacgagctgaagaaatataattga

SEQ ID NO: 11489 - RNA, 945 nt, synthetic construct
  source 1..945: mol_type = other RNA
atgactaatatcttcaggggactctgtgagcaactgcttatgtccgagaatgagctgaagagttatatcagctccgttccctttaggtataaacggtattacatacctaagcggaattcaaatgaactgcgtttaattgcccatcccgccaaagtggtcaagtctttgcagcgacatgcagtgagcaagctggagccgctcttaccaatccacaagtgtgccatggcctactgcaaaggcaaagggattaaagaaaatgcgtaccagcacaaaaacaacaggtttctgcttaaaatggacctgagagatttttttggttccatcaacccatctatttttctaggagtgctcaaaaagcacgatttaaccctctctaaggaagatgtattcctattgtctaacctcttcttctggaaattgagaagaaactccccccttcgccttagtgtgggcgcaccttcaagtccttttgtaagcaatgccattatgtacttctttgacaaggagctgcacgagtactgcaacgataatgatatagtgtatacacgatacgctgacgacatgacgttttcaacatcgaagaaggacattctgtttgctctggagaagaccgtgaaagctttcctgaagaagaacttcgggtccttccttcgggttaaccataataaaactttccattccagcactgcccacaatcgccatgtcacagggattaccataaccaacaataaaaagatcagcgttggcagaaatcggaagaggaaaattcgcgcttgcgtgcactcattcaagaatggcttgctgagcaacaacgatgcactcaaactgaagggcgagctcggattcatcaagcacatagaaccagactttatcatcaacctgactaacaagtatggtctggacacgatcaaaaagatccagaccttcgaaagtgtcgacacatga

SEQ ID NO: 11490 - RNA, 945 nt, synthetic construct
  source 1..945: mol_type = other RNA
atgaacattatcgaaagaatctctgaagacttgttgatgccggaaaaagagcttctaaattttagctcgactgctccccgcagatataagaaatatacaatcgccaagcgcaacagcgacgaaaggcgactgatcgctcatccttcaaaggaagtgaaattcctgcagagactccttgtgacacacctggaggacaagctcaccatacatgcaagtgccaatgcttacgtgaaacagaaaggtatcaagtccaacgcattagcgcacaaggacaaccagtacctcctcaaaatggacttcaagaacttctttctctcaatcactcccagtatattgatcgagcaaatgctggcctttgggatcggcctggatgataggaatatcgagtttatcagcgggatcctattctggaaactgcgtagaaatagcccactgcggttatctattggcgccccatcatccccctttatttccaacgtcattatgtacaacttcgaccggctgattgaaaaggagtgcaaagtcatgggcattacttatacccggtacgctgatgatctggccttctcaactaacatcaaggacatactgtttgagattccaaagctggtaaagaatacgctgaagaagctgtacggatctaagattagggttaacacaaagaaaacggtgttctcctccaaaaagtttaacaggcatataacagggattacccttaccaataataacctgcttagtataggacgcaagaaaaaacggttcatcagcagcctggtgcacaagtatacactcgaactcctgtctgatgaggagatccttcagttgaaaggcctattaagccacgtttccaatattgagcctttgttcattggtcgactgagtaataaatacggcaccaacatcatgaccgatctcgcaccttctaagttctttattggaaattga

SEQ ID NO: 11491 - RNA, 945 nt, synthetic construct
  source 1..945: mol_type = other RNA
atgaacattatcgaaagcatttctgaggccctgttgatgcctgagaaagaactgctatcattttcctccacggctccaagacggtacaaaaagtacaccattgctaagcgcaactcagatgagcgcagactgatcgcacacccgtcaaaggaagtcaagtttttgcagaggctcctggttacccatatggaagacaaactgcctatccatgactccgccagtgcatacgtgaagcaaaaggatataaaatcgaacgcattctgccataagaacaaccagtatcttctgaagatggacttcaagaacttctttctatctatcactcccgacattctgttagagcagatgctgtccttcgggatcaagcttgatagcaataacatggattttatcagcggaatgttattctggaaattaaggcggaattcaccactgcggctatctattggagcgccaagttctccctttataagcaatgtggtgatgtacaacttcgactgcatcatcgagaaagaatgtaaacacatggggattacatatacacgctatgccgatgacctgacgtttagtaccaacagcaagaacattttgttcgagatgcccaagctggtcaaaaagactctgaaggagctttatggaactagaatccgagtgaatagcgataagacagtgtttagctccaaaaaattcaataggcacatcactggcgtcacccttacaaataataatctgctcagcgtgggcagggccaagaaacgttacattagttccctcatacacaagtataccctctcactcctgtccgaggaagagatcctccagctgaaggggctcctctcccacgcctctaatattgaacctttgttgatcggtcgactgtctaaaaaatacggtgtagacgttatggctaaccttgctcccaaaaagttctttataggcaattga

SEQ ID NO: 11492 - RNA, 936 nt, synthetic construct
  source 1..936: mol_type = other RNA
atgagcttgattagcgaaatctctgatgatgtgctgatgaccaaagatgaactgctgtcattctctttcactgctccgaggaggtacaagaagtaccatattcttaagcgaaatggaaatgggttaagactgatcgcgcaccccagcaaggaggtaaagttttttcagcgcctcgcaatttctaagctggagatccttttgccaattcatgactgtgccatcgcctacgttaagggcaagagtatacgggataatgcagaggcacacagacggaatcgctatatgctcaaaatggatttcaagaacttcttcatgagcatcacacccgaccttttcattagttctctggaaaggaacgatataaatctcgaagcccaagacatcaaatttctggagggtgtgctgttctggaagctgagacggaattcccccctacgactcagcgtcggggctccttcctcgccttttatttcaaacttcgtgatgacggccttcgacatttttatgtttggctactgcaaggacaaagggatcacatatacgaggtacgccgacgacctgaccttctcaactcgtgagaaagatctcctctttacaatccctaaagtcgtgcgcgatgccctgaaagaatactgcaacagtaagatccgtataaacagcaaaaaaaccgtgtttaccagtaagaaattcaatcggcatgtgacaggtgtcaccattactaacgacgagaagctttccctaggaagagagagaaagcggttaatctccgctatggttcaccactttgtagacgataaatattcattgagccacgaagaaatccagaagctgaaaggctatctgtcttttgctaaatccatagagccagacttcataaacaggttgtccaagaaatatggacgcgagtacatcttaaagattcagtcgtttaactga

SEQ ID NO: 11493 - RNA, 936 nt, synthetic construct
  source 1..936: mol_type = other RNA
atgagcattctgagtgacatatctaaagacgtgctgatgacagaatctgagatccttaacttcagttccactgcccccagaaggtataaaaggtattacattctcaagcgcaatggtaaagatcttcgcctcattgcccacccctctaaggaagtcaagtttttccagcgtctggtaatttccaaactcgacgggaaactgcctattcatcattgcgctatggcttacgtgaagggcaaaagcattaaagacaatgcagacgcccataagaaaaacaagtacctgctgaagatggatttcaagaactttttcatgtccgtgactcctgagctgttcataagtagccttaagaagaacaacattatcctggacaccaacgacttaatctttttggaaggcatcctattctggaaactcagacgaaatagtccattacggctatcagtcggagcaccctcgtcaccgttcatctccaattttattatgaagagcttcgatgactacatcttcaatacatgtaaggagatgaatgttacctatacccggtatgctgacgatatcaccttctcgactaacattaagactctgttgtttacgtttcctgtgattatcaagaacgcgttaaaagaacactgcgataagaagatacgaatcaattcagagaagacgatttttacctcaaaaaagttcaacaggcacattacaggtatcaccatcaacaataataacaacctttccctcggcagaaataaaaagcggctcatatctagcatggttcaccattttatcagcaaagatcacagcttgacagccgatgaaattttgaaactgaaggggcatctgtcctttgcacactttatagagccagatttcatccaacgcctgtctgacaagtacggaaatgaggagatcatcaacatcatcaaacacatatga

SEQ ID NO: 11494 - RNA, 924 nt, synthetic construct
  source 1..924: mol_type = other RNA
atgagaatctccaagaagttagccgacgaactactcttagatgaggccgagctgaggaagttttgtgccacagcgccatatcgatataagaaatacgagatacccaagcggaattccgataagaccaggctgatcgcccagcctagtaaagaagtcaaattcatgcaacggctggtggtgaagtacctgagagacatcctccctgtgtccagacacgccatggcatacgagagtggaacttcgatagtcaagaatgcttctattcacaagaacaacccatatctgctcaagatggatttcaagaacttcttcttgtccatcacaccctccctgttctttgggctgatgtcagatggcggggtcgaattttctgacgacgacaaaatcctgttgagcaacttactcttttggaaattgcgcagaaatagtcccctccggctgtctgtaggtgccccttctagcccattcatcagcaacgtcgtgatgtatcattttgattgccttatggaatcacagtgcgctgcaatgcgtattcgctacagccgatatgccgacgacatgactttctccacccgcgagagggatgctctatcagagatgcccggttttgtgaggtctgtgcttaaacgggactatgacggcaaaattaaggtgaactccgaaaaaactatctttctgagtaaggcaaagcgaaggacggtcacagggataaccattacaaatgatgataccttgagtgtaggacgtgaccgcaaacggaacatttctgctatggttcatcacttcagccttggaaagctgagcgctgaagaggtgcagaagctcaaaggctacctttcatttgttgccgcagttgagccgaatttcatctacagaatgatgagcaaatacggcaataaagtgattgaggcgctgttcatttga

SEQ ID NO: 11495 - RNA, 954 nt, synthetic construct
  source 1..954: mol_type = other RNA
atgagcattttttcaacactggccgacaagttgctgatgtccgaggaggaactgttacggtttgcactcacaatgccccgcaggtataagaagtacgaaatcctcaaaaggaatggcattgacactcggcagattgctcaaccctctcgcgaatcaaagttcattcagcgtatgataatcgacgagctgagaggggtactgagggtgcataaagctgcaacagcctatgagaaagagacagggatccggttaaatgctctgaggcatctgaatagcaggtacctactgaagatggatttcaagaacttctttcctagcatcacacccgaactgttttttgcggtcgccgagtccagtggagtggactttgagcaagccgataaagttttcctggaacacgctttgttcttccgcgccacccgcagatcacggcttagaatgagtatcggcgccccaagctcccctttcatatccaactttgtgatgaataccttcgatcacgctatgatgaagttctgtgtggaaagaaacatcagctatactcgttacgcagatgacttgaccttcactaccaacgaaaaaaatatcctgttcgatctcccaaagatggtggcaactctgctagcggaatattgcttcaagaagatccggattaacagttcaaagacggttttttcgtctaaacggtttaatcgacatgtgacgggtattgtacttaccaacaataacgagctgtctatcggacgagcccgaaagcgcgagatagcctctcttattaactcctttagatacggcgcactcagcgaggatgcaactttgaaactcaaaggtcttatggctcacgcttaccacatcgaaccggactttatcgcgagaatgaaactcaagtacagttatgaggtcgtcaatgccatactgaggtaccctctcgccattcagaccttagagcagtga

SEQ ID NO: 11496 - RNA, 942 nt, synthetic construct
  source 1..942: mol_type = other RNA
atgtcacttgcaagtatcctcgcaaataaactggtcatgtcaaacgcagatttatttggcttcgtactgacaatgccccgcagatataagcagtacaagatcttcaaaaggaatggaattgaaaccaggcatatagcccaaccttctaaggaggccaagtttatccagcgcatcatagtggaggaacttagaaaactcctgccacccatccacaaagctgctacagcttatgagcctggcactggcattaaagccaacgccctgcggcacttgaactcccggtatctgctcaagatggactttaagaatttcttcccaagcattacaccggagttcctcttcctcgccgcggagagctccggtatcaagttcgacgaactagacaaaattctgctcgaaaatgccctgttctacaagagcactagacgtgcccggctgagaatgtctataggcgctcctagtagcccatttatctctaactttgtcatgtcaggctttgataatgatatgttcgattactgcgcaaagcgaaatatctcctatactcgctatgcagatgacctgacctttacgaccaacgagaaagatgtcctttttgagatccccaagattgtggagtctaccttgattaatgcctgttttaggaagatcagaattaacagcaagaagaccatttttagttcgaagaagtacaatcggcatgttactggagttgtgttgacatccgacgggcagttatccgtagggcgcgcgaggaaacgagaagtgtctagtctgataaactccttcaagtacgggaagctagacgaaaaagaacgtcttcatctgaaaggtttgatcgctcacgttcaccacattgagcctgacttcatcttcaaaatgaggaagaaatactcagacgaggtggtgaacagcctgatgaaaccacccacggccggatga

SEQ ID NO: 11497 - RNA, 948 nt, synthetic construct
  source 1..948: mol_type = other RNA
atgaatctcatttcaaaactgacagaaaagctgatgatgacagaggaagaacttttgcgcttcgcattaacgatgccacggagatacaagcagtattttattccgaagagaaacagtaatgagcggcggctgatagcccaaccctcccaggaggccaagttcatacagaggataattattgccgagctgcgagagctgcttacggtccataaagcagcgacagcttatgaaaaggggactggaatcaggctcaatgctatccaccatgtgggcaacagatacctgctcaagatggacttcaaaaatttcttcccctcaatcaccccagagctactgtttatgattctgcgagactgcggcatcaaatatgatgaccgcgatagaaccatcttagagcacgccctatttttcaaaagtacacgacggagccgtctgagactctctgtgggggctccttcctctccctttatttccaacttcatcatgaacatcttcgatgagaacctcgcagcttactgcctgcagcagggtattacctacactcggtatgcagacgacttgactttcacctgtaacaaaaagggaattctcttcaatgtccctgatgtggtgaagcagttttcaaaggaacattgtcacggcaaaatcaggatcaattcttccaagactgtgtttagcagcaaggcctttaataggcatgttaccggaatcgttttgacaaacgacaatcaactgagtatcggccgcgctcgtaaacgcgagatcgcttctcttgtcaactcatttaagtatgggcacttggatctggatgaaagcagcaggcttaaaggtttactcgcctacgcgaaccacattgaacctgactttatcgcccgcatgaagaccaagtactccgcagacgtaattgatgccatattccacctggattcgactcagaaagaccattga

SEQ ID NO: 11498 - RNA, 936 nt, synthetic construct
  source 1..936: mol_type = other RNA
atgaattttcttcagcatatgtgcgacaagctgttcatgtctcaggatgaactgattaacttcgcacgcaccatgccctacaggtacaaaaaataccgagtggggaaaagaaacgggtctgggtataggatcattgcccaaccaagttcagaagccaaatttatccagcgtatcctgctgaaggaattgcgcagattgctcccagtgcacgagtgtgctatggcctacgagcctggagtaggcatccgcaagaatgcaatgaggcatctgcactctgattacttattgaagatggactttaaggacttctttccttccataacacctgacctattcttcttctttactaagaagatcggactggaactgggagagaaggataaggagcttctcgagaatgtgatcttctggaaatcaacacggtcctcatatcttaagctatccattggcgcgccgacaagcccctttatttctaatttcgttatgcacgagttcgacaaaagtatgaaccagttttgtatctccaaagccataacatatacgcggtatgccgatgacctgacctttactagcaacgctaagaatatactctttgagattcccagtctggtgtctggacacctcaagaaggattgcctcggtcttatcaaggtcaacaccaaaaaaactgtgttttcgagcaaagctttcaacaggcatgttaccggcattgtcctcgcaaatgacaatagcctgtcgctgggccgggaacaaaaaagaacgctttcctcaattatccatagatttagcttaggcaagctgtccgaaaaggaaaccagtcgattgaaaggtcacctgagcttcgctcatcacatagagccaaagttcatcgatcggatgaagaaaaaatacgggaacgacttaatcgatctgattttcctccacagctgcgagtga

SEQ ID NO: 11499 - RNA, 927 nt, synthetic construct
  source 1..927: mol_type = other RNA
atgatgagtatcttatccttcgtgtcagatgccctgatgatcgacaaggtagagatgatgatgtttgcccaaacagctccacatcgatataagaagtacttcatcaacaagcgcaatggcgccggggttaggttgatagctcaaccaagcaaggagacaaaattcatccagagggtggtcctgtctaaactgcgtgagatcctgcccgtccacagatgtgcgatggcttatgagaaatctgttggtattaagctgaacgctatgcaccacaaagacggccgctacctccttaagatggatttccgggacttctttccttcaattatgcctaacatgttcttggccctagccaaagattgcggcgtggaattctctgacgaggacaaagagtttctctcaagaattctgttcttccgtagcacccgaaagtcacttctaaggctctccattggggcaccgacttcccccttcatctccaacttcattatgtacaagtttgacgttgcaatggcagaatattgccaggagaacggcatcaactatactagatacgcagacgatgtgacgttttcttccaatgtgaaaggaatcctgtttgatgtgccagatatagtcaaaaagaatctgcggcagtattgctgtggacagatcaaaataaatccccttaagaccatcttctccagcaaagcttttaatcgccatgtaaccgggatcgtgattaataacgacagctctctcagtcttggccgggaaaagaaaaggatctacagcagtatgattcataagttttcgctgggtttaatggacgaaaaggagcgcgaaagactcaaaggatttctggcgtacgccatctatattgagcctgattttatagaacggatgaagaagaagtacagtagcgatctgattgccgccattatgttgtga

SEQ ID NO: 11500 - RNA, 945 nt, synthetic construct
  source 1..945: mol_type = other RNA
atgtcaattactacagccctttgtgaaaagatgcttacaggaaaaagcgagctgctgtcattttcccacacggtacccaggcgctacaagacctactacatcaaaaagagaaactcaaccgagatgagattgatagcacacccagccaagacagttaaattcatccaacgactggccgtggaggaactgaggaattatttccctatccaccattgtgccaccgcctatgaaaagggcactggcattaagatgaatgcattccaacatcggaggaatcagtacctcctgaagatggacttcaaaaacttttttctgtcgatcacgccggagctcttctttcgagtgagtgaggacctgggggtggtgttcgatagcgaagataaggcactgctggagggacttctgttttggcggctcaggcgcaattctccattgcggctaagcatcggtgctccttcctcccccttcgtgtcaaacctggtgatgtacaagttcgatgctgcactatgcgagatttgcgagtctatgggcgtagtgtatacacgttatgcagacgatttgacattcaccaccaatagaaaagacgtgctcttcgctatacccgacatcgtgagacagaacttaaaggcgcagtgctactctaagatccgtatcaactctgagaaaactgtcttttccagtaaggcttttaatcgccacattactggagtcaccattaccaacgaagggcggctgagtgttggtagggaaagaaaacgcctcgtcagcgcgctcattcataaatttactttaggcgccctgagcgatcagcagatcgaaaatcttaagggccagttggcccacgtcaaaaacatagagcctgacttcgtcgttcggatgaaaaaaaagtattccgatgaagccattgctaaaatctttgcctggaagcgagaggggtttttatga

SEQ ID NO: 11501 - RNA, 939 nt, synthetic construct
  source 1..939: mol_type = other RNA
atgaactttctctcgaagctaaatgatgccctgatgattggggagaaggccctgctttcatttatcctaaccagccctcaccggtataagaaatacgagataaataagcggaacggaaaagggaaacggctcatcgcccatccaagcaaacagctgaaatacatccaaagactgctcgtgaaagaactggaggagcagcttcccgttcatgaaagtgccatggcttataagaaaggggttggcattaagaacaatgccttagcgcacaaggacagcaaatacctcctgaagatggacttcaaagatttcttctattctatcaccccggaaatgtttttcaaggccaccgcaagtaagggcctgcactactctgaatcagacaagctggtgctgagtcatctgctgttctttcgacttaatcgaaactcccctctgactttatcaattggtgcaccctccagcccactcattagtaacttctctatgaacctctttgatgaggctatctccaattactgcgccgagcttgaagtgacttacacgcgttacgctgatgacatcgtgttttccacaaactcgaagaatgcactattttccatacctagcaaagtggagaaaactctgaagtccgaatgtttcggatgtgtcaaggtcaatacaggcaaaaccgtattctcatctaaagcgcacaatcgccacgtcacaggtatcacaatttccaacgagggaaaactctctttgggacgcgataggaagaggaagatatcctctttggtgcataagttcggtctgggcctgcttaacgtaagggagattaatgaactgagaggcttactcgcttttgcatcagacatcgagcccctgttcttggctcgcttgagagggaagtatggcagcaaatgcttgagtagcattagcaactataagcaggaagagtga

SEQ ID NO: 11502 - RNA, 927 nt, synthetic construct
  source 1..927: mol_type = other RNA
atggatatcatgctacttctaaaaaccatgcttgtcattagtgagagtgagatcctgaaattttcagccacagctccacaccgctacaagaaatatagaattcccaaacgaaacggaaacggcaagcggcgcatagcccatccctccaaagagctgaagttcatacagcgactcattgtgaataagctggagagcatcctccctgtacatgactccgcaaaggcatataaaaagggcgttagcatcaaagacaacgccctggcccataagaataccaggtatatgctgaagatggattgtaaagacttcttccctagtattgaaccacagctgttttttaaagtggcatcctcgtgcgggattaatttctctaacttggacaaggaactcttatcaaaccttctcttttataagctcacgcggagatctcgtctgaagctgagtatcggcgcgccttcttcacccttggtaagtaactttgtcatgtacttcttcgacgctgctatctacgaatattgttccgagttaggagttaattacacaagatacgccgatgacttgacatttagcactaatcggaaagaagtgttatttgaattcccaaaggtgatttccgagcaacttaagaagcattgcaatgggtcaattaaagtgaacagcatcaagaccgtcttcagctctaagggtcacaataggcacgttaccgggatcactatcacaaacgatagcaagctgtccctcggtcggtccaagaaaaggaccatctcgagcctgatccacaaatacagcctgggaattttgactgatgagcagaaggattgcctgcgcgggcacatttcttttgctaaattcgtggagccggccttcttcataaggatggagaaaaagtacggcaaggaagtgatacagtcaatcttttctgactga

SEQ ID NO: 11503 - RNA, 942 nt, synthetic construct
  source 1..942: mol_type = other RNA
atgaatctaagtgaaattctggctagctccctcttcatggatgacgaggagattcgctcattcgcagcatcatccccctatcgctacaaggtgtacactattgctaaaagaaattcgcaggaacgaagggtcatcgcacacccttctaaggagctgaagtttattcaaagattgatagtcagcctgctggagaaacggctcccgatccattatactgcaaaagcctacacaaagggactgtcaatcaaagataatgctcagccccatatgaaaagcaaatatcttctcaagatggaccttaaggatttcttccctagcatcaaaccctcactcttctttagggagtgcagggtgcatggggtcgaactttccgagctggacgtcgagctgctggagggatttctgttctggaagcgtcggcgtgcgacccagctggtgttgagcatcggtgccccttcgagtccaattgtatccaactttatcctttaccggttcgacgaagtgataagcgaatactgtatgcgcttgggcattaattacacaagatacgccgacgacttgaccttctctacgaacgaaaaggatctcctgataaagtttcccgcccgggtgcgcaaagtgttaaaccacctgtatgatggacagatcaaggtgaacctgaagaagaccgttctttcttctaaagctcataacaggcacgttacaggcattacattatctaatgacggcaagttgagtgtagggagagagaagaaaaggaagctgtccgcctctatccaccacttcatcatgaaaaagctctccgttgaagaaatcttaaagctcaaaggtgagctagcccacaccacttttattgaaccactctttctggaacgaatgatcgagaagtatgggtatgatgcgataaacgagctaaaacattttagcgacgagtccagttga

SEQ ID NO: 11504 - RNA, 942 nt, synthetic construct
  source 1..942: mol_type = other RNA
atgaatctgtcagagctattggaaagctttctgttcatggaggaggaggagatcgtctcttttgcagcctcctctccctatcggtacaaagtctacagtatcgcaaagagaaacagtgaagagcggcgaattattgcgcacccatctaaggaacttaagttcattcagaggattatcgtggaccagctggcaggacaattgccgatccataacacggccaaagcctatatgaagggtctgtcaatcaaggataatgcacggccacacgccaaatataagtacctgctaaagatggatctcaagaacttctttcctagtataaaaccctcgttgttcttcaaagaatgcaggttacatggcgtagaattaagcgagctggatatcgatttgctggaagggtttcttttttggaagcgtaaacgggccactcatttagtgctttcaataggcgccccttccagccccctggtgagtaacttcatcctgtatagatttgatgaggctatcagcagatactgtaaatctctcggcattaattatactcgctacgccgatgacctgaccttctccacaaatgaaaaggacgttcttctgaagtttcccgctaaggttcgcaagaccctgaactacctctatgatggtcagattaagatcaacctccgcaaaacagtgctgtctagcaaagcgcacaatcgtcacgtcacagggattacacttagcaatgaggggaaactgtccgtgggccgcgagacgaaaaggactctctccgctagcattcaccgattcacccaacagaagctctcggacgacgacatcctcaagctaaaaggaaacctcgctcacaccgtgttcatagagcctgactttttggacaggatgatcaaaaagtacggaagaaatgccatatatgaactgaagcattacaccccatcctcaaactga

SEQ ID NO: 11505 - RNA, 942 nt, synthetic construct
  source 1..942: mol_type = other RNA
atgaacctgtcagagctccttgcttctctgattttcatggatgatgaggagattatctcctttgctgcctcaagcccttacaggtacaaggtctattctattccgaaaaggaacagtgaagaaaggcgtatcatcgcccacccttcgaaggaattgaagttctttcagcgggtcattgtgaagcagctgtccgagcgcctccctatccatagtgccgctaaggcctataccaaggggctaagtataaaggataacgccttgccacatgcaaacagcaagtacttgttgaaaatggacctgaaggacttttttcccagtataaatccctccctattttttaaagagtgccggcgtcatggaattgactttagcgatctggacatcgaactgctggagggcttcctcttttggaagcgacgccgggctactaagctggtgctctccattggggcaccctcttccccactggtgagcaatttcatcctttataagttcgacgaagatatcagcagatactgtaattccattgggatcaactatactcggtatgcagacgatttaaccttctctaccaacaagaaggatgtgcttctgaagtttcccactaaagtgaggaacacactcaatagcctgtacgacggacaaattaaagtgaaccttcgcaaaacagttctgagctcaaaagctcacaatagacacgtaaccggtgtcacattaacaaatgagggaaaattgtccgttggtcgagaagcaaaaagaaatctgagtgcgtctatacactcattcacgctgcagaaattatcaaacgaggagatcttcaaactcaagggccatcttgcccatgccgagttcatagaaccagacttcctggagagaatggtaaagaaatacggccaggaggcgatctgggaactcaaacactacacccactctaagaattga

SEQ ID NO: 11506 - RNA, 939 nt, synthetic construct
  source 1..939: mol_type = other RNA
atgaacttatccgagctcctggcctcactgctgtttatggatgatgaagagatcatctctttcgccacgtcatctccctaccggtacaaagtctactcaattgcgaagcgaaactccagtgagcgtagaatcatagcccatccctccaaagaacttaaatttattcagcggctaatcatacagcaactgacagttatccttcctgtacataaggccgcaatcgcttacactaaaggactctctattaaagacaatgccagacctcatgcgaacagcaaatacctgctgaagatggacctgaaagacttcttcccgtctattaacccctcccttttcttcaaagaatgcaagaagaatggcatcgacttcagcgacttagatatgaagattctggagggtttcttgttttggaagaggcgcaggacaactaatctggtgctgtccattggggcaccttcttccccactagtgagcaacttcatcctctttaagtttgacgagatcattagtaatcactgcgcaattcttggaatcaactatacacgctatgcagacgacttgacattcagcaccaatgagaagaatgtgctgttgtcgtttccagcttacgttagaaaagtgctgaataccctgtatgatgggcagataaaggtcaatctgaagaaaaccgtgttgagtagcaaagcccacaacaggcacgttaccggcgtaactcttaccaacgaaggttgtctcagtgtggggcggaacaaaaagcgccagctgagcgctgctatccactatttttctctgaagaaactctcaaacgaggatatcttcaagttaaagggcagcctcgcccattccgtctttattgaaccagattttttgctccagatggagcgaaagtacggaaaggaaatcatattccaactcattcactatgctctagacgattga

SEQ ID NO: 11507 - RNA, 942 nt, synthetic construct
  source 1..942: mol_type = other RNA
atgtctctgttcgagagtctgtccatgatgctgctgatggatgagggagaattgcggtcatttgctttgacggcaccttataggtacaaggtatatacaatcgccaagcggaactcagaggagcggcgagtgatcgctcatcccagcaaggaactgaagttcgttcaacgcttgattataaaccagcttgagcccaaactgccaattcacccgtccgcgacagcctacatcaaaggaaagtccatcaaagacaatgctctccctcatgtcaatagtaagtacctcctgaagatggatttaaaaaacttcttccctagcattaagcccgagctcttttttaaggaatgtcgacaccacgggatagaactgacggacgtggataaatcgcttctagaaggatttctgttctggaaaacccgcaggtccaataaactgactctatcaattggcgctccaagtagtcctatggtgtcgaatttcattttgcaccggtttgatgagaagatgtccaagttatgcctcgccgagggggtaagatacaccaggtacgcagatgacctgaccttttccactaataaaagaggcacactactgtcttaccagtctaaagtgcgcaggataattggaattctgtatgatggcaacatcaaaatcaatcttaggaaaaccgttcttagcagcaaggcccacaaccgtcatgttaccggcgtgacactgactaacgacggtaatctcagcgtcggcagagaggaaaagcgtaaaatctctgcggccatacatcactattcattcaacatgttggagcatgaagacgtcctccgcctcagcggtagacttgcacacgccagcttcatcgagcccgagtttctggaaaagatgatcaagaagtatgggcaggacaccatctctaaattaatgaagtctgggactgaaccagtgtga

SEQ ID NO: 11508 - RNA, 930 nt, synthetic construct
  source 1..930: mol_type = other RNA
atgaatctcttcgaatcactcagcgcaatgttactaatggatgaaaaggaactgcgctcatttgctcttaccgccccctatagatacaaggtgtacactattgcaaaacgtaatagcgacgacaggcggattatagcccatcccagcaaagagctgaagtttatccagcggcttatcatcaatatgctcttgcccaagctcccagttcactccgctgccaccgcgtacatcaaggggaaatctattaaggacaacgctataccgcacgcatctaaaaagtacctgttgaaaatggacctgaaagactttttcccaagtatcaaaccagatctgttcttcaaagaatgccggcaccacaaaatcgagatctccgagacagataagtcactgctagagggcttcctgttttggaaaacgagaaggtctaaccagttaaagctgagtatcggggcccctagctctcctttcatctcgaacttcattctatatcggtttgatgaggaagtgagcaagttgtgtcgcgccgaaggcgtcacatacacacgatacgccgatgacctgaccttttcaactaacaaaaaaggggtgctcttgagctatcagagcaaggtaaggagaatcatagggaccctttataacggtaacatcaaggttaatctcaagaagactgtgctttcctctaaaggccataataggcacgtcacgggtatcacactttccaacgatggatccatttccttaggacgagagcaaaaacgcaagatttccgctggcatacaccatttctctctgaatctgctggagcatgaggacgtgctgaagctgggcggaaagctggcgcatgcaagttttattgaaccttcgttcctcgagaaaatgattaagaagtatggacaggaggccattagtagattgatgaagactacctga

SEQ ID NO: 11509 - RNA, 951 nt, synthetic construct
  source 1..951: mol_type = other RNA
atgaacttaagtgagacgctgagtacagttctcttcatggatgaggctgagttgaggtcttttgcttcaagtgccccctacaggtacaaagtgtatgcaattaacaagaggaattccgatgaaaaaaggataatcgcccacccttctaaggaactgaagtttatccagagactgattatcaaacaactccagccccgcttaccggtgcatacagtggcaacagcctatattcgcggtaaaagtatcaaagacaatgccctgcctcatgcaaagtcaaaatacctactgaagatggacctgaagaatttcttcccaagcattaagcccgatttgttctttaaggagtgtaaacatcagggtgtgccactaagcgatagcgacaaggaactgctggagggatttctcttttggaagtcccgccgagctaaaggactcagcctgtctatcggcgctccttccagccccctagtgtccaacttcatattatacaggttcgacaaagccatgaatcagctttgccagtccgagggcgtcacttataccagatatgcagacgatcttatcttttctaccaataagaagggcgtactgctggcctaccccccaaaagttagacggctcatagggaccctgtatgacgggaacattaaaatcaacctgcggaaaacggtgctgtcgagcaaagcgcacaaccgtcacgtgacaggcattaccctgaccaacgacggccgcctttctgtagggcgggatgataagcgtaagctttcagccgcgatccatcactacgcttcccacatgttgactcctgaagaggtgcagatccttagaggaaagctgagctatgcagtcttcgtcgaaccggagctgctcgaacggctcattcgaaagtacgggaaacaggtcatagccgacttgcaaaaggttaatccaactttgaatctcaagtcatga

SEQ ID NO: 11510 - RNA, 948 nt, synthetic construct
  source 1..948: mol_type = other RNA
atgtcgatctcaaaattgttgagcaagaacctgttcatggatgagcttgaactgcgctctttcagtcttagctctccttaccgatataaagtgtacaagatccctaaacgcaactcaaaggaacttcggactatcgcacatccgtccaaagagctcaagtttgtgcagagacttatagtaagggagttgggtcagctcttacctgtttccgaagccgccacagcctatatgaaaggcatttccattagggataacgccttagttcacagtaacactagatacctcctgaaaatggacttgaagaatttctttcccagcatcacacctgagatctttttcaatgagtgtctgcgtgctggtgtagaattcgaacagcttgatattgacctgctgagagggtttctattctggaggccacgtcgctctaaaaagctgattttgtcaatcggagccccaagttctcccctggtgtcaaactttatcctgaatcagttcgacgagaatattatcaatttctgcaagaccattggcgtgcggtactcccgatacgcggacgatatgacctttagtacagacattaagggagtcctgttcacgtttcccttaatgatcaaaaagattctcaagaccctgtatggcaacagcataaagataaatcaggacaagaccgtgttcgcaagcaaggcacacaataggcatgtcactggcgtgaccctctctaacgatggctgcgtgacagttgggagagaatccaagcggaagatttccgctagcatccaccactttagcctcgggatcctacagccaaacaacataatccaactgaaagggctcttcgctcattcgacctttatagagccaaaactgaaaaaccaaatggtcgagaagtacggaatcgagatcattgaacggctgatgtcttatcagcccaatgatctgaagaaatga

SEQ ID NO: 11511 - RNA, 939 nt, synthetic construct
  source 1..939: mol_type = other RNA
atgaacatcagcacattactttccgaacacttgttcttggacgatatcgagttgagaagttttgccgatagcgccccttacagatacaaggtgtacaaaatccccaaacgaaacagcgaggagcttcgcacgatcgcacacccctctaaggagcttaaattcgtacagcgactcattgcaaaagagctatcgagcgtgttgccactacaccaggcgtccatggcctacagaaaggggacatctatacgggataatgccctcgtgcattccaactcttcttatctcctgaagatggatctgaaggactttttcccgagtataaagcctgaacttttttttcgggaatgcagcaggtatggcttggagtggacggacctggacaaaactctgttaaatgggtttctgttctggaagcctcgccgcgctaagaaactggtactgtcaattggagcccccagcagtccactggtcagcaatttcgttctgtaccaatttgatgaacacatcgccaactattgtaaagaactcggagtgaactataccaggtatgctgacgacatgaccttctccaccgatagaaaggacctgctgttcaagttccctatacaggtgaggaagaccctgaaggctctctatggctcatccatcaaagtcaatctgaataaaactgtgttctccagtaaggcacacaatcgtcatgtcaccggagttactttatcaaacgaaggcaaggtgacaattggtcgggagcgtaaaagggtcctctccgcttctattcaccattttagcctgggcgtgctcgggcatgacgaaatcctcaagctgaaaggacactttgcgcatctgattttcattgagcccctagttaaggagcaaatgattaaaaagtacggttcaagtctgatcgggcggcttacatcataccagggctctccatga

SEQ ID NO: 11512 - RNA, 930 nt, synthetic construct
  source 1..930: mol_type = other RNA
atgaatatcgaaaagtatttgagcgagaatctgtctataaacattagcgccttgcattccttttcgcgcactgctccgcatcgatacaaagtgtatagcattcccaagcgaaactcaaagggggaaaggattatcgcccacccctccaaagagctgaaattcatccagaagatgatcataaagaagctcactgatatcctgccccttcatgagtccgtgatttcatatcggaagaaaaagtccatagttaacaacgtgatccctcacctgaattcgagctttctgctgaagattgatctaaaagacttctttccatctatcgaaccagacctcttcttcgagcaatgcaaattactcgacatacactttagtgacaatgataagaagctgctgaccggcttcctcttttggaggaaccgtaagagcagcaagctgcagctgtctattggagcgccatcttcccctctgatcagcaacttcatcctgtaccgctttgatgatcggattacaaaattgtgtgcaagctacaatgtcaattacacaaggtatgccgacgatttatccttctcaaccatcagtaacagtatcctactgaaattgtccgaggagatctcagctatgcttcaggagatcttccaggggagattcctgattaatcacgagaagaccattttttcaagcaaagcctctaatagacatattacgggaataacgataaccaattcaggtgaaatgtctttgggtagaaactttaaaaggaacattagtgcatgcatccataagtttacacttaaccagctcccccaggaagaacttcttaagctgaagggccacctctctttctttaaacacgtagaaccttacttcatcttacggatggagagtaaatacggcaagcacattctcgacaaaatccgcaaatcccaatga

SEQ ID NO: 11513 - RNA, 939 nt, synthetic construct
  source 1..939: mol_type = other RNA
atgacaaataatcttaagtctctccgaaaattgctgcaaagtacccttttcctctcagacgacctgatcaacattttcattaccacggcgccctatcgctacaaaatctatgagatcgacaagagatccagtgacgaaaagcgaaagatagcgcatccatcaaaagaactgaagcttatccagaggattatcgttaaggagttgagcaatatgctgccagtacacgactgtgcctatgcttacaggaccgggcgcggcattaaagagaatgccttgattcactccaaaaactcgtatctcttaaagctagatctgtctaatttcttcaacagcctcactcctgagatctttttcgctgaatgccggcgaaataacattgattttgataaggacaacgcaagcattatatcaaactgtctcttctatagagagcacagaaagagttctctcaagctgtctgtgggggccccttcatccccctttatctccaacgtgataatgtactctttcgaccagattatcgagacagagtgcaggaaacgggaaattacgtttaccaggtacgcagacgatatgacattctcgaccagtataaaaaacacactgatcgggttcgatgagctcatcaagaaggtcctgttcgatctgtttaaaggcgctatcagcctaaatcaggacaagactatcttatctagcaaagctcacaaccggcatatcactggcattacaatcagcaacaacgataatatcagcttaggtcgggagagaaaacgtctgatttcctccgccatacatcgcttttcatacggaaaacttgatcaggaagccgtggacaaattgaagggtctgctggcatttgcctactacatagaaccgtcctttattgcaaccatggagaagaagtatggacgcgaaactatcaataagctgaaaaagtga

SEQ ID NO: 11514 - RNA, 948 nt, synthetic construct
  source 1..948: mol_type = other RNA
atgtccaataacccaaagagctttcgcaagctgttgcagtccaccttattcctgtctgatgagctcatcaatactttcatagcaacctctccatataggtacaagatatacgacatagctaagaggaattctgacgaaatgcggagaattgcccaccccagtaaggagctcaaatttattcaacgtatcatcgtgaaggagctatcggatcttctgcctatccacgaatgcgcctacgcttataggcccggacggggtatcaaagagaacgccttattccactcaaagaactcatacctgctgaaactggatttgagcaatttctttaacagccttacaccgaaaattttcttttccgagtgcaagcgaaataacatattttttgacgaggacgatacctcaattatctccaactgtttgttttaccgtgaacaccgcaaagcttctctgaaactaagtgtgggtgccccctccagcccttttatttccaatgcgatcatgtacagcttcgataaacgcattgaagaggtctgtaataataagggggtaagctttactagatatgctgacgacatgactttcagtacaaacacaaagaatgtgctcgtcggattcgaccgaatcgtgaaagaggtgctttttgacatcttcaaagacgcaattttcctcaacaacgataagaccattttctcaagtaaggcacataaccggcatatcacaggggtcaccatctctaatgacgacaacatctcgctgggcagagatagaaaaaggtatatatctagcgcgattcatcacttttcactggataagctgtccgagaacgagattgaaaaactcaagggccttttggccttcgccgaacacatcgaacatagcttcgttgatcggatggttaaaaaatatggcagtgatgtgatgaagaagctgaagaaaacggacaagtga

SEQ ID NO: 11515 - RNA, 939 nt, synthetic construct
  source 1..939: mol_type = other RNA
atgctgattctcgaggaattagcttctaagctgttgatctccaccgccgagcttgtaaagtttgtaaacactgcgccctaccgctataaagtgtactcaatacccaaacgctccggccgaggtctgcgtacgattgcccagccaactgaagtcctcaaggtcattcagagaatggtcctcgactcatatttgaagggacttcctatccacgattgcgccactgcctacagagatggattgagcatcaaagaaaatgcagcagtccacctgggatccaagtacctgctgaagatggacttttctgatttcttcccttctattggcccctcagacctgattacccacattaaaaagcatcggaaggatatagccagagaagatgcctatgcagtgaggaagattttcttttgggctacaaaaaaagaccctgcacataggctgagtatcggtgctccctcatctccattcatcagtaacaccctaatgtatgaattcgactgtaaagttttcgatgagtgtacacgactcggggtccgctataccagatacgctgatgacctgacctttactaccaacgtgaggggcatcctgtttgagttgcctgacatcgtgacaaaaacctgcgccgagattggatatccaacactgcgcgtgaatcaggacaagacagtgttcagcagcaagggcaacaaccggcatgtgacagggcttgttttaacgaatgacaataagatatccctaggccgggaaaagaaaaggtactttcgtagccttatccaccggtactccttagggggtatgagcagtgaggatatatatgcgctcaaaggcaggctggcttttgctaagcacgttgagccgactttctactatgcagtggtgcaaaaatacggggccgagctgatcaagtcgatcatggagtaccagatcctcaaatga

SEQ ID NO: 11516 - RNA, 939 nt, synthetic construct
  source 1..939: mol_type = other RNA
atgttgatcctggaggagttggccagcaagctcctcatctcaaccgctgaattagttacttttgtgaacacagcgccttacagatataaggtctatactatccccaagcgtagcggacggggagtaaggatcatagcccagccaactgaggtgctgaaggtgatgcagcggatggtgctcgattcctatctcaaaggtctgcccgtccacgattgcgctactgcctacagagacggagtctccataaaagaaaatgcaaccgctcacttggactctaagtatctgttaaagatggactttagcgactttttcccctcaatctccccaagcgatctgatctctcacatcaagcgccaccgcggctcagttagtcgcgaagacgcatacgcggtcaaaaaaattttcttctgggcacgtaagaaagatcctttacataggctatcgattggggccccgtcctccccattcatatctaacaccctgatgtacgaattcgattgtaaagtgtttgacgagtgcgcacgcatcggggtgagatacactaggtacgcagatgatcttacattcaccacgaatacacaaggtgtgctgttcggcctgctagacattgtgaataaaatttgtgccgagctcgcttatcccacacttagaatcaacagtgataagaccgtcttcagttctaagggtaataaccgacatattacaggccttgtactgaccaatgacaacaaggtgtctttgggaagggagcggaaaaggtattttcggagccttatacataaatactcactcggcgagctgagtggggaagacatttatgccctgaagggccgactggctttcgccaagcacgtggagcctacgttttacagcgccgttattcagaaatacggggccgaactcatcgcttccatcatggtttttcagattctggagtga

SEQ ID NO: 11517 - RNA, 951 nt, synthetic construct
  source 1..951: mol_type = other RNA
atgacaatattggcgtatctcagcaacaagttattgatcagctcggccgaactaattggatttgtgaatacggcaccctaccggtacaaagtgtatcctatcccaaagcgttcaggaaggggggtgaggatcatcgcacagccaaccgacgttctcaaagtgatgcaacggatggtcctggaatctttcttggttggcctgcctgtgcaccactgtgctacagcatatcgggatggtgtgggcatcagagaaaatgctactgagcatctgaagtccaagtacctgctcaaaatggacttttccgattttttcccctctattggacctaaagatctgatcctccatattaagaaacacaggggcgagatttccaaagaggacgcctacgccgtcaaaaaactgttcttctggactaagaagaaagaccccgtacataagctgtccatcggagcaccaagtagccccttcatcagcaacacgctgatgtacgaattcgattgtcgtatattcgaggaatgcgcccgattagaaataagctatactagatatgcggacgacctaacttttaccacaaataagcaggggatcttgtttgaactgcctagtttagtcgtgagaatttgccgagagattgactacccaaccctgaatataaacgctgataaaacagtgttctcttcaaagggccgcaaccgccacgtcaccggtcttgtactcaccaacgacgataagatcagccttggccacgagaagaaacggtacgtacgctcactgatctatagatactcccttggggggatgtccagcgatgagatttactctctcaagggcatgcttgctttcgccaagcatgtcgagccgagtttttaccagtcagtggttaggaaatatggtgaggccgtggttgggagtattgtctcttttcaactgattaagcaggtggcccagtga

SEQ ID NO: 11518 - RNA, 939 nt, synthetic construct
  source 1..939: mol_type = other RNA
atgacaattttaacagaacttagtcagaagctcctgattagctctgaggaactgaaagagttcattaacaccgccccgtacaggtataaagtttaccccattcccaaacgcaacggccgtggagtaagagtcatcgcacagccaaccgaagtgctgaaagctatgcaaaggatggtcctggatgatttccttgctggcttgcctgtgcacgcctgcgccatggcatacagagacggtctgggcatcaaggacaatgcgagtctgcatgtaaagaatcagtacctcctaaagatggacttttccgacttctttcccagcatcggccctgacgatctaataagtcacattagacggcatcgagaggggataggacgcgaggatgcgtatgccgtgaaaaaattgttcttctgggcacggaagaaggatcccactcacagactttcaatcggggctccaagctcgcccttcatatctaacacgctcttgtatgatttcgattgtcgggtgaatgacgagtgcacccggctcggtattatctacacgaggtatgccgacgatctcacctttactactaataataagggggtgctgttcgggattcctgactttataacacacatctgtaagctggttgactacccaactctgaaggtgaaccacgagaaaaccgtgttttcaagcaaaaagaacaatcgtcatgtcaccggcttggtcctgacaaacgataacaagatttccctgggccatgacaagaagaggcacatccgatcactgatctacaaatattccctcggagggatcccatctgaagagatccttgctttaaagggtatgctggcatttgccaagcacattgagcctgtgttctatcaggccgttatgcgcaaatacggatttcatgtcttagactctatcatgtcctttcaacctaaagaatga

SEQ ID NO: 11519 - RNA, 942 nt, synthetic construct
  source 1..942: mol_type = other RNA
atgacaatcttagccgacttagccaaaaagtttcttatctcgagcgtcgagatcgcccatttcgtcaatacagccccgtaccggtataaggtctacacaatccccaaacgaagcgggagaggtgttagggtgattgctcagcctaccgatgtgctcaaggtgatgcagagaatggtactggagacttatttggtgggtctgcccgtgcacaattgcgctgtggcctacaaagaaggacagggcattaaagagaatgctattgcacacgttaacaatcaatttctgctgaagatggacttttctgatttttttccaagcattgggcctcaggatctgatctcccatattaagaaacacaaaggccagataagtcgtgaagacgcctacgcggtgaaaaagctcttcttctgggcgcgcaagaaagatcccacacaccggctctccattggagccccttcctcaccattcatcagcaatactttgctgtatgaattcgattgtctagtaagtcatgcatgctctaagctgggtgtggtatatacgaggtacgcagacgatctgacctttaccaccaatgagcaaggcgtccttttcgacgtgccagtgtttatttttaagatctgtgacgcagtcgagtatcccagactcaaggtgaacagtgacaaaacagtgttttctagcaaggcaaacaacaggcatgttaccggagttgtgctgactaacgacaacaagatatcactcggccacgctcgaaagcggcagatccgctctctagtatataaatacagttcaggagagatgaccactgaggaagtctactcactgaaaggcatgctttctttcgcccgccacatagaacctacgttcttccaggggttgataagaaagtattcctacgaggttgtggggtccatcgtcaggttcgaaagcatcaaggcttga

SEQ ID NO: 11520 - RNA, 966 nt, synthetic construct
  source 1..966: mol_type = other RNA
atgagcatccttgagctgttgtcacagaaactcatgatgtccagttctgagttgagactgttcatcaaaactgctccctatcgttacaaagtttacccaattctcaagcggtctggcaagggtattcgcctcatcgcccagcccacggacgtactgaagatgatgcaaagaatggtcgcagatgagtcgttaagcggtcttccagttcatgcttgcgccactgcctatcgcgaaggcttgtcgattaaagacaatgccgaggcccacgcaaagaaccagtaccttctcaagatggatttttccgatttcttcccttcaatggggccgtctgacctagtgaaacacatcgaaaagcacaaaggatccattacggccgaagatgcgtacatggtaaagaaactgttcttctgggcccgcaaaaaagatcctatccacaggctgagcataggcgccccaagttcccccttgattagtaacactctgatgtacgattttgactgcgcacttcaggagtattgtgacaaactgtccatcacatatacaaggtatgcggacgacataacattcaccactaataccaaggagattctatcagcaattccaaattacatcgaggggttatgtgagcggatctcataccccaagctcaagattaacaatcaaaagaccgtgttctcttccaagaaaaataataggcatgtcaccggactggtgatatctaacgaggacaaggtgtctctgggaagggaacgaaagcgatatatccggagcctgatccacaagagcattgcggaagcaatgaccagcgaagagatctataacctgagaggcctcctggctttttccaaacatgtggaacctacattttaccagagtgtcattaagaagtacgggcagcctgccatctactttatagaaacctttcagagcgctcaaaaggctgctaaagtgatcaacaaaacatga

SEQ ID NO: 11521 - RNA, 936 nt, synthetic construct
  source 1..936: mol_type = other RNA
atgtctattctggaactgctgagccagaagctgatgatgtccacctctgagttgcgcagctttattaagactgccccctacaggtacaaagtctaccccgtgcctaaacggtcaggcaagggggttagaatcatagcacaaccgactgacgtgctcaagatgatgcagagaatggtcgccgatgaatttctaagcgagctcccaattcatgcttgtgctacagcgtaccgcgaaggcttatctatcaaagacaacgctgaggcacacgttaaaaaccagtacctcctgaagatggatttcagcgatttctttccatccatgcgtccgtccgatttggttaaacacatcagcaagtacaagggttcaattacagccgaagacgcttatatggtgaaaaagcttttcttctgggcaagaaagaaggaccctatacatcgactatccatcggggcgccatcttctccccttatatccaacactttgatgtacgaatttgactgcattcttcaggagtactgcgacaagctctccgtaacctatacgagatatgccgatgacatcaccctcacgacaaacatcaaaggtgtcctgctgggcgtccctaatcacgtcaaggagctgtgtggacatattgcctatcccacactgaaggtgaacgacgccaagaccgtgttttcatcgaagaaaaacaataggcacgtgaccggcttagtgatcagcaatgaggataaagtgagtctgggacgagagaggaaacgctatatacggagtctgatccataaaagtgtggtaggagatatgacaaatgaagagatgtacaatctccggggcttgcttgccttcgctaggcacatcgagcctaccttctacgacgcaattgctaagaaatatgggctgtcagccatctatttcattgaaacttttcaaccagcatga

SEQ ID NO: 11522 - RNA, 978 nt, synthetic construct
  source 1..978: mol_type = other RNA
atgtcaatcttagagtcgctctcacagaagttcatgatctccgcaaacgagctgagaagcttcatcaaaactgctccatataggtataaagtctaccccattcctaaacgcagcggcaagggattcagactgattgctcagcccagcgacgtactgaagatgatgcaacgcatggtgctggaggaatttctcagcgaactgcctgttcattcatgcgccgccgcttacagggagggattgtccatcaaagacaacgcagaggcgcatgcaaagaatcagtatctcctgaaaatggactttagtgacttttttccatcaatggcgccagctgatctgataaaccatatcgtgaaacacaagggcgccattactagcgaagacgcctacatggtcaggaagctgttcttctgggcccgaaaacaagatcctacctaccgcctctccatcggcgcaccatctagtccgttcatctctaatacgttgatgtatagtttcgactgcgtgttacaggattactgtgagaagataggggtcacatacacaaggtatgcagatgacattacccttactaccaatgtgaagggtctattgctgaacatgccgaactacgtgcggtccatttgtaaagagattgcttatcctactctcaaggttaacgaacagaagacggttttttcctctaaaaaatctaaccgacacgtgaccggtctagtgatcaacaatgaaaatcagatcagcctggggcgtgaaagaaagcggtacattagatctttgatacacaagagttcgctgggaggcctgacagatgaggaaatgcacaatctcaaaggcctccttgccttcgccaagtacattgaacccaccttttacaaaagcgtactggataagtatgggctgcccgccctttatcttatcgagacatttcaatccaatcccaaggtcatagagtctttagagatcaagcggcagttcccttga

SEQ ID NO: 11523 - RNA, 936 nt, synthetic construct
  source 1..936: mol_type = other RNA
atgtccatcctggagagcctcgcaaacaagttattgatcaagccgggggaattgtttagctttataaagtcagcgccttaccgatataaagtgtattctatccctaagcggaatggaaggggcatgcgcatcatcgcccagcctagtgaagccttgaaagtgatgcagagacttgttctcgatgactatctgatggggctacccattcataattctgcaaccgcatacattgtcggaaagtccatcagagacaacgccttacgacatgctaacaacccatatctgctgaaaatggacttttctgaattctttccctccattagcccagccgacctgtcgctgcacgtgaagaaatacaaaggcgtagtctccccagaggatgagtttatgctgagaaagctcttcttctgggcacagaaacacgatacccgccaccggctgtcaattggtgctcctagcagcccctttatctccaatactcttatgtacgagtttgatagtaagctctctcgggcttgttccgagaaggaggttgtatatacacgctacgctgatgacctcactctgaccacgcgtaacaaagacgtcttgttctctatgcccgaattcattgccggcttatgccaacaaatcgagtacccgcgtctgcagattaattccgagaaaacagtcttctcttcaaaaaagcacaataggcatgtgaccggtatcgtgataaacaataaaaacgagctgtcacttggaagggagaagaagaggttcattaagtcatacatctacaggttcagtagtgatgaactgagcagtgtggaaataattcagctaagagggctccttgcctttgccaaacacgttgaagtgagcttctataatgcgctgatagctaagtacggcctcgagacagtgagccgcatcgaacggtatcagccagtctga

SEQ ID NO: 11524 - RNA, 939 nt, synthetic construct
  source 1..939: mol_type = other RNA
atggacatttacaatgctctgagcgagctgttactaatcgatgaagtcgagatcgtgagttatataaataaagctccacacaggtacaaagtttataagatccctaagaggaacggaagtggcagcagggtgatcgcccagcctgcaaaggagctcaaagtcttgcaaaaatcggcactgaacatgccccttctggatctaccagttcataaatccgcctttgcctatatggagggcattggcattaagcaaaatgcccagaagcactccaagaatcagtacctgttaaaaatggacttcagtgattttttcccttctattgtgtcttctgaccttctgagtcatgttgaaaagcacaaagggaaactcgaaatcaaagaaaaagtggccctgaagaaactgtttttctggtgcgtgaaaggatccaccgaacacagactttctatcggggccccctcatcccccttcctcagcaatacgattttgtttgatttcgacacgatcgtgaatgattactgtacccaggagaagataacatatactcggtatgctgatgacttgacctttacaactaatgtgagcggtgtactctttgagctgcctacttacattgaaggggttctgaagaaactggagtaccccacattgaagataaaccactccaagaccgtgttttcatctaagaagaacaaccgccatgtaactggcctcgtgcttaccaacgacaatgcgatttcactgggccgtgatcggaagagatacatccgaagcctggtctacggtttctgcaacaagaaactttctgacgacgagagcataaagctgcgcggattaatctccttcgctaagcatgtggagccgacattcttccggtcgctcgtcaaaaagtactcactcgcagtcatcagcgatattgaaagatattatccagacaactga

SEQ ID NO: 11525 - RNA, 936 nt, synthetic construct
  source 1..936: mol_type = other RNA
atggatatctacgagtctttatctgagatgctgctgatcgatgaatccgagattgtggaatacatcaacaaggctccgcataagtataaggtttacgaaatccctaaacgcaacggacatgggactcgcacgatagctcagcccgccagggaactaaaagtgttccaaaaactcagtctggagcacccactgctgaaccttcccgttcacgacgccgcctttgcataccgagacggaatagggataaaacagaatgccgaagtgcacgctaagaaccagtatctcctgaaaatggatttcgccgacttctttccgtcaatcctggacacagatttgattactcatatcgagaaacaccatggcaaaatcgatcaaagaaataagaccgctattagcaagttgtttttctggcggaaaaagcgggacatcatcaacaggcttagcatcggtgcccctagttccccttttatcagcaataccctgctttatgactttgatgaggagatatccaatatttgcactcccctgatgattacatacactagatacgcggacgacttaattttcaccacgaatgagccaggaatcctgagtaacataccaaacgtagtggttgaaacccttaagtccatcaaagtgcccacattgcgcatcaatccccagaagacagtgtatagtagcaagaagaacaacagacatgtcacagggctggtcctgtcaaatgacgacaaggtatcactcggtaggacccgtaagcggtatattcgaagcttggtgtttcagtatcactctgagaacctcgcaagcgacgatattgtcaaactcaaaggcctcctaggcttcgcgaaacacattgagccaaccttctattcttcgctcatcaataagtactcactggatctgattttatccattgaaaagtacgatcctgcatga

SEQ ID NO: 11526 - RNA, 927 nt, synthetic construct
  source 1..927: mol_type = other RNA
atgtccattattaagtatctcgccgatcagctactattgtccgaggaggacattagacttttcatcaagaaagccccctacaagtataaggtgtttgctatacagaagcgtaacaaccatggagaaaggattatcgctcaacccgctaaggaattgaaatccatccagcagatggtgcttattgagtttcttaaggaactgcccattcactcatgcgcaatggcataccgacacggtatttccattaaagataatgccaaggtccatagcagtaacacctacctgcttaaaatggactttgccgatttcttccatagcatcagacccgaagacctgatcgagcactacgagaagtacaaagcgaaactgtctgccgatgacagggtgagtctgaaaaagatattcttttgggcaagcaggaaaccacctgagatcaaattgagcatcggggcccctagctcaccgttcatttctaacaccattctgtttgatttcgactctatcgtgtccaaagtgtgtatagctcacgaaatcacatacacccgctatgcggacgacctcacatttaccacaaacattagggatactctgttcgacatccctaatctcatcgcaagagtcatcaaggatattgattatccacgcctgaagataaaccatactaagacggtcttttcttcaaagcggtctaaccgccacgtaactggactggtgctgacgaatgagaatcagattagcatagggcgaagtatgaagcggaaaatcaagacaatgatcttcctctactcaaagaagaatttaagccctgacgacatcaaatttttgcggggctatttaagtcacatccataatgttgagccaactttcctccactcgctgaccaaaaaatttggcacacggatagttacctccatcttccaccaatga

SEQ ID NO: 11527 - RNA, 945 nt, synthetic construct
  source 1..945: mol_type = other RNA
atgtccctgatagacttcctgaaggagaagacaggagttcataaatcgacattaaaaagcttcgtgaggtctgccccacaccggtataaaacattcccaattgacaagcggaactctgataaaaagcgtttaatcgctcaacctagtcgcctgctgaaaaaaatccagaacctcgtcgtgtctgagtacgaattcctgatcaatcttcccattcacccgtgcgtcatgtcctatgtgaaaggtaaaagtattcgggacaacgcactggtgcacaaggacagctcttacctactcaagatggattttaaggacttctttccctccatcaagcctagtgacctcatcgaacacatagagaagcataagagagtgtcactggatgatgatgaaaaagactatctttcccgcctctttttttattcccagagcagaaaagaagagattgtgctgagcattggggctccatcatctccctacatttcaaacactgtgctttatgacttcgacgtgaccatcgccgccgaatgtgattccactggcgttaagtacacacgatacgcagatgatttgacgttcagctcaaacgacaagcagagcctgataaatctccataacgccatggagtcaatcttatcttccctacagtaccctaaactggccttgaatactaataagaccacctttcttagtaagagggtcaatcgacacgtcaccggtctggtaataaataacgacgggggagttggcattgggaggaagaagaaaagagagatcaagagtctcgtgcaccgctacttgaatcatagcctcgaggatgaaaggcatccctatctgagaggatacttggcttacatctggggcgtagataaacagtttgtcgcgcagctggaggccaaatatgaaatcagcattcttgatgttgtgaagcaactggaggcagactga

SEQ ID NO: 11528 - RNA, 942 nt, synthetic construct
  source 1..942: mol_type = other RNA
atgagtatcgtcgattttctggtggaaaaactggtcgtgcccaaaagcatcgttgaaaccctcgtactgacagcgccgcacaggtacaaaacatatgaagtgaccaagagaaacggaaaaggtaaaagggagattgctcagccatcgaaagaactcaaatacattcagcggatcgttctcaaagagttcgatttgatgcagaacttaccgatccatgattcagccatggcataccgcaaaaatataggaatacaagacaacgccctgatgcacaaagacaaccagtacctgctgaagatggacttcagcaacttctttccaagtattgttcctacggatctgatcaagcacattgaaaagtacaagggcctcaagctcgatgaggaggatataaaatgtctttcccggttgttcttttatactaaagaaaagggttccggcttagtactgagcattggggctcctagcagcccctatatctccaatacactgatgtatgatttcgacatcttgctccagaagaagtgcgagcaaaaaaatattgtgtatagcaggtacgcagacgacctgaccctgtccacaaatgtgcccaagatattgttcgactttcctgccgtggtcaatggaattctgaaggaaatcttaaccccaaagctgctaataaacgactctaagaccgtttttcttagtaaaggaaccaaccgcaatgtgactggcttggtgatctctaatgaggggaaagtcactattggccgtgataagaaaagagaaatcaagagtatggtgtataagtactctctatcacatcagctagacccagagtccgagattccctacctgaaggggtacctcaattacatcaacggcgtcgagccttcatttctgaagtctcttgagaagaagtatgggatcgaccttatcaagcttattcgaaactcatga

SEQ ID NO: 11529 - RNA, 945 nt, synthetic construct
  source 1..945: mol_type = other RNA
atgagcatactcgagggattaagtaagaaaattcttctaaacgagcctgatttgtggaagttcattagtagtgccccacacagatataagaaatacaagatcgagaaacggaatggcaagggctttcgcgatattgcacaaccatcaaaagaactgaagtttgtgcagaatacagccgttttcgggatcgacctctttcagaatctgcccattcatcactcagctaaggcatacatcaagaagatcaacatcaaagacaatgccgaagcgcataaactgaactcatactttctgaaaatggatttcagcaacttctttcctagtatcaaacccgtcgacttcattaaccacatagagaagcacaaaaatctcacactttcggagaaagacaagctgatcatctccaagctgtttttctacaagaagtaccgtaagagcgaactggtcttatctgtggggagcccaacttctccctatatttctaacaccctcatgtatgacttcgacgatatcgtatacaagtactgcatagagaagaagatcacttataccaggtacgctgatgacctaaccttttccactatgaccaaggtcgatctgtttgagatacctgtgttcattaaatccaccttaaatgagcttctgtatccgaggattctgattaacaacgacaagacggtgttcttgagcaaacggacaaatagacatattacaggactcgttattacgaacgatggcaaggtgtcaatcggacgaaaaaagaaacgctacattcagtccttggtgtacaaatattgtaacagcaatatctctgaggaatccacttcctacctcaaagggtatttggccttttgcctgggtatcgatgtagacttcgttatcagcctggaaaagaaatatggtaaggaaaacatcgactctataaggggccttaataaaggctga

SEQ ID NO: 11530 - RNA, 942 nt, synthetic construct
  source 1..942: mol_type = other RNA
atggtgacaatcattcaggacctttcttccctcctctcaattgatgctgaacgactaaggaagtatatcgccacgtgcccccatcgctataaagtgtacggcataccgaaaaggaatggctctggcatccgtactatcgcccaacctgccaaagagctgaaaactctccagaagcttgtgtacgaaaagtatctcgaaagcttacctgtgcacgaagcttgcacagcgtaccgcaagaacattagcattaaagacaatgccctggcacatgttaagaacaactaccttctgaaaatggactttctgaattatttcccctcaatcacacctaaggatctaattaagcacatagaaaagcatctcaactggaatgagtgggaagaagataagttcgtcatcgaaaggctgttcttttacgtgcgaaacagaggggagggactgcggctgtctattggggctcccaccagcccatttctgtcgaataccatcctctacgagtttgacagcaagattaccgagttatgcaatctgcaaaacatcacatacaccaggtatgcagacgatattgccttcagtaccaacaaaaaggacatactgttcgactttgcaggggtcgttgctgatatcctgtctcagtgtgagtatcccagcatcagtatcaacccagacaagactgtatttttgtccagaaaaggtaacatgcacattactgggctggttttgtccaatgatcgcaaagtatctataggcagatccaagaagcggtatattaaatcacttgtgtatcggttcttgaataacaatttgaccgaggacgagaaactctacctgagtggttacctgtcattctgtgtgtccgtcgagccagatttcatcgagaaacttaagagtaagtacggagccaacacgatcaatgagttgatgggccggcagagcggatga

SEQ ID NO: 11531 - RNA, 975 nt, synthetic construct
  source 1..975: mol_type = other RNA
atgaatatcgtgtcgtatctgtcccagacgctgtacatcgccgagaatgaggtcgagaagtttatcaacactgccccacacagatacaagcagtaccagatacctaaacggaacaacaacggagtgagacttattgcccagcccgctgctgaactgaaaattatgcagctcctggccattgcgcagtttcagcaatttctaccggttcattcatccgcaacagcatactgcagggggaagggcattatggataatgccaaagctcacgcaaagaactcctacttactgaaaatggactttaaggacttctttcacagtatcaaaccatctgacctcatccgccactgctcccaacatatggggggtatcgacgacgctaccgctaagcagattaccaaactctttttctggacccctaagcggactagttcactgatcctctccatagggagccctgctagcccattcatctcgaacactgtcatgtatcaatttgattgcctaatgtctgagatctgttctgaaaagggcattgtgtatacaaggtatgcagatgatatcacattcaccactaatgtgaaaggcttgctcttccagatacccagcctggtgattgacatctgtaagaagattgattaccccagacttagcgttaacagcgaaaagacagttttctcatccaaaggaaataaccggcatgtcaccggagtaaccataacaaatgagggtaagctttctctgggccgacacaagaaaaggaaaatcaaaagtctggtgttcgactgtttgaataacaagttggattcagccgaacgtcgctctttatccggactccttgcgcacgccaaacatatagagccaagtttcttcctgtctctgacgaagaagtacggctatagcgagatcgcaaagattgccagcaataaacccactctggaagtagtggtcgccaaccctttgaccatttgcgactga

SEQ ID NO: 11532 - RNA, 951 nt, synthetic construct
  source 1..951: mol_type = other RNA
atgaagatcattagctttctgagcaaaacgttatacctccccgagcatgaagtgacagcgttcatcaacactgctccctatcgatataaggaatattccataccgaaacgcaatggaactggaactcggcagatcgcacagcctagttctgaagtcaaggtgttgcaaactctcgctattgagaagattaagaataacctgccaatacatagctctgcgatggcttatagagaaggactgtccatcaaagacaacgccagtatgcacgccaagaacaaattccttctaaagatggacttcgagaattttttccactccttacttccccacgatctgctgctgcatacagagaaatattacagtagcatatccgaggaggataaaaagaccttatccaagctctttttctgggccacgaagagggatagaaaacttaagttgagcatcggggccccttcatcaccctttatttctaatacgctgctatacgatttcgacgaagccgtctcaaacgtatgtcgccctctcgacatcacttacaccagatacgctgacgacctgacctttaccaccaataccaacaagattctgttcgaaattccagacctgattcagaagatctgcgaaaccctgacctaccctaaactgaagattaataaggggaagaccgtgttttcctctaaaaaacataacaggcacatcacaggcatcacaattacaaatgaggcaacacttagtttgggccggcaccggaaaaggcatatccgtagccttgttcaccaacacatgttgggtaagctctcatcgaaacagatcaccgagctgaaaggcctgttggcatttagcaagcacatagagctaaccttctacaaaactctcgtgaataagtatggtttcaaaactctgctcgatatccaggccacacagacaaagaactctgatactccatga

SEQ ID NO: 11533 - RNA, 936 nt, synthetic construct
  source 1..936: mol_type = other RNA
atgattcttcaatttttgagcaacttgctgaacctggaaaaacgcgaaattataaagttcatagccagcagtccataccggtataaggtgtactctatccccaagagaaagaagggcgaatttcggctcattagccagccttcctcacagttaaagttcatccagaaggcgacactggatcattttttctctgacctccctgtgcactcgagtgccatggcctacattaaaggcaaagggataaaagataacgcactaatgcatgcaggaaatgcctttatgcttaaaatggacttccaggattactttcccagcattaaacccgaggatttcgtgaatcacataaagtcttccagccaacttaggttctccgaagaagatgagttcgtagtttgccgactgtttttttggtcgcccgtgagaggtaagcctttggtcatgtccatcggcgcccctagttcaccattcatcagcaacacagttatgtatccgtttgacgagaaagtggacagttattgtaagaataatggggtcatctactcacgctacgctgacgacctagtcttttccacttgttccccgcagattctctctctcgtgccaaagttcattgaggagacaatccgcctcttgtcttatccaaagttaaagatcaaccgagagaagaccgtttttagctccaagaaacataaccggcacattactggactgacgatcaccaatgagtctaccgtgtctattggaagagctaggaaaaggtatgtgagtagcctggttcaccgttacactctgtcacagcttgataacgcacagatcgtctatctgaaaggctacctggctttctgctccgacgtggagatcacattcgtaaagaggctcgagaagaaatatggtgaatcagtcatcagcgaactgctgaaaaataccggcgggtga

SEQ ID NO: 11534 - RNA, 942 nt, synthetic construct
  source 1..942: mol_type = other RNA
atgaacatactaaataaggtttcagagatgtctggaataccgcaagacatgtgcgctaaattcattatctctgcccctatgcgttataagaggtacgagatacccaagcgaaatgggtccggaacgagacttatcgcccagccttctaaaatagttaagcccctgcagaaaatctgtattgaccagctgcgcaaaactctgccaattcacagcgctgctctcgcctatgaagttggcacctcaatcaagaaaaatgcgaataaacatcgctacaatcgctacctgcttaaaatggacttcactaactttttcccatccattaagccagatgtattgttgagaacctttgaagagcacggcctagtgattacggaggaggataaattcgtgttgagctccctgctcttttggaagccccgtaggagagcgcccaacttagaactgagtatcggtgccccttcaagcccgtttattagcaacgccgtcatgtatttctttgatgtggccgtgaccgaacattgttctaacaggggcatcgtgtacactagatacgcagacgatctcacctttagcaccaacattgcagacacactgtttgagatcccaaatttcttatacgaccttgtccaacagactaatatgtcgttcctgaggtttaatacagacaagacagtctttgcaagtaaaaaggtgaataggcacatcaccggcgtaacaattacaaacgacgggcggctgagtctgggtcgcaaacggaagcggaagattagcgctatgattcatagattctcactccagcagctccgatccaacgatgaaataaacgagcttaaaggcatcctggggttcgcaaaacacatcgagcctatcttcgtccggcggatgtgcgataagtatggaaaggacactatcgtgaagatccagaagttcaactccgattga

SEQ ID NO: 11535 - RNA, 942 nt, synthetic construct
  source 1..942: mol_type = other RNA
atgaatattctcgacaaaatttcggagctcagtggcataccccaggacatgtgcgccagattcgttgtgtccgcccctgtccggtataaacgctacgagattccaaaaagaaacggggggggaactcgtttaattgcccagcctagcaaatctgtaaagccactacagcgggtctgtatcagtgaactcagaggagtgctccccattcacggttccgctctagcctacgaggctgggaccggtatcaagcggaacgctaataagcacaggtataaccgatatttgttgaagatggacttcacaaactttttcccgtcaatcaagccagatgtgctgctgtccacctttgagcaacacaatgtcgcgttaacagaggtggataaattcgtgctttccagccttctgttttggaagccctccaggagcgagtctaccctcgaactgtctattggcgcaccgtctagtcctttcatcagcaacgcagtgatgtacttcttcgatgtggcagttacagaatactgtgaacgaaagggtataacatacacgagatacgcggacgacctggcctttagtaccaacactgcagacatcctgttcgaactccctaaattcctgaatgaactggtccagcagccctccatgtctttccttcgctttaacaccgataagactgtgtttgctagcaagaaggttaatcgccatatcaccggcgtaacgataactaatgacggcaggctgtcattgggccgtaaacgcaaaaggaaaatcagctcattaatccatcggttttcactgcagcaactgcggtgcgatgaagaagtgaatgagttgaaggggatgcttggatttgccaagcatatagagccaatctttgtcaggagaatgtgccagaaatatggagaggagattatcctgaagattcaaaagttcaacagcgattga

SEQ ID NO: 11536 - RNA, 942 nt, synthetic construct
  source 1..942: mol_type = other RNA
atgaatatcctggacaaaatttctgaggtgtccgggatgccgcgaaccatgtgtttgagatttatcgtgagtgcccctattcgctacaagagatacgaaatcccaaaacgcaatggccggggtgtgaggctgattgcacagccatcaaagtctgtgaagcccctgcagaaggcgtgcatcggggaactgagggacattttaccaatccatcctgctgccttagcatacgaggtgggaacaggtattaaaagaaacgccaacaaacatcgctataatcggtatctcttaaaaatggacttcactgatttctttccttctatcaaacccgacgtcctgctgagcacgttggaacagcacaatgttgagttgacagaagaggacaagtcagttctgtcaagcctcctgttttggaaaccgactagaggcgattcaaacctggagctgtccattggagctcccagcagcccctttatttctaatgccgtcatgtactttttcgatgtaaccgtggaggactattgcaaacaaagggggatcgtctacactcggtatgccgacgacctattctttagcactaacgcctccgatatactcttcgatgtgccacgattcctaagtggacttgttcagaagcccaacctcgcattcctgaggtttaacaatgataaaaccgtctttgcttccaagaaggtaaacaggcatatcaccggcattacgattacaaatgatggacgactcagtcttggccggaagcgcaaacggaaaataagtagcctcatccaccgtttctccctccagcaactgacaaaccctgaggaaataaatgagttgaaggggcttctgggcttcgctaagcacatagaacccatcttccttatccgtatgtataacaagtacggtagagacaccatcctgaagatacagaagtttaactcggattga

SEQ ID NO: 11537 - RNA, 939 nt, synthetic construct
  source 1..939: mol_type = other RNA
atgaacatcctgaatcagatcagcgagaaaaccggcatgcctaaacggctgtgtgcaagcttcattatcactgctccgaagcgctataaaaggtacgaaatacccaaacgcaacgggcgcggcgttagacttatagctcaaccagccaagtccgtgaagctgctgcagaggatttgcgtagaatcactgcgtaagagcctgccaatacaccaggcggcaactgcttatgaggtgggcaccggcatcaagatgaacgctaatcggcaccggtttaacaagtatctgctcaagatggattttgccgacttttttccctctattaccccagaagtgctgtttaatacatttgagtcacatggggtagagttatcggatgaaaaccagtacatcttaaagaacctactgttttggaagcctacgcgggatagttctttggagctgagtattggagcgccctcgagtccattcattagcaatgccgttatgcacgagttcgacagcaaggttaccgaattctgcgatagcctaggtgtgagatatacccgatacgccgacgaccttgtctttagcactaatacacctaacgtcttgttcgatctgccggaagtcctcggatctctcttatctgaaccctccctctcattcctccgtttcaactccgacaaaacagtgttcgcctccaaaagaaataatcgacatatcactggagtgacactcaccaatgacggaaggttgagtatcggtagaaaaaggaaacgccggctgtcttcccttattcacagatacaagcttgggcagttgaccgcatccaaggatatcgaggagctcaaaggtcatctgggctttgcaaaacacatcgaacctattttcatagccaggatgacgaagaagtacgggatcgagacaattcaatctctgcagaagttcaaatcagagtga

SEQ ID NO: 11538 - RNA, 948 nt, synthetic construct
  source 1..948: mol_type = other RNA
atggagctcatcaacaagatcagtaccattactggcgttccgaaagggacatgcattagtctcatcgtgaccgcaccccgaagatacaagcggtacgagatccctaagcgtaatggttcagggacccgactgatagcgcaaccagctaaatccatcaaaacactacagcgggtttgtatcgagatcctgagggattatcttcctgtgcacggcgtggcaatggcttacgaggttggcgtcgggatcaagcgcaacgccaacagacaccgctatcaccggtacgtcctcaagatggatttctctgacttctttccaagcataacgccagaagtcctgctcaacactatatcccgccatggggtagtattgagcgacattgacaagatggtcctgacaaatctgctcttctggaaacccacccgtcataatgacaacctgcaattgtcaattggagctccttcttctcccttcgtgagcaacgccgtcatgttcttttttgatagcatgctgaacgaaaagtgtagacagttaggcattacctacactaggtatgccgacgatctaatcttcagcacaaatctgaaggatgtgctgtttgaggtgccgtctctgttgtccagagatgttttggccaacacggaattcaatttcttatgcataaacgagggaaagacagtgttcgcatccaagaggaataatagacacatcactggtgtgacaatcaccaatgacgggaggttatcaatcggtcgcaagcggaaacgggtacttagttcgcttattcacaaatttaccactggagaactgaaagaccctattgaaattatgaagctcaagggcctgctgggctttgccaaacatattgagcccatatttatccagaggatggccgtgaagtacggatccgaagtgattgagcagcttaaaaaatatccaaccaaaatctga

SEQ ID NO: 11539 - RNA, 933 nt, synthetic construct
  source 1..933: mol_type = other RNA
atgtcgtaccttgaacagtttacggaaataacctcattatcctccgtggaaatcctgaatttcgtgaagagtgctccataccgctataaacaatactatatccccaaaaggtctgggcgtggagtgagattgatcgcgcaaccatctaaagaggttaagtacatgcagtatatcggcaagcagctaatcctcgacgaacttcccgtccacgcggctgcttatgcttatcagaagggagcaagtattaaagccaatgcctctcaacacgtatctaataagtaccttctcaaaatggacttctcggactttttccctagtattaaacctcccctgctgctcgacgtgatccagtctaaagtcggcacactgtccacccacgatacaactttgattaagaggttgttcttctggcaaagagagaggatttcccctctgcagctgtccataggcgcaccttcaagcccgctgattagcaacgtcgtgatgtatgatttcgatgagtttattcacgcctactgcagtgagagagggattaattacacccgctacgcagacgatctgagcttttcaaccaatgaacgcggattgctgttccatatacccgaactcgtttcatcttacctaacagaaaacgagcatttgggcctgtcaataaatagtggtaagaccaagtttagcagcaaaaaacataaccggcatgtaactggtcttgttctcaacaatgagaaccagctcagcctcgggagggaacgaaagcggaagatccggacactggtgtttctgttctcccagagcgcccttgatctggatgagacttatcacctgaagggcctcctagcctttgccttaaacatcgagccaaacttcatcctgcgattaagaagcaagtactcctccgagatgattgactctatctttcggtatcaggagtga

SEQ ID NO: 11540 - RNA, 933 nt, synthetic construct
  source 1..933: mol_type = other RNA
atgagctatctggaaaatttcaccgaaatcacaagtcttggtagtcaagagatcctggacttcgttaaatccgctccccataggtacaaacaatataccatccccaaacggaacgggcgaggcgttagacttattgcccagccatccaaggaggtgaagtacatgcagtatattggtaaacagctgatattggatgaactgcctgtccattcagctgcatacgcatatcagaagagaaccagtatcaaggctaacgcaagccagcatattgccaataagtatctcctcaagatggatttctctgacttctttccttctatcaagccacccttactattgggagtgattcaacggcaggtgggcgagctatcggcggacgatattaccctgataaaacggctgtttttttggcaacgggacaggatgtcaccgctccagctgtctattggggccccctcctcacctctcatatccaatgtaatcatgtacgccttcgacgagtatctctactcatactgcgcgcagcgtggcatctcttatacaagatacgccgacgatctcagttttagcacaaacgagcgcgggctgttgtttcacattccagaagttgtctctaattaccttagcactaatgagcacctgggattatccatcaacaccaccaagacaaaattcagcagcaaaaaacacaaccgccacgtgactggcctcgtaataaataacgacgaccagctgtcactgggaaggaaacgcaagcgtaagatcagaacgttggtgtacttattcactcagtccgctctggaaactgatgaggtgtttcacctgaagggcctgttggccttcgcaagcaacatcgaacctgagttcatccttcgacttaagtccaagtttagtaatgaagtcgtggattctatttggaggtaccaggagtga

SEQ ID NO: 11541 - RNA, 936 nt, synthetic construct
  source 1..936: mol_type = other RNA
atgcaaccatctaacctaatatgcaagaggtttatgatgagcaaagctgagctgtaccattacgcaaatacttgtccgcatagatataagacttactcgatcgataaacgttcaggtgggaagcggaaaatctcccagccttcaagggacttgaaggccgtgcaacggttcgtcctgtctgagtatttggagaagcgccttgtcattcattcttccgcaaaagcttatcgcgtcggggtgtctattgtggacaacgccaaggaacacgtcgcgcagaaatatctgttaaagatggatttctcgaactttttccccagcatcctatcctccgactttatgaagttgctccgcagggataagatcgttgattctgaagaggaggtgaaactgctctctaagatctttttcatgaacgacagtggctcactgagacttagcattggctcccccggaagcccatccataagcaatgccatcatgtacgatttcgatgaggtgatcagtaagaagtccatcgacaactctatcttctacacccgatactcagacgacataaccttttccacgaacgagaaagacatcctcttcagctggcctaatgttgtgagtgacgttcttcgaggaattgatttcccaaaactgaaaatcaacacagacaagaccaagtttagttcaaagaagttcaatcgccacgtgacaggcattacactggcaaatcaggggtatctcagtatcggaagagagaagaaacggctgattcgtgcccgggtacacaatgccatgaacctcgatgatgaagagattttaagcctcagcggtgacataagctttgcttgccaggtagaacccaatattcttgaaaaattgtggaggaagtaccctgatcagatgaatctgattctgagaaggaaagaaaaaaccaaccagctggaatga

SEQ ID NO: 11542 - RNA, 915 nt, synthetic construct
  source 1..915: mol_type = other RNA
atgacagtcagtgaccttataagacgccgatttagcttcagcccagccgagttacgggtttacgcccagacatgcccttatcggtataaaacctacccgatagacaaaagaaacagccagcagaagcggtggatcagtcagccttctaaggacctgaaggcagttcagaggctcgtcttgtccgaattcctgggcccaaagctgactgtgcacgactcagcaaaagcctataaatcggacaccaatattttggataacgcggggccacacctaaagaaccgctacttgttaaagatggacttcagggatttctttcccagtatcagagcccaggattttgttcgctatctcctgggtagcggaatcgtgcaagatgaggctgaagctaatctcttggccaggatcttctttaagtactgcgacggtgagctgtgtctgtccattgggagccccggatctcctgtgatttccaatgctctgctatttcccttcgatgagaacatctctgacatatgtcagaaaaatatcgtggcgtatactcgctactctgatgaccttacgttttcaaccaacaccagagatttactcttcagctggcctcagaaggtggaggaggctctgaccgcactgcaatccccaaaactggaactcaatagggaaaagacagtattctcatccaagaagttcaaccggcatgtaaccgggattacaattactaacgacgataaagcatctatcggcagggacaaaaagcgggcccttagaactcgcatttacaatgccccgaatctgaatgaagaagagctggcccgactccgaggatatatctcatttgtcaaccaagtggagtccgatatgatcagtaagctttggaagaaataccccaaacagatgggccgtattctgcgtcaatga

SEQ ID NO: 11543 - RNA, 945 nt, synthetic construct
  source 1..945: mol_type = other RNA
atgagcgatataattcaacggattaagcgccggttcgcattctctgatagtgagtttaatacctacctcaatactgctcctttccggtataagaactatactatcccaaaacgatcaggaggtgtgcggctgatcagtcagccgtcaaaggatctgaagagcatccagaggtttatactatccgaattcctgttacccaagcttgagatacacgagtgcgcaacagcctatcgtgaggaaagaaatatagcagataacgctagaccccatctgcagaatcagttcctcctgaaaatggacttcaaagacttttttcccagcattagagcaattgactttagccaatacgcgctgaggcgctcaatcgtcgagagtgaagaggaagccaccatgttgggcaaaatctttttcaagtccaccaacaatggattaagactgtcaattgggagtcctggctcaccccccatcagtaacgccgttatgatcaacttcgataagcagatctcttccatgtgtcgtgactcggggatcgcgtttacccgctactccgacgacctcacgttctcttccaactctaagggcatcctttttggtattcctaaccaggtccaggaggtactcgaagtgattcaacgcccaaaactgatgatcaacgccgaaaagaccaagttcagctccaaaaaatttaatcgacacgtgaccggcatcacaattacaaatgatggactaatgtccttgggaagacagacaaaaagaagggttaggtctgaggtgtacaacgcccctagcatgcaaccaaaggaacggcagcgactccgcgggtacttgagctatgccaaacagttcgagccgagctttgtgataaaactgtgggagaagtacccagcccagatggctcttattaagaattctgctttcactaagaggaacggcgaccctcagtga

SEQ ID NO: 11544 - RNA, 957 nt, synthetic construct
  source 1..957: mol_type = other RNA
atgggtgctggcgaaagggtggttacaatcatagatcacatccaacatgaattcggcttttctagaaacgagctggtcgcctatgctggcacgtgcccacaccggtacaagacctataacatccgcaagcggaatggggatccacgaaccattagtcagccaagcaaagatcttaaggcagtccagcgatttattgtgagtaggttcttcgaggaccagtttgtgattcatgaagctgccaccgcatacagaaaaggcgtgagcatcgtcgacaacgctaaaccccacttaaatagctcctatctgctcaagatggactttaaaaacttcttcccttccattaagagtgacgatttcgtaacatacctagttgagatgggaatctacgaggacgaagcgaggatattgagccgtatattctttaaaaaggagagggacgaactggtgttatccataggcgccccttccagccccattatcagtaacgctctgctacacgaattcgatgaacgcgtcgcacagtattcgaaggaacggtcacttaatttcacaagatactcagacgatatcactatctcaaccaatgtggagaatgtgttgtttgacgtcccgaactacataaatgagcttctgggggatattcgactgccccggctcagaatcaatgaggagaagactgtattttccagcaagaaattcaaccgtcatgtgacaggtattactatctctaacgaagggcaggcatctctgggacgcagcaagaaacggcgcttgaaagccgcggttcattcagccgataaactgaccgagatcgagaggtttaaactcagaggacgcctcgcctttgctaagcaggtggaccctaagtttattgagcttctgcacgccaagtatcccaagcagatctctctcattaattctgcccaatgggcatgggacctgtccgatttcctgtga

SEQ ID NO: 11545 - RNA, 942 nt, synthetic construct
  source 1..942: mol_type = other RNA
atgaagcctacgcagatactcaagaaagagctcttcttggcagatatcgagttaaagaggtatgtgagcagctgcccccggagatacaaacggtaccctattgacaagaggtctgggggcaagcgcatcatcgcgcaacccactcccgacctgaaggctgtccaacgtctgctcgtcagtcagttcttagagaaatgtcttcaggttcacgagtgtgccatggcttatcaggtgggcaaatctatcgtggacaatgcgaagattcactcaaaaaattcgtacctgctgaagatggattttaaggacttctttccatctattcgcagtaaggacctttgccacctgcttgtggcccaaggtcacctcgatcagggcgacgaaatcgaattgcgaactatttctagagtcttctttatgctggaaaacgacgagctggttctttcagtaggggcaccctcatctccgttcatcagtaacgcactgttgttcgaattcgatacaatagccgacgagtattgcaaggagcatgggattagcttctcacgatactccgatgatctcaccttcagcacaaatattaaggacgccttgtttgctgtgcctggatttataaaagaggccttaaaggccatggaatatccaagtctgctagtaaatgatggaaaaacagtcttctcctccagggctcataaccgccatgtgaccggcatcaccctgaccaacgacggaaaactgtccatagggcgtaaaaagaaaagatcaatccggacacaggtgttcctgttttccgcgtctagactgagcactcaggaagcccggtccctccagggttacatcagctttgccaggagcgttgatgctgccttttacagtagcctactgtccaaatatccagtggcaatggcacagctcgaggccgctaactttggcgaaattaattga

SEQ ID NO: 11546 - RNA, 951 nt, synthetic construct
  source 1..951: mol_type = other RNA
atgcggcccaaagacgttttgcgtcagaacctgtttatctcagggtcagaactcgaccgctacctgtcctcctgcccgaggaggtacaagcattataagatcgataaacgtgggggggaaaaagactccaaaagacccattagccagcctacaccagaactgaagggtttgcagaggaccctgctggatgagttcctgctggagcggttgcctgtgcatgaggccgctatggcgtacaagaaggatactagtatcgcagataatgcgaaggtgcacgcccggaatccgtatcttctcaaaatggactttgagaacttttttcccagcatcaaaagcttcgatctttgttctctgttaattgacaccggcaaactagacaaggacgaccagctggatctccgcattatatctcgcgtgtttttcatgcgagagggcccagaactcgtcctttctataggcgccccaagtagccccttcatatcaaatgcaatgctgtttaacttcgattccatcgtaactgagcactgctcaagcctgaacatttcctactctcggtatagtgacgacctgacattctcgacaaaggagaagggaattttattcgacatccctacattcattcgcgagactttaaagctcatcaaatatccaaagctgtctgtcaacgaaaagaagaccgtgttcagttccaaagcacataatagacacgtaaccggcgtgaccctctcaaatagcggcgaaatctccctgggtagatctaaaaaaaggtcgcttcgaacgcaggtctatttgttcagcaggggacaactcctacccaaggaggctgccgccttgcaaggatacattgcatttagcaactctgttgaacccaaatttgtggagtccctactggaaaagtaccctgaggccatgagagcccttgctgctgctagatttagtctcgatgattga

SEQ ID NO: 11547 - RNA, 921 nt, synthetic construct
  source 1..921: mol_type = other RNA
atgagtcttatcgagcagctatctaagcgcaccaacctccctctggatagcatccagaagtatgcgaagacatgccccgtgcgatacaaggtgtattccattccaaaacgcaatggtaaaggctttagagtaatcgcccagccttctgcaccagtgaaagccttacaacgggagttggtgtcaattctggaagattacattctcgttcatgaatgcgctatggcatatagagaaggcgtttccatttttgacaatgccagcaagcacaaggataacgactacttgttgaaaatggactttaaagacttcttcccttcaatcgacccagcgacggtgctgggcttaataatgtctcagtgtccagtggcagaaaaaagcgataccctttatctgctgagtattctctgtcgcaagcccagaggaagcgatcgttttattgtctctataggcgcaccgtcttcaccttttatcagcaatgcctacatgtacgtgtttgacgatatcctgtccaagctgctagtcgacaaggggatctcatacacacgttatgccgatgacttgactttctctactagaaagaaaggggctctgttcgaggttcccgctctcgtcaaaaaggtgctggtagattcgggataccggaccattcgggttaacgaggagaaaacagtgttctcctccaagaagcacaaccgacatgtcactggactggtattaaccaatgacggtagggtgagcctcgggcgcagcaagaaaagggaaatcaggacacttatattcaaatacctgcacggcgagctgtcgaagccggaggtcgagtccctcaaggggcttgctagtcacgcccggcatatcgagcccgaattctgggaaaggctgaaaagtaagtatggaatagatgactccttctttaaactctga

SEQ ID NO: 11548 - RNA, 963 nt, synthetic construct
  source 1..963: mol_type = other RNA
atgctaaatagtgctctgattacttactttagcgttaagaccggcctggataagagtgtgtgtctgcatgtggctctaagcgcacctaaacggtacaaagcctacagcattccaaaaagaaatggcgagatgaggaccatcgcccagcctacacccgttgtgaagcacctgcaacggctggccctgaggctttttgacggcaagctgcctattcacaaagctgccacggcctatcgcaaaggaagctccatcgtcagcaatgtaagccctcatctcggaaactctttcattcttaagacagacttcaactcatttttcaactcaatcaaaccgcaggacttggacctccttgatctggggggaactattggcctgaaatcggaggaagtgtatatcttaaagcacctgttcttttggttgccaaagggggcatccgatttttgtctctccatcggtgccccctcaagccccatgctgtcaaattatttgctctttcagatcgataccaagatctataactattgcatcgagcacaatattgagtacacccgctactctgacgacattaccttgtccacagacaaaaagttcatactgaaggacgcgtacgattgtattaatggtatatgcactcgcacatcttcgccctctttagtgatcaatcaacggaaaaccgtcttcacttccaaaaagcataagcgttttattacgggactggtgatcagtaatgatgaaaagatctccttaggcagggaaaaacgacgactgataaagtccattctattcaacttcgtaaacaacaaggaaacaactatacagagtctggagcagcttaacgggctcttggcattcgccgcacacatcgaaccagagtacgttatgagactctgcaaacagtacgaggcgcacctctctcatctctatgataagggggtctttcttatcagatatgcttctaagtga

SEQ ID NO: 11549 - RNA, 936 nt, synthetic construct
  source 1..936: mol_type = other RNA
atggtaatcgacgagatcctcaaaaaaattatctaccctcggccgatgttggagtatctgatcctcacagcgcctcgaaggtataaggtgtacgacatcccaaaaaggaatgggaaagggtctaggactatagctcaacccaccaaactgatcaaggctattcagcgcgagtgtatcgaatatttatccaagttattcccagtccatttcaccgctactgcctacgtcaaaggaaagtcgataagagataatgcactcaagcacaaaaacaatcggttcctgctgaagatggacttcaagaacttcttcaacaacatcactgagtatgactttaggaaatacatccagaagcatcgcacggactacaatatcagctggacggagaaggattgcgaagatctatgcaacatcttcttttggtgtcccaagaatacctataaaagaattctgtcagtgggcgcccctagtagtccctctctgtctaatattctgatgtacgattttgacgccatcatctacaaatactgtagtgaaaacgacgtggtgtatacaagatatgccgatgatttgaccttttcttgcaataaggcatttaagctaaaggacgttgagaagtatgtgactgatatcagcaaagccatagattcaccaacccttgtaattaacgaggacaagaccgttcatacatccaagaaaaagaatcggcacgttacaggcattacaattaccaatgatggccagctctcactcggttacaaacgcaagattgtcctgaagagccttatacacaagtacgctaacaacgagctggacgaaaatagcatattgtacctgaagggaatgctgaacttcgcaacttccattgaacccgactttattcagcgtatgaaaaacaaatacggtgaagatacagtgtccgccattcttcgatattga

SEQ ID NO: 11550 - RNA, 912 nt, synthetic construct
  source 1..912: mol_type = other RNA
atgctgctggagctaatcagtaaatccacgcttatcgaaaaagatcaggtgctggatattgccaataaggcgagcataagttatgccaggttcaccataccaaagaaagacggatcacagcgtttgatttatcaaccgagtatggccatccgggccctacagaaagtggtctacgatgaggtgctggataagctgccagttcacgatgcatgctatgcatacagaaaaaaacggtcactcaaagaccatgctaacgtgcacaagaataataactacttactgcgaattgacctgaaggacttttttgagtccattacccgatccgacattgagaaatactgccatgagtccattagtaaggttttcccccatttcaacgaagaggattttaaactcatgacaaacatcatctgcagaaaggatactatcacaatcggctcagtcacctccccttcactgagtaatagcatatgttatacgctggatgaaaggatttctcgcttggctaagtcgcacggtgtcaagtatacacgctacgctgacgacatgttcttcagcactagcaacaaaaacgttctttgtatcatccagaagggcgtgtccgggatcattaaaggattagaataccccacccttaccatcaacaaaaaaaagactaagcacagtagcaagaaaaatagaatgagcgtcacaggcgtagtgatcactctcgacaagaaactgagcataggtagaggaaataagcggtttattcgcgaacaagtatataagtggtcttctttgtcttccgaggacaagtcctatctctctgggtacctcagcttcgtgaagtctatcgagccttcatacatcaataggctgtgtaacaagtacagctctcagaagatacaggaaattcttaggttttcgtga

SEQ ID NO: 11551 - RNA, 912 nt, synthetic construct
  source 1..912: mol_type = other RNA
atgctcctcgaactgatttccaagaatactcttatcgaaaaagaccaagtgctggatatcgctaataaagccagcactttgtacgcacgattcacaattccaaaaaaagacggctctgaacggctcatttatcaaccgtcaatggcgatccgtgccctgcagaaggtggtgtatgatggagtcctggacaaacttcctgttcacgacgcctgttacgcctacagaaagggtagggggttaaaggagcatgcaaatatccaccgcaactctaaatacctgttgcggatcgatctaaaggatttttttgagtctatcacccggagtgacattgaaaagtattgcaatgagtatgtgagcaaagtgtttccaatcttcaacgaaggagatttcaacctaatgattgacatcatctgccggaaaaacacaattacaatcggctcagtaacttcaccttccctgagtaactcaatttgctacaacctcgacgagaaaattagtagactgtctgatagttacggggtgaaatatacgcgctacgctgatgatatgttcttttccaccaccaacaagaacattctcaagataattcagaaggaggtgagctccataatcaagaagctggactaccccaaattaacgataaataacaagaagacccgacatagcagtaagaagaataggatgagcgtcacaggggtcgtcataaccgtagacaagaagctgtctataggacgcgataaaaaaaggttcattaggggccaggtttataattggaagaatctgtcgatcgaggaaaagtcctatctgagcggttaccttagcttcgtcaaatctgtggagccctcctacatcaacagactttgtgacaaatattcatcccacgttatccaggagatcttgagatttagctga

SEQ ID NO: 11552 - RNA, 924 nt, synthetic construct
  source 1..924: mol_type = other RNA
atgatcctggaagagattcagaagaggacttttctcgatatagactacattcgatccatcataaaccggagcaactctctgtacagcaagttttacatcttcaagagagacgggtctaaaaggtggattcatcatcccaagaaggaacttaagcttatccaacgagtggtaaatgataacattctcgacaagctgaagatccacccatcatcaacagcttacagaaggggatgttcggtgaaaaagaatgcgctactgcacgttaacaatgacttcttactgagaatggactttaaaagctttttcgattccatttcctacgatgacatcgagaacttcctcgataaagaatttagcattagcgaaccgaattggacttattccgatacaaaattgctggctaaactgctctgctataagaactccctggtgatgggtgccgtgacctctccttgtatcagcaacgccatttgttataagctggataaaaagctgtccgggttgtgccagaaccacaatgttatatacagtcggtatgcagatgacctgtatttcagtacctctgagcgtaatacactttttttcatcgagaaagaggtcctaaagatagtcgccaatctggagttacctagtgggcttaccatcaacaagaataaaaccttccactctagccgcaaaaggaaaaaacaggtgaccggcttaattctgactcatgacaagaagttgtctatcggtcgcaataagaaacggacagtcaagagtaaagtgcataactgggcaacgcttaacgagaatgaaagatcatacctcagcggctatatttcctatattcactcaatcgaaccccagttcatcaaccgcctctgcctgaaatacggcgccgacctcgtaggagagatcatatcatacaatagtaagttgtga

SEQ ID NO: 11553 - RNA, 939 nt, synthetic construct
  source 1..939: mol_type = other RNA
atgaagcttattctcgacgttatacattccaagacgtttcttgaggtggactacattatcattctgctgggaaaggtgaacagtttatacagtagattcagcattgacaagaagaatggttccgggcggagaaccgtctatcacccttccaaagaacttaaagccgtgcaaagagttatcaatgatcacatcatcacgaaactcgatacacacgacgcatgtaaagcttataagctggggtgcactactaagaaaaacgccgagccacatctgaattctcgcttcttgctgcgtatggacttcaagtctttctttgagagtatcgaatacaaagatgtgcataagttctgtcaggagtttatcaagaagcactttattgagtggacagacgaggacagtgagatctttagcaaattcgtgtgctataagggccgactcgtgatgggcagtgtgacctcgcctgccctgaccaatgcaatgtgcgttgggttagacaatctgctgtacgaaaaatgcgaatctattggagtaaagtacagcaggtatgccgatgatctctacttttcaactgacgctccaaacatcttgaagaagctggagaaggatgtgtacaaaatcgtcagctctttgaaaatacccagctccctgaagataaactccgataaaacataccactcaagcaggaaacgacgcatgatagtcactgggctcgtgatcacaaattctggaaccatctcagttggccggggcaaaaaacgggaaatcaagtccctagtcttcaactgggaatctctagatgaggagtttaagaaatacacctccggttatctgagctatattaagtcagtcgaacccgaattccttaataacttgtgtctgaagtacggcgcggagaaaattagggtggtaatgacctataaccagtcactcaagatttga

SEQ ID NO: 11554 - RNA, 921 nt, synthetic construct
  source 1..921: mol_type = other RNA
atgttacttgagctcatcaaagccaaaactctgctcgacgaagattacatcaaagaaacgtgcctgaactcaaatgcattatactcaagcttctacctccctaagaaaaacgggaagcttcgaaaaatataccatccacacaaggagctgaaggccttccagcgaattctccatgataacgtgttggcttactccaaagtgcactcagcgagcatggcctatagttccggctcctcaatcaaacgtaatgccgagagacatagcgagaagaaatttctgctcaggatggactttagaagcttctttgagagtatctcctctaaggacgtgttccagttctgtgaaaaaactctttctaatcagttcagtggatgggatcgcttcgatagcgacatgtttaccaatttcgtttgctacaagaattccctggtaatgggtgctgtaacctcgccctccatagctaacctgatcctgtatgaatttgacgacagtttgagcacgttctgtagtagcattggggtcacctatacacggtacgcagacgatatgtacttttcgacaaacaccagaaatgtcctaaaggaggtcgaaaggcgggtgtataaaatcgtcgagaagctgcaattacccaacgacctgaaaatcaacacctcaaagacatatcactcctctaagtcccgcaggcggctagttactggattggtgctgacttgtgaaggctctgtttctctgggcagaaaaaaaaagcgcgaggtgcggtctttgatttttaagtgggatagccttacagatgaggagaagcagagcctgtctggatatctctcttacgcaaagtcaatagagcctgactttattaataggctgtgcatgaagtacggttccaatattgtgaagaacgtgctcgaatatagtccagaatga

SEQ ID NO: 11555 - RNA, 921 nt, synthetic construct
  source 1..921: mol_type = other RNA
atgttaattaagctcatctccgaaaaatcattgatcgacgaggattttattcttgatttcgctaacaagcaacaagtgaactatttcaagtttcagattgagaaacgcacaggtggaatgaggacaatttatcacccgagtaaggaactcaaatacatacagaagatactgctggacgacgttatatccagccttccaatccacaattgctgttacgcatatgttaaaaacaggaacatccatacgcatgctatacagcacaaaaacgctaaatatcttctaagactggattttcgcaatttctttgagtccatttcatacaaagacatctatgagttctgcgagacaaccatggggatatataataaagggtggacctcctcagatagtgaaatctttagtaagctcgtgtgttacaaagataggttaaccatcgggagcgtcacttcaccctctctgtcgaacgccatctgttacgatttggacattaagttaagccagctggccctttccaagtctgtcaaatatacccgttacgcagatgacatgttctttagtacaaagatcaaaggtgtgctgtatgcactgcagaatgacatcaacaatatcatctctaccaatacactgcctagcaaattgaagctgaatctggaaaagactcatcacactagcaagaaacggaagatggccattactggcctggtgattacgaatgacggaaatatatctctcggcagaagaaagaagcgagagattaagtctaagatttacaagtgggacaccctgagcactgatgaacggacatacctcagcggctacctggcgtacatcaagtccgtagaacccgagttcattaacaacctatgcgataaatacgacgccaacttgatcctcgagattatcaagttcaacaccaaatga

SEQ ID NO: 11556 - RNA, 942 nt, synthetic construct
  source 1..942: mol_type = other RNA
atgttactcgaattaatcagttcacttacgttgctggaggaggaatacatactaaatatagctcagacctcttcccagcgctacaagaagttctacatcaccaagaaaaatggcaatttgcgggcaatctaccatcccagcaaagagctaaaaggcatacaaagagtcattcataatgagctgctgcagaagttgccgacacacccagccagtgcagcctataaaaaaggctgctccatcaagaagcacgccgagcagcacaagaaaagcaaatatctcttgaggcttgacttcaagaattttttcgaaagcatctccgagattgatattcgctgtttcgcgaataacaatatcattggcgttattaaagggtggagcgaagaggacactaaactgctggtggaactggctacttttaaaggaggactcactattggatcaatcacttctcccctcctgtcggacgcactgtgttatcagctggatattgccctattttccctgagccatgagctgggggtcacatacacacgttatgctgatgacctctatttttcaaccaaccaccgaaatacacttaaaaagattccttccaacgtggatactataatcaaggaacttgaataccctaagaaactgaagattaactacagtaagaccaaccattcatctaaaaagaacaggatgatggtgaccgggctcacattgaccaacgatttcaaagtatccatcgggaggtccaagaagagagagattcggagtaagatatacaaatggtctgaactgaacaaagacgataagctgcacctgtcaggttaccttagctatatcaagtctgtggagcccagcttcatcaacaccttatgcggcaagtatggtgccacgattatccaaagtatcatcagatttaacagcaaaaaggacccaaatctcaagtcttga

SEQ ID NO: 11557 - RNA, 927 nt, synthetic construct
  source 1..927: mol_type = other RNA
atgttgttagagatgatttccaatttgaccttgcttgagaaggaatatatccagaacattgccaaaacagctagtaaaagatacaagcgtttcctcattcctaaaaagagtggaggaaatagggtgatttatcatccaagtaaggagctgaagggcatccagcgcgtgatacatgaggaactactccagaaactgcctattcatcttgcatcggcagcctacaataaaggatgctccatcaaaaagcacgcggagcagcaccggaaggccaagtacctgctgagactggattttaagaacttctttgagagcatcaccgaaattgacatcaattgcttcgttaacaacaagttcatcgatattttcgatgactggtctgaagaagacacgaagcttctcattgacctgactactttcaagggtgggctgactataggctcaattacaagcccactgttaagcaacgccatctgttaccagcttgacatagcactgttttctttaagccacgagctggaggtcacatatacccggtatgctgatgatctgtacttttcaaccttccaccgagatgtgctcaaaaagatcccgtctaaagtggacatcattataaaagaactcgaataccccaaaaacctaaaggttaacaataacaagaccaatcactcctcaaaaaagaacaggatgatggtgacaggtctgacgctgaccaatgactttaaagtatctatcgggagaagcaaaaagagggagatccgctctaaaatatacaaatgggtggacctcaaccaagatgacaagcttcaactcagtgggtatttgagctatatcaagtcagtcgagccctcctttattaatactctgtgtggcaaatacggcgctaaggtcatacagcagatcatcatcttcaactccaagaatatttga

SEQ ID NO: 11558 - RNA, 924 nt, synthetic construct
  source 1..924: mol_type = other RNA
atgctgctcgaactgctgtctcgactcacgatcctagaagaggagtacatattgaatatcgcacaaacgtctgctcagcggtacaagaaatttcacataaagaagcggaatgggacactgcgcgctattttccagcccagcaaagaggtaaaaggatttcagaggatcatacacgatgaagtccttaaacgccttccatcacatccagcctcggccgcctataaggaaggtagcagtatcaagaagcacgccgagctgcacaaacgttcgaagtacctgctccgcttagacttcaaggacttcttcgagtccatcagtgaacatgatatcagaaagtttgctagcgagaatctcactggcaaaattaaagggtggacagacgaggacaccaatttgttggtgaagctgtgtacctttaaaggcggacttacaattggcagcataactagccccctcctgagtgatgccatttgttacaatctagacgtggccttgtattctctgtcccatgagctgggcattacctatactagatacgcagatgatctttatttctccactaacaaatctggggtgctgaaaaaaatccctgaacgggtggaagagattatctcccgactggaatgcccgaacaagctcaaaataaacaagtccaaaacacaccactcatccagaaagaataagatgaaagttaccggactgaccattactaacgacttcaagatcagcatcggtagggagaaaaagagggaaattaggtctaaagtctttaattgggatggattaagtcccgaggagaaggctcatttatccggctacctgtcatatattaagagcgttgagcctgcgtttatcaacaacctctgcacaaagtacggggcatcaatcatcaaggaaattaccgtgttcaactctaagaagtga

SEQ ID NO: 11559 - RNA, 924 nt, synthetic construct
  source 1..924: mol_type = other RNA
atgctgcttgaactgattagtaacattaccatcctggaagaagattatatcctcaacgtggcacagacatcctctcagcgctataagaagttctacatccccaagcgtaacgggagcctcagagctatcttccagccctctaaggagctgaagggaattcagcgcgtaattcacgacgaagtcctgaagaaactccctagccatactgcttcctcggcttataaggaaggctcttcagttaagaaacacgctgagcaacacaggaaatccaactacctgctgcgattggatttcaaggacttctttgagtccatcagcgaccatgatatacggaaattcgccaatcaaaatcttgtggagaagatcactggctggacagaggatgacaccaacctattaatcaagctggccacttttaaggaaggtctgaccatcggaagcattacgagtccgctccttagtgatgcaatttgctacaatctggatgtagcgttattttccttttcacatgagctagggatcacctacacaaggtatgccgacgacctctatttttccaccaataacaggggcgttctgaaaactatcccatcaaaagtggaggacgttatatctaatcttgactacccaagtcagctcacgatcaatagatcaaaaacataccatagtagcaagaagaacaaaatgatggtgacaggattgactctgaccaatgactataaagtctcgattgggcggaccaaaaaacgggagatccgaagcaagatttacaactggtccgcattggatctggaacagaaacaccacttgagcggctatctcagctacataaaatctgtggagcctgcctttataaacaccttatgtacaaagtacggtgccaatgtgattagagagatatcagtcttcaattctaacaagtga

SEQ ID NO: 11560 - RNA, 930 nt, synthetic construct
  source 1..930: mol_type = other RNA
atgctgattaacctcattagcaaactggtcctgttagagaaggaatacatcgtcagcattgccgacacagccagcagacggtacaagcggttctttatcaacaaaaagaatgggaagctccgcgccatctatcatcccgcaaaagaactgaaagctatccagcgggttatccacgacgaagttctaaagaaactccctagccatgaggccagctgcgcttataagcagggttgctcagtgaagaaacatgccgaaatgcacaaaggggctcgctatatgctgaggatagacttcaaaaatttcttcgaatccatcagaaccgaggacatacgtcacttcgcagataagaagatgatgagttatatcgaaggctggactaaggctgacacagagcttctcgtgaaacttacatcttttcaggaagggctgactattggatctattacctctccgctactgagtgatgcgatctgttacgacctcgatgtatcagtatttagtcttgctcacgagttgggcgtgaaatataccaggtacgccgacgacttgtacttttctacgaacaaaaaaggagtgctgaagtccattccccctaagattgaggcaatactgttagatctgaagtgtccacataacctcaagattaacaccgcaaaaactcaccactcctccaagaaaagtaggatgatggtcactggcctgaccatcacgaatgataacaatatctccattggtcgcacccgaaaacgagagattagaagccaaatatacaattggacatcactgaatgatgaggataagaagtacttgtcgggctacttgtcttatgtgaagagcgttgaaccagagtttatcaacgccctttgttgcaagtatggcgcgtacaagataaaggagatcatcgtgttcaactcatccggaatcaattga

SEQ ID NO: 11561 - RNA, 918 nt, synthetic construct
  source 1..918: mol_type = other RNA
atgattttactgaagtacttagcaaaggaactgttgctcgacgagtcttacatcgaagagcttgctaactcagccagcaaccattacaaaagctttaccatcccgaagaaatcagggggcgataggctgatcaatcagccttctcgagagctgaaggcgctccagcgcaccctgcatgataacatactgagtaagcttcccatccatgattcagcattcgcttatagggacgggcaaagtattgataaacacgctaaggtgcacttatcagccagatacctgctgagactggacttcaaggacttctttgaaagcatcaaggcgcacgatatttaccgatttatcaacaaacacggtatcaacctactggacaattggagtgagctggacacaaagttgttggtggacattgtgtgttacaaacagaaactcacaatgggctccgtcacctcccctattcttagtaatgccatttgcttcgccttggacaagcagctcgaaaaaatctgctatatgcatgacgtgaagtacagcagatatgccgatgacctgttcttttctacatccaaaccaaatgtgctccggaagatcgaaaaagatgtattcaatgtcgttgcagctctaaacgagcccgaaaagctgaaaattaaccgcaagaagacgtatcactcttctaagaaaaataggatgtcggttactggaattatactgaccacagatgggaacattagcataggaagggataataaacgcaaagtccggactatggtgttctcctggaataagctcgatgttgtagagaagcggtatcttcagggttacctcagcttttgtgcctccatagagccagagtttatcaactccctttgcaataagtatggcgcagacaaaatcactgagatccaacgttataactga

SEQ ID NO: 11562 - RNA, 918 nt, synthetic construct
  source 1..918: mol_type = other RNA
atgattctcttggaatatcttgctagggagctgatcctggataaaggctatatcaaggacttggccataaattcctccctgaactatatttccttttcaatccccaaaaagtcagggggtgagcgtattatacaccagccatcacgagaactgaaagcgctacaaagagctctccacgataatctactcaaaaagctacccatccacgagagcgcatttgcctacagaaaagggaaggggatcgatcagcacgccaaggttcatttgagtgcccgatacctgcttcggctggacttcaagcagtttttcgagagcattaaagctaaagacatcacctcctttatcaataagaataaggacctgctgcttagcggctggactgatagtgatacaaaactgctcgtcgatattgtgtgctacaagcataagttgacaatgggatctgtcacctcgccaatcctgtcaaacgcaatttgctttctgttagacaaggaactggaaaagatatgctacttaaatgacgtcaagtattctcggtatgcagatgacctcttcttcagtacctctaagcctaatgtgctgaggaagattcaaaaagaggtttttaagatcgtgagcgagcttgacgaacctggccagctcaaaatcaacgtaaacaagacctatcattccagcaaacggaacaggatgtctgtgacaggattgattttaacaaacgacggaaaggtcagtgttggccgctgtaacaaaagaaaggtgcgcactatggtgttcaattgggatacgcttgatgaaaaggacaaattctacctgcagggttacctgtccttctgtagcagcatagagccggagttcattaactcgctctgtaataaatacggctctgaggtaatcgtgaaaatccagacttacaactga

SEQ ID NO: 11563 - RNA, 924 nt, synthetic construct
  source 1..924: mol_type = other RNA
atgaaattactggatcacctgtcaagttccctcctgcttgacaaaacctatatcatggaactggctgaaactgcgtcgcaaaggtacaagcagtttagcattcccaagaaaacaggaggcttcaggtcaatccttcaccccgccagggaactgaagacactacagcgcattattcatgaggatatcctcgtcaagctgcctattcacaatagtgcatttgcctacagaaagaagctcaacatcttcgaccatgcaaatgtgcacatcggtgcctcctacttactgagaatggacttcaaaaactttttcgagagcatttcctcaaaaaacatcgcgaagttcttggactctaaagccaattatctgctcaaagactggaaagctgaagatactgagctgttggtgaagctagtgtgttataaaagcagcttaacaataggcagtgtttcctctccgacgctcagcaatgcaatatgttatgaactcgacgaggccctgcacaagctatgctatgtaagagggatacaatacacccgttacgctgatgatctctatttttccactaacgagcctaacattcttaactcgatccagaataacgtctacgaaatcgtgaacagtctgagcattccagacaagttgcggataaactcctctaaaacccatcattcaagccggaaaaatcgaatgagcatcaccggtctgattcttacaaattccggggatgtttcaatagggcgagacatgaagcgcaaaattcggtcccttattttcaaatggtgctctctggatgtgaaggagaagaagtacttggccggctatctgtctttttgtgcttctatcgagccagagttcttgaatagtctgtgcaagaagtacggagccgacatcatctacgagatccagaactttatgaataagtga

SEQ ID NO: 11564 - RNA, 912 nt, synthetic construct
  source 1..912: mol_type = other RNA
atgttaattgagcacttatccgacacactcattctgacgaatgatttcatcaacgatctggcagatactgcttccaagaactacaacaaatttagtgtcccaaaaaagaacggcgggacaagggtggtataccagccaaataaagaattgaaactccttcagagggtgattcacgatgatttcctgaagatcctccccgtgcatcctgcctgttccgcctatctggacggcgctagcgtgaaggaaaatgctgagagacataagaataacaagtacctcctccgcatagactttgtagacttcttcaaaagcattacccataatgacatcttgtcatttctaatcgagaacaagatccaccctcaatggaacgataacgacacggaactcctgctgaaactggtttgctataatggtagattaacaatgggctcagttaccagtccaatgataagcaatcttgtctgcaataaactggacaaagcaatcgagtctatttgtaacatccaggacataatttactctcgctatgcggatgatatttacctctccactaacacaccgaatattctgggaatgatgcccaagaagatcaccaacatcttgcgtaaaatcgactatcccaaacaccttataatcaataccagcaaaacacaacactctagcaagaaaactcggatgaccattaccggactgaaaatcactaatatggggaccatctcaatcgggcgggagaagaagcgagaaattaggtccctggtgcataaatgggacactttgcccatagagaagaaaaagtatcttcagggttacctaagttattgtgtgtcggtcgaacctctgtttattaacgccctgtgcgagaagttttctgccaagataatcaagaagattcagagttacaagttctga

SEQ ID NO: 11565 - RNA, 912 nt, synthetic construct
  source 1..912: mol_type = other RNA
atgcttattgatcacctatcagatagtctcatccttacccataatttcatcaatgatttggccaacactgccagcaaaaattataacaaattctctgtgcccaagaagaacggcggaaccagggtggtgtatcaaccacataaagaattgaaactgctccagcgggtgattcacgatgacttcctgtactcccttcaggtgcatccagcatgtacagcatacattgacggctcatccgtgaaaaaaaatgctgagaaacacagacataacaaatacttactcaggctggatttcgtcgacttctttaaatcgattacccacaatgacatattgctgtacttaatggagaacaagattcacccccagtggacggacgaggatacagagatctttctgaaactcgtatgctataacgggcgccttactatgggagcagttacgtcccctatgattagcaatctaatttgcatcaagctggataaggctatcgaatcaatatgtagccccctgaacattacatatactcgctacgccgacgatatatatttgtcaaccaacacagcgaatatcctcgggctgatgcctaaaaagatcatccacatcctgaggaccatagaataccctaaaaacctgatcatcaatacaagcaagacacaacattcttccaagaagacccggatgatcattaccggcctgaagattactaatgacggtgagatttctataggtagagacaaaaagcgtgagatccgatctctggtctataagtgggacagcctcagcattgaacagaagaagtacttgcagggatatttatcctactgcgtaagtgttgaaccgctctttatcaacgctctgtgtgagaagtttagtgccaaggtcatcaagaagatacagacttacaaactgtga

SEQ ID NO: 11566 - RNA, 912 nt, synthetic construct
  source 1..912: mol_type = other RNA
atgctgattgagcacttaagtgattctctgatcctcacagaaaatttcatctgtgaactcgccgacactgcttcgaagaactataacaaatttagcgtaccaaagaagaacggagggaccagagtggtctaccagccacataaagagctgaagctgctgcagagagtcattcatgatgatttcttggtgaaaatgcctgtgcatcctgcctccacggcctatcttaaaggagcgtctgttaagaacaatgccgagaagcacaagaacaataaatacctactgaggctagacttcgttgattttttcaagtccataacccataatgacattctttcctttatgatggagaacaaaatccaccctgactggaacgagtatgacaaagaaatctttctcaagctggtgtgctacaacgggaggttaaccatgggcgcagtgacatcacccatgttatcaaacctgatctgtaataagctggatcggattattgacagcatctgctctcaacagaacataacctacacccgatacgcagatgacatctatctcagcaccaatacagctgggattttgggcagtatgccccagagaatcattaatgtactccgtctcttggagtacccgaagcaccttatcatcaattcctctaaaactaagcactcaagtaagaaaagcaggatgatggttacaggattgacgatcactaacactggcaatattagtataggtcgcgacaaaaaacgggaaatacgcagcctggtctataaatgggatcagctgacaatagagaagaagaaatacctgcagggttatctgagctactgtgtgtctgtggaacccctttttattaattcactctgcgagaagttctccgctaagatcatcaagaagattcaatccagcaaactgtga

SEQ ID NO: 11567 - RNA, 912 nt, synthetic construct
  source 1..912: mol_type = other RNA
atgcttattgaacacctgagcgagaacttgattctgacaaagcaattcatccttaacttagcagattcatcatccgactgctacaataaattctcagtgccaaagaagggtggcggaacacgggtgatttaccaacctaataaagagctgaaactgctgcagagggttcttcatgacgattttctaacgaaaatgccagtccataacgcgtgcacagcctatagagatgggtctactgtgaagctgaacgccgagctgcacaaggataaaaaatatctactgcggctggacttcgtcaatttttttaagagcatcacacacaacgatatctttctttacctgcaggaaaacaaactcagccccaattggatagatgatgacaccgagcttttcctcaagctcgtatgttataaggggcgactcactatgggagcagtgacctctcccatgctcagtaatcttgtgtgtgaaaagctggacagagctatagaggggatctgcaaccatgacgccctcacctactcccgttatgctgatgacatttacttaagcactaatacccctaacatcctgtctcaggtaccgaagaaagtgattgctgtcttgagaaatctcgagtaccctaagaatctgatcataaacacttccaagactctgcactcctcccagaaaaggcgaatgttggttaccggcttgacaatcaccaaccagggaaatattagtattggtcgcgacaagaaacgcgagatccggagtctgatccacaagtgggaggccttaccaacggacaaacgcaagtatctgcagggctatttgtcgtactgtgcatcagttgaacccctgtttataaacagcctctgcgaaaagtactctgccaaactaatcaggaagattcagagctataaattctga

SEQ ID NO: 11568 - RNA, 912 nt, synthetic construct
  source 1..912: mol_type = other RNA
atgctgatagagtaccttagcaaatccctggtgcttacccccgactttattaaagaaatcgcggatacggccaatgagagatacaacaagttctctatcccaaaaaagaatggcggcaccagggtcatctaccaacctcaaaaggagttaaaagtgttgcagcgctcactccacgatcactttctgaagaaagtccctactcaccaggctatttgtgcttaccaggaaggaagcagcataaagaagcacgccgagctccattcaaagaataattaccttcttcgcctcgactttattgacttcttcaagtcaatcacttctaacgatattctgcattatctgatggagcataaactacattcggaatggactgaaaacgatagtcagttgctgctaaaactggtgtgctttaagggacggctcactatagggtccgtgacaagtccactgctgtctaacttagtctgcaatcacttggaccggtgcatcagtgagatcgccatctcgagaggcatcacatacagccgatatgcagatgacatctacctctccacctccagcaaagacattctgttcgatatgccgaagaaaataatttccgttctgcggaacattaattatcccaagaacttgatcctgaactcaacaaagacaattcactccagtagaaaaaagaagatgaccgtaacaggtctaatcataacgaatgataagaccgttagcattgggaggaaaaagaaacgtgagattcgatctcttgtgcataaatgggacgtgctgaccttagagaaaaagaagtatctccagggttatttgtctttttgtgcagggatcgaacccctgttcatcaacagcctgtgtgaaaagttctctgcccgcaagattagggacatccagaaacagaagctctga

SEQ ID NO: 11569 - RNA, 918 nt, synthetic construct
  source 1..918: mol_type = other RNA
atgttattaaattacctctccaacaatctggtgctgactccggagttcatttcaaatatagccgatactgctaatgaacggtataataagttcagcatctctaaggataacgggaaaaaccgggtcatctatcaaccccagaaggaactgaagctgctgcaaagggttctacatgacgatttcttgcgacggattatccctcacccatgttgcactgcttacaaagatggagcttcaacatacaaaaacgccatccagcacattgaaaatcggtacctgctcaggctcgacttcgtggatttttttaagagcataacctccaacgatatcttcctgtttctgaaagagaacagctccaagttgcatccagagtggacagaggaagacaatgagctgttcctgaaaatagtctgctataaaggacgcctcaccatgggttccgtcaccgccccaggcgtgtctaacctggtttgcaaagccctcgattaccgaatctccgacctatgtgcagctagagggatcacttatacaagatattcagacgacatgtacttttctacgaacaaggaaaacatccttcttaacctcacccccgagattatcgccatcattagaaatattgactaccctaagcaccttataataaattcaagcaagaccaagcacagctcccgcaaaaggaaaatgagtgtgacgggccttgtgattacaaacgacaagaagatttctttgggtcgcgacaaaaagagggagatcagaagtctggtgcacaagtgggataatttggacagcaagcgtaaaaaacatttacaggggtatctctcgtattgtgcaagtgtagagcctctgtttatcaacagtctgtgcattaaatttggcgcggcaaccatctctaagatccagaagtacattccctga

SEQ ID NO: 11570 - RNA, 954 nt, synthetic construct
  source 1..954: mol_type = other RNA
atgctcatcaagtatctgtcagataacctagtcctcaccaccgattttattcaggagctcgctaacactgccgacgatcggtacaacaaattcagcgtgcctaaaaaaaatggtgggacacgtgtgatctaccaaccccagaaggagctaaaactcatccagagggttctgcacgacgacttcctgaaaaagataatcgcacaccctgcctgcagcgcatattgtgacggttcttctgtgaagaaaaacgctgaaagacataaaagcaacaagtacctgctgcggttggatttcgtcgactttttcaagtccatcacaagcaacgacgtcttacattttctcgccgacaataagcttcataacgattggacaacacacgatacggagctgttcctgaagctcgtgtgttttaaaggaaggttgaccatgggcggcgtaacttccccaatcctgagtaatttagtgtgcaacaatttggatgtggcaataaatgacatctctatttcccttggcattacgtactccagatacgccgacgacatttatctctctaccaataatccgaacatcttgttctgcatgccaggaaaggttatttcactgctacgatccatcgagtaccctaactatctgatcctcaacactaagaagactaatcactcaagcaagaagaacaaaatgatgattacagggctgattcttaccaatgatggagaagtttccctggggaggaagaaaaaacgcgagatcaaaaccttagtatacatctgggaaactctttctattgaaagacgcaaatatctgcaaggctatttgtcctattgtgctagcgtggaacccctgttcataaatagtctgtgcgagaagttttcggcgaaaaagataaaggatattcagagctacaagtttcagtcttcgaattcaagtgtccccagtaagatacttaccaaatga

SEQ ID NO: 11571 - RNA, 915 nt, synthetic construct
  source 1..915: mol_type = other RNA
atgctgatcaagtatctctctgataaccttgttctgacgactgctttcatacacgaactcgctgatactgccgacaacaggtataataagtttagcatcccaaagaagagtgggggaacacgggtgatctaccagccccataaagagcttaagctgatacagcgcattctgcacgacgattttttaaaaaagatccctgtccacccagcctgtaccgcgtactccgatggatcatccgtgaagaaaaatgcagagaaacataagcacagcaaatacctgctccgcttggacttcgttgacttctttaagagcatcaccagtaacgacatttactacttcctgtccgagaataaactgcattctaattgggtcaaagaggacaacgagttgttcttaaaattggtgtgttttaagggccggctgacaatgggcggcgtgacaagtcccattttgagtaacctgatatgctacgaactagacatagctattaatgaactctctcagtccctcggggtgatttactctcgatatgcagatgatatctatctttcaaccaacaatcctaacattcttttcaatctgcccgcaaggatcattaagatcctcagatctgtgaagtacccaaagaacctgatcttgaatactaaaaagacagttcacagcagcaaaaagagaaaaatgattgtcacggggctgaccatcaccaacgataatcaaatctccattggcaggaaaaagaaacgtgaaatcaaaactctggtgtacttatggaagggtcttacccctgagaagaagaaatatctacagggatatctgtcatactgcagcggtgtagaaccgtcgtttattaacgccctctgcgagaagttttcagccaaagtaatccaggacatccagcaatataagataaactga

SEQ ID NO: 11572 - RNA, 927 nt, synthetic construct
  source 1..927: mol_type = other RNA
atgctgcttaagtatctgtctgagtctctcatcttgaccgcggattttataactaacctcagtaacacggctgacgagaggtataacaagttcgggatcccaaagaaaaatggaggaacgcgagtagtgtatcagccccaaaaagaattgaaacttctgcaacgcgtgctacacgacgactttttgaagaagattaacgtgcatattgcctgcacagcctattgtgagggctcctcggtgctgaaaaatgccaatatacataaggagaacaagtacctgcttagactcgacttcgtcgattttttcaagtcaatcacttccaatgacatccggctttttctgaatgagaaaaagggcgaattctccgattcttgggatgacctcgatagtgacctgtttcttaaattggtgtgtttcaagggacgtctgaccatgggcggtgtcgcaagccctatgatcagtaatctgatatgctacaagcttgatctgctgattaacgaactctgtctcagcctcggcgtaacatatagcagatacgctgatgatatgtacttcagcacaaatacacccgatattttgtttacaatcccgaaaagagtgatctcaatactgaggcagctcgactatcctaaaaagctgattctaaacaccaataagaccaagcacctcagcaaaaagcgcaaaatgattatcaccgggctggttatcaccaacactgggactgtctcattaggccgggagaagaaaagggaaatccggtccctggtttacaaatggaacattctggacgacaaaaagaaaaagtacctgcagggttacttatcttactgcgcaagtgttgaaccattattcattaacgctctatgcgagaagttcagctcccaggccatctctgagattcagacctattgtcccccttcaacttga

SEQ ID NO: 11573 - RNA, 915 nt, synthetic construct
  source 1..915: mol_type = other RNA
atgctgacagagtatctcgcctccagtctcatattgacaaccgattttatcagggacgtggcagataccgctgacgaacgctataacaaattcgggatcccaaagaagaacggtgctacgcgggtggtgtaccagccgcagaaggaacttaaaatactgcaaagggtcctgcactctgagtttctggtaaagctgaaagttcattcgtcttcaactgcctatagtgacggaagctcagttataaagaatgcgaacctgcacaagaacaaaaaattcctgttacggctggactttgtggacttcttcaaaagtatccgatcatccgacattcgtctgtttttgaacgagcggggtagtgaactctctgatcagtggaccaacgacgattctgatgttttcttgaaactggtctgcttcaaggggagactgactatgggcggagtgacaagccccgccatatccaatctcatttgctataagctagactccgcattatctgagatctgtctttccctgggggtgacttactcgcgctatgccgatgatatgtatttttccactaacgtgccaaatgtcctgtttagcatgcctaatcggcttatcaaaatccttagatctatcgattaccctcgctccctctacattaacaccgagaaaactaagcattcctcaaaaaagcgaagcatgaaaattacaggcttaaccctaaccaataacggagaagtctcactcggcagggagaagaagaggagaatcagaagccttgtcttcaactggagtaatttgacagtggacgaaaaaaagtacctccaaggctacttgagctactgcgctagcgtagagcccctgttcattaattctctgtgtgagaagtttagcagcaagattatcacgaatattcagaagtacaagtga

SEQ ID NO: 11574 - RNA, 918 nt, synthetic construct
  source 1..918: mol_type = other RNA
atgctgctggattatttatcctcaagtcttgtcctgactaatgagttcgtgtcactgatcgctaatacttctgacgagcggtacaataagttctcaatcccaaagaagaacggcgggactagagttgtctatcaaccccagaaggagctcaagctgttacaacgggtgttgcatgacgatttcctgagtaagatccctcttcactctgcctgcaccgcctactgtaggggcagttccgtgattaaaaatgcaaacatgcaccgtggtaacaagtttctgcttagactcgactttgtcaactttttcaagagcattacgtctaacgacatattcaactacctgaatgagaatcgcgacaaactcgacggccactggacaaacgaagatctcgaactgtttttgaagatcgtttgctacaaaggtcggttgaccatgggatccgttacctccccggtaatctccaatctcgtgtgctctatgcttgatagtaagctgcaggccgtctgtgtgcccctaggagtcacatatagcaggtatgcagatgacatgtacttttcaaccaacgggaagaatattttgttcgatattccatcacgagtgattggaatcatccgaactctgggctaccctaaaggcttaatactgaacacatccaagactagccattcgagtaagaagagaaaaatgtccataacagggctggtaatcacaaatgacgggaaaatttctctcggaagggataaaaaacgcgaaatccgcaccctggtgtatatgtgggacagcctcacggtgaagaaaaagaaatatttgcagggttacctgagctactgtgcttcggttgagcccctatttattaacagcctttgcgtgaaattcagctctgcggtgatcagcaaaatacagtccttcaccccttga

SEQ ID NO: 11575 - RNA, 930 nt, synthetic construct
  source 1..930: mol_type = other RNA
atgctcatcgagtatcttgctaaggtcttactgctagaagccgatttcattctgaaggtagcaaatgacgccaactcccattacggcaaattctctgttccaaagaaaggaggaggcacccgtattgtctatcagccatctaaggagctcaaggttctgcagcgactgttgcacgacaatgttctgagcaaactgcccatccaccctaacgcagtggcctaccagcagggctcttcagtctttaaacatgccagtattcacaaggctaaaagattcatgctcaagatggacttcgaagggttttttgatagcatcaaaaagtcagacgtagagcgcttcattaatgacaacaagcacttctttagtgacgattggagcaaagatgatacggacttattggtgaagatagtgtgctttaatgggagactgacaatgggggccgtgtcctcccctgtagtttctaacgcgatatgttacgagcttgatcatatcctaaatgagttctgtttgtcaaagggcattacctacacaaggtacgctgacgacatgtactttagtaccaacgaggagaacgtgttaaagcaaatcccgccctttcttcggtcaaatctcaaaaacctgaaatatcccagtaagctgtggatcaaccggaaaaagactctccacatgtcgaagaaaaataaaatgatggtgacaggtgtgactctgactaccgatggcggagtgtcccttggtagggataagaaacggatggtcaagagccttatttttaagtgggaagctctcgacgagaagaaaagactgttcttgcagggatatctgagctattgcaaatctgtggagcccctcttcataaataggctgtgcgcaaagtacagctccgaactgatcgatgaaatccaacgctatcagcctgtcgtgtccgaatga

SEQ ID NO: 11576 - RNA, 978 nt, synthetic construct
  source 1..978: mol_type = other RNA
atgcttctggaattcatcgcccagcacctgatcctgacgcccgaatatattctgacagtcgcaaatacagctagcaagaggtataaagagtattacattgacaagagagacggaactaaacgcctgatccatcatccttcgaaggagctcaaaagtatccagaggtgcatcaaccaagggatcctccctcggctccccgtgcatcattgtgctgccgcttacaaaccgggggccaagttgattgatcacgttacccggcacaagaactccaaatatctactgaggcttgactttaaggatttttttcacagactgaccgacatggacatcatgctgtgcctcgatgagtacaagcattttcttccgtctgattggaatgtgctagactccgatttgctcatcaaattggtatgtcgatatcacaagttaacaataggagctgcaacctccccaagcttgtcaaatattctctgtttcaagctggacacccagattcagaccctctgcgatcacctcggcgtcgaatacactcgctacgccgacgatatgtatttctcaaccataaagcccaatattctttatgacgtgaggtctagtgtttataatatcgtgaacagcctgaaataccccagcaacctgctgttcaacaaccggaaaaccaagcacactagcaaaaaacaccgtcgagtgatcactggcctggtggtaactcctacggcgaagatctccattggtagagataagaaaagagacattcgcagcaagatttataattggaatggtctgagtgtcgccgaaaaatactctctgaagggctacctgagttactgtaattctgttgagccatccttcataaactctttatgcgataagtacacagcgggaacaattaaccttatattgaagtacgacgaatcagctgaggccccaaagcctaaactattatcaccaatcgaggcaatcgcagcctccgcctga

SEQ ID NO: 11577 - RNA, 936 nt, synthetic construct
  source 1..936: mol_type = other RNA
atgataagagagaggatggcctcagccatcggagtgacaatcgaatacatttcaggactggccaacggcgcaagccatgcgtataaaacttaccgcatacccaagagagacggaaggctaaggaccatacatcacccatccaagcaactgaaagcgctgcagcgctggctgctccagaatgtaatagagaaccttcccgtgcacagcgcagcttttgcctacaagaaaagcacctccatgtttgacaatgcaagagcccatagcaagaacaggttcctgctgcgtattgatctgaatgactttttcccttccattaccgataccgatgtacgccggtttatccaagaccgggccaccatgttcgaaggctggacaaacggcgacatcgacgctttttgtaagattatctgcagaaatggtcacctcaccatcggagctcctaccagtcccgccatcagtaatgttctttgcttcgacctggattcagccctatcctctttggcaagtaaattaggtgtcacatatacgcgctatgctgatgatcttttcttttctacaaaccaggcgggcgttttgcgacccttgcaggaaagcgtcgagcagacagtgcgggtcgctactctcccaggaaatctggccattaatcatggcaagactcgtcacagctcgaaaaagaggttacggcgcgtgactgggatcgtgattgggagtgacgggaaagctcacgtgggccggggagtgaagagaaagattcgtggtatgattcatagattcgactctctcaacgatcaggatcgagcatctctggctggcctcatcgcttatgtcatcgggttcgaccctgccttcctgaactctcttgtgactaaatacgggcacgcagcagtttcccgagcccggtttccaacgaggccgtcaggtgtcaatgtgaactga

SEQ ID NO: 11578 - RNA, 912 nt, synthetic construct
  source 1..912: mol_type = other RNA
atgatggtggacaagatggccctggacctaggcctgacccgaaaatttgtggctaatttttcacggggagcgtcacacgcctataagttctacaccatccctaagagaaacgggggcgagaggcctatccaccatccatcgaaacaactcaaatccatgcagcgctggctgctggcatacgtgatcgaacccctcccagtacaccctgctgcaaccgcttacaggaagcatcggtccatactcgacaatgcccgtgcccacgcggcatccaagttcctgctccggatggattgcgagaacttttttcccagcatcactgaggacgatgtgctcttgtacattcagcagcgaccaagcttattcccggggtggactgccttcgacatagaggtcttctgcaaacttatctgtcgcaatggtagactgaccattggcgcccctacatctccgggaatttccaacgctctatgttatgaaatggattctgccctggccgatctgggcctcaaaaggagcgtcaactacacaaggtatgcagacgacctgttttttagtgcatcaaagcctgatgttttgcgcccacttcagagcgacatcgagcaactgataacagatcttgaacttcccggggggctcaaaatcaatccagccaagactcggcactcaagtaagcgagggagaagaagggcaacgggaattgtgctgggttctgacggccagcctcatattggtcgcgccctgaaacgcaaggttagaagcctgattcacggagtagattctttggatcccgccgctcgtcagagtttagcgggcttagtcagctacgctattggattcgaccccgatttcatgaactccttggttatcaagtatggccatgctgtgatgcagaaagtgcggttccccacatga

SEQ ID NO: 11579 - RNA, 939 nt, synthetic construct
  source 1..939: mol_type = other RNA
atgatgctggaacaaatggctaacggaatcggtatccctgtggtgtttatcgagaatttggcgaacgcagcttcctacgagtacaagacttatactattaggaaacgatccggcggtctacgcacaatccatcaccctagcaggcggctcaaggccctgcaaagatggttactggccaacgtcattcagaattttcccgtgcatctcgccgccaccgcatatgctccagggaggtccatcttcaaaaacgcctctgttcacgctactagccgatacctgctgcgcatggatttcactgatttcttcccaagtattacgcagaatgacgtacgttcgtacgtgaatacaaacacccggtttttcgagggctggaatagtaccgacgtgaacgcgttttgtaatctcatttcaagaaacggtgtgctcacaataggcgctcctaccagccccgctatcagtaatgcactttgttatgacttggacgcaaggctcgagctgttttgctccaagtctggggtcacatacacaagatatgccgatgacttattcttcagcgccgatcggtctggaacccttcgccagattgaagaaggcgttcttcgaattgtgtcagaactggagatcccgagatgcctggtcatcaatagggccaagacgagacactcttcaaaacggggaacccggagggtgaccgggattgttctaggcagtgacgggaaacctcatatcggacgcacactgaagcgtaaaataagagccagcattcaccagtttgctgccctggatgacgccggtaaggattccttggcaggacttatagctttcgccgtagggtttgatcccgacttcctgaacagcttgatcaagaagtacggcctcgcggcagtccgcatagctatgaaaaagccatcagcaaagactggcgggaaacccctgtga

SEQ ID NO: 11580 - RNA, 1026 nt, synthetic construct
  source 1..1026: mol_type = other RNA
atgactactgaacttggcctcacgtgggagttcgtggctaatctggcagggtccgcctcctacgaatacaagaagttcatcgtcagaaaaaagtctggaggcctccgcgagatcttccaccccagccgtaaactgaaggcagtgcagatttggttgctgcgaaatttactgggccaactcccggtgcacgagagtgcaaccgcctatcggaccggaatatccatatacgataacgctacaaggcataccaaaagccgatacttgctgcgcattgaccttgagaattttttcccctctattcgcgattcagatttcagtgcgtatgtggacagtaatcaggaaaacttcaaggggtggactgaaatcgacaaagccattgtgacgtccctgatgttccggaacggtgagctaacaatcggggcacccacaagtcctgcgctgtccaacgctctgtgctttcaactcgacgtgcagctctcaaagttagcaaataacaggggtctggtctataccagatatgctgacgatttgttcttctcgtctatcaaaccaggggtactgagcagcgttcttgacgaggctcaatccatcatcgacgaactcccaattcccgccactcttaaaattaacagagcgaagacacggcatagctctaaaaagggaaggaggcaggtgaccggcatcgtgttgggatcagacggaaagcctcatatctcacgaacatttaagagaagcataagaagcatggttcacaaattcgatctgttacgcgaggatcagaaggtggccttgccaggtatgatatcatttgtagccggcgaggagcccggctttctgaacagcctgattaccaaatacggctttgaactgattgcccgtgtcactaccatccagtctcttgctgaacggcagcgcatccacctacctaaggttaaaccatcccctccgaagaaagtcagggccaagtctagtacccaggttctctttgatacactgcggaatgccgggtttgatgtcgacgactga

SEQ ID NO: 11581 - RNA, 912 nt, synthetic construct
  source 1..912: mol_type = other RNA
atgatcattgaaaaaatgtcagccgagctgtcccttccactcaaatacgtggacttccttgcactgacagcttcacaccagtacaagcagtacaccatccctaaaaggacaggcggagagcgcatcattctccaccctagtcgtaaattaaaggccctccaaagatggctgctgagtaacgtaattgccgtgtggcccgtgcatcctgctgccatggcatatcggcccggggtttctatttttgataatgccaacatccacgtccagtctcagtatctgctgcggatggatatgacgaatttctttccttcaatcgaggtccgggatctggttgcttttatggcaaagcgcccaaccttatttcaagactggactgatcgtgataagagctacttcgcaaggctggtgttccggcacgggaagctcactgttggagctccaacgtcccccgcgctcagcaacgcactgtgcttcgaactagatagcgccttagccggtattacatctgctcagggggtggcttacagccgctacgccgacgacctatttttttccgccaataagaagcaggtgctgatcagtatcgaagccgaggctaaagctgtgttgggtgagatcaagattccggctaatctctctctcaaccaggccaaaaccaagcactctagcaaaaggggggcaagacgcgtcactggcatagtactgggaagtgacggcaaggcctatgtgtcacgagataccaaaagaacaatccgaactttggtgcatcagttggacacccttaaggacgaagagagaataaggctggccggccttatatcctatgtctcgggcttcgaacccgcgttcctgaacaatttgattctgaagtatggagcagacaaagtcagctccgcgaagcaacatacctga

SEQ ID NO: 11582 - RNA, 921 nt, synthetic construct
  source 1..921: mol_type = other RNA
atgtctatagttgactcagcggcagccagcttaggcgtatcgcgggacaaaatcctcacattggccgatcaggctaatcatagttacgtgacctattccattccaaaaaagtcagggggagagcgtgagattcaccatcctagcaaacccctgaaagccgtgcagcgctggtttctcagacggtggataagcctcctgcctgtgtctcctcttgctactgcttatgagccaggaagctcagtgttgaagaatgccctcgtccatgagggcgccaaatacgcagttcgcattgatctgcaagacttttattggtccatttccagcgatgacttccgcagctatttggcgaccgtgccggcaggagcagagattgattttggggacgtggaaacagtagcagcactgctgttccggcacggccgtttaacagtcggatccccaacatctccctcgctgtcaaacagaatgtgccgaaagctggatactgaatgtgaggcactagccgttaagatcgacgccagatacagtcgctatgccgatgacatgtacttctccgctacccacccagggatcctgtccgctatcgagagttcactggaatccatcttatccggtctggacacgcctggttctctacgaattaacaagagcaagacgcagcacttcagtcagaagaccgggatcttcgtgactggacttgtcatcggctcagacggtaaggtgtacctcgggcggagacgcaaaagggaaatccgagcgctgatccacaatttggaatctctggaccttgatgctaggagacggcttgccggcaaaatatctttcgctaggagcattgagcccgcttttgtcaacgccctcataaagaagtacaccgtcggcaggtttaggtctgccagtaggcccgatagcgccggctga

SEQ ID NO: 11583 - RNA, 927 nt, synthetic construct
  source 1..927: mol_type = other RNA
atgctgatcgagttgctttcacagagactcctgttaccagagaaatatatctccaacttagcagcgggtgctagccaccactacaagacctactatgtgtctaaaaggagaggcggggccaggctcattgaacatcccagcaagcaactgaaggccgtacagaggtggcttgccgcaaacataatctgccactttcctgtacacgccgccgccaccgcgtacaaaagcggagtcaatatcgccgataatgccaggaggcatgctagttcctcatttctggtgcggatagacctgcaggactttttcccttcgctgcgggctgtcgatgtgaaaagactggcggagacttcccttgtgttcgtgcctgggggcggacagtggagctctgacaatattgacgtgttcgtttgtttgagttgcaaggacgggcggctcactatcggcgcaccaacaagcccacccttgtgcaacgccctttgttatcatctggatctgcagctgacagcatttgcacagcagcgcgaactcacttactcaaggtatgctgacgacctggtgttctctgcgcgggctccggaccaattacgcggagttcccgctcaggtagccgctaccctcgaaaacctggaggtcccacgtggcctgaaaatcaacacgtccaagacatggcacgccagtcgacgaggtcgcagaaaattgacgggcgtggtgattacatcagatggaaagctgagtgtgggccgccagctaaagcgtcgattacggactcttgtttaccgccattataccctggataaaacccaaaagaagaatctcgcaagatggttggcacacgttagaagcattgagcctgaattcatcaattccctaattctcaagtacggggctgatcgggtcgtcgatgccatgcaaccccattctggttga

SEQ ID NO: 11584 - RNA, 942 nt, synthetic construct
  source 1..942: mol_type = other RNA
atgctgattgagctcctgagcaagactagcaatgtgccagaatcaaaactgttgtcacttagcctcacagcgagccgccgttataaagtttataccatccctaagagaacgggcggggatcggttgatcgagcacccttcgcgcgaactgaaggctattcaacgctggatagtgcaagctctcttcgcacgcttcccagtccatgaggccgctacagcgtacaggaaaggcactgggatcagagagaatgccgaaagacaccgccagtccaagttcaccaatcgttacgactttagtaacttctttcctagtttttcccaggacagggttctccattatgtatctgagcagagtaaaaacttggggatagacctcacccagcgagatctggacttcgtgggaaacattgtgtgccgtcatggccgcctaaccataggtgccccctcaagccctgccattagtaacgcaatgatgtttgaatttgacagccgaatgcacgaagcctctcagtctcgaggactggtgtttactcggtacgccgatgatattttcttgtcctctttcgaacccgggaagctggagggcctggaagcactgatcctgaagtccaagagggatatcccccacttacggctcaggcttaatagacagaagacagcatatctgtcaaagaagtactccaggaaagtgaccggaattgtcattacaccgcagcacacgttatccattggcagagaaagaaaacgggaggtcaaggctctcatccatcagtggatcaaggggggcatcgaacccgagcggttctactatctgaaaggtcttttcgcattcgccatcgacatcgagccacaacttgaggctaggttaatggagaagtacggaaaagagaaaattcagctgctacggtctgccgattttgactttccaatcggtctgatatga

SEQ ID NO: 11585 - RNA, 942 nt, synthetic construct
  source 1..942: mol_type = other RNA
atgctgatcgagctactctctcgtacagctaagatccccgaagctaagttagtcagtctggcagagtcagccagccgacggtacaaggtgtatacgatacccaaaaggaccggaggggaacgagttatcgaacatccttctagggaattgaaagctattcagaggtggatagtgagagcgctgatcagccggtttccactgcacgagagcgcaactgcctaccgaaagggaaccggcatccgggagaatgctgaaagacaccggaagaccaagtttaccaaccgttacgacttcgccagtttcttccctagcttctcccaagctcgggtggtacagtatattggggagcaggccaaagccgtgggcatagatctctccgagagagatttggaatttatcggcaacatcgtgtgtcggaatgggaggcttactattggagcaccctcttcgccggccattactaatgccatgatgttcgaatttgacagaagaatgcacgaggactgccacgctaagggattagtctatacgcgatacgcagatgatctgttcgtttcctctttcgaacccggtcaacttgacggcattgagaaagtgatcgtcaaaaacaagcggggcataagtcatctcaggctgaggctgaatcatcagaaaactgcctatctctccaagaaataccgccgcgttattaccggggtagtcataacacctcagcacacactgagcatcggtcgcgagcgcaagcgcgaggtgaaagccctaatccataagtggattaagggcgatatcgacccaacaaacttttactacatgaggggtttgttttcatttgccatcgatattgagccagagttcgagaaaagactcgcggaaaagtatggggcggcacgcatccgtcagcttagatcagcagaccacgacttccctattggactgatttga

SEQ ID NO: 11586 - RNA, 942 nt, synthetic construct
  source 1..942: mol_type = other RNA
atgctgatcgagttgctgtctcgcacatcgggcatcccagatgagaggctgttgcgcatatccgccacagcctcccaacagtataagttgtacaccgtgcctaaaaggaccggaggcgaaaggcttattgagcatcctagtagggaactgaaagccatccagagatgggtgatacgagcgctcattaatcggtttccggtccacgatagtgctacagcctacagaataggctcaggtattagagaaaacgccgagcgacaccggacgtctaagtatactaaccgttacgactttatgaatttcttccccagctttaggaaggagcacattagcatattcatcaaggaacagagcgacattattgggattgatctgagtgaacgagacatagatttcatcgctaatatcgtatgccgcaacggaaggctcaccattggcgctccaagcagccccgcaatcaccaatgccatgatgtttgcattcgacaagaagatgcacgacgcatgtaaatccagagatctcatttttacccggtatgctgacgatattttcatttccgcatcagaagctagaaaactattcaacatcgagaatctgatcatcgacagcaagcgtgatatccattacctcaacctgaggatcaaccataaaaagactgccatgctttcaaaaaagtaccaccggtctataactggggtggttatcactcctcaacatacgctgtccatcggacgcgaccgcaaacgcgagattaagagtttaatccacagatggatcaatggtcagattgatgcggagaaaacagagtacctaaagggccttttttcttatgctatcgacattgaaccatccttcgaaacacggttaatcgacaagtatggggcagatatcataaaatcactgagatctcccgagaatgccattaacaccaaccggagctga

SEQ ID NO: 11587 - RNA, 978 nt, synthetic construct
  source 1..978: mol_type = other RNA
atgcttattgatcaaatcgcccggtcaagtcagctagaggttgatgagctggtgcgcctagcacaaaatgcatcccagcactataagctctataatattcccaagcgaaacggtgagccccggagaattgcgcacccgagccgtgaactcaaggccatccagcgctggattgtgaaagtgatcatccagaggtttcccatacatgacgctgccacagcttacaggacaggagggggcattcgtgaaaatgcggagcggcaccgcatctccctgtacactaataggtatgactttgcaaacttcttccctagctttaaacgggaacaggtccagagttttatacaatctgagtccgagaaagtcggacttttgctctcagacgacgatgccgactttgtgggaaaaattgtgtgtcggtatgacaggttaactatcggcgcccctagtagcccttctattaccaatgccatgatgttcccattcgatcagatcctcttcgattactgcgtcaagagggatttgatatatacaagatacgccgacgatatcttcatctcggctaacaaaagcgaccagttaaacaacctggaagtgcgtatcgccgatgcgaaaaggaaaatccctcacctgagcattcgacttaacagacaaaagaccgcatacctgtccaaaaagtaccatagatctatcacgggtgttgtaataacccccgatcataaattgtccgttgggagatcacgcaagcgcgaaatccgggctctggtccaccgctggataaatggcaagctggacccaatcgaggtgtcttatatgcgaggcctgattgccttcgctagggacattgagcctaagtttgaagtagcactgcgagctaagtacggcccgcagcggatcgaggaaattctcagaagaccagacctgaccacaactcccgggtggccaaaggaggggaataacgatgacgatgtgccattctga

SEQ ID NO: 11588 - RNA, 966 nt, synthetic construct
  source 1..966: mol_type = other RNA
atgttaatccagcagatcgccaggaccactaaactcgacgaacaagacctcagacacctcgcagcgtctgccgatcgtcgctataaagtctacctgatccccaagcggggacatggccacaggaaaattgaacatcccagcagagagattaaagctttgcagaggtggatcacaaaggtgatcatcgatcggtttcctgtccatcatgcagccacagcctaccgcaaggggaacggagtgcgggaaaacgcagagcggcaccgaaccagcaaatataccaatagatatgacttcgctaacttctttccaagcttcgggcaggctcaagttgagaacttcgtgaagcaggaagccgaaaagctggggatgctgttcgacaatgacgatttacgttttgtcggcaatatagtatgccgattcggaaggctgagtatcggcgctcctagttcaccagcgctgaccaatgccatgatgttcgactttgatcgcactcttttcgattggtgtcagtccaaagagctgatatacacccgctacgccgacgacctctttatttcggctaatgagccggaccgacttaacaagttagagccacttatagctaaggccaaacgcgacgtggctcatctcacgcttagactgaacaggaggaagactgcctacttgtcaaagaaatacacccgactgataacaggtgtgattattacaagcgatcacaagttgtccattggtcgcgaaagaaagagagagatcaaagcgctggttcaccggtggctcaacggcaaactggaggccggagagatctattatatgcgggggctactggcatttgccagggatatcgagcccgagtttgaaaagaatctccgttctaagtacggtgatgcagctattaatgaagtgctaagacacccctccctgggcaaggcaccagatcctgagttccagttgcctccgtggctgtga

SEQ ID NO: 11589 - RNA, 930 nt, synthetic construct
  source 1..930: mol_type = other RNA
atgctgattgagatgctggctcgcactacttcatttgacctcgatcggctctctcggattagtatgacagcctcccgccggtataagatttacaccattccaaaacgcacaggcggggttcgcacaattgagcacccctcgcgcgagctgaaggccatccaacggtggatcataaaagcgctttttgccaagttccccgtccatgaatccgctaccgcatatagaaaagggtttggaatcagagaaaatgccctgaggcacaagcagactagctacaccaatcgttacgatttcgctgacttctttccttcttttcaacagtcctccgtggagaaattcttagccttacaggccaagatcctacagatagatctgagccctctggatatcagattcgtaggtaacgtggtttgcagaaatcagcgacttaccataggagccccctcaagcccggcaattactaacgccatgatgttcaagtttgacgaaaatcttaacaacagttgtgaatctgacaaactcatctacaccaggtacgctgatgatatttttgttagcagcaatgaacctaacaaactctttgatgtcgaagtgcggattgagaacgcgcatagagggatagactatctgagcctcgagttgaagaatgagaagacagcgatcttgtctcgcaaatacgcaaggaaggtggctggagtcgtgattacgcctacccataacctgagtatcggtagagagaggaaacgagagatcaaagcactggtgcactcctggtcagtaggcgctcttgagaaggacaggttcgcctacctgcgaggcttgttggcattcgcccgtgacatcgaaccagatttcgaaaggagactgcgggctaagtatggcgaccccacgatcgacaggctactcttcgccccagacctgtatgcatga

SEQ ID NO: 11590 - RNA, 948 nt, synthetic construct
  source 1..948: mol_type = other RNA
atgctcgtggagctgttagttcgggcctcaaaaatatctgaggctaagctgacctcattagccgccaccgcctccaatagatataaagtgtacgagattcctaagcgttcgggcggaaaacgaaccatagaacacccatccaaggaattgaaggccatccaaaggtggatagctaaggccgtctttgctaggttccccattcatagcggtgccacagcataccgccagggattcggcatcagagaaaatgcggagcgccatagacagagtaaattcaccaatcggtatgatttctccaacttttttccatccttcactcaggcggaggtgcagaacttccttcgatccagatctgcagcagtgggattggttctaacagaaaaagacattgggttcgtggggaacattgtgtgtcgcaacggcagactgacgattggaagccccacttctcccatcatcacaaacacaatgatgtttgacttcgatgtaaccctggataatttttgcgctgagcggggcctcatctttactcggtacgcagacgatatgtttgtcagcagtaataaggaaggccagctgttctccgtggaggatgggattcacctggcgatgaattctatccctaacctcaacttggaagtgaatcacaagaaaaccgccctcctgagcaaaaagtacctgcgccgtgtcacgggggtagttatcactagcgatcataggctaagcattggtcggcataggaagcgagagataaaagcacttattcacaagtggcgcacagggacccttgaggtcgagaaactgcactatatgcggggtctggtggctttcgctagggacgtggaaccgaattttgagcagaggctcagactgaagtatggcgaccaagccatcgacgaaatcgtccactcaagtgacctttcaatcgtttttgacaagaacacttga

SEQ ID NO: 11591 - RNA, 936 nt, synthetic construct
  source 1..936: mol_type = other RNA
atgttgctggaacgtctcgagaagcatacaggcctgccaaggtccctcttagagcgatacgctgaaaccgcctccaaacggtatcgggtttatacagtggagaaaagaaatggagacaggagaacaatagagcatcctagtagagagattaaggcgatacagaggtggctgatcagagctctcatcgggaacatgcccgttcacgaggcctctaccgcctactccaagggcgcttcaatccggaaaaacgccgagcgccacgtgagatcacgttataccgtcaggttggatttcgaaggttttttcccgtctttcggcggagctgacgtaatcgcctatctgaaaaagacgcacgatgatcccattatggtcctgtcagctgaggacttgagctttattcgtcgcatcgtgtgccgacacgatgcccttaccataggcgcccctactagccccgggctgactaatgccatgatgttcgagtttgatagtgctctcgccgactggtgtgcagcacgagctctgatctatacgcgctacgccgacgacctgtttatctctgctagcgcccctggagcacttgctggcgtagaagccaaggccgccgagttggcagcggcatttccatacgccaagttagcgctgaacagggaaaaaactgcacatctgagccgcaaatataggcggtcaattacaggacttgtgatcaccccagaacagacactcagcattggtcgcgacaagaagattcgactcaaatcggatgtgtacgcatacagcaaggggaatctacagtccgaacaacggtcccgcaccgcgggtctaatcgcattcgtgagggacgtcgagcccgctttctacgagactctgttaagaaagtacgggagagaaactattgaagggctgcagaaaggcctgcggtctagtcttaagggatga

SEQ ID NO: 11592 - RNA, 909 nt, synthetic construct
  source 1..909: mol_type = other RNA
atgttgttggatgagctctctgcggaaaccgggttgcgacccgatcgcctggagtattatgccgattctgcatccagacggtactactccttcaccattaaaaagagaaacggcgacccccgttggatcagacaccctgcaaagcccctgaagtcgctccagaggtggctgaacagcaacgttatatctaggatgcgggtccatcagtgtgcgatggcctaccagccaggaagcaatatcaggagcaacgcattaagacacgccagttccaatttcacagtgaggattgactttgaagatttcttcccttcgtttaaacgatccggtattgtgaagtttctgaaggaccaggaaaaattcggcctgaagctcggaaggcgggatatcacctttttgtctaagattgtgacacgttttgatgagctgacgattggcgcaccttcaagcccgctcctaactaatgcaatgatgtatagcttcgataaagaagtctcagaattttgcgagcgtaaggggctgacctacactcgctacgccgacgacatctatatctcttccgttgctcccaatggcctggatggcgttcttcaacgggtggccgctgctgccaaaaagtttccttacgccaagctccgaataaactcctcaaagaccagttatacaagcaggagataccggcgcatgataactggattagtgatcactccagaccataaaatcagcctgggtcgcaagagaaaacgggagatccacagtctggtacatatggccagtgtggacaaactggaccttgagaaactctcttacctgcaagggatgctagctttcaccaaggacgtcgaaccatcattcttcgagacattagtagctaagtatggacgcaaaacggtggagcgcattcttctttga

SEQ ID NO: 11593 - RNA, 909 nt, synthetic construct
  source 1..909: mol_type = other RNA
atgctaatcgactggttgtgtgccgagacgggattgcagagagaaagactgattgcttttgcagcgtctgcctctaagcgctacttcgtttttcggattaagaagcgggatggttccgaacggcagatcgcccaccccgcaaagccactaaaaggcattcagagatggctgaactcgcgcgtgattaaatcctggaaagtgcatgatgctgctacagcctaccagcgtggagcctctatcaggcttaatgcactgcgccacgccgaaacaaactttacactccgagtagactttaaggatttcttcccctcattccaagccaaggggatagagaaatttatctcagaccagcccaacgggggtaagaaatttgacaaggtggacctgaagttcatcactgatataatcacccggaatggacgcctcactattggctcacctagcagtccgtttatcacaaacgccatgatgtattcctttgacgaggaagtgagcttattctgcgacgctagcggattggtgtataccagatacgcggatgacatttttgtttcaagtcacaatccaggcaatctggctcaagcgtatgacttcctgtgcagcgctgcaaataagttcccttacgccaatctttccatcaatcataacaaaaccaagttcctgagccgtaagtataggaggactatcaccgggatagtgatcacctctgataggaagatttctattggcaggcctcgaaaaaaggaaatcaagagtctcattaacagctacatctacggcaaacttgatgatgagaaagagatgtatctcaaaggcatggtcagtttcgcatgtgatgccgacaacgtcttctttctgtccctggagaagaagtacggtaaaaaagtcatggggagattaatagggtga

SEQ ID NO: 11594 - RNA, 912 nt, synthetic construct
  source 1..912: mol_type = other RNA
atgttgcttgagcgcctgaggaaacaatcaggcctgaccaccgctcaaatcgaaatgtatgccgccacggcaagtaagaggtacaagatctacacaatcaaaaagaagaacgggggagataggaccatcgaacacccatctcgcgctctgaaatcactgcagcggtgggtcaataaaagcatcattagcaaactgccgacgcacgtgtctgccaccgcatacgccaaaggttgttccatccgtaagaacgcccagcaccacctaggctctatttttacactccacgtcgacttcaagtcctttttccccagtttcaaaagcgatgggataagcgatttctttagaattaagtccaaggagttgggaatcgagttgtccgaagaggacgtgaactttattactaggatagtgtgccggaataattgtcttacaatcggtgctcctacctcacccagcatcactaatgccatcatgttcgagtttgacgacgtagttaacgagtggtgcaaccagcgccgactagtttatacccgctatgccgacgatctctatatctcagcgttcgagcctgggatgctgtctgatgtcatcccatttcttattagtgcactcgacaaacagagattcgtgagactgaagataaaccatgataagactgcatttttgagcaaaaagtaccggcgagctattacaggaataattattacaaccgagggcaagctctctattggcttaaagcgtaagaagctcattaaaagtatggtgctggatttcaagtacgggagattacccatggaggacaaatcgaggcttcatggactgataagctttgctctggacatcgaacctgcgttccatgaaacactgatccggaaatacggcgaaaatactatcaagtccatttccacttga

SEQ ID NO: 11595 - RNA, 930 nt, synthetic construct
  source 1..930: mol_type = other RNA
atgctcctggagaggctggagcgtcagagcaggctcagtagagggcagctggagcaattcgccataactgcaagcaagagatacaagatctacaatatcccaaagcggaatggcggggagcgccaaatagaacaaccttcccgggccatcaaggctattcagcgctggctgaacttgaacttgattagaaaattccctatccacatatcttccacggcatacaataaaggttccagtatcctgcgcaacgccgagtttcacaagaacacaaattttaccgtccgaattgacttcgaagattattttccatccttccgcgacaatggaatagaacgcttccttcaggaaaaccgatctgtgattggtgatcccctagacgacaatgacatctcattcatccggaacattgtctgtcggcatggcagactgaccatcggcgctcccagttctcccctactgacaaacgcgatcatgttccagttcgacgggatagtgtatcagttttgccagtctaggggtttggtgtacacccggtatgcggatgacattttcatctcagccactcgcgcaaacagcctcggcgatgtggcagattttgtcgctagcgtttcgacgggttacccgtacgctaatttaaccatcaattgccggaagacagtgtttctgtccaaaaaatataggcgagtggtcaccgggatggtgattacaccccaggggtcagtaagcgtgggaaggaacttaaaagatgaagtgagaagcggcgtttacaagtttaagaacggaatcatcgatggagacgagattgcccgtattagaggcctcgtagcctatatttacggcgttgagccatcatttcttggaatcctggaaaggaagtatggagacgagactattggcagactccttggcgggaggcctctggtcaaatga

SEQ ID NO: 11596 - RNA, 939 nt, synthetic construct
  source 1..939: mol_type = other RNA
atgctgttggagaagctgaaagatcatagcgggctgagcgagcgccaacttgatagatacgcagcgacagctagcaatcgatacaaggtttataccatacccaagaaaccctttggtgtgagaaccatcgaacacccctcacgggagattaaagccattcagcggtggttaaacagtaatatcatccgcaaactcccagtccattcatccgccaccgcctaccacagaggagcatctataaaagaaaatgcaatccggcacgccggctccaactttacattgcatgtagacttccagaacttttttccaagttttcatggacaccacatcgagaagtttctcaggtggtggtctgaggagaacaagattaatctgaacgataacgacatcagtttcttcaggaagattgtgtgtagaaataatgctctgacgattggagctccaagctcgcctattttgaccaatgccatgatgttcgactttgatggaacagtggccctctggtgcacatctaacggctttatttatacacgctatgcggacgacatcttcatctcatccgtcttacctgggaaactggggaatgctctggaattccttaaggagacttgcccgagttttccctatgctaacctgtcaatcaaccacaataagactgcattcctatctaggcgctacaaacgatctataactggcctgatcattactcctgagcggaaaatcagcattggcagggccaaaaaggaagagattaagagcgaagtgtacaagttctccaagggcgaactcaccagcgaggagatcggaaggctacgtggcaaaatagccttcactcgtgatgttgaaccttccttctacgacagactgctcaacaagtacgggtattccacgatccataccttggagttcctgggggaaggtgatcttcttggtaagtga

SEQ ID NO: 11597 - RNA, 933 nt, synthetic construct
  source 1..933: mol_type = other RNA
atgttacgcgaagtgctcgcagagaaaagtggaatttcccccaagagattacagtttatccaagaaaatgccagccggatgtataaggtctatccaatctccaaacgtgacggtaccgacagaattatatcccagcctacaccagagctgaaggccctgcagaggtggctaagtagggggatttttcagcggttgccggtgtctagttgcgccatggcgtacaagaagggtgcttccatcagagaaaatgccaaggcacacgtgaaaacatcattcaccctccatcttgattttgaggatttcttcccttcgttttctaccgatcatatcatccgatacctctccgaaaatactaaactgaactcagatgacatccaattctgtagcgacgtagtctgcagacacggacgcctgaccatcggggctccttcgtctccagctgtcacaaacgccttgatgcactccttcgacctgcaggtagattcttggtgcagcggccggggcttggtgtatacgcgttacgcagatgacattaacatctcatcagcgggtagcggcagtctcggggatgtcgaaggcttcatatccgcaacggccaaggactttaaatacgctagcttgactataaacggaaagaagaccgcatatctgagtaagaaataccgccggtctattactggtatcaatgttactcccgaaggatgtatatccattggccgcgctaggaagagggagattaaatcactggttcacagcttcaagcttggcagccttgagccagagctgctgtggaagctgggagggctaatcgcttttgcccatgacgtggagcccgacttcgtggtttctctgaaaaaaaaatacggaagcgccacagtggaggccattctccaccagaaaacccctaggggccttcgagggcccaaggagtga

SEQ ID NO: 11598 - RNA, 930 nt, synthetic construct
  source 1..930: mol_type = other RNA
atgctcagggaagtgcttgctgcaaaatccggtatgtctctctccaggattgaacggctgcagtgcaacgccagtaagatgtacaaaacatatccgatccctaaaagggatggctcagatcgcatgatttcacagcctacacctgagctgaaggcagtgcaacggtggctagcgcgcggcatatttcaacgtctgcccgttagtgcctgcgccacagcttataagaaaggcgcttcaatcaggaagaacgcagaagcccatgtagccagcagcttcactattcatcttgatttcaaagacttcttcccctcattctcccacggccacgtctctcgattcttaagtgaagctactcggctgagccaggaggacatcctattttgtagcgatattgtctcccgacatggatgcttgaccataggcgcccctagttctccaagcgttaccaatgcattgatgtattcttttgacgtgtcagtagagagatggtgcatgaagcggggtttgatctacacccgttacgctgacgacatcaatatatcgagcaaatgtccaggcgcacttagggaggttgaagactttgtgcgcgacgcctccggggcttttgagtatgcaaatctggtgattaacgagagaaagaccgcctacctgtccagaaagtacaggcgatccattaccggggttaatgtgacacccgaagggagactgagcattgggagagatagaaagcgcgagatcaagagtttagtgcaccagtgtgtcatgggaactctccaggtcgacatgctgtggcggctcggtggactcatcgccttttcttctgatgtggagccccacttcgtcgatgctctgaaaaacaagtacggagccgacgtgatcgagaagatcctgcaccagaaaacgccacgcggagcgtgggtggcggattga

SEQ ID NO: 11599 - RNA, 921 nt, synthetic construct
  source 1..921: mol_type = other RNA
atgctccgcgacgccctgtccaatctggctggaataccaatttctaggatttctcgtattcaggagaatgctagcaagctgtataaggtctacgaaattccaaagaacaacggaaaaaagagaactatttcccagccgacccccgaactgaaggccatccagcggtggctaatacgaaatgtattcgccaaacttccagtgtcaacttacgccaccgcatacaaaaaaggcgcgtcgatcagactgaatgccgagttccatcgaaattcactttttaccttgcacatggatttcgagaacttcttcccctcattcactgagaacaacgtgtttgattttctgaaggagaacacgaatctgaatcaagacgatatatccttctgtgtggacttatgctgcaggtttggtgcactgaccgttggaagtcctagctcccctgctctgacaaatgcgatgatgtacgcctttgaccaacagatcagcgattggtgtgcagaacgcaaattagtctacacccgctatgctgacgatattaacattagcagctcatctcctgatgcactcggcgacgccgaggggttcataaaagacgcttctaaggagttcaagtttggcaacctcaaagtaaacgaagtcaagactagttacctcagcaagaagtatagacgttccatcaccgggctaaacatcacgccacaaggtagtatcagtatcgggcgggatagaaaaagggagatcaagtccctcgtgtataagtacaaagaggagttgctgcccaaagaactgttttggcaggtgggagggttgatcgcctttgcaaatgacgtggagcctacattcgttcggtctttgattgaaaaatatggccagaagacaatcgaagaacttcttcaccagcggacacccaggggcctcaagtga

SEQ ID NO: 11600 - RNA, 915 nt, synthetic construct
  source 1..915: mol_type = other RNA
atgttaatcgagacactgtctaaacagagcggcgttactattgaaaatctgaagtggcttgccgaaacagcctccaagagatacaagacctacgagatccctaagcgcacgggtggggtgagaaccatccaccatccaagtcgaggcctgaaggggattcaaaggtgggtatcaaagttcctgctagctaggctccccgtgcataccgcggcccaagcttatgtgcgtggcgcatctatacggaaaaatgctgagctgcacgcgggctccaaattcaccctacggattgactttgcgaatttctttcccagctttagctcagagcacgtggaggtctttctggcaactgctgaaagggatagatctattggtctgaccgatcaagacatcagtttcgtgagtagaattgtgtctcgacacggccagctgacaatcggggcaccatcgagccccattctgaccaatgccatgatgcattttttcgatggacagatcgccgaatttgcagaacgacagaacttgacctatactaggtacgcagatgacttgttcttctcctcaagcaagcctgataaccttactgatgccctcgagatagtgcagcaggtatccgttgcttatccttatgccaacctccgggttaaccccgacaagacagctttcttaagtcgtcgctacagcagacgcgtcacaggtcttgtcattacgactgacgggaaagtctccatcggacgggagcgcaaacgcatggtcaaagcccaggtgcacaaattcctccagggacagctggacatatttgaagtgccgaagttgaggggctacctcgccttcgtgcaagacgttgagccagaattttgggagggcctgaaacggaagtacggggccgacgctatgatcaccgtaacaggaggatga

SEQ ID NO: 11601 - RNA, 936 nt, synthetic construct
  source 1..936: mol_type = other RNA
atgcttatcgaggccctcattaagcagagcggaatgaatgatgtatccttggagtggctcgcacttacagcgagcaagcgctataagacctacgatatacctaagagaaacggtgccacccgaacaatccaccacccttccaaatcaattaagagcatacagagatgggtcagtaagttccttttgcgtcggctacccgtgcacgttgctgctcaggcttatgtcagaggcgcctccatcaggaaaaacgcagagttacacgccggaagtaagtttacgttaagaatcgacttttcggatttctttccttccttctctcgcgaacatgtggaactgttcctggcggccgtggaacgagatcgaagtattggcctgaccaaccgcgacatctcttttctgagccgcattgtgtctcgtcatgggcagctgactataggcgcaccatcatccccaattcttaccaatgcaatgatgcacttttttgactcccagattgccgagttcgcagacaggaaaaacttgatctatactagatacgctgatgatctgttctttagtagcaataagcccgacaacctcactgatgttctcgccattgtgcagcaagtctctgctacttatccctacgctaatctgaggatcaaccccgataagaccgtgttcctgtctcggaggtacagcaggcgggtcacgggactggtgctgacaaccgacggcaaggtcagcatcggtagggcccggaaacgcgccgtgaaagcccaagttcataaactgatccagggagaattcgacaattttgagttgccaacactccgggggtacctcgctttcatacaagacgtggagccggaattttgggagtcactaaaatcaaagtacggcgcggacgcaatgttaacagtagttgggaaacagcatttctcgaatctgctgtga

SEQ ID NO: 11602 - RNA, 936 nt, synthetic construct
  source 1..936: mol_type = other RNA
atgttgaaagagacacttagtaagcaaagtggcgtcacaatagagaatctcgagtggcttgcggaaaccgccagcaaaagatacaagacatatgaaatcccaaagaggaacggtgggctgaggaccattcatcacccctctagaggtttgaaaggcattcaacgttgggtgtcaaaattcctcttacgtaggctgccagtgcatgttgcagcccaggcttatgttcggggcgcctcaatccggaagaacgccggactccacgcaaactctaagttcactctccgaattgatttcgcggacttctttcctagcttttcaaaagagcacgtggaggttttcttagcagccgtagagcgcgaacgacagatcggcctcgtacagcaggacatctcctttgtgagcagaatcgtgtctcgccatgggcggttgaccattggagccccgtctagccctatgttaacgaatgcgatgatgcacctgtttgatagtcaaatctctgaattcgccgagaggcaaaagctaatatacagcagatacgctgacgatctgttttttagttccaacggacccgataacctttccgacgtcgttgctaccgtgcgtcagattgcagattcgtacccttatgctaatctgcggctgaatccagacaagaccgtgtttctgtccagacggtatagccgccgcgtcactgggttggtcctgacgaccgacggcaaagtctccattgggcgagaaaggaaaagggctgtgaaggctcaggtgtataaattcatccagggggagctggacaacttcgaagtgcccacactgcgcggttacctggccttcatacaggacgtggaacccgagttctgggagtcactaaatcggaagtacggagccgatactatgctcactgtaagaggcaagcagcactttgcagccctgctttga

SEQ ID NO: 11603 - RNA, 939 nt, synthetic construct
  source 1..939: mol_type = other RNA
atgctggttgaggccctgcagaaacaaagcgggctacctacctctgtgatcatgaggatcgccgaaaccgcctcaaagagatacaaggcttataagatcccaaaaagatccggcggatggcgggatattagccatcctagcagggagctgaaggcaattcagcgatggatcaatcgtaccctctttatgaagctccccatccatgaaagtgccacggcttacgccaaggggtcaggtatcagaaggaacgctgaaatccacgcctggtcgtcctatacacttagattagacttcgagaatttcttcccctcttttgacattcacggaattagtgagttcatcgccgcccaaagcgatgagagggaatggggcctaactaaacaggacgtgctgttcgtggggatggtagttactcggtatggaagaatgactatcggcgcaccctcctcaccaattcttacaaacgcaatgatgtacatgctcgattccgagttggctgaaatcagtgaaaagcgtaagttgagctacacccgatacgcggacgacatttttctgtccgcctatgctccggatagccttgctgatatgattcccatagcaaaggagattgtgggccgccagaaatttgttaggctgaaatttgcagatgaaaagaccgcgcatctgtctaagcggtataaacgctctataacagggctggtcgtcaccccagatcagaaaatttcaatcggtcgggagcgcaaaaggactataaagagcttagtattccggttcatcaacggagagctcggtgacgtggaactgatgcgattgtccgggacgatagcattcgtgtacgatgtggagcgcgctttttatgacagtctcgtccgcaagtacggcgaggacgtcattggcaaaatccagaaacctcacctggcggacgccgagtctacatga

SEQ ID NO: 11604 - RNA, 975 nt, synthetic construct
  source 1..975: mol_type = other RNA
atgttacttgagaaactgcagattcagtccaaccagtctctagagcgtctggaaaggtttgccacctctgcaagcaagcgctacaaagtgttccaaattccaaaacgcagtggcggctttcgcattatcgagcagcccagcaaagaaatcaaggccatccaacggtggctgattgaggcgctgtttgatgagttccccatacaccattcggccacagcctatatccgagggaagaatatccggagtaatgctgaggtccatgctgaaagtaattttaccctgaagctggatttcgagaacttctttccgtcattcacggaaaggcacctgataaaattcttaagaaactaccctctcatcgagaagaaacagatcaacgacagggacatcaactttatttcacgcatatgcctcagaaacgggcggctcaccattggcgcgccatcatcacccaccataaccaatgctatgatgtatcagtttgatacacttatgtccgcccggtgtgcagaagataatttcagctatacaagatacgccgacgacgtgttcgtcagctcccgaagttacatcaacgttggagagattattctgttcgtagagaatttgctttctaaatacgagtacgcatccctccgactgaataaagataagacagccatcctgtctagaaaaggcaggagatctatcactggttgcgtgataactcctcagaggggcatctcgatcggacggaagctcaagaaaagcattaagcacaagatctatgaatccatcaacgggcgtttaagctctctggaagctactaagttgatgggttatctcggatttctgaaggatattgaacccaactatttcgagtccctgaagaaaaaatacggagctgacgcaattaagacgatcaccagcgggaattacgatgaaattaagttggtgccactaatattggacgaccttgacgacactcctttttga

SEQ ID NO: 11605 - RNA, 924 nt, synthetic construct
  source 1..924: mol_type = other RNA
atgattctcgagtggattgctaaagaaaccggtgtgggagcggctcagatcgctacaatcgtgcggtctgctaacaacaggtactgtacttatagcattcctaaacgcgacgggactccgcgccagatttcacagccctccaagaagttgaagtttgtccagagatggcttgcaaagagagtgttcgtgaatctgccagtgcacaagagtgcgacggcatacctgcctggcgtggggatcaggaaaaatgccctcgagcatgcctcgtctaaatatctgctaaagatggatatgtcagattttttcccttccatccgggaggaagacattgttaagctcatgctgttgaacagtgaaaagtgggccgggtttgaagatgccgacgctaacttcatcggaaaagcagttagctaccgaggtgcgctcactattggcgccccatcctcaccagtacttagcaatgccatcctgtttgagttcgacgaactggtccacgagtactgcataaacaatgagctggtatacagtcggtacgccgatgacatcagcatttcttctaagggacgcattgatcttcacgcagtcagcggggttgtggaagagtttgtccaaaaactggagacacccaaactgaatataaaccgtgagaagaccgtgattgtaagtaagaagcatcagagattcataacaggcctgaatttgacatctgacggaaatgtctccgttggccgattaaggaaacgcgaaatcaggaccctgatcttcaaattcaagtccgccgaccttgatttttcagagatagggtatctaaaaggttggatggcatacctcaacgccgtggaacccagctttgtggagagagctcgtttaaagtatggcgaccggaccgtgcaaaaaatcttcgagtatgatgtcgacggctga

SEQ ID NO: 11606 - RNA, 981 nt, synthetic construct
  source 1..981: mol_type = other RNA
atgaactacgcagagcttctacaggcttggtgccgcctgttgagagctacaccccaggacgtaacagtcttgttaatgaggggaccttaccagtataagcattatcagattgagaaaaggactggcggcaagcgggatatattccacccaacccccaacctgaaggccgtgcagcgatggctggtaaatgagcacttacaaaccctgcctgtgcacgacagtgtgtactcctaccgggtgggtagagggatcaggcagcacgcggatgcacatgtgcactcaaactttctactgaggctggatttcaaggacttctttccctctattacacaggactggcttctgcaatttctgttgcagagtgcccatgaaggaagcctcagccttgatgatagggccattgcagcatgtatgcgggtgctgtgcagattcaataaatttgatggctctctcgccctgtccattggagctccaagctcacctgccatcagcaacgcaatcctttttcctgctgacgtggacgcgcactccagatgtgccgagctgggctgtctctacacccgttatgcagatgacatctatgtgagctcacgcgaaaagaatgtgctcgtggaggccgaaagacaagtcaaggccgcgttttcgcaacatgccccgcgcttgcagttcaacgctgacaagcgaatcaatgtctctaagaaagccaaacgagtggtcacgggccttaccctgacacccgaccgcaagctctccatcggtagagagttgaaacggagtataaaaactctcgtttacctccacgtctccgggaaactggatccagttgaacgcccgcgtttatgcggactcgtctcatatgttagggacgttgaaccagctttctacaactctctggtgctgaagttcgggcatgtaactatggaagagctgttccggtgcggtcctggcgaggctctttatctgcccaatgaggggctatga

SEQ ID NO: 11607 - RNA, 951 nt, synthetic construct
  source 1..951: mol_type = other RNA
atgacgaggaatgatctcatatttgccctggcaaaattgctgagggcatcacatgaggacattcagaagctcattttgacagccccctaccagtacaagcactacaagattaagaagcggaccggagggtatcgcgacatctatcatcctactgcatctctgaaagcggtgcagcgatggctggtttcaaattgttttcttcacctcatgatccatccctcggtcttcagctacagagaaggcgtcggaattcgccagcacgcgagccagcacctgcactcaaattttctgttacggattgacttcaaagattttttcccctctattgatcaaagctgggtcctggatttcttctatcaggaggttaacgccggccgcctccctatccaactcgagacagtccctaccctggccaggcttgtatgtaggttcgcaaaagaagagaaaaccatggccctatctataggggccccgtccagcccccttttgagtaacgctatgcttttcgccttagaccaggacatggatgagtattgccgtgctcacgactgcgtatacacgcgatacgcagacgatatttacattagcaccaaacacccaaacatactatccggcatcagagatctgctgacctcaaagatcctcgaattcacacctaaactcgtgatcaacgacaaaaaaactatcaacgtctccaagaagatcaaacgggtggtgactggtttgattctcactccagatcgccaggtgagtcttgggcgtaatttaaagaggtctatcaagaccaagatctatttgtttacacatggtcaactaccagtggacgaagttgaacatctgagaggactggtggcttacgctagtgacgctgaggccgtgttttatgatgccctgatccacaagtttggctccgcttccatagacagactgctgaatcggaagaagaactga

SEQ ID NO: 11608 - RNA, 966 nt, synthetic construct
  source 1..966: mol_type = other RNA
atgaactatagtgacctgctgtcttctgccgccaagctgctaaggacatccagcatcgaggccgagcggattatcattacagctccttacaggtacaagcactacaaaatcgaaaagcgaaatgggggtcagcgggacattcatcatcctactcccgcattaaaagccatccagcggtggctcgtatccaccccgcttgcgaatttacccgtgcacgattgtgtctactcatatcgcaagggcagaaacatcgcaatgcacgccgcaatgcacgttgagtccaactacattacccgtttcgacttcagcgattttttccccagcatcaccgctaccaccataaggaggtttttattggaagagactatgaaagggacaatagatcttgacacagccgccatcaatgcaattgtgagactcgtttgccgagccgaggacaaaagcggaaagctggtactgtcaataggagcccccagttctcctcatctcagtaatgcagtgttgcatgattttgaccacgtgatggagtcctctgcgcgtattgccgggggcatgtatacccgctacgccgacgatatttatgtttctggccgtactaaagaaacggtcgcattgctggagaaggcttttatccgggaaacatcaaagctgctaccatatctcaagatcaacgagagaaaaacgcagagattgtctcggaagcgccgcatggctgtgactggcatcaacgtgacaccacaaagaaaactgtcggtcggccgggatcttaagaggagcctgaaaaccaaggtccacctggctctcctggggcagatagcgccagaggagctgtccgctctgcgaggtatgattgctcatgtcgcaagcgtggaacctgctttcatggactcgctcagtaagaaatttggagtggaacgccttgaatccttccttactagcagagaaatcgaggaggtgtcaaggtga

SEQ ID NO: 11609 - RNA, 945 nt, synthetic construct
  source 1..945: mol_type = other RNA
atgaagaatgcagacttggagcgggccctctctgcttacctccggatcaaacctccagacctgaggcagatcgttaggacggccccttatcgctacaaacactaccagattgacaagcgcaacggcggaaaaagggacatatttcacccgtctcccgagttgaaagccatccagagatggcttgtggaaaatgtgctgcttaatatcccggtgagccccagcgccatgggctatgagaaaggctgtagtattcgcgatcatgcacggcagcacctgcagtcaaactactttaccaagctggatttctccaacttcttccccagcatacaattggattggattactcgttttcttctggaaagcctgcccgactatgataacgaggctattcatagtatcgctcgcttggcttgccgctgggcagatgctggcatgcccttagcactgagcattggagccccttcctctccagccctgagtaatcggatcatgttcgctctcgataccgccctgtcggaagtggcctcagccaacgatgtcacttattccagatacgctgatgacatttacttttcctgcgctaaggccaatactctgcatgatctcgaaagagaggcgcggaaaatcatcatcgagatgacccctgcactgcgattgaacgagcaaaaaacattacacacaagcaggaagcggaaggtactaatctctggcgtcggtataacatccaccagaaaactgtccatcggtcgaaacttaaagaggagtattcgaacacaggttttcctctggtcaatgggatcactgccagcggaaaacttccctaagcttagagggctgctgaattttgcgaatgacattgagccagagtttctcgcctctctccacagaaagttcggggacgacctaataaagaggtttcttgcaggggacttcgaacgtaattga

SEQ ID NO: 11610 - RNA, 951 nt, synthetic construct
  source 1..951: mol_type = other RNA
atgaataggaatcagctcatagccgagctggccgctcagttacgagtgtcccccgctaacattgaacgcgtcatagcaagcgcccataggaggtataagcggtacactctcattaagaggacaggcggatcacgggaaatctttcacccaactcctgagctgaaagctatccagcggtggttgattaaaaacgtattcgaccaacttccgacccaccctagtgtgcatgcatatgagccaaattgtagcattgcgcgacacgcggctgctcatcgtcgctcaaatttcttcctgcgtatggacttttctgattttttcccaagcatctccgcccagtgggtgaaaaacttcctgttggagtctatccaggccggactcgtagatcttgacaaggattcggtggatagtatctgcagactggtctgcaggcgggggagactggaggtggaaagtaaactgacgatcggttccccttcttcgccgagcataagcaatcggatcctgtacacattcgatagtaagctattcgaagcctgtcacgagcgtggcgttatttacactaggtatgccgacgacatttacttttccacccgagaacccgacgtgttacatgagattgaacagatagttaccgacctcgtcagggccacagtgcccgaattgtctttgaaccgaaagaaaacccaaagagctagccgcaagcgccgggtcctgattactggtcttgtgatcacctctgatagaaaaatctcagttggaagagatctgaagagaagcgtgcgcacgcaaattcacctgtggaagcagggcaacctgccactggaggacatccctagactccgcgggcttgtctcttttatcgcaggcacagagcccgagtttctatcctccatctcaaggaagtatggggcagagtccatcgaacggttactcaaccccgcaattaattga

SEQ ID NO: 11611 - RNA, 981 nt, synthetic construct
  source 1..981: mol_type = other RNA
atgatgaataatgataacctgatcacggcctggagtggattattgcggtctagttccgaagacgtgatacggttcatatttacagctccgcaccgctataagcattacaagatcccaaagaagactggagggttcagagacatttaccatccaactcctgaactcaaagctgttcagcgttggcttaacgcgaatatcttctcctcactgaggattcacgatgctgtctattcctaccgcaacgggagatctattaaagaccacgcatctatacacctcagttcgaattactttctgcggttagacttcaaagacttcttcccctctatcgaactgtcctgggtcgaggagtttctccgctttaactctaacaacaacatcattccttgcgacctgacaacaattagcaccatcagccacgtggtttgtaggtatagcgagaaagagaaaactaatgcattgagcattggcgcccctacaagccccatcttaagtaatgccattctatacgacctggatcaggccgtgtccagattgtgctccgagaatgatgtgatctatagcagatatgccgatgatatctatctctcgaccaaacataaaaactccctggacaggatcggttcagatgtgctggagcttgttggcaagctggtacccatgctgcagataaaccaaaagaagaccatctacagctctaggaaacgcaaagtcaacataaccggcctgaacatttcaacggaacgaaatgtctctgtgggtagggaactgaagagatcagtcaagactgaattccatctttggtgtatcggcaagcttccaaatgaaaagctgacccgactacgtggcatgatctcctacgtgaagggggtggagcctagtttctttgacgctttgcggaataaatttggagcagagaagatggaatcatttctcagcctcaacattgccccaattgagtttgtagagatccccttctga

SEQ ID NO: 11612 - RNA, 969 nt, synthetic construct
  source 1..969: mol_type = other RNA
atgaacaagaatgaactccttattaagttggccacccatcttgacatattgccggaagaggtggagcacattctcaagtcagctccctatagatacaagcattatacactcaagaagagaggaggaggggcccgggacatttaccatcctacccctgaaatgaaagcgatacaaacttggctggtggcgaacatttttgcagctctccctgttcacgagtccgtttactcttaccgaagcggcctgtcaatcgccgatcacgccagggtccatgtcaaatccaaattcgtgactaaactggacctgcagtcattctttcccagcatcgccggcatacaggtgagagccatgcttcgtgcggctaatgcagcaaaaaaggtggccttgacagatgacgcaatcgctaccatcgtgaggttctgctgcaggggtgataggggtggcggcgatttacgtctgagcatcggatccccaagttcacccgcgattagcaatgcaattctctacggcttagatgagaatctcaagaaggcaagtcatcacgtgggcgttacgtatacccggtacgccgatgatctgtacttctccacaagcgacagggacgtgcttgctggtgtagagcgcgcagcccgaagcatcatagctcgctatggcttcctaaaagtcaatgaggacaagacccagcgcacatctaaaaaaaggcgggtagtcatcactgggctgaccgctacaagtgctgggggagtttctatcggacggggtagaaaacgcaagattaaaacggagctgtatctgcacttttcggagagactaccattggacaagatcgggactctgcggggcctggtgtcttttagtatgggcgtcgaacccaacttctatcactccttatgtctgaagttcggggaaaaccgcatgcgagcctttatcgccgaaggagggaacggagggcagtctgccccattttga

SEQ ID NO: 11613 - RNA, 966 nt, synthetic construct
  source 1..966: mol_type = other RNA
atgacactcctgtcccgcatggccgccgatatgggcctgtcatcagcttacatccataaaattgctgtttccgcatcccaccgatataaagtgtactctgtcaggaagagaactggaggcagaagggtgatcgagcaccctgcacgggaattaaagctgctgcagacctggctgctggataaactgttctcacatttcagggcctccgactctgtatacagttatcggatcgggaagtctatccgcggacatgcaaataaccaccgccgtaattccttcttgcttaagatcgacctgaaagactttttccctagcattacttctgaggacgtgtacaagtttctgaaagaccggcagaatgatctaagcagtcccctgacccccaccgactgccgattaattgccgctattgtgtgtcggcgaggccgcctaaccattggcgctccatcaagcccagcgattagcaactccatcctttatcgctttgatctggctatagccacattttgcagacaaagaggtgtcacttacacacggtatgcagacgatctttttttctcgactaacacccctaacttgcttaccgagataaacaaagaagttaggaggtgtctgagcgccctcccataccccaggctgaagattaaccctgagaaaacggtctttacaagtcgcaaaagattacggctcgtaacaggggtcgttttgacgtctgataagagactctctgtgggccgtgccaagaagaggatgctgaggaccctagtgtacctctttagcaccgaccgtctcgatgaaaaaaaaactgcctatctgagaggaaatctcgcatatgtggcttccatcgagcccacattcatcggatcgctcgagaagaagttcgggaagcgggtgctggaccgacttcacaagcagccattgataaatttgaagccgaaaagcagaagtgcggaaggtttcaagtga

SEQ ID NO: 11614 - RNA, 918 nt, synthetic construct
  source 1..918: mol_type = other RNA
atgttcctccagcagctcgtgaaaatcactggactttcagaagcatatatcataaaactcgccaggacggcctctcatcggtatagaacttatcagatccctaagaggaagagcggcgtccgaactattgaccatccctcgcgtcaccttaaattcctccagaggtggctggttcggaacattttttcatacgcccctgttcacccaagtgtctacagctataaggagggtgtcagtataagacagcacgcgtccttacatgtgaagagcaaatacacacttcgcattgattttcgcgatttctttcccagtatcaaatctgccgacgtacaaaagcttctcgataagaacgtagagcggttcccattccagctcaccgatcgcgacattcacattatcttatccctgtctagcaaggacggcaaattgaccatcggtgccccttgctcccctgctgtgtctaatgcaatcatgtacgacttcgacaagcactggtcacaaaggtcaaagcgcctgaatgtgatttattctaggtacgctgatgacatttacttcagtaccaatcgctccggggtgctaagcaagatcctgtccgagctgaaagaacatctggcaacgcgcgacagcccccggttgatcctgaacaacgccaagaccgtttttgcttctagaaagaggcgtagagtggtgacaggcatcgtcatcacaccgaccagaaagctgagcctgggccgggagaaaaagagacagctgagaaccttgactttcttatttggaaaagggcaactggatcgagatcgagctaaaagcctacaggggtttctgtcctacgcgtcaacaatagagccaatctttattagtaggttgcggaaaaagttcggagacgaactgatttccaaaatagtgcagatgccctga

SEQ ID NO: 11615 - RNA, 1014 nt, synthetic construct
  source 1..1014: mol_type = other RNA
atgatactcgagaggatcgctagagaaacaggtatcggcgtggatcacttaagagtgattgtcaagacagcctccaggaggtacaaaacgtacacaattcctaagcggacaggggggagaaggactatatctcacccaactcccgaggtaaaatttctgcagcggtggctggttcggaatatgttttctgccctccccgtgcatcatgctgtggcatcgtaccgcgagggcgttggaatcgcggataatgctcaggcccacgttcgcaagaactatctccttaagatcgacttcaaaaactttttccctagcatcagggccgcagacatcaggcatttactggagaaaaactcgagtcgattcagcgacatcttaaccgacgacgacgtacaggtgataacggatattgtgtgtaagaacggcgcactaagcatcggagctccgtcctctcctattctgagtaatgcgatcctcatcgatttcgacgagttcgtcttccaagcctcaaaggatagagaggtaatttacacacggtatgcagatgacctgttcctcagcaccgataaacccaactgccttagtgtcatgatggagctaatccgtattcggttgtcctcagggggccagccaagcctttccatcaatgaagagaagtcagtgtttaccagccgcaagcgaaaccggactgtgactggcctggttctgacctctgaccgcactctgagtgtcggtcgaaaaaaaaagcgccagattaggaccatgattcacctgtaccaggaagacaagctttccgccgaatccatttcttacctgcgcgggtatttggcctttgtgcacgctgccgaaccggatctcctggtgagattgcagcagaaatttggtcaagaaaccatggaccagctgatgtgctatcccctggtcccacgtaaaggacatggaagaggcgctcaaagacccgcaatacctttgggggcccacaagaccggatctccacaaaattcaagcgattcctga

SEQ ID NO: 11616 - RNA, 930 nt, synthetic construct
  source 1..930: mol_type = other RNA
atgagaattgcccagatcatcgctaagcaaacatccgcagttactgcggcacacttaatcgcccttgcaaactcagctaaccacagatacaagacctataagatcagtaaacgcaacggacagcatcgtactattgagcacccaagcaggcagctgaagtttgtccagaggtggcttggccgcaagctcttcagtaagtttcccatacatagcaaagcttttgcctatgtgaggggaaaaagcattgcccatcatgcagagattcacgtgtccaataattacctccttcgaatcgactttaaaaatttctttcccagcattaccgccgaaaacatcaagcacaagttgaatgatttcagatacaaagacggaagcaatttggagccagccgagattgattttattacgaagatagtcaccaagtctggacagctgacaatcggggctccttccagtcctatcatctcaaacatcctcatgtacgagttcgaccactactgggaccaatactcttccgagcgggggattacatattctcgctatgccgatgatatttacttcagcaccaacgtgcccaatctgctcaaccagtgcctgattgacgtgcgggagtatctgcgagaaaaccccaaccctagactgttcatcaatgacaacaaggttgtacacacaagcaaaaaaaggaatagaactgtaacgggcctaaccctgactagtgatcggaaagtgtctataggtcgcgataggaaacgtcaaatccggtcgttaatcttcaagcataagaatggcctgctgaatgagcaacagattggtcagctatctggcatattgtcctatgtgcggtcagttgaaccggaatttattacatccatcgaacagaaatacgggggggcgttcatcaactcaatatcgggcgtcaaccagacctga

SEQ ID NO: 11617 - RNA, 954 nt, synthetic construct
  source 1..954: mol_type = other RNA
atgatcttaaggagcatggcggcagatatgagggttccagtggcttatatcgagctcattgccactacagcatctcatcgctacaaaatttaccgaatacgtaagaggacgggcggcacaagagagatatcacatccttcaaaggagctgaagggactccagagatggcttgtactgcatgtttttagccagctgccgattcatgacagcgtgtactcttacagaaatgggctgtccattcgggatcacgccgaagtccacaaaaggaacaactatctggtccggattgatttcaaagacttctttccctctattactgccaaagacgtcgcgaggttgctgcttgccaatcgacaaaatctgcccctgacaattactgctgctgacttgaaagccatctgctggatcgcctgcagaaacggccggttaaccatcggcgctccatcaagtccagtgatttccaatgcagtcttgtaccctctagatgagtattggtttaatacatgtgaacagagagggatcagttatagtcgttatgccgatgatatctatctgtcaaccaacgccccaaacgtgcttgctaccatctacaaggaaatcaggaaggacctggaggagcgcgaatggcccaagctacagattaaccagcggaaggtggtttttacgagcagaaagcacaatcgcaacgtgaccgggcttatcctgactagcgacagacgggtgtccataggacacaaaaagaaacgctggttacgctctcaggtgttcaagttcatggagggtcaactccccgccgagcaagtgtcctatctccgcggatacttgagttttgcaaaaagcgtcgaaccttccttcctgacccggctgcgaaagaagtacggtgcatcggtaatccaccagatcgctaatatacagcctatgcagctcaaactcgttaaggtgaggaagaaatga

SEQ ID NO: 11618 - RNA, 954 nt, synthetic construct
  source 1..954: mol_type = other RNA
atgatcctcagaaagatggccgaagatatgcgcgttccattagcccatattgagctattggctaccacagctaaccaccgatataaaatttacaggatacctaaacggaccggcggtactcgcgaaatctcgcatccttcaaaagagctgaagtctctgcaaagatggttggcgctgcacctgttttcaagacttccaattcacgatagcgtgtatagttaccggataggcgtggggattagggatcacgctgaaatccataaacgaggaaactatctggtcaggatagacctcaaggacttctttccctccatcacatcaaaagacgtcgcccgtctcctgatcgaaaatcgccagaaactagggcagattatcactgcaacggatctgaaggccatttgctggattgtgtgtcggaatggaagactcaccattggcgcgcccagttcccccgtaatctccaatgcagtactttatgcagttgatgagtactggagcgtgacatgcgagcaaaggggtattacctactctaggtatgccgacgacatatacctgtccacgaatcggccaaatatccttgcaggaacttacgacgaaatgcggaaggaccttgagaatcgcgagtggccgaaactgcaaattaacaggcgaaaggtggtgtttacttctagaaagcacaaccgtaacgtgaccggattgatcctgacaagcgataggcgagtttctatcgggcatgagaaaaagagacagatccgcagccaggtcttcaagtttacacaggaccagctgagcgctgagcaggtgtcttacctccgtggctatttaagtttcgctaagtccgtcgaaccttcattcctcactcggttgcgcaagaagttcggcgtgagtgtcatacaccaaatcgccaacacccagagcatccagatcaaaaaggttaaggccagaaaacagtga

SEQ ID NO: 11619 - RNA, 921 nt, synthetic construct
  source 1..921: mol_type = other RNA
atgattctcgagagaataagcgcacagttggcgctcccaacgccattcctcggaaagctcgcgaggacagcctctcaccgatataaggagtatcccattaagaagaaatctggcggcacaagaacaattcatcatcctgcccgggaactaaaactcattcagacctggctgcttcacaacgtgttgatacgcctgcctgtgcacgctgcagcaactgcgtacagacagggttttagtatcaaacggaacgcagaaatgcacgtcagtcataattacttgcttaggattgacttccaaaacttttttccctcccttaccgggatagatgttgtggggattctgcaggctaaccgccaaaaactggccgatgtggaggtgactgaccaggacattattttcatcacccagatcgtatgccgctacaattcactgaccatcggtgctcccacttctccccagttgtccaacgccattatgttcaaatttgacgagacatggagcaggatggcccaggcattagaagtcacctattcacggtacgccgataacctgtacttctcaacaaatcgtcctgatacccttagagagatactcggcaggctgcgtgaatcgctgaatgaggtgggacacccagccttaaagatcaatgaggacaagactatctttagtagccgcaaaagacggcggttagctgccggcctggtactgacttctgatcgaaaaatcagcatcggcagagagaaaaagaggtggatcaagagtttggtcaatcgctttaagtataaacaacttaagccggaagaagttgctagcctccgagggtggatcagctacctgcggtccatcgagcctacgttcgtgctgtccctggaaaggaagtatggactggacctagccgctaactccacctgggaggtttga

SEQ ID NO: 11620 - RNA, 945 nt, synthetic construct
  source 1..945: mol_type = other RNA
atgaatatttttcaggaagagatctccagccacttctcaaaaagttaccgagatatatttcggtacgcgctctcagctagccggagatataaatcttataccattcccaagagaactggaggatcccgtgacatagtgcaaccaagcaaagaactaaaagagtatcagcgatacattgtcagcaccctgttcaacaaactcccagtacactacgccgtgtatagctaccagaaagagaaaaatatcaagcaaatggccacaaagcacataaacgcaaggtttcttcttcggattgactttaaggaattcttcccctcaatcaagggggaacatataaggtctttcctgaaatccaatgtggactacctggaaacctctattaacgattatgacctgactctgattaacctgttggtgtgcaagagtaataagttgactatcggcgccccgtcgtcgcccgtgatctcaaacacgatcttgtacgagttggacaactttcttttcgataagtgtaacgttgagggtattgtgtatacaagatatgctgacgacctgtatttcagcacaatccatcctaataagttaaagacaatcctgcccctgctgaaacagtacctcaagacattctttattcgcctcgtcatcaatgaagacaagaatatctacacgtccaaaaaacgcagacagcagattactggcctgacccttaccaccgataaaaaactctccgtagggcggaagaagaagaggtacatcaagagtctaatctacaaatattcccaacagaacatcgttccagaagagattaattacctcaagggttatatgtcttacttatacagtatcgagcctgattatatagagaaactgcgcaagaagtactctagcgagctggtcggcgagctcctgcctttaaggcataaggaggaaaacgatgaggaatga

SEQ ID NO: 11621 - RNA, 930 nt, synthetic construct
  source 1..930: mol_type = other RNA
atgaatatattccaggaagagattagtcgacattttgaaaagtcctatagggacatctttcagtatgcatccagggcgtcacggaggtacaaatcatataccattccaaagaagactggaggcagccggaagattatacaacccagcaaagagttaaaagagtatcaacgctatctgatcgagacaatctttaacaaactgcccgtgcacgatgctgtttacagttatcgcgagggtcgctctattaagcagatggccgaaaagcacattgacgcccggtatctgttaaggatcgactttaaagagttttttccatctatccgtggggagcacatcagagaattcctgacatcgaatattcatcacattgagctctccatcagtgactacgatttgactctgattaacctcctggtgtgtaaaagcaacaagttgactataggtgccccttcttcccctattatctcaaacaccatcctttacgagctcgacaaattcctattcgatacttgccacgctgagaacattatctacacacgttacgccgatgatctttatttcagcaccatgtgccccaataaattacagacactgcttccaatactgaagcagtacctgaaaaccttcttcataagactcgcaatcaatgaagacaaaaacatctatacgtctaagaagcggaagcagcaagtaaccgggttgaccctgacgaccgacaagaaaatcagcgtgggaagaaaaaagaagagatacatccgatccttgatccataagtactcacagcagaatatcactggcgaagaagctaactacctaaagggctatatgtcctacctgtactctatagagcctgattacattgaaaatctggtccgcaaatatagcaaggagacaattgcagaactcctcccgcttaagaacaataattga

SEQ ID NO: 11622 - RNA, 930 nt, synthetic construct
  source 1..930: mol_type = other RNA
atgaatacttttcagaagcagctgtccgaaaagtttgagaaaccctttcttgagatttatcaattcgcttattccgcctctagaaggtataagacctacaatattccaaaaagaaccgggggaaaccggattatctcacagcctagcaaagaactcaaggagtatcagcgctacctgataaccaaagtgttctccaagttccccatacatgaaagcgtctactcatatcaggatggaaagaacattaaaggcatggcgctgaaccacgttaataaacggttcctgttacgtgtggacttcaaaagtttttttcccagcattaagggcgaatatatcaggggttttctggtgaagaatatcgagctctatgagctgagcctcagcaagaatgacatcactctaatcaacatgttcgtatgcaaatccaaccaactatctatcggtgcacccagttcaccaattatctcaaacatacttctgtacgaactggattcctacttatctgagatctgcaccaatctgaatattatttacacgagatacgccgacgatatgtatttcagtacgaaccagacaaatcaactcgaaaagattttgcctctgcttaaagagtacctcaagtcgttttacatcaaactggttgtgaacgaagataaaaacatcttcaccagcaaaaagaggcgacagatagtgactgggttgatcctgacaactgacgggaacatttcggtcggaaagaataaaaagcgcgagattaagtccctgatttatcagtacatcaagcagacaatctctagcgctgacttaaactatcttaaaggctacttgccttatctctacagtatcgagccgtcttacatagacatattgaagcggaagtacacagagaaaatcatttgtaagcttctgccactcaagcaagatatctga

SEQ ID NO: 11623 - RNA, 927 nt, synthetic construct
  source 1..927: mol_type = other RNA
atgctaaaattcaatgagctgcttaagaaagaggacgacattgacttctttaagctctatctgtttagtctcgatgccagcagaaaatacaagacgtactccataaagaaacgcaaaggaggcttaagaaccatcaatcatccctctaaggagttgaagaagtaccaacggattctgagcaaactgatttttagcaagttgcctatccacgagtccgtcttctcatacaaaaagcgcatatctattaagaacctggccgaacagcacaagaataacaggtttcttcttcgaattgatttcaaggacttctttccctctttaacaagcaaaaacatcagggaactcttagaaaagaatctgagcctgtttgacttcgaactgtccaaagacgatatcacactgattaacaacatcgtgtgcaagagtaacaaactaacaataggcgcgcccacttcaccaatcatctcaaatgctctcttgtatgatttcgactgcgagatgaacaacttctcgaaaaagatcaagtattcccgttatgcagacgatttgtactttagcagtaatattccaaacctgctccagaatatcattccttacatcaagacctttctcctgaactataagattaaactacagatcaacgaggataaaaacatctacacctctaaaaagcggaaaaggtgtgtaactggactggtgcttaccacagataatgaaatcagtattggtagagagaagaagaaatatctgaagtctctgattttcaagtacatcaaaaagaccatcactagcgaggagcttatttatctcaaggggtacctctcctttgtgaaatcagtcgaagaatccttcttgaacaacctgataaaaaagtacaacccggtgataatcaaggaaattcaggagctgaaaaacatcgttatatga

SEQ ID NO: 11624 - RNA, 924 nt, synthetic construct
  source 1..924: mol_type = other RNA
atgatctttctggagtcaatctgtaaacggtttgagaagaacctgaatcaaattgttgacttttctacgaccgctaacaagcgttacaagacgtacaaaattaagaaaaggactagcgggaccagaacaatcgaacagcctagccaggagcttaaactgtatcagaagttcatcagcgaaaagatttttctcaatcttcccgtccacgaggcggtgtttagctacaagaagaacattagcattaagaatctggctgataagcataagaataaccgatatctcctaaggattgatttcaaggattttttcccatcaatcaaaggcgataacataaggttgttcctcaaaaactctaatctaaaactgtctgatctcgagattactcttattaatctgttcgtctgcaagaataacaagttaactataggcgccagctcgtcaccctccatcaccaatgcaattctgttctccttcgacgacgacgtatataaattttgcctcgagcagaacattatctattcaagatatgccgacgacctgtattttagtacaaatgaagagggaatcctgtcctccattttggaatacgtgaaaaactacatcttcagttacaagattgacctgcatatcaactacgataagaatatctacaccagtaagaaacaccgccgcataattacagggttaacaatcaccaccgatggcaatatcagtgtgggtcggaaacagaagcaatacataaagtctctcataaactcctacaagtataaatgtctggaagacgagcagatcaactacttaaagggttaccttaactttctggtttatatcgagccgacttacatcgacaatttgaagaataagtacggagaagtgataatcaacgaattgttcatcaacaagttcaacaacaagtgcaattga

SEQ ID NO: 11625 - RNA, 933 nt, synthetic construct
  source 1..933: mol_type = other RNA
atgatcgtgaaacgcatagctcaggagactggcctggactctgcctacctcgataaggtggtcagaacagcatctcaccggtataagacctataaaatcgccaaaaagaacggtggcctgaggatcatctcacatcctgccaaagaacttaagtttctgcagagatggcttgtgtcaaatctcttctgccatctgcccatccacagtgctgtatttagctatagggaaggtcggaatattaagcagctagcggaaactcacattgcaaataactttttgttgcggatagatttcgaagggttctttccctccatcctggtgagagacgtctcaaacctactgaaaaacagcatcgatgtgctgccgttccaattgtctcgcagcgacgtgaataaaatcgggatgattgtttgcaaggacggtcgcatcaccataggagcaccaagtagccctatgctttccaacgccatactctttaatatcgatactgagattgctgacgcctgtgttaaaaagggcgtggtatatacacgttacgccgatgacttgtacttctccacaaatgaaccaatggttttacaagaggtctttgagggggtgaaaggagtgctcaggaagaataagagtccaaagatcaggattaacgcagagaagaccattttcacgagccgcaaacataaaaagatggtaacaggcctttatatcacccctgataggcgggtgtctattggccgacagaagaaaagagctataaaagccctggtttactcatatatcaaccagtccattgcggaggaggacatgagttatctgcgagggtacctctcctacattaagagcgtcgagcccggattcttaagatcgctggaaaaaaagtacggacaggaagtcctgcagaagattatgatccacgagtacgtgaagcgtaagtga

SEQ ID NO: 11626 - RNA, 996 nt, synthetic construct
  source 1..996: mol_type = other RNA
atgaatttgataaaggtgatggcagacaagtttggcctatctcctgatttcgtgcagaagactatatcatttgcacctaggagctacaagcggtttgagatttccaagaagaacggacaaaagaggaccgtttaccaaccagcccgtaaagtgaaactccttcagtccttcgtatctgacgagattattaaacgatttccactgcaccctgccgtcttcagctacagagaaggactgtctatccgcgacaatgccgaacaacataggagaaacaactacctcctccgactcgacttccgcaactttttcgaatctattgagatcaaagacgtcatccagttctttatccggaacgtgaaaaatgctcccttcgtgctgagccacgacgatattttgctcctcagtcagctatgttgtttcagagctgatgatggtaaactgagagtcgtgatcggggcccctagctccccaagtatcgcaaatgcgatactgtatgactttgacgtcgaggtttttgatcattgcaaatctcaggggataatttataccagatatgccgacgatctttacttcagtacgaatcaccaaaatttactgagcaagatcccggagttcgtctctagggttctttcccagacctcaagcccccgcctgatgatcaatgagaaaaagacatatcacacatcgaaaaagcatcgtagaatcgtgacaggattaaccataacatccgaaaatcgcattagcatcggtcgagataggaaacgggaaatcaggactctggtgtttaagtgcatctccaacagtattgacattgacaaaaaggagtacttgcgcggccttttgtcttatgtttcatcggtggatccagactttttcttctccctgctgcggaagttcggcgaggatgctatctactccattcagaagaaccagccccagagtgatcggaacgtactgtcaactgaggaatcagatagcggggaatttcccttctga

SEQ ID NO: 11627 - RNA, 918 nt, synthetic construct
  source 1..918: mol_type = other RNA
atgattatccagcagattgctaagtccagtggcatcgaggctagctacctgcgcacaatcgtgagtaccgcctcccacagatacaagatctataaaatccccaagaaaactggtggggaacgcgagatccatcacccaagtagggaactgaagtatctgcagcgatggctcgtggataacgtgttcgcctatcttcctgtgcacgaagccgtcttctcatacagagacgggaagtcaatccgggatctggccaaaaagcacgcgaattctagatacatgctgaggctggattttgcttccttctttccatcgattgtggggagcgatgttgttaggttgttaaaaaacaacgtaggctccgtccctattagtttgactacccatgatctgatggacattcgcaatatcgtgtgcagatttggccgtctgaccatcggggcccctagctctcccgtcatttctaacgccatattattcgagttcgacaactatatctacagcaagtgtaagcagataggcattaggtataccagatacgcagatgacctgatattctcttctcaaaagactggagttctcagtcgggtggaggctgacgtcatcgcagccctcaagcaccttcccggtccaaaactggcgattaacgacaaaaagacagtcttttccagcggaaaaaatcgcaggaaagtagtgggcctggtgataacaagcgaaaagaaaatctccattggacgggataaaaagcggtatgtgaagagcttggtttacaagtatatcaatggcatcctctctgccgacgaacttgtttacctacgaggttacctagcatttgtcaattcagtggagcccgagtttctcgcaatgttgtcagctaaatacggatccgacaaaattcgtcttataacgcatccggtatga

SEQ ID NO: 11628 - RNA, 975 nt, synthetic construct
  source 1..975: mol_type = other RNA
atgacactcaatgagattgccaaaaatctcggcgtcagaatctccaccctgcagtcgatagcacgacaagccaactacctgtatatttcataccgggtgaaaaagtacgatggcagttatcgcaccattaatcatcctagccggaggcttaaggcaatccaacgcgaaattctgaagcaggtatttagtaaagcccccgtccacgtgaacgtgtatagctacaaaaaagggatctctattggagatctcgcaaggtaccacgccggggcgtcatacttaacaaggtttgactttaccaagttctttgaaagcatcctccagtccgatattgatctccttatcgagaagctgatagacagtggatctatcgatcttctcaaaagcgacatacagactatctctaagctggtgacactgaaaggggcgcttacgatcggggccccttcatcccccatgataagcaattgcattatgtacagcttcgacgttttctgtgctgactactgcagatccaaaggagtgaaatattcaaggtatgccgatgacatctatctgagttctagcagccctaacgttctgaaaccactgggtgctttcttgattaccaacttttctaagcatactagcctgaagttgtcattaaacagagacaaatccctattcaccagcaagaaacacggcatgaaagtcactggcttgacgttaacctctgatggtaaggtgtctctgggccgggaaaagaagcggaagatccgcagtatgctgcatcacttttcccacggacgcctggacgaaaggcaggcagagtcgttgcgtggataccttaatttcgctctaaacatggagcccactttcatcacatccatgaaggctaaatttggcaaggagattaagcagctctcaatcagtccgccaaagcccaagcgttggccattctactctcgacagtccatcggtattagagggtcctattga

SEQ ID NO: 11629 - RNA, 1002 nt, synthetic construct
  source 1..1002: mol_type = other RNA
atgtcaattgtcaaaaagattgctgaggagaatggagtgcctgagcatctgatcaaccgcattgtgaattcctccaaccatgcctataagacctacgaaattgctaagaagaatggcgacactagaacaatctgccaccctagcaaaaaagtgaaagccctgcaatactggttaaaccagaacgtattttgccacctcccagtacacagcagcgtgtattcttataggtccggcctcagtatactcgacgtggcaaaggaacacgtgggaaagaagtactttctgaagttggatttcaaggcattctttccgtccatcactgccgacgacctccgacgtcatctgcacaaacacaacaatttagttgagctggaccgagatgatatcgaggtcgcgcttaagatagtttcatatcaggaagctctcaccataggatctccatctagccccattctgtccaacagtatactctacgactttgatgacaagctgacactgttctgtatcgacaaaggtgttacctatacccggtacgccgatgatcttacgtttagcacaaacgatagtaatgtgctgacagaaatcaattccttcaccagagaactgttacaggggtttgatggtgtcaaactgaaaattaacgaggacaaaactcagttcttgtcaaaaaaaggaagggttcggatactgggccttatcctaacttcggacgggaagatctctgtgggcagggaaaaaaagagagagatcaggagtctagtgaaccggttcaaatacgatgctatcgaacccgatcatgactctaacgggaatgtcttgagcacgattgaggagaaaaagcgctctcttcaaggctacatcagcttcattgaatcaatcgaacccgacttcattagttccttgaagaataagtacgatgagaatgtcatcgaggcaattaagaagttttcatatgaggaggccatccagtcgagaacagtgattgaccgcacccctagctga

SEQ ID NO: 11630 - RNA, 948 nt, synthetic construct
  source 1..948: mol_type = other RNA
atgatgatctatccccggactctgacgggcactatcgacattgagaattttctcaggaaacgccctatgctgatcgataaatttagcaaggaaattggtctgccaagaccgagcgtccagaaaatcgcagcgtcggctaactatttgtataagcattacaccatcccaaagcgttctggaggtgagagagacatctatcatcccacgcctcgtctgaagctagtacagcggtggattacccggcacgtgattagggatctgcccgtgtcagacgccgctatggcttaccgcaagggcaagtctataaccgacaatgcaaggcttcatgccgggaagagattcctccttaagatggatttcactgacttctttcctagcataaaagctcgagatttgcaacccatcttgacttccaggggttacgacccagaagacgtgaacttcattctgaccatctgctttaaatccggcagtctgaccattggagccccttccagtccagccgtctcaaatatcgtcatgtttgcgcttgatcaggagttcaagggaatcgccgataggcggaaattaacctattctcgctacgccgatgatctcaccttcgctggcaacgtgagaggcaatttaattgaagcaaaaaaggacgtggaaagactgatcgggacatgggccagtcctaacctcacacttaaccaacgcaaaacagttctggtgtcatctgcccaccggcagaaagttacaggcataacactaaccactgacggggagatctccattgggcgcgagaaaaagagggagttgagagctatagtacaccgaagcacataccagaagctcgaaccggaggtcgaggcatatgttcagggatggctggcatacgccaatagcattgaacccaaattcgtggactccctccgaaagaagttcgacacttacctggatttttga

SEQ ID NO: 11631 - RNA, 942 nt, synthetic construct
  source 1..942: mol_type = other RNA
atgagtctacgcgataggctggagaaatcactgcccttctctcggaaagagatagacttactcgtgctttctgcccccctgcggtacaaaacctatcagattcctaagaagactctgggcaagttccgagaggtcagccaacctacaccggaagtaaagctactccagaggtggttgattagtaatgtgtttggcgattttgctgtgcacgatgccgctaaggcatatcgcaacggcatcgggctgctccagaacgtggcaccccataagaaccacagataccttctcaagcttgacttttcaaacttctttccttcaatctctagcggacacttcttcgaatttatggatggcaaagggtacgatcacgacgacctgattgttatgtcccgtgtctttttcaaaaactatcgtaagacagcgtccctcagactcgctattggcgcaccaagctcgccagcacttagtaatattctgctgtacgacttggacgtagcgatcagcaatttctgcaggaatttagatattacctacactcggtatgccgacgatctctcttttagcacaaacactgccgaagtcttgtccgaggttgagaagaatatcagtaagatcatcaaggagaattgtatcatcaatctgaccttgaatgaggagaagacagtgcatgccagcaaaaaaaacgggcggaaaataaccggactcacgatcacctcagacaataagatctccataggtctgcagcagaagaaactgttgagagccaagattgaccgataccaaaaaggactgttaactcaggacgccattgattccctaaaagggtatatcgctttcgtggattctgtggagccagaacatctggttcgcctgaccaaaagatacggtattgaaatcatgcgccagctgtatacgaggataaaccttgaaaacaacatatga

SEQ ID NO: 11632 - RNA, 939 nt, synthetic construct
  source 1..939: mol_type = other RNA
atgtctcttcgagatcagcttctgagggctttgccctttaacgcaaccgagctggacttactcatttggagtgcaccactgcggtataagacatactacatcaaaaaacggcagcctggtcttttccgcgaagtttcccagcctacccccgaggtaaaattgctccagcgctggctggtggccaacgtgctgagcaactttccagtccataccagcgctaaagcctacaagcgggggactggcctaatagaaaatgtgcaacctcatgtccaacacaggtttctcctgaaagttgacttcgagaatttcttccccagtatcaaggctgatcactttatccgctttgcgagcgacgccggaatcgacgacctggacagcaatttaatgaagcaggtgctgttcaagcgcacgaaggggaccgggagtcttgcccttgccatcggcgctccgtcctcaccacacctgagtaatctgatgttgcactcgctggattgtgcgttagccctcaccgcttcaagggagaacattgcatatactagatatgcagatgacctgtccttttctacatccacacccggagtgctaagtgagttcgaaaaaaagctgccactgataattcgagagaactgcgacataccacttaagctcaacgccgaaaaaactattcatgcatccaaaaaaagcggcaggcggattacgggcctcacaatcaccccgcagggcacaatttcagttgggctcgagcagaagaagctgctcagatctcaaattcatcgtttcagcaagaatgaactgaatgctgaatctatccagtctctgactggatatatcgcctacttggcctccatcgagcctgcgcacctggtcagactagctagatactatggtatagatgtgatgcgtgccctctacccccctatctcagatttgttggtatga

SEQ ID NO: 11633 - RNA, 918 nt, synthetic construct
  source 1..918: mol_type = other RNA
atgtcactgaaaaaaatcctagagaaatccctccccttctcatcaaaagagatcgacttttttgtcatgagtgcccccttgcgatacaaggtgtacaaaattaagaagaaggagcctggcaaatttcgtgaagtgtctcagcctagtgctgaagtcaagctgctacagcggtggttgatgctgaacgttcttgtcaaattcaaggtgcatgattccgccaaggcctataaagctggagtcgggttattggataacgtgagcccacatgtgaacaatagattcctgttgaagatggatttcgagaatttctttccgagtattactagcggggacttctttgacttcatggtcggcaaaggatacgattacgaggatatcgttgtaatggtgagcatacttttcaaaaaggatagagcagatgactcattacgcttagccatcggcgctccttcttccccactcctgagtaacattctgctgtacaacttcgacgtggccctggacgactactgtcaaaccctcggggtcgtgtatacacgatatgcagacgatctgtctttttccacaaagaactccggagttcttaatggtgtggagaaggcacttggagggataattgaaagttcatgctctatcagcctgaaggtgaaccgggataagaccatccactcttcgaaaaaaaatggcaggaaaatcactggactggtgattgggtctgacaataaggtgagcataggtttggaacgcaagaggctgctcaggagccaagtatatcggtttaagaagggtttcctcgaccccgaacaggttggctccctcaagggctatattgcgtttcttcagagcgtagaaccagagcacgttaaaagactgatcaatatttacggccgcgagacgatgtttctcctgctgtcctga

SEQ ID NO: 11634 - RNA, 921 nt, synthetic construct
  source 1..921: mol_type = other RNA
atgtcacttaaagatcgtctgctgcgcgccctcccttttagccgacaggagttagaattgctaataagcactgccccattccggtataaagaatacaaaatccccaagcgaaaggaaggagcattcaggcttatcgcacagcctaccccagaggtcaagcttgtccagaggtggttggtgaagaacgaactgtcgaccctgcctatacactccgctgcaaaagcctataaggctgacacaggcctcatcgagaatgtgattccccataagaatcatagattcctgctcaaattagacttcgaaaactttttccctagtatcactgcttctgactttcaccaattcatggaagataatgggttctcaaataccgacattccgacgctcattaatctgttgtttaagagagatcacgctactaaatcactgcggcttgccatcggagctccatccagccccacgatttccaacattctattgtaccctctggatagggccctggacaaccattgcagtgacttagcagtgagttacacacgctatgccgatgatttgagcttctctacaaatctcccgggtatcctgaaggacatcgagcagtccgtaccagcacttatcaaagcctcatgttctctgaacctgcggatcaacaagaacaagaccacccatacatctaaaaaaagagggaggagagtgacaggactggttataaccagcgagaacgagataagcgtgggtcgctttcggaagcgtctgctgagagcccaaatccaccactttggcgcgggcaagctcccacccgaagagactgaggcgctacgagggtacctttctttcctcaatagtgttgagcccgatcagattgacaggctccggattttttatggcaaggagctgatgtcccgcctgatgtcccgctga

SEQ ID NO: 11635 - RNA, 918 nt, synthetic construct
  source 1..918: mol_type = other RNA
atgagcctgagaacacgtcttctagcaaaccttccttttagcaaaaatgagctgaatctgctgattgcgagcgctccaattcgctataaggagtactctataccaaagcgacagccgaataagagaagggaagtctcccaacccaccccagaaatcaagctaatccagcgctgggtcgtggaaaacgaactcaacaaatttcctatacacgagtcggcacgggcctataagaaaaacgtgggcctgattgcaaacgtgttgcctcataagaacaatcggtacctcttgaaagtcgattttaaggacttctttccgtctataacaaaccacgactttaggaagttcatgatcgggacggagttcagtgatgatgatctgcacgacttgtcacagatcctgttcaaggctgaccataagactaaaactcttcggctggccataggtgccccatcatctcctctgctcagtaatattctgctttactcactcgacagtgttatccacgaccattgcaaagagattgaggtgacttacactaggtatgctgatgacctgagcttttccaccaaccgccccaatctgctcacaagtctttacgagaatcttcccatcctcattagctccggaaccgacatacatttaacggtaaacattgagaagaccgtgcacacttccaagggtaacgggagaaggatcaccggactgacaattaccgaaaagaatgagattagcatcggcagagaacggaaaagaatcttaaacgcccaggtgttccgcttcaagaataatctcctgtctatcgaggatatcgagaaactcaaaggctatatctccttcctgcgatctgttgagcccgaacacatcaaccgtttaatccagaaatacggggaatcaacaattttggccttgcaaaggtga

SEQ ID NO: 11636 - RNA, 918 nt, synthetic construct
  source 1..918: mol_type = other RNA
atgctgctcaaagagcttatgcttgaatccttacctttttctagtggcgaactcgaggtgctgatcggcaccgcgccatttaggtacaaggaatataagataccgaagagggattctgataagttccgccagatcagccagcccaccccagaggttaagctgctccagcgttgggttgtggttaacgtgttgagccaatttcccgtgcacccagcagcaacagcatacagaagcggccggggtctattagaaaatgtgcgcccccaccaaaaaaatcgcttcctgctaaaagtcgatttcaaggactttttcccctcaattacttcagagaacttcaaggtgtttctcaaagaatcatcatactcggacgcagagatccgaatcttgtgcaatatcctgttcaagcttgacaggcgaacggaacaactgaggctggccattggagccccatccagccctgccctgagcaacatcctgatgtatcggtttgatgaagtgattagtaagttttgtgaccggttgtatgtagtctacacacggtatgctgatgacctcactttttccaccaatgagcgcgacgtattgtgtaaggtcgagaaagcccttcctgaggtgatcgccgaattcggcctgattgctctgacggtcaaccaggaaaaaacccgccatgctagcaaaaagactgggagacagataacagggctcaacatatctagtgagggggaggtttccattggaagagacagaaaaaggctgctcagagtccagattttcaaattcagcaagggagagcttacagccgatgagatcgactctctgagaggttacattgctttcttacagtacgcggagcctgcccatgtgacccgattgcggtcctcttttggcgatgacctgatctcccgtctgtgcagttga

SEQ ID NO: 11637 - RNA, 918 nt, synthetic construct
  source 1..918: mol_type = other RNA
atgtcactgaaaaccgatctgctgcaggctctgccgttcaccgagcatgaacttacaatgctcattgccaccgctccccgccgttacaaggaatataccatcgagaaaaggaggcgccccgagcggaggaatatagcgcagccaactccagaaattaagactctccaaaggtggttgagcaaaaacgtgctgagcaagtttcctatacacgcctctgctactgcataccgaaaggacgttgggctatctgccaatgtgtcccctcatcttggcaacagattcttgctcaaaatcgacttcaagaattttttcccctccatcgaaagcgatgacctcgtggcatacttagagaagaaagcagagctgacaaatgacgactgctatattctcacgcagattctattcaaaaagaacgtcgagaaaggaaagctgactttggctgtgggtgccccttcaagcccacaggtcagtaacatcctgcttttccagttcgatgaagcggtgtctaattattgcttagcccacaatatagcctatacccggtacgcagatgacctcagcttttctacttccaccccggttattttgcgagattgtctaagtgtcgtgcgcaaaataatccaggatctgccttacccaaaactggtgatcaacgaagagaagaccgtagagacttccaagaagagggggcggagaatcacgggtcttaccattacaaacgatgacacaatctcgattggcagactgcagaagagaaaactgcgggttctgatccaccgttttaaaacaggcaatttggacgcctgtgaacaagagagtcttcgcgggtacttagcctttctgaactccgtggaacccaagcatgtcgagagactgaagatctcatttggagtagacacactcgctctgctcctgtga

SEQ ID NO: 11638 - RNA, 918 nt, synthetic construct
  source 1..918: mol_type = other RNA
atgagtcttaaagttgacctcctccaagcactgcccttcacggcccaggaacttgacgtgctgattgccaccgctcctcgccggtacaaagagtataccatcgagaaacgcaataagaccggccggagaaacatcgctcaacccactcccgagataaagacactgcagcgttggttgagcaagaacgtgctctccaattttcctatccacgccagcgctaccgcatatcgcactggagtcggcctcgcgcagaatataagcccacatctaaacaatcggttcttgctgaaaatcgacttccagaactttttccctagtattacttcagacgatttgctcgcttatctggaaaagcgaaaggaattcacggatgacgatagatacgtgctgacccaaatcttatttaagagggacgccgaacggcgaaagcttactcttgcagtgggggcaccatccagccctcagttgtccaatatcctgctgtttcagtttgacgaggatatttccgccttctgcatagaaaataagatcgcctacacaaggtatgctgacgacctctctttttcaaccagtacacccgaaatcctgaggggatgtctgaacacagtacggcagatactgcgagatctccaacacccaaggctactgattaacgatgggaaaactgtggagacgtccaaaaaacgcggtaggcgcattaccggactgacaattacaaatgagggcgcaatctctgtcgggaggctccagaagagagagttgagagttcttatccatcgttttctcaacggccatctggatgcctgcgaacaggagtctctgagaggttacctggcgttcctttactcagtcgagccgactcacattgagagactaaaggccagcttcggcgcttctaccttagcctcgctgttatga

SEQ ID NO: 11639 - RNA, 915 nt, synthetic construct
  source 1..915: mol_type = other RNA
atgagtttacggtcgaagattctgatggaccttccatttactgagagagagttgagtctgctgataatttcagctccccggagatacaaagagtactggattccaaagaggaacggcaggcagagactcattgcacagccaacccccgagattaaactgctgcaaagatggctcgtgcagaactatctaagcggcttccctgttcacgctgccgcaactgcttatcgacagggcatcggactgaaagaaaatgtcctcccccacctccgaaatcggtacatgctcaagttggatttcgagaatttttttccgtcattgaagtctagcgatctgctgaacttcctgaaagacgcacctctggaccaggttgatatcaatatgctcgcgcagttgcttttcaggaaagccgatctggggcttgaactagctgtgggtgcgccgtcctcacctcatctgtccaacgtgctcatgtataagttagacgacagaatcaacggattttgcacggccaacgggatcgcctacaccaggtacgctgatgatctcaccttcagcaccagtaaaccccatgtccttcgcgagtgtttacagttcgtgacgtccgccttggcagaaacagcctctcctaagctgcggcttaatgccgaaaagacagtagagacaagcaaaaaacgtggccgccgggttactggactgagcatctccacagagtctaaaatatcaatcgggagggacaagaagagggacctgcgcgtacttgtccatcgctttactaagggagacttaaatgccgaagaaatccaaaagctccgagggtactgcgccttcctgcgctctgtggagccagagcacctggatcgtttggcaaagtcctttggtgtggaagtgctgctagctctgaccgaaggctattga

SEQ ID NO: 11640 - RNA, 921 nt, synthetic construct
  source 1..921: mol_type = other RNA
atggcgctgaaggacctcatgttggaatctctgccttttacgtcaaccgagctcgataggttaatcgaaaccgcccccctgagatataaggagtatgagatccccaagaggaatagtgacgacaagaggcctattgcccagccgacccctgaggtgaaactgatgcagcgctggttaatggacgaggttttgaggaagtttaaaatccaccacgctgcaacagcttacagaaagggcgtccagctcgttgacaatgtaaggccacacgctaacaatcggttcatgctcaaacttgactttcgcaatttctttccatccattatagctaaggatttcgcatcgtatctcgtaaagtccggttggcgcaaccgagacgatatacatcttctgtgcaacgtcatttttaaattcaaccgtagacggaagctcttagaactgagtatcggcgcccccagctccccaatggtcagtaacttcctgatgttcgacattgatcaagagatctaccagtattgtaaggacaatgagatcacatacactagatatgccgacgatttgacgttctcaactaaccgtaccgagatcctacgcgactgcaaggattttgtggtcgatgtgttggacaatactgacagccctctgctgcgactgaacgtggataaaatcgtggagacatccgtgaaacgggggcgaagggtgactggacttggaatcacaagcgataacaaagttagcattgggagagaaaagaaaagagcacttcgcctagaaatttaccggtacattaatgggtacctgtcagccaccgattctgaagcgttgcgtggctacctcgccttcctgaagtctgtggaaccagagcatatacaacggctgcagaaatcttttgatgatgaccggctgggtggactgcttccctga

SEQ ID NO: 11641 - RNA, 948 nt, synthetic construct
  source 1..948: mol_type = other RNA
atgtctatatttgatagaatgctgcgggagctgcctttctcagcatccgaactgaaatacctaatcgcaacggcccagtatagatataaggtgtacaagatcccaaaacgccagtctaatcagtttaggacaattgcacagcctagccctgaaatcaaactgcttcagcgatggctcatgtcagacatcctgtctactttcccaataaacaaagccgccaccgcttacagagagggccggtctattgccgatcacgccagtctgcacgctaaaaaaaagtttctcctcaagatggacttcaagaattttttcccaagtatcagtgcggaagacgtccatcgctatttgattgagtaccgcaaggtttcccccgaggataccaggctgatcgggctgctggtgtgctggagaaacaaaacagacggaaagttgtgcttatcgattggagcaccgtcctcaccgcttctgtccaacgcgatgttatacacgttcgacaaagtcgtgactaagttgtgtagggatcaaaaagttacttactctcgttatgctgatgaccttgctttcagcacaaacaagaaggaggttctatctgtgatcaccaccaatatctacgatatttgtaacaatctggtctaccccagactcgtaattaacgagcagaagactgtaagcatctcccgcagttatcggcgggtcttggtgggactcgtgttgacccccacaggtaaggtgagcctggggcgagaaaagaaacgcagactaaggtccgagctttatcgattctcgcaaggccgtctgaatctggccgatgtcccaaagctgaggggcgagctcgcctttgcttggagcgtggaatcagactttatatttaccctgctccggcagttcagcgaaggtgtgtttaggcaactcgacttacctttcagccttcccaacgagattaattga

SEQ ID NO: 11642 - RNA, 948 nt, synthetic construct
  source 1..948: mol_type = other RNA
atgtccctgttacagaaaatgctgatcgacctgccgttcagcggggatgagctgaaagccctcatctcaaccgccccatatcgctataaggtgtaccagatccctaaacggcagcctaatcagtttcgtactatcgctcagccgtctgctgagatcaaagtcatacagcggtggctgattaagaacgtcctttctagtctgcctatccacaaagctgcaaccgcatacaggctgggcgaaagcatatctgaccacgccgtcattcacgccgataaacgctttttgctgaagatggattttgaagacttcttcccaagcatttcagccgctgatattcagatgcatctgatacaaagcggaaagctatcacaagatgacgctaggttagtgcgccagattgtgtgttggttcgacaagatcaaagggggattctgcctgtccatcggtgcgccaagcagtcctctcctgtctaacgctctcctttataccttcgataagaaaattacacagctacttaagggtaaaaaggtgtcctactcgaggtacgcagacgaccttgccttttcgacgaaccgcacagacgttttgtccactatccccgcccaggtgcagtccatatgcgatgagctggaatacccccaactaagaatcaatcatagcaagactgtgtcaacctccagggccttcagacggacacttgtgggcctcgtattaactccaaccggagaggtcagtctgggccgcgagaagaagagacgtatgagaagcgagctgtatagattttctaagggcctcttggcagtaaccgaaacaccccggttgcgaggagagctcgcgtttgcctggagtgttgagcgagcattcattaattctctcgttaggcaatttggcattgaggtgttccggatcctggatttgccctttggggaagaatacgacctcaactga

SEQ ID NO: 11643 - RNA, 939 nt, synthetic construct
  source 1..939: mol_type = other RNA
atgaacctgttggacaggatgatcgatgaactgccattcagtaaagaggagcttcttgagattatcgcgaccgcatcataccggtataaagtgtttcagataccgaagcggcagcctggtcaatggcgcaccattgcccagcccacacccgaagttaaactcttacaaagatggctggtggataatgtgctcagccagctgcctgtgcatagggcagctacagcctaccgggagggggtcagtatctacgcccacgccgaaaagcatgtcgacaagaagtatctgttgaagatggatttccaggatttctttccttcaatttccgcagacgctgttcagcagcaccttctgggcgtgggcaagataaaagaaaaagacgctaccctcatcagagcgctggtgacttggcgcaataaggtatctggaaagcgatgcctgtccataggggcaccatcgtctccaattctttctaacacaatgatgtatcggtttgacactgagattagtatcatcgcaaagcgatatggagctgtctactcacgctacgccgacgacatggccttttccacgaataggaagggtgttctcacagagctgtctagagaagtagagagcctatgtggcaagctgccttatccccgcctgactcttaacaaacagaaaaccgtgtacacttcacgagcctataaacgtgtgttagtggggctcgtgctgacccccgacaggaaggtcagcttaggccgggagaaaaaacgtgagctgaggagtaagctctacagattgctcaaaggcgcccccggagttgatagcgccagcttgcgcggtgaactggctttcgctaacagcgtagaaccagagtttatctcctccttggtcagacagtttggcacagatgcattcctacaactagggctgccgttcggatcctctaaggcgtga

SEQ ID NO: 11644 - RNA, 939 nt, synthetic construct
  source 1..939: mol_type = other RNA
atgtcaattttcaaccgcatgctcactgaactcccctatagcaaagacgagttgcttaatctgatcgctaccgcccagtttaggtataaagtctacaaaatccccaagaggaagccaaatcagtttcgcactatagcgcagccttccccagaaattaagctgattcaacggtggttggtgaaatccgtgctggctgacttgcccctgcataaggttgcaactgcatataggaagggcaaatcaatcgccgaccatgcaaatctgcacaaaaagtaccagttcctccttaaaatggactttaaggatttcttccctagcattaatgtgctcgacgtgcgtaactatctaattgaaaccgccaatatgagtgaggatgatgctcggctggtgagctctcttgtttgttggaaggacaaagagaagaatagactgtgtttatccataggtgccccatctagccctcacctatctaacataatcatgtacgagttcgatgaacaggttagtatcatgtgcaaagagttaaacgtgtcatattcacggtacgcggacgatctggccttttcgaccagccagaagaacgtccttgagaaaatcccgaacattatcaagaacatatgcctcgcactggagtaccccaagctgattattaacgattctaagacagtatccacaagcagagctaaagggcgagtggtagttggactggtcttgacatccgaaggaaatatcagtctgggcagagaaaagaagcgccagctcagatacgaactttacaaattctccaagggggtcttggaccatgagagcatctctaaactacggggtgatctcgcctttgtctggagtgtggaggagcgattcatccacacgctgctgaggcaatttggcaatgaggtgttcaccaacctggaattaccttttcaaaaggccgactga

SEQ ID NO: 11645 - RNA, 942 nt, synthetic construct
  source 1..942: mol_type = other RNA
atgaagttgcttcagctcctgcttcgggaagtgccgtttgaaaagcaggaactgctcactatcattgccacagcatctcggaggtacaaagtgtaccaaattcccaagaaagacggcaaatcagtcagaacaattgctcaaccagcccctgaagtgaagctcctgcagagaatactgcacgagaaactaatcggaaagtggcctatacacaaagccgcaactgcgtatattagtgaacagtccattgccgatcatgttagacgtcacgttaatagcaagtacctactgaagctggacttcaaaaacttctttcctagcattaccgccgcagatatcaggcagcatgctaggagacacagcaaactgggggaagacgatttggatatctttgtaaacatagtcgcctggcgcaacaatctggaccattccttctgcttgtcaatcggtgctccaagcagtcctgcaattagcaactcgatgatgtttgagtttgatgagtcaatcagtgctttctgtaagaagaaggaggtgacctattccaggtatgccgacgacctcgctttttctacaacccacagggatactctgaaagaggtcgaggcggaggtgcaccggttaaccctgtctatccagagccccaaacttaccatcaacgagaagaagacggtcaatgtttccaagaagtacaaccgatccttggtgggactgactatcacacccgaccagaaggtgtcattagggcgcgagcgcaaacgggatattagagccaagctttatctttatggacgcggctacctcaatggggaggacgtagcccatttacgaggcttgctggcgtacgcttggtctatcgaaccaacgttcatactgagtctggcagagaaacaaggtaatgagctcttcgccaagctggaactccccttccgtaatctaaaagactga

SEQ ID NO: 11646 - RNA, 927 nt, synthetic construct
  source 1..927: mol_type = other RNA
atggtggtaagtctcttggctaaactttccaaagacctgctcttgcccaaggaacggctggagtatctcatccggtccgctccctacagatacaaagtgtacgaggtgcctaagagatcaggaacagggatgagaacgattgcccaacccgcaaaggaggtgaaacgcctccagtactgggttattgaaaatctcttcccgcgactacccatccatcctagcgctaccgcttacatcaaagccaagaacatactgaacaattctgagctgcatgtggccaagccgtacctgttgaaactggacttcgtcgactttttcccatctatcaagggcgatgactttattcagtatatccgggaactgaacaacttagatcttgatgaacttgatctgcaactccttgttaggatcctgttctggtatcctaaaaggatccacaatctccaactgtccgtcggtgcgccatccagcccatatctcagcaacgccataatgcaccgctttgattcagaaattgagagctattgttgccagaggagtattacctacactaggtacgcagacgacatgacttttagcatgatggagaaggcagcccggtcggaagtcctgaaccgagtcttacaggtgatacagcagctgccattccccaagctacagatcaatcaaaagaagaccatctttggctcaaaggcccaccgccgaatggttacagggctggtactgtctaacgccggaagggtgtccctaggacgtgagaagaagagacgcattcgtgcacagatacaccacttaattaccgggcatttgacacctcaggagaaatcttcacttagaggtatgctggcgtttgctaggagcattgagcctaatttcgtggaacgcatggagcagaaatatggcaaacgggtcttgagtaatatctga

SEQ ID NO: 11647 - RNA, 936 nt, synthetic construct
  source 1..936: mol_type = other RNA
atgataagctctttgctcggatcaatgtccgctgatctattaatccctaaggataggttggactatctgctacggtccgcaccataccgttataaggtataccagatccccaagagaagtggttccggtaccagaactatcgcacagccagccaaagaagttaaatctctccaatattgggtgattaagaacatttacccgttcttccctatacatccctctgccactgcgtacacaatcggcaagtcaatcttgaaaaacagcgaggcccatgccacaaaaccttacctgctgaaactggatttcaaagattttttcccaagcattaccgggaatgactttctccaatacagcaagaacataaaacagctggccctttcggaccgggaccttcgtcttctcatgaggctgctgttctggctgagcgagcgaaattacgatttcagattaagtattggggccccgacatcccccttcctgtcaaatgctatcatgtatcagttcgatcaagtggtctttgactattgcaatgagcgcaatatctcttacacccgctatgcagacgacatggctttttcaatgcacaacattaagatgcggagtgaagttctggaaatggtgcagaataccctgacctccctgcccttcccaaaactacagttgaaccacaagaagacaatctttgggtctaaggcacacagaaggattgtaacgggactcgtcctctccaacaatgacactgtgagcctgggccgagaaaaaaagcgccggatcagggcccagattcaccaccttctgcttggaagactggacaacaaggagatttcgaaattaaagggcatgttggcttttgcgcatgatatcgagcctgcctttgtggagcgcatggtcgaaaaatatggcgagaaggtgataaagagtctcaggagcgcttga

SEQ ID NO: 11648 - RNA, 921 nt, synthetic construct
  source 1..921: mol_type = other RNA
atgacattgttgggacagatgtccaaggatctcctggttcctaaaggaggattagtatatctcatgagatcagccccccatcggtacaaagtttttcccattcccaaacattctgggaaaggccagcgcattatagcccaacccgcgcgcgaagtcaaaagacttcagtattgggtgatcaaaaacctatttcctaggctggagatccacccagctgctactgcctacatccacgggcgcaacatccggtataacaccgagattcactcccaacttccatacatcctcaagctggatctgaaggattatttcccgagtctgaagggtgatgacttcaagcgttacgcatcaaatcacagcggcctcagtttaagtgacgaagaggtggatcatctggtgcggctgctgttttggcaaagggacaaggactcacagcttcagctgtccataggcgcaccttctagcccagggctctccaatgccctgatgtacagcttcgactccgagatcttttctttctgcaacgctaacggcattaattataccagatatgccgatgacatggccttctcaatgagggagaaggagaaaagaggtgatgctctgaggaaagtgaccgaaatattggaggtgatggaaagccctaagctgcacattaatgacgggaaaactgtgttcggctccaaggcacaccgaagaatgttgacagggcttatcctgacgaatgacggtcgagtctcgctcggccgagaaaagaagcgccggattcggagccagatataccattttatcaaaggcgacctatctgatacaaagaggcagtacttacagggaatgctgagtttcagcaaggacgtcgaaccagagtttattcgccgtatggaaaaaaagtacggaatcgagactctcaactctatctga

SEQ ID NO: 11649 - RNA, 930 nt, synthetic construct
  source 1..930: mol_type = other RNA
atgaaggacgttcttttagagaaaatgtcctatgatctcctcctcaaaaaggagcagatcatacacttgattttgagcgcaccacataggtacaaagtgtatcaaatacccaagaagagtggcgctggaatgcggacaattgcgcagcccgctaaagaagtgaagatattacagtactgggtgatagagaactgtttccctctgatgcctatccacagagcagctactgcctatgttaaggacaagaatattcgtgacaattgcgaaccacatattaaaaatccctactttctgaagctcgatttcaaggattttttccctagcatcaaatccgatgacttcatccagtatatgaaaaacatcgggaacataacctttgatgacatcgacatccaacgactcgcgagaatcctgttttggtgtcccaaggaatacactgggctgcagctgtctattggagcaccttcatccccatacttgtctaacgccatcatgtatcgcttcgataacgaaattgacctgtactgcacacagcacaatatctcgtacaccaggtatgccgacgacatgactttctctatgctggacaaaacactgcgggaaaacgtccagcaaaaggtgattgaattacttcaaagcatcccctttccacagcttgagctcaataataagaagaccatctggggttccaaagcccatcgtcgcatgatcaccggtctgattatctcaaacgatgagaaaatcagtctagggagggagcgcaagcgccgaattcgggctcagctcaattacgccattaatggaaagctgacgccggagcagaaaaaatcattgagcggcatgctggcctttgtacggaacattgagccggatttcgtcctgagacttgaaaagaagtatggcagagagctaattagtaacctgaggtga

SEQ ID NO: 11650 - RNA, 918 nt, synthetic construct
  source 1..918: mol_type = other RNA
atgctggccgataggattgccgacgatctgttactccctatggagatgcttcagtatctagttcgctctgccccccaccgctaccgggtatacaggatccccaaacacagcggctccgggttccgtactatcgcacagccagccagagaggtgaggatgttgcagtactgggtgatgaaaaacatatttcccgagttgccggtgcatagcgcggcaaccgcttattgcgctggtaagaatataagagataattgcgcccctcacgcagctaacccttaccttctgaagcttgactttcggaatttctttcctagcatcaaagcgggggacttcatccaatatgctgcagaagcaagacatcttcccttcgatcccccagaactgcggatgctggcttgtattctctttcgtagacccaagggaaaaaaggagatggtcctgtcagtcggggctccatctagcccttacctgtctaacgccctgctgtacgggttcgatgacgaaatgtcccggtattgtgagtcacgaggaatcgtttacaccagatatgccgacgacatggcattctccatgcaggacaaggccaagagactggaggttctccacaaggtgagggacgtgttgcggcagatgccgtttccacgtctgactttgaacgatcgcaaaacagtattcgcatcaaaggcccatagaaggagtataacgggcctgacactcgccaacgatggacgcatttccttaggccgggagcgaaagcgacagattagtgcgcagttgcatcacttcgtcaatggtaagctcccacaagaagaacgcggcaagctgcgcggcctactctcgtatgtgaaagacatcgagcctgccttttttaccaggatggctgagaaatacggaagggaaaaaattgctggtatctga

SEQ ID NO: 11651 - RNA, 921 nt, synthetic construct
  source 1..921: mol_type = other RNA
atggctaatgaacttctcattagtcagatgtctaacgactttatgctgccagagaagaagctcaaaaagcttatcttgtctgccccatatcgctataaggtatactccatccctaaaaggtcaggcaagggttacagggtcattgcccaacccgcgaaggaggtcaaaatcctgcagtactggatcgtaagaaacgtgctgtgcaagttcgttgtccatgatgccgcaagagcttacgtgaagggttgtgggttattaagtaacgtttctcctcattgttactccaagtatctgatgaaattggacttcaaagacttcttttactccataaaggctggagacttcctgtcgtatttctctctctataaggactttggctactccgatatggacatccaggagatggtgaagattctgttttatgcccgtaacaagggcgattattgccttagcattggggcaccctcctctcccctgctctcaaatattatcatgagcgacttcgacaaaagggtcgtggagttttgtagcagccggagtatcgtgtacaccaggtactctgatgatatgacgttttccatgagcgactcgctcctgcgaagagaggttttcttcgagatcaaaagactgttggatatcatcccatatccgcggcttaagctgaatgaagacaaaacactctttctgagcaaagccaacaaacgcatggttaccggcctggtgctatcaaatgacgggcgaatatcaatcgggcacgataaaaaacggatgttgcggagcaaaatatataagtacactaaaggccacctagatgtggatgaagtgaatcagctcaagggaatgctggcatacgtgaacagtgtcgaacctgattttatttgcaagatgaagattcgctacggagacttaattatattctga

SEQ ID NO: 11652 - RNA, 930 nt, synthetic construct
  source 1..930: mol_type = other RNA
atgggaagtaagagcgtatccttttcattaatttccaagatctccagcgacctattgataccagtcgaaaatctgagatatattatccgcacatcgccttacagatacaagaagtactctatacctaaaaggcgggggcggggcgtacgatctatagcacagcctgctaaagaagttaaaaagttgcagtattgggtgataaagaacgtgctgtctaagtaccccgtgcacccagccgcaacagcctataagaaggagagctctatccttcaaaacgccgagatccatctggacagtaggtgtctgctaaagctcgatttcgaggatttctttccctcaattcttgccaccgacattgtgcacttcttcgaaaagggatcgctggagtttgatgaagaggaggtgaatgcgttggcatccattcttagttgggcgagaacccgcacggctgaacgtgttgtggcaattggcgccccctctagtcccatgctgactaatatcatgctctatgacttcgattccgttgtgcgcaggtggtgcgacgagacaaagatcaactataccagatacgcagacgatatctcactgtcaggggatagcaaagaaagcctcgccgaagccaagaggaagattgctgaactgcttgaagagatgaatagcccgaggctctccttgaacaacgacaaaaccgtctttgccatgaaaccttttagacggtttgtcactggcttatacctgtctaatgaggacaaaatctccctcggtcgggacaaaaaacgagccattcgagctaaagtccatcatttcgtcaacgggaaattcaatcaggatcagatccagcacctccgcggagtgatcgcttttgctcgtagcgttgagccagagttcgtggagcggctggagaacaaatttggtaagctgttccaatga

SEQ ID NO: 11653 - RNA, 924 nt, synthetic construct
  source 1..924: mol_type = other RNA
atgctgaaaaacctcggggctgccctgctgttgtctcaacaggaactatcccggcttattagctccgctccccataggtacaagacttacctgatagaaaagaggaatcgcggccaatatagaacgatagcccagccagccaaagaagttaaggcgctccagtactgggtgatccagaacgtgttgaacatgttccacgtccacccggctgcaattggatatcaacgggggaaaaacattgcagacaatgcccgctcccatgttaatagcagattcctgctcaagctggattttaaagacttctttccttccattcggtctgcggatttcgacctgtatattcgcaagcagcagattcagatcacagaccaggaggtcgccgctcttagtagaatactcttttggaacccaaaaggaacaaaagacatgtgcttagccatcggcgctcccagctcgcctggtttgtcaaacatcttaatgttcgagtttgacagtgcagtagaagctttttgctccgaggcaggcgtttcatacactaggtacgccgacgatctgagtttcagcgcgaatctgtcagatgagcttaggcgtgtggaggaatgggtgacacacctgtgtgataatctcgaaagccctcgactgtcactcaacagggagaagaccgtgcgtgtatcgaagaaacgagccagacgggtgactgggctggtgttgacaaatgacagcaaggtcagcatcggccgagatcagaagcgccggatcagagcctctgtccaccacttcgccaccggtcgtctgccagaggatcaaagtcgcaagctgagaggcctcttagcttatatcaactctgtggagccctcctttctaaatcgcttgcggcataaatacggagcagacaccatcaagaggcttcagtctgcaacctga

SEQ ID NO: 11654 - RNA, 951 nt, synthetic construct
  source 1..951: mol_type = other RNA
atggacctgatcgaccgcctgcagtcagcttttcccctttcccgccccgaagttgagttgatcattcgtaccgcaccactgcgatacaaactgcacttcatagaaaagcgcaatggccgcgggcaacggcagatagcacagcctactgccgagctcaagttggtacaaagatggctggtcagcgagtttgtgaataacctcccggtgcaccctgccgccgttgcttacaggccgcagctgggaattaaggatcacgccagaaaacatgcagcgaagaggtatctccttaaactggactttaaagacttcttcccaagcatccaggcgagagacttccacgcccatctagctcggtatacagaactttctttacccgacaaacacgctctcacacggctgctgttcagactggaccgtgaaaccaaggagatggtgctatcaattggcgccccaagttcacccgcagtgagcaatactgtcatgtaccggtttgattctatggttagtgattattgcaaggacttacgcgtggagtacactagatatgcagatgatttggccttctcaaccgatcagcctcacgtccttgacgagattcagaaccacgtcaggcagctgtgtagggccatggaatacccctccctcacgcttaacgaggggaagagtgtgtttacaagtaaaaagcatcagcgtcaattgaccggcctcattctgacaaatgagggtaaggtaagcctgggaagagaaaagaaacgagagatccgagccatggcgcatcggttctctaacggagatctatctgctgaagacgtgtctcgcttgcgggggctgctggcttttgccatgtcgatcgaaccacagtatgtcgagagcctcgtgaggatgatcggccagcagagctaccactccttaatgaggcctggtagaaggacccattcctccgatcaatga

SEQ ID NO: 11655 - RNA, 945 nt, synthetic construct
  source 1..945: mol_type = other RNA
atgaatctgatcgaacgtctgcaaatagctttcccattttccagacgggaagtggagctgctgatccacaccgcccctagaagatacaagattcattcgattgagaagcggaatggcaggggcttgaggatgattgcccaacctacagcagagttaaagctggtgcagcgttggctggtttctaattacctgcagtcattacccgtgcatagtgctgcgactgcctaccgtcccagcctcggaattaaagaccacgcacaacttcacgcatcaggaaagtatctactcaagttggattttgaggacttcttcccctccatacgcggcgaagacttcaggcagcacgtggccaggttttctgatgttactcttccggaccagaccgctatggtgcgccttctgtttagggccgacgtcgatgccaaacggctgatcctgagtatcggagccccctcaagcccagctgtgtccaacaccgttatgtattctttcgatctggctgttaaggagtactgcgagcaggcaggcgtacgctatagccgctacgcagacgatctcgcgtttagtacaaacgtccctcacatcctcgaggccgtgaagactcgagtcgtcgagatatgtcgaacactcgaatatcctcggctccgcttgaacgaagggaaaacggtgttcacctctaaaaagcatcagcggcagctgaccggccttatcttgagcaacgacggacgagcctccctaggtagagagaagaaaagaaaaattagagctacagctcatcacttcgcccagggggtattatccccagaagaggtgggtaagctcaggggcctgattgcatttgccatgagcatcgatgcagagttcgtcgcgtcaattaacaatatgcttggggagcagatctttaaagaactgatgcgggggaatggggaagtggctgaaggttga

SEQ ID NO: 11656 - RNA, 927 nt, synthetic construct
  source 1..927: mol_type = other RNA
atgaacttaatagaccggctgcaggcggcctttcccctatctcgcgctgaggctgcatccatgattgaaaccgcccccaggagatacaaaattcatctgatcgaaaagcggaatggcagaggccttcggcagatcgcgcaaccgacagcggaactgaagttggtccagaggtggattgtggctaactatataaatgcccttcctgtacaccaagcagctatggcttaccgtccagacctcggaataaaagatcatgccaaggagcacgcaaccaagaaatacctgttgaagcttgacttccgtgatttctttcccagtattaaggctaatgacttcaagcagcacttgacccgccatacagaaattagcgaggctgataaagtggcaatcaccaggttactgtttaggtatgatcgggagaatcaggacatgcggctgtcaatcggcgccccttcgtctccttctgtcagcaatactgtgatgttccattttgatactatcgccagtgattattgtaatgccgccggtgttcagtacacacgatacgctgacgacctcgcattctccaccaacaccccccacatcctggacgagctacagaacttcgttcgagagacatgccgccagctcgactatccaagactgactttaaacgaggagaaatccgtgtttacttcaaaaaagttccagaggcaactgacagggctgattctcacgaacgaaggttcagtcagtttggggagggaaaagaagagactcatgagagccatggcccacagatttaacctcggaactctttctctggatgatacgaagaaacttcgcggactgctggccttcgcaatcagcatcgaaccagagtatgtgaattccattatccgcatgataggcgagcctagctacaaaagcctcatgcgagggaactga

SEQ ID NO: 11657 - RNA, 933 nt, synthetic construct
  source 1..933: mol_type = other RNA
atggacctgattgaccgcctgcaagcagcctttcctctgtctagagctgaagtcgaactgctaataaaaacagcccctcggcgctataaaatccacaccatcgagaagagaaatggccgaggcctcagggagattgcacagcctactgcggaattgaagcttgtacagaggtggattgtgagcacatacattaacgagctgcctgtgcactcagccgcaatcgcataccggcccggtctgggaatcaaggatcacgctaaaaagcatgcggcccgtaagtatctcctgaagctggatttcaaggactttttcccatcgattcgcgcgggtgaccttcgagcccatctgacccaccacacagacctcagtactgccgacaaaagtgctttgatgaggctcctcttccgtttagatagtgagaacggagccatggttttgtccataggcgctccctcctccccagctatctcaaacacagtgatgtatccattcgacattgccatagccgactactgccgcgaaaacgacatcgcatacacccgctacgccgacgatctggctttctctacggatactccccacgtgctggatgctctccaagattttatcaggaagacctgtcgaggcctgatatacccctctctaacccttaatgagaaaaagacggtgtttactagcaaaaaattccagcggcagctgaccgggttaattctcacaaatgatgggaccgtcagcttgggcagagagaaaaagcgggatcttagggccatggcccatcacttcagcaggggagctttgtcaaatgaggaaatgagccggcttagaggattactggcctttgctatgtccatcgagccgcagtttgttcattccattatcagaatgatcgggaaggaagcatatgcgcagctgatgcatgcatctgggacttga

SEQ ID NO: 11658 - RNA, 918 nt, synthetic construct
  source 1..918: mol_type = other RNA
atgaacatcatcgaaaaccttcagaaagcttatcctctaagcaaggaggaggtggaattttttatacaatccgcaccacggaggtataaggtacatcatatcgaaaaaaggaacggtcgtggactgagagtaattgctcaacccacagcggagctcaaaattatccagaggtgggtgacgaagaagtttatcaataaactgcccgttcacgattccgcgatggcctataggctgggaaaagggatcaagaatcacgccaactcacatgcccagcagaaatacctcctcaaattagatttcaaggacttcttcccctctattaaaccaagagatctgaaattgcacttagcaaattacactgacctccacaaagacgatataagcgtcatccttaaacttctgttccgctacgataaaagcaagggcttgtccctcagtataggcgctccttcctcacctgccgtgagcaacacaattatgtatcccttcgacgaaatggtttccgactactgtaaaaagcgaaagattaagtacactcgttatgccgatgacctagccttcagcacaaatcatccccacattctcgacgtgctgcagaactttataagagagctttgcgagagtttgaaatatccgaaactcaagttgaatgaagaaaagtcagtcttcacctctaagaagtttcagcggcagctgaccgggctgattctgaccaatgacggtaagatctctctggggcgggataagaaacggctgatccgcgcaatggcacacaactacaagatcgataagctggacccaaaggaggtgagtcgcttacgaggctggctggcttttgccctttcggtggagcctgaatacgtcgagtctattaagagaatgctggataaagacatctacgagaagttgatgaagtga

SEQ ID NO: 11659 - RNA, 984 nt, synthetic construct
  source 1..984: mol_type = other RNA
atggatgctaccaattcagaactgctggagttgctctgcgacgaacatcccttgactcgcgcggaagcctgggagttgattctcaccgcccctcggaggtacaagatccattacattgaaaaacggaatggcagaggccgaaggctcattgctcagcctaccgctgagttaaaagcaattcagcgctggatcatttcaaagtatatcgctgcgatgccagtacatgaggccgcaacggcttacagacctcacaagaacatctcggatcacgcgcgcgtgcatgccaaaaataaatacctgcttaaggtagacttcaaagacttctttccatctatccgggatcgcgacttcgtgcagcatgccgtgaagcaccttgggatttcaactaggcttgcctcagaactgtctttcctgctgttccgtcgtgatgaaaacaaaggtttgtccctgagtataggcgccccctccagccccagcgttagtaactctctcatgtatgaattcgacctgaagctgagcgagtattgcgatgccaacgaaatagtttatactcggtacgcagatgaccttgccctctctacaaacaaaccgcacgagctagataaagcaaatgagtttattagggagctcctgggatgtatccgctaccctcgaatcgagatcaatccggagaagaccgtctttacaagcaaaaagtttcaaaggcagctgacaggcctgatcctgtccaacgagggcaaagtctctctcggacgggacaggaagagaagcatcagagcaatggccgaccactatagaaaaggaaagcttgctcccgaattacacaccaagctaaaggggtggctggctttctccttgagtgtggagccagatttcgtgcgaagtattagaacaatgatgggggagtttcactactttaagttagtgagcgtcaatgaaaagatggaagcagaggggataataccatccggtgacgagtggtga

SEQ ID NO: 11660 - RNA, 984 nt, synthetic construct
  source 1..984: mol_type = other RNA
atggatgccaccaattcacaacttctcgagctcttatgcgaagaacacccatttacaagggcggaggcttgggagctgatcaggagtgcgccaaaacgttataaggtgcacttcattgaaaagagaaatgggagagggagacgcttgatagctcaacccacagcagagctgaagactatacagcgctggatagtaaacaaattcatagcaccacttcctgtccatgacgtggccatggcctacagaccgggaaagaatattgccgaccacgcaagatcacatgctggcaacaaatatctgctgaaaatcgacttcaaggattttttcccttcaatcagggcgcgggacttcactcgccacattgtgaaacacctgggcgtgaacaccagactggcatctgagctcgctttgttactctttcgcaaggatgagaacaaaaggctgtctctgagcatcggagccccgtccagtcccagcatcagcaacactctcatgtatgaatttgactgcaaactatctgaatactgtaaggagaacgagattacttacacacgatacgcagatgatcttgccctgtccaccaataaaccccatcagttagataaggctaatgagtacattcgggagttgctgaactgtgttaagtaccccaggatcatgatcaatcctgaaaagacggttttcaccagcaagaagttccagaggcagctaaccgggctgattctttcgtccgaaggcaaagtgagtcttggtcgagagcgtaaacggctcatccgagtaatggccgatcattatcgcaaagagaaattggatccaaacctgcacacccagctgaagggttggctggcctttagcctatccgttgaacctgactttgtccggaatattcgggccttgatgggagaagagtattactccaagctgatctctatcgacgtcaaggtggccacggagcagctcattcccgctgacgacgaaacatga

SEQ ID NO: 11661 - RNA, 1017 nt, synthetic construct
  source 1..1017: mol_type = other RNA
atgaccaggagcgcagctaaaccaatgagaagaagtatggacgcgacgaatagccaattgctcaatctgctgtgtgatgaattgcctttcacaaggacagaggcatgggaactgattagatcagcccccagacggtataaggtacacttcattgaaaaacggaatggccggggtaagcgcctcattgcccaacccaccgccgagctgaaggctgtgcagcgatgggtggtgactcgctttatctcccagatgcccatccatgatgctgcgtccgcgtaccgcacaaaccgctcaatcggcgatcatgcgaggctgcatgcacggaacaaatatctcctcaagatagacttcaaagacttctttcctagcatcggcgcacgcgacttcaaaaggcacgcaatcaagtaccttgccattgacgcccgcctggcctccgaattagctttacttctgttcaggcgtgacgagcacaagagatttacgctctctatcggagccccctcgtctcctgttctgagcaatactctcatgtatgagttcgattccaagctgagtgagttttgcgaaccgaaggggataacatactctcgttacgctgatgaccttgctctctccaccaataaaccacacgaacttgacaccgccttcaagtttatcaacgagcttctgaacgatctcgcttacccaaggctgactatcaatcaggaaaaaaccgttttcgcctctaagaagcatcagcgaaagttgaccggactaactttaactaacgccggagatattagcctagggcgagagcggaagagggagattagagccatggctgaccactacagaaaaggaaaattggaggggaaccgacacggccagctgaaggggtggttggcctttgctctgtcagtcgaacctgagtttgtccggaccattcggaaactgctgggtgaagagatgtatgcagcactgctgagttttggcgacgtgtcagccccactagtgacacagcttgatgatcgtgagtga

SEQ ID NO: 11662 - RNA, 972 nt, synthetic construct
  source 1..972: mol_type = other RNA
atggtggacaataattcagaactggtcgatatgctgtgtgatgagctgcccttcaccagaacagaggccgctgtgtttatagacagcgcttgccggatgtacaagatccactttatcgaaaagagaaatggcaaagggaaaagactaatcgcccagccaaccgcggaggtgaaagagattcagaggtggatcattaagaagtatatcaagaaccttcctatccataatgcggcgacagcttacagggaaggccggaacatctttgaccacgcacgcccacacgtcaagaataagtacctgctcaaggtagattttaaagacttcttccccagcatacgtgcccacaatttctctaagcacatccgcaagcatttggggattagcaagcctttagcaattgaccttgcccgtgtcctttttcgacaagatgaaaagcgcagattgagtctcgctattggagcccccagtagccccagcgtgtccaacaccctcctatacgaattcgattcccagttatctatcttttgccaggcaaacaacatccaatatacaaggtatgccgatgacctcgctctgtccactgacactccgaaaatactggatgaggccttgaagtttattgaaaagctgatcaaggacatcccttacccaaaactgtcaattaacaacgagaagacggtgttcacgagcaagaaattcaaacgagagctgaccggattgattttatctaatgacggttcggtttcactgggacgggagaaaaagaggatgataaggacaatggcccacaaatactcaagtggtgaacttcatgattctctgattggccgcctcaaagggttcctcgcattcgcccattccatagagcctatctttgcagctaagatccgggagaaaattggcgaagagaaatataattccctgaccaactttcaggagactaaccatcagaaaaaagttcaggacttctga

SEQ ID NO: 11663 - RNA, 924 nt, synthetic construct
  source 1..924: mol_type = other RNA
atgaatctgattgagcacatccagaaggatttctctctgtcactccatgacgctcgggtgctcattttcacagccagtagacgctataaactccattacatagagaaaagacacgggcggggcaagaggctgatagcgcaacctactgcagagatcaagctgctacagcgctgggccattgaaagctacctgtcaaagctgccgatccatagagccgccaccgcatatcgacctggcaggggaattaaggatcacgccgaagtgcacgctgacaaccgctatttactgaagttagacttccaggatttctttccttccatactcggcaggcatttccttatgcacctgaagtcacacgccagtatagccgacgacgatgctaaatttcttatgcggttactgttccggtttgaccgggatagtcaggactacgtcctaagcatcggggcaccctcatctcccgcagtcagcaataccattatgtatgactttgataacgccctcactgattactgcaagacccacgatatcatctactctcgttatgccgatgacttggcgctttctacttccaagccaaaggtgttggatgacgcttttaatttcgtgaaacagctgtgtaaggacgttccttacccccgcttgcaactaaacgacacaaagacagtattcacgagcaaaaaacaccgtaggcaactcacaggtttgatcctgaccaacgaggggaaaccctcccttggaagggagaaaaagagactcatccgatccatggcgcatagattcagtctgagcgagctgccagatgaccagatcctgcatcttagaggcctgctggcttttgcttactccattgaaccactcttttttagctcgattaatcgaatgatcggcggagaagcattccagcgcttgatgaaaggttga

SEQ ID NO: 11664 - RNA, 924 nt, synthetic construct
  source 1..924: mol_type = other RNA
atgaatatcattgagcgaatacagagcgactttagcctttccttacacgatgctcgggtgcttatattcactgcagcatacagatataaactccactacattgagaagaggcacgggcgtgggaaacgcttaattgcccagccaaccgctgagattaagctgctccaaagatgggctgtagagaagtatgttggtcagctgcccatccacaaagcggcaacagcctaccggagtgggacgtcaataaaagatcacgccgcactgcacgccgaaaactgttatttgctcaaattagacttccaggatttttttccgagtatcctgggccgccattttctgatgcacttgaagagctacatgaagatctcagatgatgacgccaacctccttatgcggctgctcttccgtttcgacagggaatcccaagattatgtgctatctattggtgcgccaagttctcccgccgtgagtaacacagtgatgtacgatttcgacaataagctcactaattattgccggactcatgacatcgtctacagcagatatgccgacgatctggcgctctccaccagcaaacccaaggtgctgaacaacgcttttgacttcgtgaaaaagctgtgcggcgatatgccttaccctcgcctgcagttgaatgacgctaagacagtctttacctctaagaagcatcggaggcagttgaccggactggttcttgccaacgacgggaagccatccctcggacgcgaaaagaaaaggctaattagatcaatggcacatcatttttccctaggcgaactgcctcaggaccaggtccttcacctgcgaggattgctggctttttcgttcagcatcgagcccctgttcttctcatctattaataggatgatcggcgaggaagccttccaaagactgatcaaaggctga

SEQ ID NO: 11665 - RNA, 930 nt, synthetic construct
  source 1..930: mol_type = other RNA
atgggactgattgagcgcatccagcaggacttcacgctaaccaggcgcgaggtgcagctgctgcttttaacagccgcatcccggtataagctacattatatcgaaaagcggcatggccgtggtcggagacttatagcacaacctacagcagaaataaagatccttcagaagtgggctgtggccaactacgttaatctcctgccaattcataatgctgcgacggcttaccgcccaggcagaagcattaaagaccatgctgtggcccacgccggcaatagatacctgctgaaactggactttgagaatttctttccgtccatcactgggaacaacttctttgatcacctgaagagttatctcgaagtttctgatgaggatgccaacttattggtgaggctgttgttccggtacgaactggtcagtcgaaactacgtactctcaataggagcacctagctcccccgccgtgtcaaacaccatcatgttcaagtttgataccgcccttgccgaatattgcgacgcgaaccagatcgcttatactaggtacgcagatgacttggcactgtccacaaatacccctaaagtactcaatgatgcctacaatttcgttaggcagctctgtcgagagactcagtatcctcgggtcagcttgaacgagaagaagacagtgttcgtcagcaacaaatttcgcagggagttaaccggcctggtcctgagcaatgagggaagaccctctcttggtcgagagaaaaagcgtcaaattaggtctatggcgcaccacttctcactcggccagattccccccgaggacgtgccacacttgagagggctgatcgcttttgccatatcgattgaaccagaattcattgagtccatcaaacgcatgatctcaatcgaactgtttcagtctctcatgagtgggcaagcttga

SEQ ID NO: 11666 - RNA, 927 nt, synthetic construct
  source 1..927: mol_type = other RNA
atgaaacttattacggccatacagaacgacctcccattgagcatctctgaaattcagctgctcctgttgtctgctccacatcgatacaaagtacatgagatccagaagagacacaatcgcggcactcgggttatagcccagcccacctcagaaattaaagtacttcaaaggtgggccactactaatatcctggccaagttacccattcactcagccgctacagcatatgtcgccgaatccaacacaaagaagcatgcccaggcgcacgcaaagaatcgttacctgctgaagctcgactttaaagatttctttccctccatcaaggcggacgattacttgcagcacctgataaaatatgcaaaaatcgacattgacgacgcccgacttctctgtagacttttgttctggcgggaccgggtcagtaacagcttaaagttaagtatcggcgccccgagtagcccaatggtgtccaataccgtcatgtacgatttcgacacatttgtgtcggaattttgcctgaaaattgaggtggtctacacccggtatgctgacgacctggctttctctacagacaaccccaaggttctagagtccgtgcatgagtttatcatcaccctttgcaaaaatctcccttatcctaacctgcagctaaacgaggagaagacggtgttcgtgagcaaaaagcacaaaaggtatctgaccggactggttctcaccaacgatgggaagccttctgtgggtcgcgataaaaagcgtcaaatcagagcaatggtcaatacatatgctaacggaaacatgcctgatgatgagctcaataggctgagagggttgatagcatacgctcacggcattgatgaaaagttcatcgatagcctgattcgcatggtggggactgagaactacaataagctgatctcaggtaggtga

SEQ ID NO: 11667 - RNA, 972 nt, synthetic construct
  source 1..972: mol_type = other RNA
atgtgccaagggcaggagcggataactaagtttattcgttccaacgacatgaatgtgattcggaccatcgtaaacgcctaccctctgagtctacgagaggcagccgtcctgatccagacagctcccgcacgctacaaggtgcaccaaattgagaaaagacacgggcgaggaactcggaccattgcacagcccacagccgaaattaaactgctgcagaagctgctcgtgagggaggtgatagagaagcttccggtgaatgacgctgccaaggcttatcgctcaggccaatcaatcgccgatcatgctcgcccccacgcaagcaaccgtttcctgttaaaactcgacttcaaggacttctttccttccatccggggagccgattttctcaagcacttgcacaaacacagtgagatcggcacggaggattctaagcacctcgtaaagctctttttctggaggccaagagggactcgctctttggtcttgtctatcggcgcccctagcagcccagcaatctcaaatacaatcatgttcgactttgattctgccttaagcgatttctgtacccgggaacatgtggtttacaccagatatgcggacgatttggctttcagcacaaacggaccagaggtgctgcacagggtgcatgaacatgtcataaatctgtgccgcactcttaagtatccccgtcttacgctgaacgacgccaaaacagtctatacctccaaaaagcatcataggagtttaaccggactggttctgtccaatgatggtaaagcgtcactcgggagagagaagaagaggcagctgagggctatggttcacagacttaagtacgatcttctaaaccaggaagaacgggccaaattgaaaggttggattgcattcgcgctcagcattgacgaagagtttgtccgatcgctgaaaagaatcatgggcgaccagacttttgaatccctgatgcgcggctga

SEQ ID NO: 11668 - RNA, 924 nt, synthetic construct
  source 1..924: mol_type = other RNA
atgaacgtgatcgagataatcctgcatgaattcccgttggggcgccaggaggtcgaaagactgattcgcactgctccctcacgctacaaagtccacgagattgagaaacgcaatgggaggggcaagagaaccatcgcccagcccaccgccgagatcaaactgctgcaaagatatctggtagatagatatatctccaacctgcctgtgaatgacgcggctaaggcttacaggttaaaccacaacatactggatcacgccagcccacacgccaaaaatcagtaccttctcaagttggatttcaaggacttttttccaagcatacgggcggtggactttattaagcatctccgcaaatactctgccctctctcgggaagacatgaaaacactatctagggtcttcttttggcgtcccaagggccagagggacttgattttgtccataggcgccccatcgagccccgctatttcaaataccatccttttcgatttcgacagtgctgttatcgagcattgcatcaaaaacgagattacgtacacccgatacgcagacgacctcgccctctccactaaccagcctaatatcctgaatgatgcgtatatctttgtggaaatgctctgtcgttcattaaaaacacctaagttaaccctgaatgcagataagacggttttcacaagcaaaaagcaccaccggcaacttaccggactggtgcttagtaacgccggcactgcaagtattggacgggaaaagaagcggacaattagggcaatggcccaccattataaacagggtattctatcccaggaagagcatgggagactgcgaggttggctggcatttatgatgtctatcgatcgagagttcgtgacaactatcgaaaagatgataggagaggtagctttccaaaagctgatgcaggactga

SEQ ID NO: 11669 - RNA, 930 nt, synthetic construct
  source 1..930: mol_type = other RNA
atgaacgtccttgagctcttgcagaaaaaattgcccctatcaagatcagagctgctgctgctcattgccacagctcccaatagatacaaggtgcacacaattgacaaaaggcataaccggggtaaacgtgtcatcgcccagccaacagccgaagtgaaggcgctacaaaagcttctcctgggcatactcaggggcaagttaccagttcactcttgtgccaaagcataccagcccgggacgagcatcagagatcatgccctgccacacgctcccaatcggtatctgctcaaactagacttcaaagatttcttcctgtccattaaaggaggagatttttcctcccacataaagagacatctggatattcctgatgttgagatcgaaatattcacacacgcgttcttttggacccctaagaaaaccatggactttgtattggctatcggcgcaccgagctccccgtggatttcaaataccattctttttgagttcgacgagctgctgaccgactattgcgattctaagaacgtgaagtacacccgctatgccgacgacttggcatttagtaccaatactcctcatgtattgaaggacgtgcatgcctttgttcaggacatctgcaaggagatcgcttatccacgcctcaacatcaacgaatcaaagactgtgtttacttctaagaagaacagcaggagtctcactgggctcatcctttctaatgaagggagcgtgtccataggacgagcaaaaaagcgagaaattcgggctatggcccacaagtaccagatcggtgcactggacctggagtcgaccctgcacctgcagggcctgcttgccttcatgcaaagtattgatcctgatttcaatcaaagcatcgctcgcatggtcggcaacgataggtacctgacattaacgaaacagttacagtga

SEQ ID NO: 11670 - RNA, 924 nt, synthetic construct
  source 1..924: mol_type = other RNA
atgaaagtgcttgaccaactgtttaccgactttcctatgtccccccagcagcttcgaatattgatgctgactgcgccctatcgctacaagttctttcacattcctaaaaggagtggaggcagacgtctcatcagtcagccagctaaggaggtgaaatggttgcagcgctatgtaattgaaatcatccgcaagaagatccctgtgcatagatgtgccacagcctacgagccgggctcatctatcttcgcaaacgccgaggcccatgtacaaaaccggttcctgctgaagatggacttcaaaaacttttttccgagcattacggatatggatgtctcccatctcataaaatcggcttacccagacattgaggatggggaattagaattaatcgtccggctcctcgtgatgtccgacaagaagaacgagaaattcgtcttggccgctggcgccccatcttctccattcatcagcaatgcactgctaaatcaatttgataccgaactgcacctccactgccttagccagaatgtcgtatacacaaggtatgcagacgacatcgcactctctaccaacgcccccctgctgctttccgagcttcacaaatttattagggttctggtcaatgaaatgaaacatcctgtgctgaagattaacgaggagaagaccgtgtatacatcaaagaagcacaaccgaaaagtgactggtctgacattaaatagccagaagcaggtgagcctggggcgcgacatgaagagagagctgcgtgcggctgttgataagttcaggaaaaatgagttgtcccaggaagctgtgagtaccctgagaggaaaattggctttcgcactcgccgttgaacccgagtttgtgctacggctacggactcactacacggatgaagttataactaggctgttccagtcatga

SEQ ID NO: 11671 - RNA, 933 nt, synthetic construct
  source 1..933: mol_type = other RNA
atgaacatgaaatcactaatcagtcttcttgtcgatgaactgcctttctctgaaagggagatccgggagctcttaaactcggccccctcgcgctacaaggtgcactatatcgagaagagaaagggtcgcggactgagacagatcgctcagcctactgccgagatcaaactgctgcagaggtgggccattaatcagtacagagatcagctgcccgtccaccctacagccaaggcatacattagtgactccggcatacgccaacatgcagccgctcacgttaagaactcttatttgctgaagctggacttcaaagacttttttccgtccattaaaggcattgatgttaggcgacacctggctaaacacctcggtgccccctccgaggatttgtcactgctcatgaagctattctgctggaagggaaagccagtaggcgggttaaggttgtcaatcggcgctccaagctctccattcatctccaactctattatgtttgagatggacgaaaagatacagaaaaaatgtagcgactacgatgccacctacacccgatacgcggacgacctggctatttcaacaaatcaaaaggacgcactgagcgcaatctatgagcatatactggaactctgcgacagtagtaagtacccctccctgaaaattaatccagggaagacagtgtttacatctaagaagcacaatcgtcatctgaccggcttgacgcttagcagcgatgggaaagtgtccctgggaagagatcgcaaaaggctcatccgggctatgacccatgcctatactactggcaaactcaaccctgacgaactcggtaaacttcggggatggatcgcgtttgcatatagcatcgagcccgatttcgtggaaagcttagagcgtatgatagggcttcaggccttgaatcggattcggagaacctga

SEQ ID NO: 11672 - RNA, 903 nt, synthetic construct
  source 1..903: mol_type = other RNA
atgtctctgctccaggaattgagcgataaattccagctgcacgagcagctaatggagagtttcattaaatccgcaccataccggtacaagtttcataaaatcgacaaacggcacggagggaagcgcgagattgcccagcctgtcaagtccctgaaaatcgtccagcgctggttggtgaagcactatttatcaaagtacccaactcactctaaaagcgccatcgcgtatatcaagaacaagaacattaaggacttcgcagagccccatagaaacaacatattcctgctgaaactggatttcaaggatttcttcaacagtatcaagattagcgacttctacatcttctgtgagaagctttctattcccgaagaggacaagatctttctgggcttactcctcttctgcaagaataaacaagacgagccctatctgagtattggtgctccttcatctcccaccctgtccaatgtgctcatgtttaactttgacaacgaagtgtttaacctctgcaaaaaggatggaatcatctacacacgttacgctgatgacctggcttttagcactaatcagcctaatgttcttcggcaactgttgtcgaatataaaagaactttgtgccaagctaaactacccgaggaatctgcagatcaatacccaaaagacgatttttacctcgaagaagtataacagaacactgacagggcttgtaataagcaatgacggcaatgttgggatcggcagggagaagaaacgaaagctcagggccattgctcatcaggcaaaattaggaagattgtcacaggataaagtgggctccctgttgggcaagattgcctttcttaaaggtatagacccaagctttgccaaacaactggaagataagtatctcaaacacatctcctga

SEQ ID NO: 11673 - RNA, 903 nt, synthetic construct
  source 1..903: mol_type = other RNA
atgttgatcaacgatttgaaggaaaaattcagtctcaatgagaaagagattctgtcatttatcaacagctcgccaagtaggtacaagagctacaatattaagaaaaggcacggaggcacacgtgagatagctgaacccaccagatctctaaaaatcctgcagagctgggccttgaataaatacctcagcaagtataagatccatccctccgccatagcatacgtgaaaaacaagaacatcaaggacttcgtcttgcctcattctaataacaagtatctgctcaagatagacttcaagaacttctttaactccatcaagggaatcgactttctgcactttctggaagacaaaaaaagcgatctgtccaatgaagagagacacctccttacgaacattttcttctgcaagaacaaaaccagcgaatctaaggaactgtatctgtccattggggcacctagcagtccattcatctccaacattatcatgatcgatttcgatgaccagatttctcaactgtgtgctaatattggcgttacttatacacggtatgctgatgatctggccttctctacaaataatcctaatatcttggacgagctgcttgaggagatcgaaattatttgcaagaaccttaactaccccaagaagttagagattaattcagagaagactgtgtttacctcccgaaaacacaatcggaccctaacaggcctcgtaatctccaacgacggtaaaattagtataggtcgcgagaaaaaaaggaaactccgcgtgatcgcccataaggcgtcgcttagactgctggatcaggaatctctcgataagtttaaagggactctggcctttcttttatcaatagacccggacttttcaaattacttaaagcagaaggcaaacatctga

SEQ ID NO: 11674 - RNA, 909 nt, synthetic construct
  source 1..909: mol_type = other RNA
atgttgagtgtgctcgaaaatttcaagaaaacctttagcttctccacggtgtctgctattatctttatacagactgcacccaaccgctacaaatttcatacaatccagaaaaggcacgggggggagagagagattgcgcaaccgaccaagagtttaaagattgtgcaacggtgggtaattaatcagtacttccagaatagcccaatccataaggctgctaccgcatacatcaagggtaaagggattctcgaccacgccgaacaacacaaaagcaataagtatctactgaagctcgatttcaagaacttcttcaactccatcaacatacaggacttttacgaattcatcaatcgttctatgccccaattctcagaggaagacagagatatcctgggacttcttcttttttgtaagaacaaggacgacaactattatctatcgattggcgcgccttctagtcctcatgtcagcaatatcatactgtacaagttcgactgcctgattcaggagatctgctctaaaaaaggcgttgtttataccaggtacgcagacgacctggctttttcaactaacataccccacattttgaaagggatcctctgtgatatcgaacatattttgtccaacctggagtatccaaaaaatttgaaactgaaccaggagaagaccgtctttctctcacgaaagcacaatcgcacactcacaggacttgtgataagcaacactggtaagatcagcatcggcagggataagaaacggaagctgcgggccgccattcataacgccatccacggcaaactgaccgatgaggaaatccagacactgaaaggaagaattgcatttctgaagggcattgataaagagttcgccataaagctggagcaggaactgcagtccgccaatttatga

SEQ ID NO: 11675 - RNA, 921 nt, synthetic construct
  source 1..921: mol_type = other RNA
atgagcactatctttgacaagatttgcgagactttcagcttaaatcctcatgaggccgaaatttttattaagaccgcgccagagagatataaactccactcgatctccaaaaggcacggtggtgtccgctatattcaccagccaaccaaaaaccttaagtttatacagcgctggttggtcaactcttacttctcaagtatgcccatccactcatgtgcccatgcctatgtgaaaaatcggaacatcctgagtaacgctaaaccccattctcacaacaagtatctaatgaagctcgatttctctgacttcttcaccagcattacgattagggattttctgatctttgcccacgacaatttaagagaattcagctacgaggaacatcatattctcgcttccctgttgttttgccgtcataagattaatggagactttgtgctcagcatcggcgcaccttcatcacctataatcagcaatattatgctctaccacttcgaccaagttctgtacgacttttgtcggacaaagtatgtttattacacaagatacgcagatgatttgagtttctccactaaccagccacgaatcctgaaagaagaggtgtttcctttcgtggaaggactttgcaagacaatcagttacccaaactacctgaagctgaataaaaacaaagtagtgcacgtctccaagaagtttaaccgcaggatcaccgggctggtgctatctaacgagggcaatatttccatagggagggataaaaagcgacagctgcgggcaatggcccatcaaatgtctcttaataagctgcccccggagaagataaataagctcttgggctatatcaacttccttaaagggaaaatcgatcccgagttcgctgaacagctgatccagaaactgaataacaagcacaataagtga

SEQ ID NO: 11676 - RNA, 960 nt, synthetic construct
  source 1..960: mol_type = other RNA
atgaatattatcaatgcgcctttgtttgagcggctcttggctctaagtcctttctctgccagggagctgggcattctcatcgcaacagctccccaccgatacaaagaccactacatcgagaaacggaacggtaggggaaagcggctgatctcccaacccacagccgaacttaaattcctgcaacgcctcattgtgaaacatgaattttcatccttgcccatacatggagctgccactgcctatcggagcggctcctctataaaggcgcacgccctgccacatgcacattcccgctatctgttgaagctggatttctcggacttctttcccagcctgaaggcaaacgctctcaggtatagactaagccgcgacgcctcatatactgagcaggaactgtggatcttatgtcagctcctttgtagacagccgagacgtgatgccggcctgcagctgagtataggggcacctagttccccatgtgtaagcaactacctcatgtgggaattcgatagccggctggctgaattttgcgctgcctgcggtaccgcatacaccagatacgcagacgacattgccgtgtcaaccacatttgcggatgtgctggatgtggtcgaggccgaggttcgtaggcttcttggggagcttggatacctgggcctctctctgaatgaaggcaagaccgtaaatgtttccactaagtctcgcagaacgctcgtgggcctggtccttgcgaacgatggaacagtgtcgattggtcgggaagagaaacgacgcttaagagcaaccatgcacaggctgacgcagggaggactgtcaggcgacgaggtggctcgattccgtgggcagctcgccttcgctcactctatcgatgccagtttcgtcgacttattgtgcgctaggcacaattttcctaacgttgccagcatcggtagcccagatgggggggacctaactgactga

SEQ ID NO: 11677 - RNA, 960 nt, synthetic construct
  source 1..960: mol_type = other RNA
atgtccatcgcaaacgagcccttatttgagcgtttactcgccctgagcccattctcagctcgagagctgggcactcttgtggctaccgccccgtaccggtacaaggatcattatattgagaagcgcaacggaagaggcaagcgcctaatctcccagcccacagcagaattgaaatttttacagcggctcattgtgaggcatgaattttccagcttgccaattcacgaagccgctactgcgtacaggccccaccgttccatcaaagctcacgcccttccgcacgcaagtgcccgatatctcctaaagttggactttcgcgactacttcccttcacttaaagctagcgctctgcgttataggctgtctcgggacgccacctatactgagcaagagctctggatactgtgtcagctcctgtgcagaaagccaaagagagacgcagagctgcagctcagtataggcgcaccttcttctccccacgtatcgaactatttgatgggcgagttcgactctcggctgacggacttttgcggagcttgtggagccgaatacacccgatatgcggacgatatcgcagttagtaccagcttccctcatgtgctggatgccgtggaaggggaaattcggaggctgctaggtgagctgagctacctgggattgtcactgaatgagggcaaaacagtcaacgtgtctaaaaagaataggagagtacttgtcggcctggtgctggccaacaatggtgtggtcagtatcggcagagaggaaaaaagacgcctccgcgctacaatgcataggcttgtgcagggagccctgcctgcagacgaagtcgcccacttccgggggcaactcgccttcgtctactcaatcgatccagcttttgttacctccctgtgcgcgcgctacgatttccccaatgttgggtccattggggcccctagcgggggtgatagcacagattga

SEQ ID NO: 11678 - RNA, 960 nt, synthetic construct
  source 1..960: mol_type = other RNA
atgagtatcattaatgagcccttatttgagcgtctcctgacactgtccccattctccgccagagagctgggcatactaattgccacagcaccttatagatataagtcccactacattgagaaaagaaacggaaggggaaagcgcttaatcagtcaacctactgccgagctcaagttcctccagcggttggtggtcaaacacgagatgtcttcactgcaaattcataatgctgccactgcgtaccggcccaacaggtcaataaaggaacacgccctaccacatgcgcgcgccaggtacctgctgaagctcgatttccgtgacttctttccgtctctgaaagctacagctctccggcaccgacttctggcagatgcaaattactctgcccaggaactttggatgctgtgccagattctctgcaggaggccgcgaagggatgcagagctccagctttccatcggcgcccctagtagcccatatgtcagcaactatttaatgtacgagtttgatagcaagttggcacggagctgcgaggcttgtggcgctgaatacacccgctatgctgacgatatcgccatctcgacttcttttccccaaatcctagacattatcgaagtggaggtgcggcgcctgcttggggagcttgactatctgggattgagcttgaacgaaggcaaaacggtgaatgtttctaccaagaacaggcgcaccctggtaggtttggtgctcgctaacgatggtaatgtttccatagggagagaagaaaaaagacgactgcgcgccgctatgcataagctgacccaggggaaactgccagtagaggaaacagctagactgagagggcagctggcgttcgcatactcaatcgaccctgactttgtgaatgacctttgtgcccggtcaaacttcgccagcgtcgcagccattagtcagcccgataatggcaagcagaccgactga

SEQ ID NO: 11679 - RNA, 948 nt, synthetic construct
  source 1..948: mol_type = other RNA
atgagcatagtgaacgaaccccttttcgaccgtctactggctctctccccttttagtgccagggaactcggcgtacttatcgctactgccccacaccggtacaagaatcattacatcgagaaacgcaacggaagaggtaagcggctcatctctcagccgaccgctgaattgaaattcttgcagcggctgattgtgaaacatgaaatgagctcacttcccatccacgacgccgcaactgcctaccgatctcagcgcagcataaaggaacacgcattacctcacgccagagcacgatacctgcttaaactcgacttccgtgatttctttccaagcctcaaggcgacagccctgagacaccggctgctactggacgcaaattatacagaacccgagctgtggatgttgtgccaaatcctcttccggaaggctggccgccatacggatctgcagctgtccattggagcaccttcctcccctcacatctcaaattatctgatgtgggaatttgacaagaagctcgcccaattctgcgagctgctgggggctgagtatacacgctacgcggatgacatagccgtcagtacttcttttccacacctgttagacgctgtggaggccgagatccgaagacttttaggtgaattagactatctgggcttgagtctgaatgaggggaagaccgttaacgtttctaccaaaagcaggaggacactggtgggactagtcctcgcaaacgatggcaccgtctccattggaagggaggagaaacggcgtctgagggccactatgcataggctcgttcagggcctgcttgcaggagaggaggtagcgagattgagagggcagctggctttcgtgtactcaattgatcgcgcctttgtggattcgttgtgtgctcgccatggctttaccagcgtggggagtattggtcagcccacgtcagattga

SEQ ID NO: 11680 - RNA, 954 nt, synthetic construct
  source 1..954: mol_type = other RNA
atgaatatcatctcaactcccctcttctctcgggtcctagagaattcccccttttccgaaagagagcttctgatgctagtcctcactgcccctgagcgctataaggatcactatatagaaaaacgccacggtcggggaaagagattaatttcccagccaaccgccgagattaagtacctgcagcgcctgattgtagcaagagagttgagcgaacttcctatccatcctgcagccaccgcttaccgggtgggatgttctattaaagaccacgctctgctgcatgcctccaatcgttacctgctgaagctagatttcaccgacttctttcatagtatcaagcaggatgccgtgctcagctgtctttctagagacacaagctacagcgttaacgagcagtggatgttggtgcaactcttgtgccacaggccacgcggcgctggtgatcttcagttatcaatcggggctcctagcagtcccttcatgagcaactacgtcatgcacgaatttgacaataaggtggataggatgtgcagagcctctggcgcagtgtattctcgatatgctgacgatatggcgatctcatcatctttaccaagggtgctcgacgccgtggagcaccagattcgcgcgttgcttctggaaatgaagagcccgaaactgcgcttgaacgagagtaaaacggtgaacgtatcgaaaaaaaatcgtcgtacactggttgggctcaccctctccaacgaaggctcggtcagtatagggagagacgaaaaaaggcgactgagggccatgatgcatgcactgactgagggcaggctcgatgttacatccgtgtcactgctgcgaggaaagctggcatttgctcagagtattgactctgtgttcgttagccaactgtgccggcggcatgggttttcctccgtcaaggacatccggccacccatatcaagcatcggctga

SEQ ID NO: 11681 - RNA, 951 nt, synthetic construct
  source 1..951: mol_type = other RNA
atgtcctttgccagggaacccctgtttgttcggctgctggatttaacccccttcagtgaacgagacttggccatcctgattgctaccgctcctcgcaggtacaaggatcattatattgagaagaggaacggcagggggaagcgactgattagccagcccacagcggaactcaaattcgtgcaaagactgctaatcaagcacgagcttacacatctccagctacacgaggcctccgttgcctatcgctccggttcctcaataatggaccacgcatccccacacgcgtcagctcgatacctcttaaagctggatttcaaggacttctttccgtcacttaaggcatctactctacaatacagattcaccaaggacagcgattacagcgagaacgaaaagtggatcctgtgtcagcttttgtgccgcggctctctgatcacgggagatctccagctgtcaatcggggctccttcatctccttatatttcgaactatctcatgtgggaatttgatacgaaactgaccgagttctgcaaaaaatacagcgccgagtacacacggtatgccgacgatctcgccatttctacttcccagccacacgcacttgataaaattgaaagtgaggtcaggcggctgctcatggagttgagctacctgaagctgaccctcaatgaagacaaaaaagtgaatgtgagcaaaaagaatcgcaggacattggtgagtcttcgtctggccaacgacggcaatgtatctgtggggagacagcggaaacggcaactgcgtgcggctatgaacgccttgatacatggaagattatccactgctgagatcagtagattccgcggaatgatggcttttgtctattctattgacccaaatttcgtggaccagctgtgtagtaagaacggttttgcaactataagcgccatcgacgcagtcaaaatcaagaagtga

SEQ ID NO: 11682 - RNA, 948 nt, synthetic construct
  source 1..948: mol_type = other RNA
atgtccatagttacagagcccctatttcagcggctgctggcctggtccccatttagtgagcatgaattagtcgtgttgattgccaccgctccttctaggtacaaagcctactacattgagaaaaggggcgggagagggcagagagagatttcccaacctaccaaggagatcaaattccttcagaggttgctcgctagcaaagaactgcgcgagctgcccattcatgatgtggctgtcggataccgaagcgggcgctcgatcctcgatcacgcacagcctcacgcctctgcacgctatctactcaagctggacttcaccaattttttcccgagtctcaagtctaaggccctcgatcacaggttatccagggacactgcatacagcaccgctgaacgttggattctgcggaacctcctgtgtagacgaacaccaggcaccggcaactatcagttgagcatcggcgcccccagtagccctcacatttccaattacctgctgtgcgaattcgaccagcttatgagtgactactgcggtatacgggtggtgcgatatacccgctatgctgatgaccttgcattttcgacatcaatcccatcagtgttgaacgacatagagactgaggttagaagactaattcaggagctcgactatctgggtctttctctcaatgaagccaagactatcaacgtatccacaaaacacaggcggacactggtcggactgactctgtcaaatgatgggcgtgccagcatcggacggatcgccaagagagaactgcgccaagcaattcattctctgcggcatggtttacttagccaatctgaaatcgcgaacttgaggggccgcctggcgtttacgtacgctatcgacccagagttcatagaacacctgcttcatagatatggcttcgagtcaatctccacgatcgatggaccccagactgattga

SEQ ID NO: 11683 - RNA, 993 nt, synthetic construct
  source 1..993: mol_type = other RNA
atgatccccgagtatgagtctctgtttgcacggatcctcgcacaatcgccattcagcagtaaggaactggtgaccctactggggacagctcctgacaggtataaagatcactttatccagaagcggaacggccgaggtctgcgtcagattagccagcctactgcggagttaaaatttttgcagcggctcttggttaattttgagttttgcaacctgccagtgcacaatgctgccactgcctatagagctgaaaagtcaattaaaagccatgcagtagaacacgcgaagaactcctacctgctgaagcttgatttcaaggatttcttcccttccattggctcagacgcgattaaacaccgcttgaggcttgacatgaactattcagagacagaactgtggatgctgtgtcaaatcctctgccgccgagatcgcctaacaaataggctgcagctgagtattggcgccccctcttcaccttttctctctaactatatcatgtgggagttcgattgtcgtatacaatcttactgcgaccagctaggggtgtcctacactcgatacgccgatgacttagccttcagcaccagcgtcccccatattctggatgtcgtgcacgaatatgtcgagagattactgagagaattgagttacctgggaatatctcttaacaaggagaaaaccgtaaacgtttccaagaagaacaggagaagccttgtgggactcgtgctgagtaattccggaaacgtttcgatcgggcgcgccgaaaagaggaatctgcgggcagcaatgcatgccttgatcaataataagctcacacaagacgaggccggcaaactgcgggggaaaatggctttccttcttgccatcgaccccgatttcgtgaatggcctctgtgtgaaatacaatttcacgagagtcgctgacatacaggctaccaactacgacagctcccagccgcagaaaaacgatggtaccgacgacctcccattttga

SEQ ID NO: 11684 - RNA, 939 nt, synthetic construct
  source 1..939: mol_type = other RNA
atgaacttcagaagcgcgaatttatttactcggcttcttgagatgtccccccttagcgcccgcgagttgagtcgagtgatcgccaccgcccctcatcgctacaagtctcacttcatagagaaacggcacggcaggggcaaaaggctgatttcacagcccacagctgagttaaaatacttccagagatggcttgttgacaatgagctgaatcaactcccagtccatgatgccgccaccgcctatcgtaaggggaggagcatcctggatcatgcgacaccgcacgcaaagcagcgttaccttcttaagctggactttaaggacttctttccctcactcaacgaacacgcactccgacactgtctggaaagggactgcaactactctgaggaagaaatcgagatattatgcaacctgctactgaaaagtgcttcgattgaaggcggacctctccagctgtccatcggtgcaccttcttccccatttatttctaactatctgatgtgggagtttgacattgcgatgcagcaatactgtgaagtcatgggtgtaatgtactccagatatgctgatgacctagccttctcaacggataccccgcgcctactcgataaagtatttgacactgtccagaagatactggcctctatcagctatttgcccttgatcctgcatccagacaagacagtgaatgtgagtaaaaaacgcagacgactcctggtggggctgactctcgccaacgatggcaatgtttcaatcggaagggaagagaagcgcagattgcgggctgctctgcatgcatatacccaaggccggttgccatgtgacgaggttgctagactggcaggaatgctgagcttcgtgtggagcattgatcctaagttcgtggaaaatctctgccagcggcacgggttcagtaggatttccgatctgctccggtga

SEQ ID NO: 11685 - RNA, 951 nt, synthetic construct
  source 1..951: mol_type = other RNA
atgaggatctctgacgcgtcgctgttcgagcgcataatcgagaacacccctttctccgaggctgaattggtactcctgatactgacgggacccacacggtacaaagaccactggattaacaagaggcatggcagaggcaagagattaatcagccaacctactgcagagcttaagttggtccagcgctggctcgtgagcagcgaactttcctcccttccagtcgacgttcatgccacagcatatagaaaagggttatccattcgtgatcacgtgagtccccatactaggagccacttcctattgaagctggattttaaggacttcttcccttctttgactgattccgccctgagatacagacttgaacacgacgccaactatacggagctggaggtgctcatcctgaccaagctcctgtttcggaaaaaacagagcgaggagacatataggctatctatcggcgccccctctagtccatttatttccaactacctcttactagactttgatcgccgcctggcagattactgtgaatcaaattacctgcactatacacgatacgccgatgacatcgcaataagtgtgaacagggctgggaccctcgatttcgctaaagtttttgttgaacgtctcatctctgaactcccgtatctggggttacggctgaatgaagagaagaccgtgaatgtcagcaagaagtttcgccgacagctggtgggtctggtgatttctaatcagggcaaagtctcgttgggacgggaagagaagagacgcctcagggccgctgtacatagcctggctttgggtaaacttgacgtgcgacaaagtgtccagctgcggggccagcttgccttctgcctgtcaattgacagggactttgttattaccctgtgcaatcggcacggattccagagagtgtgtgatctgccatcagggtcagatgcgtcctga

SEQ ID NO: 11686 - RNA, 948 nt, synthetic construct
  source 1..948: mol_type = other RNA
atgaagctaagcagcacgcccctgtttctccggctgttggagcttactccttactcagaatatgagcttgccaccctcatcctcacggctcctacacgatacaaggaacactacatcgtgaagcgacatggcagggggaagcgtttgatttcccagccaacagccgaacttaagctgctgcagcacaccaccataaacaaggaactcaacaagcttgagatacataatagtgcaactgcatatagatgcggaagctccatactccatcacgcacaaccacacgctaactcgaactttctactgaaactggactttaaagatttctttccatcactgacagacaaggcactgaagcacaaattaagggcagatacaaactatagcgaactggagattgacattttgcgcaacatcttgctgaagaaagacaggaagtctggtaatttcaatttgtcaattggagccccgtccagtccctacgtatccaattacctgatgaacgagtttgatatgttagtgagcatctactgtaaaaccaagaaacttgcgtatagccgctacgctgatgatattgctatcagttctaccaagccctacctgttagacgaggcgaaatcatacatcgacgatgttctcctcaaactggactatttaggactgattctcaatcaggagaaaactgtcaacgtgagcaaaaagcaccatcgcgaactggtcggcctggtgctttctaatgacgggcaagtttctctcggcagagacggtaaacggaatttgcgggccggcgtgaacgccctaatcaatggcaagctggatgagattgccgcctccaaactcaaggggcagctggccttctatatggctatcgatagagacttcgtcctaaacatgtgcaagaagtatgggttcaatagtatcgtggagctgtctaagaaatccaaaccttga

SEQ ID NO: 11687 - RNA, 981 nt, synthetic construct
  source 1..981: mol_type = other RNA
atgagcttcctggaaaccaacatgtttgctcggatggtggaacgctctccattttcctataccgatttggccatcctcatactgactgcccctaagcgatacaaagaacaccatatcaagaaacgttcagggggtctgaggctgatcgctcagcctaccaaagaactcaaattcgtccagcggctgctgatctcaaacgagctctcccaccttaaagtctctgaggccgccgctgcatatgtgaaggaaaggagtatcaaggagcatgcagagaagcatgccggcaatcgttaccttctgaaactagatttcaaggattttttccctagcatcactaaagatgctattaatcgcctcttgatccagcaaaccgacttgtccgccgacgagcgctacatagcgtgccaactgctcctaagatctccgaagaaagaggagacactccggcttagcattggagcaccatccagcccattcatctcaaactgtgtaatgtacgaatttgacgagaaactccttggctattgccaagctaacggcattacatattctcggtatgcagatgacatagctctctccacgcagaatcccagaactctggatcctgcgaaggcgtttgtggaaggcctgctatcacagttggactacctcaagctgagcctgaatcccgccaagaccgttaacgtgtcaactaagaacagaagaacactgaccggactggtacttagtaatgaggggactgcaagcattgggagggacaagaagaggttaattcgagcccaggtccactctatgattaaaggtcagctgtcgaccgaggaagccgtgtctcttaagggccacctgtccttcttgtacagtgtggacaagagttttgttgttaatctggctagaaggtatggattggacgccaaatccttaatgacgtaccgcacaagttccacagattcgttacccccccagccagacaaaagcagctga

SEQ ID NO: 11688 - RNA, 1026 nt, synthetic construct
  source 1..1026: mol_type = other RNA
atggccgagttcgataacaataaccttttcttgacattgctgaaccagagcccattcagctcgggggaattgaagaccctgatcagtaccgccccacagaggtataagaatcactttatcgagaagcgtaacggccgcggccggagattaatatctcaacctactagggagctcaaaggactgcaacgcagtctgctgagtataattgatgaagttattgcgccaagcgccgtggcagtcgcttataggaagggaaagtcaatcaaggatcatgcagccccccatgctaaaaattcctacctgctcaaacttgatttcaaagacttctttccgtcaattgattggtttacaatcagccactgcttcaaagagacagggaagttctctgacgatgagatcaagatcatgaacttcatcctgtgtcgctacgactccgagcccatcagccttcggggatcttttaagctgtctattggtgccccctcctcccctcctatctcaaattttatcatgagggacttcgacgaaaccctcgaaaacttttgtaagaatgagtctgtgacgtacactagatacgccgacgacttagctctttcctgcagtattccccgtaaacttgacgaggtgaagaattttatcgcgtcgattctggacgagaaaaagtacctaaatctgttcctcaacgaggggaagactgtgaacgtctctaagaagaacaagcgatccctggtgggcatagttttgtctaacgaaggcgtcatttcaatcggacgcgataaaaaaagactaatacgggcaacactgcataaagcatcccagggattgttaaccgaaaagcagctcgagaaactgaaaggtcacctcagctattatatcaatattgatcgggactttgtgtatagcctcgtagggaaatacggcttcgggtcagtatcccaggtgagtttcgaaaccattaagtaccctgaagtttttagcgctagagacaatctgttctttggccgagatgatggtattccattttga

SEQ ID NO: 11689 - RNA, 936 nt, synthetic construct
  source 1..936: mol_type = other RNA
atgagccagttgctgcctctgttcgtggcagagagtggaatggatccccatgacattgtgcggatcattaggactgccccgcgccggtataaagttttcttcatccccaagcgttctggcgaacccagagagatcgcccagcccgcacgcgaattaaaagttttgcaacggattctcgtcgataaggttctatgcaagctcccagtacacgatgcagctacagcctacaggaagggactgagcatcctggacaattctgacccacactccggatccacccctatcttgaagctggatttcgagaacttttttccttcaattaccgagagcgattggttgcgatattgtcgagagaacagcatcctgagggaagacgacagggaaatcgcggcacgcatactgtttcgcagagccaaaggggagagaacactgaagttatcaattggcgctccatctagccccatgctctccaatattctcctttatcgtttcgactcacttgtggaagcggctgccctgaaacggggtctgaagtatacgagatacgccgacgacatgtccttttctggccagcgagcaggtatgcttaaggatatgattaaagaggtggccgaggctgctcgcatagctcggtaccctagacttaagttgaataagagcaagacaactttcgtgaccaccgctacgagacgctcggtcactggcgtcatcctttccaacgatgggacagtgggcattgggcacggtcggaaaaggctcataagttcaaaagtgcatcatgccatgttaaataaactcagtgtagacgaagtcagacagctagccggagaactggcctttgtgaacgtggtcgagccgatatttctggcatggctcaggaataaatacggggagcaaaccattgataacatcaagaggctgatcctgccaatctga

SEQ ID NO: 11690 - RNA, 930 nt, synthetic construct
  source 1..930: mol_type = other RNA
atgagtgacttggtcaacctctttgttgctgaaagcggaatggcccacgacgacgtgctgaggattattcggtcagctccacagagatataaagttttcagcattcctaaacgctccggcggaactagggagattgctcaacctgctcgggagctgaaagtgctccaacgggtcctggtggacagcattctgtgcaacctccccgtgcatagcgccgcaaccgcctacaggaaggggagaagtatcctggataatgcaatccctcacaaaggcggcctgcccatcctcaagctggatttcgagaacttctttcccagtatagtagccgatgactggatcaactattgtaacgaccacgatatcttcgataacaacgaccgtcttatgtctgcgaagattctatttcgcagagcaaagggcgaacggatcctgaagctttctattggggctccttcctctccgatagtctccaatatactgatgttcgagttcgataccttagtgacagagtcggccaataaaaggcgactaaattacacgcgctatgccgacgacatgaccttttccggtcagagagctgggatgctgaaagatatggtaaaagaagtggcgtctgcagcccgatcagttagctaccccaggctgaatttaaaccgatccaagactactttcgtaacagctgccacacgtcgctccgtgacaggcgtggttctctctaatgacggagaggtgggtatcggccaccagcggaagcgcatcatcagtgcgaaagtccattattcaacccaggggaagcttaatatcgatcagttgagaaccttggccggagagctcgcatttataaatgtggtcgaaccagcatttcttagctggttgtcagccaagtacggtgaaccagccattgagaagattaagcatctggaaatctga

SEQ ID NO: 11691 - RNA, 939 nt, synthetic construct
  source 1..939: mol_type = other RNA
atgctcagtaaatttctcaagcaattaagcgtccacacgggcctctctgaggctgatctcctgaagatctggactaacgctcctgaccgatacaaggtgtttaggattcgcaaaaggtcaggtgggtggagagagattgcccaaccggccagggagctgaagctagtgcagcgtgccttggtggagatacttctgtctcagctacctgttcacgacgcagccacggcttacgtccgcggaagaagcatcttggacaatgcaactcctcacagaggcgacacacccatcctgaagcttgactttagggacttctttccctctatcttggcagaagattgggaggcctactgtgcggctcatgatgtaattcagggttccgacgttcacctgaccagtcgtatgctttttcgacggccacggtcatccacaaagctgcggttgtccattggcgcgcccagcagtccaatgttaagcaacgtgctgatgtatgagttcgatgacgccatagataagattgctaaggataaggggatcgcttatacacggtacgctgacgacctgaccttcagcggccaaagaatcgggatgttgcaggatatggtcagggccgtcaaaaagactctgagaaaccagtcaagccccaaacttcggctgaaccagtcgaaaaccgtcttcgtaaccatggcatctaaacgcactgtgaccggtgttgtgctcgccaatgatggcacagcaggaatcggacgcggccgcaaacgagaactttccgccgcggtgcatcatgccaaaatgggaaagttagagaaatccgaactcaaagaactgtgcgggcacctcgcctttgcaaatgcaatcgatccagacttcctgaagttcctggccaagaagtatgggagtgaagtgattagggctattcagtcagcggtggagctgaaatga

SEQ ID NO: 11692 - RNA, 933 nt, synthetic construct
  source 1..933: mol_type = other RNA
atgtctgaccttataagactcctgtcagccgagacagggctgagcaattcagatcttattaggatcattcgcacagcccccaggaggtataaggtcttttacattcctaagcgcactggtggcatgagagagatcgctcagcccgcccgcgaattaaaggtgctgcagcgggtcctggtcggaaggttactgggggctctgccagtgcatgacgcagccagagcttacaggactggtatgagcatccgcgataatgcagccccacacgcaggctcagggcccattctgaagatggacttccgagacttctttcctagcatcaggagcacagactggcaacgttactgcagagatcacgacatcctctccgaggaagatcgcgaaataacgtccctgatcttcttccggcgaaacaagggagaaaagatttttcgcctgtctattggagccccatctagtccggtactgtctaacgtgcttatgtacgattttgacacccaggtcagcgctgaagcagagcgtcgaggcatcgcctataccagatacgcagatgacctgacattctccggccagagggccgggatgctcaaggatatggttggagaagttgaaaaagccgcgcggaaagttaagtacccccgattgcaggtgcacggggagaaaaccacctatataactgcaagtcggcggcgtaccgttacgggggtcactcttgccaatgacggtgccttgtccctcggaagagataaaaaaagattgctgtcggcgggcgtacatcatgctagcctgggtaagttgagtgcggagcagatggaggagctcgcaggccaactcgcttttgctaacgtggtggagcctgagttcctagataggctaagagccaaatatggcgaagctgtggacttagtgcgccggtcagtgcggtccagttga

SEQ ID NO: 11693 - RNA, 936 nt, synthetic construct
  source 1..936: mol_type = other RNA
atgtcaagagtggtatctctgattgccgtggaaaccggactccctaccgacgacatccaccggctcattcgttccgctccccgtcggtacaaagtctttcacattcctaaacggtccggcggcactagggagattgcccaaccggcaagggaagtgaagctcctccagcgagtgctggttacgcatgtcttatcttccctgccagttcacgacgcagctatggcatacaggaccgggcggagcatcttgacaaacgccacgtgtcacgctggccacggccctatactcaagatggattttaaggacttctttccatccatccgagccgaggactggatggtgttttgccgaaacgcacagctgttcgatgagtcagatgctgagctgtcagcccagatactgtttagaaaggccaaacacgagcatgtgcttaagctgagcataggcgccccaagtagccccgtactgtctaatgtcctgctcgttcctttcgacgtaatggtggctgcagaagcaagcaaacgcgggatcaagtacacaaggtatgctgatgatttaaccttctcagggcagcgcattggaatgctaaaggacatgattgacgtggtgcgcttaaccacaaaacaaatcagaagaccgaagctgactattaatagtgagaagacaaccttcgtgacagcgaaacattgcagggtcgtgactggtgtcactctagccaacgacggagccctgtctctgggtagagatcggaagcgtatgttgtctgcgcgcgttcatcacgccgtgttggggaaactgaatcccgacgaattgcttcgcctcagtggagatcttgcctttgctaacgtcgcggagccctccttcatcgatcggcttagcaataaatatggtagtgaagctatccagactatcaggcatgcaccaagaagctcgtga

SEQ ID NO: 11694 - RNA, 936 nt, synthetic construct
  source 1..936: mol_type = other RNA
atgtcaaagctggtggacctgattgtgtcggaaacaggacttccacccagcgatgtactgcgcttaatcaggtcagccccacgacggtataaagtctacaggatacccaaaagatcaggaggcgagagagaaattgctcagcccgcccgcgagataaaactgctgcagagggtgctggtcgacaaggtgttgtcttctctgcccgtgcatcgcgcagccacagcctacatgaagggctgcagtatcgctgcgaatgctagttatcacgccggctctggtcctatcctgaagatggatttccgagacttttttccgtccatccgggccgaggattgggtgctcttttgtcgtaacacacatgtgttcgacgagaatgacgcagaacttagcgcacagattttattccggagagctaagcatgaacacgtcctcaagctgtccatcggcgcgccatcttcccctattctgagcaatattctcttgatgcctttcgataccatggtgatggctgaggcttcaaaaaggcacatacgctatactcgctacgccgacgacttgaccttttccgggcagcgaatcgggatgctaaaggatatgatcgatgttgttagacttactgtgaggcaagtccaacgtccaaagctcaccgtgaacctcgacaagactacgttcgtaaccgctaaacaccggcgggttgtaaccggtgttacactcgcgaacgacgggcttttgagccttggtcacgacaagaaaaggcggttgtctgcagccgtccatagagctattcatgggggactggatagcaaagagctgttaagtctaagcggcgatctggccttcgccaaggtcattgagcctagttttctggatagactcgccaggaaatacggaccggaagcagtgcagatgatccgccacgcacccagacagtcctga

SEQ ID NO: 11695 - RNA, 936 nt, synthetic construct
  source 1..936: mol_type = other RNA
atggggaacctgatcaatacacttagtgtccagacgggcctaagccccagcgatgtaagattgatactccgaactgcacctcgccggtacaaggtttataccattcccaagaaaactggcggtgagagggttatcgcccagcctgctagagaagtgaagctgcttcaaagggctctgatgtctgcactcctagagaaacttccagtccacgagaatgccaaagcctacaaaatggggacatctctcctgggaaacgcgcagccccactcgggtcagagcccaattttgaagatggactttgctgactttttcccttcaatccatggtattgattggcttcggtactgcgcccagagcgcaattttagacagagaggactccatcttttccgctaatctgctcttccgactagccaaacatgaacgcactctgaagctgagcattggcagtccgagctcaccgttgatatccaacattctcatgtatggcttcgacgaaataatcctccgggaggccactaagcggaagatctcttacacccgctatgctgacgatctgacattttccggacagcgtgtggggatgcttaaggacatgccttccatcgtcgagaaggccattcgcgaagcgaaaggccccaggctgtcgatcaataagtcaaaaaccacatacgtgacgagtagattccaaaggcgggtcaccggactggtgctggctaacgatgggaccgtgggaatcgggcgagataaaaaacgtctgatcagatctaaggtgcacagggcaatcaatggcaaactggatgttaaacaggcctcagaattggccggttacctcgcatatgtgaacagcgtagacccagaattaattttgtctctggagtccacctatggcattaagatcttcggagagctcataccaaagttactgagtaagtga

SEQ ID NO: 11696 - RNA, 921 nt, synthetic construct
  source 1..921: mol_type = other RNA
atgaatagcctcacctccctcttggcatcccagagcggactgtcccatgctgatgtcctccgaattttgaacacagctccgaagcggtataagatttactcaatcccaaagagagggggcgggatgcgagagattgcacagccatcaagagaagtcaaactgctgcagcgcatatttgttgacgaggtgctcacaaagctccccgtgcattctgccgcgacagcctacagaaaaggctgtagcatcagacaaaacgcagaggcccatctcggagccacccctatactgaaaatggatttcaaggacttcttcccatcgttgcacggagtagattggcttcgatattgccggcacaatagaattctgaacgaatcagatgcagcactgtctgccaacttattgtttaggaaagcgaagaaggatcgtactctaaaacttagtatcggtgccccctcaagcccagcgctgtgcaacgtgctactttttgacttcgacagctatgtggccgaagctgcatcccgtcggaacattgtttacactaggtacgccgacgaccttaccttctctggtcagaggttcgggctgctcaaagatatgcctgagatagtccgcacggccatcagggaggctaaaggccccagactgagggtgaatgaagacaaaacagtctttgtttcttccaagtttcagcgccgcgtgaccggcttagtcttaactaatactgggaccgtgagtatcggccgcgaacaaaagcggaagatccgggctagcgttcaccgggccttgctgaataagctggagcctaatgaagtggctagtctgaaaggatacctggcttatattaagagtgtagagcctgagttcctgcaggtgatctccaggacgtactctgattttgacaccgagtggcttctgccctga

SEQ ID NO: 11697 - RNA, 948 nt, synthetic construct
  source 1..948: mol_type = other RNA
atgatcgacgatctgatcgggttgctttctcggatgacgggattacctccaagcgctgtgcgtcggatcatcctctccgccccacgcagatacaaggtatactatatagacaaacgctctggcggtaagcgcgagatagcccaccccgcacgagaactgaaactcttacaaagggctttcctcgacgccgttcttgaagatctgcccgtgcacgtgtcagccacagcctacatcaaaggtaaaagcctgaaggataatgctctgcctcatgtgggagcaggaccgattctcaagatggattttagggatttcttcccctccattagggctaaggactggattgcgtatgccagggaacatagagtgttcagcaacgatcatgatgctgagctcagtgctcttttgctttttaggaggcctaaaggagaatctgtacttcggctaagcgtgggcgcgcccacatctccagccctaagcaatatactcatgtacaactttgaccaggcagtttgggcatccgtcggagagagatttgtcacttacacccgatatgccgatgacatgactttctcggctgctagaaccggctttttgcaaggtgtgcagacacgagtgtccgccattattcgggagatgtcataccctaagctggaactgaatcaccagaagacaagattcgtcaccgagaagtatcacagggacgtcactgggttgactctgtcactcgacaaccgggttacgatcggccagttgagaaagcgcaacatccgcgcggggctgcatcaagcaaaactggggcagctgagtcgggaggaactgcagaccctgagtggccacattgcctttgccgcagatatcgagccagaatatattggcaagatgaaagagcgttacggggaggacttactggactggatcaccaaaggcagacagtccgacgatcgctga

SEQ ID NO: 11698 - RNA, 948 nt, synthetic construct
  source 1..948: mol_type = other RNA
atgagaagcaagttagttgatctcctgatccgcgagctacgcattggtgagcgagaactggcagccttgatagctactgctccagataggtacaagacatattttatccccaagcggagcggcggacgaagggaaatagcgcaccccgccttcgaacttaagattgcgcaacgggctatcatcagcggctttcttaatgagctgcctgtgcaccattgtgcaacggcttacaagaaagggagctctatacggcagaatgctgaacgccattgccacaacagggccatccttaagtatgactttaaagacttcttcccttcaatcaccgagcaggcctggctgagttactgtgatcggcgcaaggtgatggacaggtcagacgctgtcttggcaggaagattgctgttcagacgccccaaaggcggcaggatcctgagactctcaattggtgcacccagttccccaattctgagcaatgtactgctgtacgactttgactgccaggtgcacgagcgtgtcactgcccataaaattacctatacgagatacgcagatgacatgacattctcttccgaacgaacctggaacctgcgcgaagtcgataagatcctcaggtctgtgattaattccctgggcaccccaagtctcactatcaacgggtccaaaacaacactggtaactcctaagtaccatcgtcaggtgacaggcttggtcctcaccttagacggacgggtgtccctcgggagagacaggaagagattaattcgagccagagtgcaccacgcggtttcgggtaaactatcaaaagccgcccttgttaatctggctggaactttggcctttgccaaagatgtcgagccggagttctataaccggctcgagctgacctatgggcgtgagaaccttgaaaccataaagtattctgtgagggattaccatcgggagtga

SEQ ID NO: 11699 - RNA, 948 nt, synthetic construct
  source 1..948: mol_type = other RNA
atgacttcaaaattagttgagtttctcactagagagctgaggattggcgaacgggagctagctgccttaatttcttctgcgcctgatcggtacaagacctatttcattcccaagaggtcaggtggaaaacgggaaatagcacaccccgccttcgagctgaaaatcgcgcaacgggcgatgattaatggattccttaaggacttgcctgtccacccctgtgccaccgcctataggaaggggtcgtccatacgacagaacgctgagcggcattgccataaccgcgcaattctgaagtacgatttcaaagagttctttccatctatcaccgagagagcatggctcacctattgcgacagacactccgtgctggacagatctgacgccatcagcgcaggtcgcattttatttcgcagaccaaagggcggccgcattctgaggctgagcattggggccccatcaagcccgatcctctccaacatccttctgaatgactttgaccgcgaggtgcaccagcgagtgagtgctcataaaataacttatacccggtacgccgatgacatgacattctccgcagaacggacgtggaatctgcgtgaggtggatggcatcctgcgatcagtcattcgcctaatcggtactcccagccttacaatcaacagtgccaaaacaacattggttactcctaaattccatagacaggttaccggcctcgtactgaccctcgatggccgtgtaagtttgggaagagaaagaaagaagctcatccgcgcccgagtgcactacgctataaatgggaagctggataggcacgctatggctcatttggctggaacgctggcatttgccaaggatgtcgagcctgaattttacacacgtctggaacggatctatgggagggacaacatggaacttatcaaacacagcgtgagggggtactccaggagctga

SEQ ID NO: 11700 - RNA, 948 nt, synthetic construct
  source 1..948: mol_type = other RNA
atgacctctcccctcgtcgagctgcttattcgcgagttgcggatttccgagagagaggtcttgcatctgatcgctactgcgccagagagatacaaagtgtacaccattcccaaacgaaatgggggtcgaagagagattgcccacccggcgaaagaactgaaagtggctcagcgggccgtggttaattcctacctcaacaatctccctatccacgatgccgccatggcctataagattggacggagcattaaagataatgcagcttatcacgcaggttccggctcaatcctgaagtatgatttcgtggaattttttccttccatcaccgaatttgcctggattgcctattgcgaccgtcacgccgtgatggacagggctgatgctataagaagcggacgtatcctgttcaggaggcctaagggcggtagaatccttcgattgtctataggcgcaccaagctcgccaatcctgagtaacatcttaatgcacgacttcgacgaagaggtgactcagctcgtagcagaacataagatcaaatacacacgctatgcggacgatctgaccttttcagctgaaaggactggatatctgaccgccgtggataagatactgaggggagtaatcgcccggagtaaggcccccaaacttaagattaacgacagcaagacagttctcgcaacgcctaaggttcaccgccaagtcacagggcttatcctaacactggatggcaaggtttcaatcgggaaaaacaaaaagcgcgagataagggtgaaactggactacttccggaaggggctgttaggggaacgtgaggtcgcacccctagctggctatatgagttacatctgggacgtggagcgggacttctacattaagatgcagcgccattacggagaggaagtcctcgctagattgcagaagcagggccaacataaaatttctccatga

SEQ ID NO: 11701 - RNA, 981 nt, synthetic construct
  source 1..981: mol_type = other RNA
atgacttctccgctgatcacattcttgatgaacgagctgcacctgggtgaaagagaagtcgtgaggctgatcctgacagcaccagagcgctacaaggtataccagatttctaagcgcaatggtgggaagcgggagatcgctcagccagcccctgaagtaaaagctgcacagagggccatagtgagggcgtatctgctaagccttcccgtccatccttccgccactgcatacagtcccgggtcatccatcattaagaatgccagtgcgcactctgatgcaggccccatcctgaagtacgacttcaaggatttcttcccatccattactgagaaggcatggatatcatattgcctgagagtgggcctctttagtaaggaggacgccgtcaggtccggccggttgttatttcgtaggcctaaaggggggcggatactgcgactcagcattggtgctccctcatcacctatcgtgtcgaaccttttaatgtacgacttcgatgagcgactctctaaactgttggagggccataagattgtgtatacccgctacgctgacgacttaacattcagtgctccaaggaccggaaacctgctcgaagtccccaaggccatccgcgctgccatgaatagcatgagccaccccaaacttgcacttaatagccaaaaaaccgttctcgtgaccaagcgctaccaacggaatattaccggactgatcctgactctagatgggaacatctctgttggtcggagcagaaagcggctgatacgtgctggcattgatcattttatcagaggcaagctcgacgttgaccagacagtgaaattggcgggcattattgcctttacgaaaggagtggagccaaccttttttgccaaactcacgactagatatggaaacgacgtcatgggaaagatcatggcctccacaaaagattataaacgcccgaggcctgaaacagtgaaccgaaccaaaagaagatga

SEQ ID NO: 11702 - RNA, 957 nt, synthetic construct
  source 1..957: mol_type = other RNA
atgacttcaaagctgattgaattccttgtgagcgaggttggattgagcgcaaggaacattgagaggctgatccaaactgctcctgagcgatacaaagtctatcatatccgtaagagaagcggcggatggcgagagattgcccagcctgccactgaactgaaaattgttcagcgtgccatagtcgagaagtacctgaaacatttgcccattcacccagcggcaacggcttatgtcccgggaagtagcatcagacggaacgctgctatccactccgtgaatggcccaatcctgaagtatgacttcaaggagttcttcccatcaattaccgaacgggcctggttacgctactgcgaaattcatggcatatttgatcgagttgaagcaatacagttcggcagactgctctttcgcaggcctcacggtgggacgattctccggctctctatcggggctccctccagtcccatcctgtctaatgtgctgatgtacgagtttgacaaaatgttgcacgagagggtggcacagcatagcgttacatatacaaggtacgccgatgacctgaccttttctgcaagaaggaccggatatcttaactctgtgaatcggatcctacgcagtaccatatcccaggtgcaacttccaaaaatcaagattaacgaggagaaaactgtggtcgccacagaaaagtataggcggcaagtgacaggcctgatcctcaccaacgacaaacgcgtctcactaggtcgggaacgcaagagaaatctcagggcggccctccaccacttcagagaggggaaactggatatcgatcagtccgtgaagttggccggtctgatggcctttgctagagacgtagagcccgaattttacacccgtatggaactcacatacgggaaagatcttttatcgcagctgaagtatttagtaaagggctaccggcgccctgagtaccgatga

SEQ ID NO: 11703 - RNA, 951 nt, synthetic construct
  source 1..951: mol_type = other RNA
atgtctgcactgatttccgtgctgcagcagtccctcggcatagatgctatgagtgtgagacgtatcatcgcaactgcccctgaacgatataaggtatacagtattccgaaacgcgggggagcgggacgcaggataatcgcacagccagccaaagaagttaaagctctccagagaatcctgctgaaaaccttcctctcagacctgcctgtgcacccatctgctttcgcttacgtccctggtaaatccatcaggactaatgccgtcacccatgtggcgaatggccccattcttaagatggacttccagaactttttcccttccatccgatcttacgactggctatcgtattgccacgacaacggggtgtttgacagcgaagccgacgcgcgtatggcttctaaaatactgtttagaagggagaaaggcgagtcaatcttgagactcagcattggggcccccagcagtccccatgtttcaaacttgttaatgtacgaattcgaccgcgcaattagtgataaggtcgccgaagattacgtgacttacactcgttatgccgacgatctaaccttttcagcagaacggacgggctatctgacacgggtggagaaggatgtcaggaagacactcagagatttgcggtatccacggttattcatcaacgaccggaagacagtcctggccacaacgaaataccgccgagaggtgacaggcctgattcttaccaatgaccaccgcgtgtctctgggaagacataagaaacgcctccttagggcccaaattcacagatacagcaagggtgagttgaataacatcgcaaccgccaagcttgccggaaacatggctttcgcttccgacgtagagcccaccttttatacccgaatggagagggtgtttactaaggaggttatggataggctgaaggatagcgttaatcggcaagatcagagctga

SEQ ID NO: 11704 - RNA, 945 nt, synthetic construct
  source 1..945: mol_type = other RNA
atgagtaggctgctggctgtgcttacggaggccaccggcctgtctggttacgacctggcacgggtaatcgccacagccccgcacagatacaaacaatttacaatcccaaagaggcaagggggaacccgccttatagctcagcctgcgagggaagtcaaagctatgcagcgtgccatcgtgagagcctatctcagcgatctacccatccaccccgcagtaactgcttacgaaccgggcacttccattagggagaacgcctcgcgccatgccaccaatgggccaattctcaaactcgatattgccgactttttcccttctatcagagcagatgatttcctgtcatactgcgccgagcatagcttgtttgatgatgagtccgaaaggatcgcggccaccaaaatattattccatcgacctaaaggcgctagggtgctccgcctggcaataggtgctccctcctcaccccatattagcaacctgttgatgtatcatttcgacagagcagtcgctagtgaggtcggggaccagttcgttacatatactcggtatgctgacgacctgacattttcagcaaagcgcacgggttatctgaatccagttgagaagatcgtgagaaaagtgttacgggaaattggataccctcggcttaagctgaacgacagcaagaaggtggtggctactaagaaatatcaccgccaggttaccggccttgtcttgagtaatgacgggcgcgtgtctttaggccgtaaacgaaagagggaactacgagcagcgctccaccactttgccggcggaaagctggagcccaaggcacagaagcacttgcacgggatgatggcttttgccaaagacgccgagccagatttctacgccagaatgcaggcccggtacggaagaaacgtcttcgaagcactgtccgaagccctccgggaggcggatgagtga

SEQ ID NO: 11705 - RNA, 999 nt, synthetic construct
  source 1..999: mol_type = other RNA
atgagcgaactgctcccagtgctgattggggcaacgggtctgtccgatagcgatatccgaagaatcgttagcaatgcccccagtcggtacaagcattttactattaagaagaggaacgggaaggatagacatatctcacaaccgtctagggagctgaaagctctccagcgcgcactgatggaattcaagttgtcacaattgcccgtccatccagccgcaatggcctataagcacgatgtgtctatcctggagaatgctacagcacacgctggaaatggccctattcttaaatacgacttcgtggacttctttccttcgattaggtccaaggactggcagaggtactgcgattattactccattttcgaaaaaagtgaggacaaatggatctctgagcggatcctgttccagagagacaaaggatcgcgcattcttaaactaagcataggggccccgagttctcctatcctgagcaacatcataatgaatgagttcgacacagtgatttcccaaaaggtcgcctctgataacgtcgtgtacaccagatacgcggacgacattaccttttcagctcctcgggtagggtatctcaaccgaatcgaccgcatcatccgcaggaccattaaggaagtcccctggccccgattaaagataaacgaggaaaagactgttctcgcgactagtaaataccgtaggcaggtcaccggactcgtgctggcaaacgatggaagcgtgagcatcggtcgtgatagaaaacggtccgttcgcgccgcgcttcatagagcccagcacgatcggctgacagaccaggaaaccgcctatctgtgtggcatgttggcttttataaattccgtggagccagagtttttagcccggatggagaatcactatggcgtagaattgctacagcgccttagacgtcacgcctctattggtagaaggccaacagaacggtcaagggctaaaggcgaggacctccgaatcgatggctccgactga

SEQ ID NO: 11706 - RNA, 945 nt, synthetic construct
  source 1..945: mol_type = other RNA
atgagcaagctgatatccattctgatcgagtctaccggtctgactgagagagacgttatgaaaatcatctctaatgcacctcggaggtataaacacttcaggatcaagaagcgaaatggatctctcagggatatagcccagccagcaagagaactgaaagccttgcagaaggtcattgtggagaagtacctgctggaacttcctgtgcatcaggccgccatggcataccggaaggggagatctattagagagaacgctctcgcgcacgtggacaacggccctatcctcaaaatggatttcaaggagttctttcccagcattcgggtccgagactggcaagcttactgcgaggatagaagtctttttatggatggggatgaccttcatcacacctccaaaatcctgtttcaccaatcgaagggtgagagctatctgaagctggccatcggagcccccagtagcccacacttgtccaacctgttaatgtacaaatttgacgcacttgtttcacagctcgtccagaaagactacgtggcctacacgaggtatgctgacgatctgactttctcagctaagaggacaggatatctgaccggcgtggaaaaagctgtccgccgtgctataaaagaggtgccctggcctcggctctccattaatgaaaacaaaacagtagtggctactccacgatatcatcgccaggtgaccggactcgtattgacaaacgatcaggaggtgagcttagggcgcgaccgcaagaggaaaatttcagccgcagtgcaccatgcgaagcatggcgaattgaccgtagaagccgccgcgcgtttatccggcacactggcattcgttaatagtgtcgaacccgaatttctactcagactggagcggaagtacggccgcgaggttatcgacaatctaaaacaattcccgtggaagttggagaagtga

SEQ ID NO: 11707 - RNA, 975 nt, synthetic construct
  source 1..975: mol_type = other RNA
atgtctgagattcttaaggccctgtcaactgccacaggattgagtgaccgcgacctcagagcgataatcagcaattcccccgaccgctataaggtttatagcatcgctaaacgaaggggcggtcgccgggagattgcacaaccagctcgtgaacttaaggttctgcagcgggctctaaatgatatcgtcttgagcaaactgccagtccatcccgcagctatggcctaccgacccggcattggactcaaacagaacgcccaggcccattcccacaacggcccgatcttgaaatttgacttccaggacttctttccttccctgagggctgaagattggcaagaatactgccaccgacataaggtatttaatgacgaagaggatgtggagctcagtagtaagatcatgttcagacggaagaatcgccatagcaccgtgctgaggctcgctatcggtgctccttcctctccaccactgtcaaacatcctgatgtttgactttgacatcgcgatgcaggcatattgtgcctcacagaaggtaacttacaccaggtatgccgatgatattaccttttccgcccagagaaccggtttcctaacgggagtgcctaaagccttagagcgcattgtgaaggatttacgtagcccccggctgaaaatcaaccacgacaagacagttctggcaactaagaagtacaaaaggatggtgacagggcttatactcacaaatgatggctctgtgtccttgggccaacagagaaaacggaacatacgggcaggcgtccacagatggaccttaggggtcctttcgaatgcagacatctgcaggctcgccgggcacctgtctttcgctgaagatattgagcctgcattcattagtagactggccaacaagtacggggcgcaggccattgctgacatcaagcgtgcctacctgcaacagggatcagattctagccagaacccggtgaaaatatga

SEQ ID NO: 11708 - RNA, 951 nt, synthetic construct
  source 1..951: mol_type = other RNA
atgagcgagatccttagggcattgtctgaggccaccgggctgagtgactgggatttacgggctattatatcaaatgcccctgatcgctataaggtgtatcacatagataaacgcaggggcggtcggagagaaattgcacagccagcaagagagctgaaggtcctacagcgggcgctccacgatatcttcttagcgaagcttcccgttcaccctgccgccatggcatataggcctgggatcggcctgcgtcaaaacgccttggctcacagtcataacggacctatcctgaaattcgacttccaagatttctttccctccctgcgcgctgaggattgggaggcatactgccgcagacataacgtgtttataaacgaagaagacgtgaatctcagctccaagattatttttaggaggaaaagccgtcattcttcagtgttcagattggctatcggagccccatcctctcccgctgtgagcaatattctaatgttcgactttgacaaaacggtgcagtcctactgcgagtcacagtctgtcatatacaccagatacgctgatgatctgacatttagtgcccagaggactggctatctgactggagttccgaaagccctggagagaatcatcaaggaccagaagtcgccacggttgaagattaattctgaaaagacagtgctggccaccaagaaatacaaaaggatggttactggacttatcctcaccaacgacggcgacgtcagtctggggcagcttcggaaaagatccatccgcgctggcgtacatcgttggacactcggcggtctgtcaccagcggacacatgtcgcctcgcagggcacctgagctttgccgaagacatcgagccggccttcgtagcacgactcgctcgacgatatggggcccaagccattgctgatattaagaatgcataccggcagagcggtgcgccctga

SEQ ID NO: 11709 - RNA, 948 nt, synthetic construct
  source 1..948: mol_type = other RNA
atgtcggaattgatctccgtgctgagccaggctactgggctgtctgattttgacttgagagcaattatcagcaatgcccctgacagatacaaggtctactatattgcaaagcgcaagggcggacgcagagagatcgcacaacccgccagagaactgaaggttttgcagagggccctcaatgatagcattctgtccaaattgccggtccacccagctgctatggcttaccggcccggcgtgtcacttaggcgtaacgctcaggcccactctcataacggcccaatcctcaaattcgattttcaggacttcttccccagccttcgggcagaggactgggaagactattgcagacgacatggggttttcaaggatgacgaggacatcgagctatccagtaagatcatgtttcgaaggaagaatcgacgctcctctgtattgaggctggccattggtgcgcctagtagccctcttctgtccaatatactgctctttgatttcgacgagaatttagcaaagtattgcgattcacagaagatcacgtacacccgctatgccgatgatctcactttctcagccaagcggactggcttcttaaacggagttgagaagttccttgtgaaactgatcaaagacgcagatcacccacgcataaagctgaacctgaacaaaaccgtgctggcaacaaaaaaatacaagcgtatggtaaccggtctgatcctgaccaacgacggtaaagtgagtctcggccaactgcgcaagaggaatatgcgggccggggtccaccagtggattcttgggaacctctctgaggccgatacatgtcgtctagcgggacatctcgcttttgccgaagacatagaacccgactttgtggccagattaacagtgaaatacggagctcaggtgattgctgagattaaaatggcgtatcggcggagggtcctgtga

SEQ ID NO: 11710 - RNA, 945 nt, synthetic construct
  source 1..945: mol_type = other RNA
atgagcgagctcctgcgtatgctgagcgaggatacaggactaagcgaaatcgacttacgcaccattatcgccactgctcccaatcgttacaagacttacgagatagacaagcgcaggggcggaaaacgcgaaatttcgcagcctgccagagaactcaaagtcttgcagcgggccatggtacagaggattttaagcggtttagccatacacagtgccgccatggcataccggccaggaatatccatcagaaacaatgcagcatatcacgcgggggacgggcccatcttgaagtttgacttcaaagactttttcccgaacattcaagccgttgattgggaaaagtattgcgagaagcactcaatttttgaccatcaggaggacgtgaagctctctagtcgaatcctctttcggaagtcatctcgatattctcccgtactgagacttgctattggagcccctagttccccaatgctcagcaatatcttgatgttcgaatttgatgagtacatgcagtcatacgcggaaagtcaaaaagctaagtataccaggtacgccgatgatttgacattttccgcaccccgaacaggctatctgaacggtgtggagaaagtgctgaggcaagccatacataagattaaaaaccctaagctgcagcttaacgaagataaaacggtccttgcaactcggaagtacaagagaatggtcacaggcctgatcctggctaacgatggttccgtgtccctgggccaccagcgcaagagaaatatgaggagcgcggtgcatcactggctgctggggaagctgtcaagcgctgagcaggcaaatctcgctggccttctcgccttcgcagaggatgtggagccatccttcgttttcgctctggctcggaaatatgggacctctaccctgaaagacatcaaaaaactagccgacatcgaatcttga

SEQ ID NO: 11711 - RNA, 1026 nt, synthetic construct
  source 1..1026: mol_type = other RNA
atgccacagagctcgaagcagctgaaaggatgcaatgtctccgacgtggtccaagccctggtcgctgcaagcggactctctgagagggacgtgcggactattatcgcaactgctcccagccgatacaagacatactccatcccgaaacgcagaggtggagagaggattatctctcagcctgcgcgcgaggttaaatttttgcagcggattatcgtagaggagatcctctcccgcctccctgttcacgacgctgccatggcctatagagagggtcgctccatacgcgataatgccgcagttcacgccggtggcggggcaattctaaagttcgatttcgccgactttttcccaagtattaaggccgatgattgggctgcctactgtcggcggcactcagtgttcaaggatgtggacgatattcggctgagtgctaatctgttgttcagaagaacaaaatatgggagtgtactgcgtcttgcgatcggggcaccctcctcaccccatctgagcaacatcttaatgcgagagtttgaccagagggtaacagaagcggtggccaaggagaaggtgaaatacacgcgctacgccgacgacctaacctttagcgctaaaagggcgcacaacctcataggcatagaacgtgtcttaagaaggattatcagagaggtcgcttcacctcatctcagactgaatgaagataagaccgtgctggccaccaggaaatatcgccgagttgtgacaggactcgtgcttgccgacgacggcaaggtttctctgggccgagatcgaaagcgggatataagggctgctttgcaccattacgcactggggcaattaaacggccacgaaactgcaaggctttctggcttgctggcctttgtcaacgccattgaacccgagttcctggaacggctggtggacaaatatgggccagctgtgatcgagcgtattaaggcccggcttcctcccaccgcaaactgccagcagccacatgatccgatcatcgaattcaaatttagagaatga

SEQ ID NO: 11712 - RNA, 909 nt, synthetic construct
  source 1..909: mol_type = other RNA
atgtcggaatcagacgtcaggttgattgtcctgacagcaccttctagatacaagacctatacgattcccaagaggaacggaggggagaggattatctcccaaccggccagagaggtgaaattcttgcagagagtgctggtcaatgacgttctcagccagctacccgttcattctgctgccatggcctatcgcgagggacgcagcattaaagacaatgctgctgctcatgctggcggcggtgcaatcctcaaattcgatttctccgattttttcccttcaatagtggcctcagactggcgggcctattgcgagcgccatggggtgttcgataacgaagaggatattcggctcaccgccaaccttctgtttcaccgtacaaaacgatcaagtaagctgagactggcgataggggcgccctcttccccaacccttagcaatgtgctgatgtttgactttgatcagtgtatcgcgggcttagtggctaaggacaaagtccgatacactagatacgcagatgacatgacttttagttccaaaagggccgggaacctcagcaatgtggagcgggtgctgcggaaggtattgaaggatctcgttagcccaaggttgagaataaatgagaagaaaactgtgctcgccacaaagaaataccggcgcgtagtgacaggactggtgcttagcgacgatggtaaggtcagtctcggccgcgacaggaagaggatcatccgtgcaatgctgcaccactacaccctgggtcgattaaacggcgaggaaaccgctagattatccggactgctggcatttgtgaacgccgtcgaacctatgttcctgaagcggcttatcgataactatggcgttgaaatcgtagaccgcctgaaagccagtctacacccaaattctattttctga

SEQ ID NO: 11713 - RNA, 1014 nt, synthetic construct
  source 1..1014: mol_type = other RNA
atgagcaaactgctcccactactcgttgcaggtacaggcctgagtgaacctgatatcattcgtattgtgtctaacgctccccttcgatacaagagttacaggatcccgaaaagacgcgggggcaatcggacgatctcccaacctgcacgcgaactgaaggtgttacagcggatactgaccgaagagttcttgtccaagctgcctgttcatcagagtgccacagcgtatcgggccggcacctcaatcaagcataatgcattggctcatgccctcaatggacccatcctgaagtttgactttgccaacttcttcccatccattggcgcgcgagactggactgtctattgcgaacgtgagggattaatgctggaggcccgcgatatttggatctcctcgaacatattctttcacagatggagcagacaagggagactctcccttgctattggggctccttccagcccctgtttatctaatgtcttgatgaatgagttcgacgaaaaaatcgccaacgcagtcgcctcagaccaggtcacctacaccagatatgctgacgacctcgctttcagcgcaaaaagaacgggctacctgaaccaggtggaaaaaatactgcgcaggacaatcaaagagatcaagtttccaaatttgactctcaatgaaagcaagactatactagcgaccaagaaatacaagcgcttcgtgactggactgaccctaacaaacgatgggaaagtgtctttggggagggagaggaaaaggaagatccgggccgctcttaagcactatgccgatgaccggctcaacattcacgagcaggccaagctcgccggcctgattagcttcgctcacgacgtggagcgagattttgtacttcggatggagaggacatacgggtctgaactgcttcaggcactgaagctggttcgcctgccctctactcgtggtggcggtggaggtggagtggagtttgacagtgatgtatcagatgcatcagaccccgacgatgatttttga

SEQ ID NO: 11714 - RNA, 957 nt, synthetic construct
  source 1..957: mol_type = other RNA
atgagcaaactcctgccactcttcattagcgacactggcctttcagaacatgatgtgctaagaatcgtgcgagacgcacctatccggtacaaaacataccggatcccgaagagaaccgaaggtactcgtgttatttcccagcccgctagggaacttaaggctttgcagcgaatcttgactgcagagctgttgtccaaattaccagttcatcccgctgctactgcataccgccccggagtgagtatccgagcaaatgcggcagctcacgccccaaacgggcctatcctgaagtacgactttaaggatttctttccttccattacctcaaaggactggcgcaactattgcgaaaacaaccatgtctttgacaacgatgaggacctgtggatatcaaccaatatcctgttccagaaaagacgcggggaaagccgtctgacactggcgatcggcgcaccatccagtccgtcgattagcaatattctgatgcgggatttcgattctacagtcagcgccctcgtggccaaggattatgtcacctacaccaggtatgccgatgacctcactttttctgctcgcaggaccggatatttgacggttgtggacaaaatcctgaagaagactctcagggacatgaaatctccttcccttacactgaatcccagtaaaaccgcgattgccaccacaaaatataagcggtttgtgacgggattggtgttaaccaatgatggcgccgtgagtctcggtcacgacagaaagaggaaaattcgggccacggtccaccacgtaacacttgggaagctgtcagagaggcagttagccgagctggctgggatgctggcctttgtaaacgatgtcgagccccaattcctagccaagctggagcgcacatacggcgtggacctcatacaaaagataaagactggcagaggatctagcaaaaatttcgatcttgactga

SEQ ID NO: 11715 - RNA, 957 nt, synthetic construct
  source 1..957: mol_type = other RNA
atgtccaagatcatccagattctcatggaggagacagcgctcaatgagccagctcttcgcaggatcatttacactgcaccttccaggtataagaccttttatattcccaagcgcaatggtaaaaacagacggatcgagcaacccgcgcgtgaattgaaggcaatccagcgggtgctggtgcagaagcttcttagtacattgccagtccatccgagtgccactgcctatcgaccaggcctcagcgtccgtgataatgccgcccgacatgctcacaatggtcccgttcttaaattcgacttcgaagactttttccctagcatccgcgcaagagactggagggtatattgcgagaaaaaagggctgctcgaaactgaggaggatatttacctgacccagcagatttttttccggagggagaaaggatcaagcgtcctgcggttggctataggcgctcctagctcgcctgcattgtccaacatcctgatgtgggacatcgacgccgcaatcgctgagatgatagatggcgaacaggtttcttacacgagatacgccgatgatctgacgttttcagccagaagaactggttatctcaatgggatcgagaaggggctacgtgctattctgagatctgcagggggcccgaggctcaagataaacgaagaaaagaccgtcctggcgaccaagaaattcagacgacaggtgacaggcctgatactggccaacgacggacacgtgtctttgggacgggataagaagcgccttattcgggccgctgtgcaccgcgagacattaggcttactcgaaacctctgagcgagagcaactggccggaatgctggcgtacgtgaacgtagcagaacctttatttctagctcgcctgaagaaaaagtacggagttgaagccattgaggagctgaaaaaagccgtgaggcccgggaacgaaccagaaaggccctga

SEQ ID NO: 11716 - RNA, 915 nt, synthetic construct
  source 1..915: mol_type = other RNA
atgattgaacatacagggctcagcagaagtgatattctgtcgatcgcccgaaacgcaccgcagaggtacaaaacttacacgatcagcaagagaaatggaggcaaaaggaccatttcacaacctgctcgagaagtgaaggtgctgcagaagatcttgctggaacatgttctttataagctgcccgtccactcagccgcaactgcttacaggcaggggatcagcctgaaggaaaatgccaccaggcacgtgcacaatgagtctattaagaagtttgacttcaaggacttctttccctccatcaaaggccgggactggatcaaatactgcggagatcacggagttttcgccgataccgtagacgtcggactatctactcatatactgtttcaccagccagccaatagtaccatactcagattagcaataggcgccccatcctcacccgctctgagtaacgtgttaatgttcgagttcgataagatcatcacagacgaggtggcaaaggatgaggtgatttatacacgctatgccgacgatcttacattttccgcctctcgcatgtggaacatgatagacgtgcctaaggtgatcgcgagggcaatcaaaaataaccattatcctcgtctgaacatcaatccagacaagacgatttctgccaccaaaaaatataaacggcaggttaccgggcttattctgactaacgatggtaaagtaagcttgggccgcaagcgcaaaagagaaatcagagctgaggtccatcgagcgttgattggccagctcacaaatgaccaactgatgcacgtccaggggatactagctttcgttgaggacgtcgagcccgattacctccgtcggctggaatcctactacggtgctgagtttattaggaacctccggaagcgcgtgcgggagtga

SEQ ID NO: 11717 - RNA, 936 nt, synthetic construct
  source 1..936: mol_type = other RNA
atgagcaaaatcatcaggctcctgactgctgagactggccttccaacgcacgatgtgcgggcaataattaatcgagcccccatctcctataagcactacaccattaaaaagaggtctggggccgatagaccaatcgcacagcccgccagagaggtgaagcgtttacagaagatactgatggggttcctcagcgatctccctgtgcattcagccgccacagcatatgcacctggcgcttctatcaaagataacgcggaaagacacgcgaagaacggtcctatactgaagttcgacttcacgaatttcttcacatcaatcagggagagagactggaagaactactgcgctaaatacaatctctttgacgatcccgacgatgtgactttatcgaccaaactgtttttctgtcgtgtaccaggcagtaccctgttgcgcctagctattggcgccccgtcctctccatggctgagcaatgtcctgatgtacgaattcgacgatttgattagtcggcgggtcaggcaggaccaagtgacctacacaagatatgcagatgacctgactttctccgccaggcggaccggttatctcaccagggttgagaaaatcctgaacagaactctctccgagatggagaacccccgccttaccctaaaccaggagaaaaccgtgctggccactatgaagtaccggagggttgtgacaggattagtactggctaatgacgggcgcgtcacattgggaagagagcggaagcgacgcattcgagccgcgctgcatagcgcttttgctggaaagcttgacgcagaagccatgacacgcctggcgggaatgctcgcctttgtgaagagtgttgagcctgaattttttgaacaaattgctgcccgctatggcgaaaatgtcatcagcaaacttgcagggtcacagtctcagttgtga

SEQ ID NO: 11718 - RNA, 930 nt, synthetic construct
  source 1..930: mol_type = other RNA
atgggtcatttgatagaacagttagcctccggctcaggtttactcgaaaatgatgtacgcaaaattgtggccaccgcacatcggaggtataaacattacacaatcaagaagcgcaacggggaggatcggccaatctctcaacctgccaaagaggtcaagctcctccagcgtctgtttcagaagcagttcctgcaaaacctcccagtgcaccccagcgctacagcttatgagaaaggtctgtccatcaaagaaaacgccggacggcacatgcataatgggcccattctaaaactggactttaagaacttcttccctagcatcaaggcttcggactgggttgcttacactgaggcgcacggcctcctggacgaccttgaagaccgcgaactgtccgcgcggttgctattcaagagcacccgaacgagtgccggaatgcgcctggctattggggcacccactagccctcacatttcaaaccttctcatgtacgacttcgaccgcctaatggctgagcgagccgctagagagatggtgacctatacaagatacgccgatgatcttactttttctgcaaagagaactggctacctgcagcccatagagaaaatcgtgaggaccacattgagagaaataaatagaccgcgattgactctgaatgatgagaagaccgtctttgcaaccaccaagtatcgtagggttgtgacaggactcacgctgacaaatgatgggaccattagtatcggaagagagaggaaaaaacttattagggccatgatccaccactacgagaagggcttactggacgccgagaacctgaggaagctggtgggccttctggcatttgcgaatgacgccgaaccagccttcgtcctgcggatgaagctgaaatatggcgagaagttgatggcagaaatcctggatctctcttga

SEQ ID NO: 11719 - RNA, 951 nt, synthetic construct
  source 1..951: mol_type = other RNA
atgtccaaactgattcggctcttgagtatccagaccggcttgaccgagcaagatgtagaacggatcataaatcgcgcgcctgacacctataaatcttatacgatccccaagcgtaatgggaaagggaacagagtgatcagtcagcccgcccgggaagtcaaggttctgcagcgggttctcaccgaaagactccgttcacttcctattcatgatgccgcgatggcttacaggaaaggcatctccatccgtgctaacgccctaaagcacgcacagaacgggccgatacgaaagtacgactttgagagtttcttcccgtctataaagggacttgattgggaacagtattgtcttcaaaaccccgttttttcagaccccgaggatattctgaggtcaatcaacttgttttttcacagggcaaaacgacataacgtcttacgcctggcaatcggtgccccttcctcgccatggcttagcaatgtggtgatgttcgagtttgatgacgcggtaagcagagcagtggcaaaggatcgcgtcacttacaccaggtatgccgacgacctaactttttccgccccccggacaggtcacctgactgttgtggacgatattgtcagaaaggctatccgcaatattcagtgcccacgcctcaagctgaatgaagccaaaactacggtcgccacaaagaagtacagaagggtggtcacaggactgatcctggctgacgacggcgaagtgtctattgggcgggataagaaaagactggtgcgcgccgaggttcatcacgctctgacaataggcgtgggttgggagaaggccgacaaactgctcggctacattgcacatgtgagaagcgtggagcctagcttctactacaggttattggcccactatggagaggatttcgaggctcgagtaagggctaaaaatggaccaccagtgttcgacctctga

SEQ ID NO: 11720 - RNA, 942 nt, synthetic construct
  source 1..942: mol_type = other RNA
atgagtgatctgatcaaacatctgtcttccgagactggcttaagcgatgctgatgtggagcggattatagccagggcacccagatcttacaagttctataccatcgacaagcgcacaagggggaaacgactcataagtcagcccgcacgagaggttaaagcacttcagcgcgccctggtcaaataccttgatgccttgccaatccacgaaagcgccaccgcgtatagaaagggtaagagcatactcgataatgccgcacctcatagtcaatccggccccatcaaaaagtacgacttcaaggactttttccactctatcagggctcgcgactgggaaacatattgcgctgaaaagggagtgttcgaggaccaagaggatgttgcactaacggcccgattgatgtttcacgtgaccccaggatcctccatcttacgtctggcgatgggcgctccctcaagcccttggctgtcgaatgtattgctgcacgatttcgacaagcgcctcgccgacgagcttgcaaaggagaagattatctacacacggtatgccgatgacctgaccttctcagcacctcggactggccacctcaactcagtcgatggtattctgaaggacattatacgggacacggatgccccagagctgactattaacgctctgaagaccgtggtagccactaccaaatatagacggaccgtgacagggttggttcttgcgaatgacggcagagtcacaattgggagggatcgcaaaagatacatcaggtctgcgatttaccatgctctgaagggagccaatactgctgaagaaaatcagatgctgctcggttacatcgcctttattgggtccgtggagccggactttgtggaaaaactcaaagccaaatatggacctaactttgtcgaacgtctaagcgaggctcatatcgctaacaaccagtga

SEQ ID NO: 11721 - RNA, 1017 nt, synthetic construct
  source 1..1017: mol_type = other RNA
atgatgaaagagcacctggtcaccgagggagagcccgctgtgaggttccctgacgtgcttcagatcttatctgaggaaaccggcttgctcatttccgacattcgccacataatctcctcagccgaggtgagctacaaaacatacactataccaaagcgatccggagggatgagagtgatttctcagccgtcccggcaggttaagattttgcagcaggcgattatcaatcggattctgctcaacctgcctatccacgaaagcgcaacagcctaccgaaagggtaagtcaatactggacaatgctcatccccaccaaggggcagggcgcacaattctgaaaatcgatttcagccagttctttccatccattaaatcggccgattgggtacatttctgcaagaaaaacaagcttatgaacgacatcgatcaatattacacgagcaagattctctttaagaaagaacccaatatgaggggactcagacttgccatcggtgctcctagttcccccttgatcagcaatatcttaatgtacgatttcgacaacgccgtcaatgagttaattgttagcgaagaggtggtctatacacggtatgcggacgatctgaccttttctgcccctcgtacgggctatctcgttgatgtagagagtaagctccgcaagatcatcagaaagaacgtccacccaaggcttaaaattaatgaagagaagaccgtttacgcaacttcgaaatatcgcaggagcgtgactggcataatcctgactaacaacggtaatacctccattggccggcaaaagaagagaataatctctagttgtgtgcatcatgctaaatgcggactactgtcagcagaggacctgaagaagctgagtggctacctggcctatatctcttcagtggagccagactttctgcagtacctgcgtaagaagtatggcgatgaaatcatcgaattgctcaaaaaaatcgggaatccgaacaccaaagtcgaactaattcccaaaatatctgtgtga

SEQ ID NO: 11722 - RNA, 993 nt, synthetic construct
  source 1..993: mol_type = other RNA
atgtccgaagagaattttgtcactgcccaggagtacaggtttgacaatatcctgcaaattttgagcgaggagacaggcctgctgttgaacgacattaactacatcatttcatccgcacccaagagttataagacctataacataccgaaacgaagtggagggacccgcaccatatcccagccggctaggcaggtcaaaatcctacagaaagccctcattaagaacgtgctccttaatttaccagttcaccccgcagcgactgcttatcagaagggcaagtctattttaaacaatgctcagccccatcagggagagggacggagtatcttgaagattgacttcagcgagttctttccatcaatcaaacacttcgattggatagactattgcaagaaaaatcgaattctgaatgagcaggaccaacattacacgtcgaggatcctgttcaagaaagaagtggggatgcggggcctacggttagcaataggcgccccttcaagcccactcctcagcaacatcctgatgttcgactttgattccgccgtgaacgatctgatcgtaacggacaaaatagcttacacaagatatgcagacgatttgacctttagcgcaccaagggcgggatattttggggaaatcgaaaaaaagcttcgcaccatcatcagaggtatgtcccaccctaagctgaagatcaaagaagagaagactgtccgcgccacacccaaattcaaaaggagtgtgaccggcctgattctgacaaaccaaggcaagacttccatcggtcgtgataaaaaacgcattatctctgcctctgttcaccacgccaagaacaacaatctcagccaagaacagatgaagaaactgtctggttacctcgcttacattaagtcaattgagcctagcttccttgactatcttagaagaaagtacggagaagccatcatggattctctgcggaagatggggcatcctgattaccgtgtggagaattga

SEQ ID NO: 11723 - RNA, 1011 nt, synthetic construct
  source 1..1011: mol_type = other RNA
atgaaaaatcaggcaccccactctattactgatcgctttaataggagcgctatcgaaaactttgatctgatccagattctgtcagaggaaacggggtttctctcatctgacattaagcgtataattcactccgctccaaaatcctacaagacttacgaaatccctaagcggacaggggggaaaagaattatctctcaaccagcaagagaggtgaagattctgcaaagagtgatcatagagaaggtcctatctcatttgcctattcaccagttcgccacagcctacagaccgggcatatcaatcctcaataacgctcttcctcataagggggctggtaggagcattctaaaaatggacttcgagaactttttccccagcatcaaatctcatgattggataacctattgcgaagaacttgagattttatccaacgaggatcgcgctctcacagcatccctctttttcaagtcccagccacccaaacgaggactccgtttggccatcggtgcgccaagttcaccgatcctgtcaaatatcctcatgtatgaattcgacaagaaaatcgagaaagagatttacggcaaagagattatctataccaggtatgccgacgacctgacctttagtagtgagaggacaggctacctgctggatgtccgatcgatcgttcggaaggcactgatggagattaagtaccccaagctgaagatcaacaaggaaaaaaccaagtacttcactagtaagtatcgccggagtgtgactggcctggttctgaccaatcagggagaggtaagccttggacgggataagaagcgctctataagcgccggtattcacaacgccttgaacggaaaattaaatgacgaggaaatgaaaagcctttccggctatctggcctacgcgaacagcgtggagcctaatttcctgaagaagatgtccgaaaagtatggcgacgacatcatgaagacgttgaaaaaattcgggaaccccgaagtgaatatcaaaatatga

SEQ ID NO: 11724 - RNA, 948 nt, synthetic construct
  source 1..948: mol_type = other RNA
atgtcagaccttatcgcactgtttgtccacgagacagggttaggggagcatgatatacggaaaattgtagcgacagcccccgccaggtacaagacctatgcgatcaaaaagaggaatgggatagatcggaggattattagccaacctgcccgagaactcaaactgttgcagcgcaccctaatcgatgcagttcttaagaacctgcccgtccatcgctcagcaaccgcctacaggacagggatgtcaataatcgacaatgtgcgccctcacattaattccggtgctatcctgaaactcgacttctccgatttcttcccgagtctacgggagtctgactggagagaatattgcgttcgcaacgaaatcttcagatcagaagaagacattgaggtcagtggattagttcttttcaagaaagagaggcagagacgtgagttgaggttaagcattggcgctccatctagccccatcgtatccaacatcctgatgtttgatattgactcggagatcgagtccaagatagtcagtgaggaagtggtgtatacgcggtacgcagacgatatgaccttttccgctagacgaaccggatttctgaacaaggtggagaagaatgtgagagaaatattgaggggaagtcagagcttgcggctgcagcttaatgacgataaaactgtctacgccacaaaaaagtataagcggcaggtgactggactgatcattacgaacgatgccacagtgagcgtgggccgagagcgtaaacgcaacctcatggccgccatccacgctgctctgtccggtaagctcagcggtgaccaagtaagagaaaccctgggcatggtgtcttttgtgattagcgttgaaccagatttcaaaaagagaatcgagcgcaaaaatggcgaggacgctctggccctgctctctaagctcgcatctactaagggcacttga

SEQ ID NO: 11725 - RNA, 933 nt, synthetic construct
  source 1..933: mol_type = other RNA
atgggcagcttgtacgatctgctgaaacgcgagacagccctacctgaccgggacctgcagaagattattgcgactgctccggcccggtacaagacctacaaaatacccaaacgtaattccgaaaagatgagagtgatctctcagcctgctaaagaggtaaaactcatgcaaagagtgctgatgcgggaattcttgtcgaacttccctattcacaaagcagctaccgcttacaagtcaggcagcagcattcgagataatgccgctgcacatgtcgggcgtggacccatcctgaagtttgacttcaaagatttctttccatccattacagagaatgattggagaaaatacgccgagggtcgcggcattgccgaactcgacatcgaaatctcaactaagatcttcttcaaaaaggagttcaacaggagtctgttgaggctctctataggcgcgccatctagccctattcttagcaacatccttatgtttgggatcgacgaacggatctccgcagaaattgcatccgacgaggtgtcatacacgaggtatgccgatgacattacctttagtgcccccaggactggatactttaacggcctggaacggcatttacgcatgatacttcgagagatcgaatatccagctctgaagatcaactctgagaagaccgtgtatgcgacctccaagtttcgccgtcaagtgacagggctggtcctgacaaacgatggtcagatcagtgttggaagggatagaaagcgaaatctgttcgcagccgtacaccatgccttaaatggaagactcaatgacgagcagatcgaggaggttctagggttgatagcctttgttagctcaatagagcacgacttcaaggatcggctcgaaaagaaatatggtcccgaggtggtccgcaggctttatagatgcaagcagaactga

SEQ ID NO: 11726 - RNA, 978 nt, synthetic construct
  source 1..978: mol_type = other RNA
atgatgtcttggatcactaggatgctggccctgcacacgggcttacaagaaagtgccatccatcgcatcatggtgaccgctcctgtgcgatataaaaccttcttcattcccaagcgtaacggtgaattgagacagatttcccagccagcccgcgaggtaaagctggtacaaagggcatttagcgagattatcctgaagaagcttccagtgcacccttgcgcaaccgcttatattgatcggaaatccatcctgcataacgctcaaccacacgccgggcacggccagatcgtgaagatggactttaagaacttcttcccctctattcggagggtggattggatacactactgtcaggaaaacagtatatttgacagccagattgacgccgatttatcctcatcccttttgttccagaaaaacaagaatagcggactaatgaggcttgcgattggtgcaccttcgtcccccattctgagcaatatcctgatgtataatttcgactacctagtgagcaaggccgttcttaaagatcatgttacatacacccggtacgcagacgatatgactttttccgcccctcgtacaggacatctcgttaacgtggtgagaattgtcaaaagtgtctgccgctcactgaattacccccgggtcgagatcaacgagaataagacagtctatgcaactgcaaaatacaagcgagccgtcacaggcttgatactgaccaatgacgggcgggtgaccatcggcagagatcagaaacgcctcatccgcgctatggtgcatcacgctatcaacacaaatttgacgaaggaggccctcgaacgactcgctggaaatctggcgtacattaactctgttgagccggcttttatggaaactctgacaagaaagtatggggccgagaacatccagaggatcaggtgtatatggagaaaagactcacccaaaaatagcacttcaaagaaatctctcacctga

SEQ ID NO: 11727 - RNA, 954 nt, synthetic construct
  source 1..954: mol_type = other RNA
atgtctgaattagtccggaagcttgcccaggaaactggggtgccggaacccttagtccgcgagatcatgctcaccgccccagttcgttacaaggagttccatatcgttaaaaagagcgggggcctaaggaagatctcccagcctgccagagaagtgaaactgcttcaaagaatcgccactaaaatcctgctgaatcaattgccagtgcacccctgcgcaacggcttatcgaattaacagcggtctgctcaataacgttaagccacacgctaagaattcacagatcttgaaactggatcttaaagagtttttcccctcactgcggctcgtggactggtatcagtactgccgccgaaattttatgaacatcagctcggaagacatcacactcgccgggcgcctgttcttcaggaagacccccaaaaaggtaagcctgcggctggcgatcggagctccttcttcccctagtatgagtaatatcttgatgtacgagtttgataccttagtgcacaagtactgtcttacagagaacatagtgtatacacgttatgccgatgacatgacttttagcgcacctagaaccggatatctggtcggcgtgatcaaaaacgtgtctcggattattcgaaagctgaagtctcccaacctggagattaatagtggcaagactgtgtacgcaacacaaaagtataaaaggtccattactggactcatattggccaacaatgggtcaattaccataggtagagacgcaaagcggcttacccgcgccagggtacaccatgctattaaaggcaggctgaccgaagatgagataatcaagctaagtggatacctgagctttattatgtcagttgaaccatccttcgtctacacgttgcaggtcaaatacggcgcgcaccagattaaccagatcctccatgcttccctcacaccgaaagagagaattgagtga

SEQ ID NO: 11728 - RNA, 954 nt, synthetic construct
  source 1..954: mol_type = other RNA
atggatctcctgatcttggagacaggtttaggcgaaagggacgtaagagccatagcagccaccgcacccatccgttacaaaacatacgagattgaaaagaggaatggcgggaagcgtctcattagccaacccgcccgtgagcttaaggccctccagagggtaattgttaatgaagtgctcgataaactgcccgtccacccagctgctactgcgtatcggccaagtctctcaattaaggacaatgcaaagcctcatacggttagcggcgcaatcttgaagctggactttaaggatttctttccgtcactgagagaagtcgattgggagtcatattgcaaacagcacaacattttcgagactccagaagacatccacctaagttcccgcatcctgttccaccgcaaaaagacagcgtctactctgcgattagcaatcggagcgccgagcagtcctaccctctcaaacgttttgatgttcgagctggacacccatatcagcaaactggtcgcctccgacgggattacatacacacggtatgcagatgacatgactttctcggccccccgggcttggaatcttgttggcacccttaggaaagtgcgcaagttgcttcgagatacagcttcccctagactacagcttaacactgataaaacggtgttagtgaccaagaaataccggcgcgtggtgactgggctggtcatctctgacgaccagcgagtgtccctgggacatgaaagaaagagattgctgagagctgccgtgtacaggtttatccaaggcaagctgtctatacgggagcaggctaggctggctgggaacctagcctttgcctatagcattgaaccagagtttatacagcggctggaggataggtacggtacctctaccatcaccgacataaaaagagcccctcgcctcctgcaaagctccggagataatcagaaccgctga

SEQ ID NO: 11729 - RNA, 915 nt, synthetic construct
  source 1..915: mol_type = other RNA
atgaagttatccccctggaaacaaggttggatgtggcatctgtcacgagcactctgtgaagtgcacccactggacatagaaccaatcgcttttccgaacgtgtcgcaacctgccgttgaggtgaaggcactgcaacgggggctgatcgagatcctactgcgcgatttacctatgcatcatgccgccactgcttatagggtggggattagtatcaaagacaatgccatgcgacacgctggaaatgggccaatactgaagatggatttcaaggacttctttccttcaataaagccccgggactggtccgcatattgcaaacggacaggggtcttgagcgacagcgtggacattcatcttacctccctcctccttttccagaggccgaaaggctctagcgttcttcgccttgccatcggagcgcccagctcaccattcttgtccaacgccctcatgtttgattttgatcaggccatcgcagaagcagtggctaaagatcacgtgatctacacgagatacgccgacgacctcactttcagcgcacctagaacaggccacctggtaaacgttgagaaaatagtgagggccactttgagggctctccagtatcccagactaaccgtcaatgatgataagaccacacgtgtcaccagaaagtacggtcgtaaagtaacaggtctgacgctgaccaacgacggcaaaatttctattggccacaagcgcaagaggttgattcacgccgctgtccaccatgcttctctgggcaaactgagtcctgccagtctcggagagctgaagggattacttggcttcgcaaactctgctgagccacagtttatcaataccctgcgacagagatacggggccgcgctgattcagcggatccagacttttgatattcccaagcgcgcgcggtga

SEQ ID NO: 11730 - RNA, 948 nt, synthetic construct
  source 1..948: mol_type = other RNA
atggccgccatcatcgagaggctggctttagccactggaatggacgttggcctggtgggaagagtattacgctccgcgcccgtccggtacaagacataccttattccaaaaagaaccaacggttttagggaaatttcccagcccgcagttgaggtgaaggctctgcagcgaggcctcatcgaaatcctgttgcgggatctgcctgtacacgaagcagccaccgcctatcgcgtgggcatgagtataaaagacaacgcacaacgtcacgccggcaatggccccatcctgaaaatggacttcaaagacttcttcccctctatcaagccgcgagattggatttcatactgcacagaaaccggagtgctgattgaccaaaccgacatccacttgacgactctacttctgttccacaggcccaaggggacatctggcatgcgtctggctataggggccccaagctccccatttttatccaacgccctgatgttcaactttgataaagcgatcgctgaggctgtggccaaggatcatgtcaggtatactaggtacgctgatgacctcacatttagcgcgcctaggactggacatcttgtcaatgtcgagaaaatagtgcggtcggtccttcgcgggctggagtatccgagactgctagtgaatcaggataagaccaccagagtgacgcgaaagtatggacggaaggtgacagggctcaccctcactaatgatggccgcgttagtattggacatgggcggaagcgtcagatccgcgccgcagttcatcacgccagcttgggtaagctggacgaacggtctttggcagagctcaaagggctgctcggctttgctaactcagctgagcctcagttcgtgattaccctcattgagaaatacggtgcagacattatccaccagatacagaaaagcccaaatagacctagaaagatctga

SEQ ID NO: 11731 - RNA, 951 nt, synthetic construct
  source 1..951: mol_type = other RNA
atgatggggaagattgtcgaggccctcgcaatcgaaaccgggatggatgtgggtttggttgaaagaattatgaggagcgcacccgcccgctacaaaacatatcggattcctaagcgaacaaagggctttcgggagatcagtcagcccgcagtagaagtcaaggcactgcaacgcgggctgatagaagtcctgctgaggaaccttccaatgcacgaagccgccactgcctatagagtgggtatgtctattaaggataatgcgctaagacacgctggcgacggtcctatcctcaagatggacttcaaagactttttcccatcgattaagccccgggactggtccgcctattgcaaacagaccggcgtgctgatggaccctgtcgagatacagctgacatcactccttctgtttcagcgtccaaaggatagctcagtgctgaggctcgctataggagccccaagctcacctttcctgtctaacgccttgatgttcgagttcgataaggcaatcaccgaggctgtggctaaagatcatgttgtgtactctagatacgccgacgatctgacttttagtgcgccgcgaaccgggcacctcgtgaatgttgagaaaatcgtgcgcgctaccttacgagccctggaatatccgacgctgacagtgaacgatgacaaaacgacccgggtgactcggaagtacggcaggaaggtaacaggactcactcttactaacgacggcaaagtctccatcggacatgagcgcaaaagattcattcgcgcagcagttcatcacgcctccctgggaaaacttagcacagcttccttaggggaattgaagggtttgctaggctttgctaatagtgcggagccccaattcatcggcaccttaaaggagcgttacggagctgagctcatccagttcattcagacctttgacatccccaaaagggaacagtga

SEQ ID NO: 11732 - RNA, 957 nt, synthetic construct
  source 1..957: mol_type = other RNA
atgtcatccaacatagttaaagcactctctctgcagaccggcatggacgtgctccttgtcgagcgtattatccagactgcccctattagatacaaaacttacaggatccccaaacaggcgggcgggtttagagagataagccaacctgcgattgaggtaaaggcactgcagagagggttgatcgaaatattgttacggaacctgccactacacgaagcagctacagcatataggacaggaatgtctattagggataacgccctacgccatgctggggatggtcccatcctgaaaatggacttcaaggactttttccccagtatccgccctgccgattggtccgcctactgcgagaaaaccggagtcttaactgaagctgacgacgtcaaggcaaccagcctgattctgttccatcgcccaaagggtagtagcatccaccgccttgccataggagccccatcctccccgtttctgagcaatgccctgatgttcgactttgataagctggtgactgatgctgtaggacgcgaccatgtcagatatacaagatacgcagatgatctgacctttagtgctcctcgaaccggccacctggtgaatgtggatcgaatcgtgcgggccgccattaaatctatcgatagaccgcgcctcaaaattaacgacgacaagacgacccgggttacacggaagtatggcaggaaggttactggtcttacactcaccaatgacggctcggtgtctatcggaagagagaggaagaggttgattcacgctgcagtgtatcgtgcgagcaaaggggagctggacttgccatcacttgctgagctcaaggggctgctcggcttcgccaattcagctgagcccgccttcataatgacgttacgggaacgatacggcgatgaagtgattaagtatatccaaaggtaccgtatccctaaacggatcccccagcagtga

SEQ ID NO: 11733 - RNA, 960 nt, synthetic construct
  source 1..960: mol_type = other RNA
atggttgggatcatagagctgcttgctatcaataccgggatggacaccggtttagtcgaaaggataatggtgactgccccagtccggtacaaaacgtattttatcccgaagcggcatggcgggctaaggaagatttcccagccagctctggaggtgaaagtgctccagagagcactgatcgaggtgttactcaacgaactccccgtgcatgacgctgccaccgcatacagaaccggaatgtccataaaggataatgcgctgaggcatgcagggcacggtcctattatgaagatggatttcaaggagttctttccctccattttcgccagagattgggatcagtactgcgagactacagaagtgctgacagagccacgagagatctatctgactacccggcttatgttccagcgcccgcgtgattcatcactgttgaggctggctatcggcgcccctagttcgcctgtactgagcaacgctcttttgtttgagttcgacgaaatgctgacagccgaagtagccaaagaccacgtcgtgtacacccgctatgcggacgatctcacattctctgccccacggacgggacatctcgtgaacgtggaaaaggcagttagaacagtcattaaggcgattcgacgccccaaactcaccatcaacgaggacaaaacacaacggatcactaccaaatttggacgccacgttactggactgacgttaaccaatgatggagaagtcagcgtaggccacgaaaggaagaggcaactgcatgccgcagtgcacagagctctccacggcaaactggacgtcattgagctggggaagttgaaaggcattcttggctttgtgaatagtgccgagcctgagttcattgttactttgcgcaagaaatatggttctaaaatcatagacagcatccagaagacacccgtgcccctacgaccacgtccttttaagaagtga

SEQ ID NO: 11734 - RNA, 960 nt, synthetic construct
  source 1..960: mol_type = other RNA
atggttggaatagtcgaaattttggccatcgaatcagccatggacgtgggcctagtcgagagaatcatcagaacggccccagtcaggtacaagacttatcagatccccaaaagggctggaggcaatcggactattagccaacccgctaaggaggtgaaactgctccagagatctctgattgacgtcctgttgcgaaacctgcctgtgcatgacacggcaacagcctacagagaaggcctatccattaaggacaacgccctcaggcatgccggtgatggccctattctcaagatggacttcaagaatttctttccatcaataactccgttcgattgggcggagtactgcaaagagagcggtaccctcaccgacccgcaggacatccacatgacaagtttacttatgtttcaacggcctaaggggtcgagcgctctgcgtttaggcataggggcgccctcaagccccttcgtgtccaatgctttactgtacgaatttgataaaagggttaccgcggcagtcgcaaaagatcacgtgaaatatacacgctatgccgatgatctgacattttccgcaccacggactggacacctggtgaacgtagagaagatggtgagaagtacgctggagggacttaagtatcccaaacttgccatcaacgacgaaaaaacaacacgagtgacacgcaagtacgggcgcaaagtaactgggttgaccctgactaatgatggccaggtgtctatcgggcacaagcggaagcgtctcctgcatagtcaggtgcacaaggcttctcttaaccagctggacgtggatgaaatggttgctctcaaaggcatgctgggtttcgttaactccgccgagcctcagtttttgaaggtcctcacccgcaggtacggagagggagtactgaccaggattcgacggtttgaaaccgagccagcagggcgcggcaccttcaattga

SEQ ID NO: 11735 - RNA, 951 nt, synthetic construct
  source 1..951: mol_type = other RNA
atggccggcatcatcgagatgttagccattgaaaccgcaatggacacttctctagtggaaaggattatccggaccgcccccatccggtacaaaacatatcagataccgaagcggtctggaggataccggactatctctcaacccgcaaaagaggtgaaactcctgcagcgcgcactgattgacgttctgctgcgcaagttgcctgtacatgataccgcgaccgcttaccgggaaggcctttccattaaggacaacgcacttcgccacgtgggggacggaccaatacttaagatggatttcaaggacttctttccctcaatccgtccaggggactgggccgagtattgcaaagaaactggcgccttgactgacgcacaagatattaagctcacaagtttccttatgtttcagcgccctaaagggagctcgacgctccggttggctattggcgcgcctagcagcccattcgtctccaatgctctcctgtacgattttgacaatagaataaccgccgctgtggccaaagatcatgttagatacacacgatatgctgacgatttgaccttcagcgcgcctaggaccggacacctagtcaatgtggagaaactggtcaggagtactattcatggtcttaagtacccaaaattgatgatcaacgctgagaagacaactcgcattacaaggaagtatggccgaaaggtgacagggctgaccctgacgaacgacggtcaggtatccatcggacacgatcgtaagagactgctccatgcccaggtgcaccgagcctcattaaatcacttagatgccgatgagctgctcaacctgaaagggatgctgggttttgtcaactccgcagaaccccactttctggaggttctgaggagaagatatggcgacgctgtgctcacgaggatccagagatacgaggtcgaaccgccccagaagccttga

SEQ ID NO: 11736 - RNA, 948 nt, synthetic construct
  source 1..948: mol_type = other RNA
atgtcagacatcgtacgcattctcgcaatcgaaacgggcatggagatgtctctggttgagcgaatcatcaggaccgcccccgtgaggtataaaacataccagatccccaagagatcagggggccaccgaaccatttcgcaaccagccagagaggtaaagctactgcagagggcactgatcgaagtgctgctcagacggcttcctgtccatgaggcagctacagcctatagggagggcatgtctattcgggacaatgccctaagacatgtggggggaggaccaatactgaaaatggacttcaaggacttctttccttccatccggccccacgactgggtggaattttgcaaggagacaggagctattagcgatcttgttgacattcagttgactagtctcttgatgttccagcgcccgaagcgttccagcacccttcgcttagccataggtgcgccgtcctctccattcgttagcaacgcactcctgtttgaattcgataagcgaataagcgaggccgtggctaaagatcacgtcatctacaccaggtacgcggatgacctgactttctccgcaccaagaacaggtcacctcgtgaacgtcgaaaaaatggtcagatctaccctccggggcttagggtatcctaagctcacagtaaacaatgaaaaaaccacacgcgtcaccagaaagtacgggcggaaggtgactggactgaccttgactaatgatggcaaggttagtgtgggacacgccaggaaacgccttttgcatgccacggtgcatcgtgctagtcaggataaactgaattcaactgaactgggtgtcctgaagggcatgttaggttttgtgaacagcgtggagcctcaatttatagagaaactgcgcgagaggtacggctccgctctgatcgggcggattcaggcttatgacattcccaagcgtaaatggtga

SEQ ID NO: 11737 - RNA, 957 nt, synthetic construct
  source 1..957: mol_type = other RNA
atgagcattatcgacattctctctttcgaatcagggctcgaggccaccacagttgagagaatcatcaggaacgctcctcttcgctataaaacttaccagatcccgaaacggagcggggggtccagaaccatctcacagcctgcgagagaagttaaagtgttgcagcgagccctgtcggacgtgctactgcgcgttctgcccgtgcatgaggcggctaccgcctacaggcccgaaatgagtataaaagacaatgcattgaggcatgcaggagacggtcccatactcaagatggactttaaggattttttcccatccatcaagccaagggattggacactgtactgcaaagagactggcgccctcacggaccctgtagatgtccgccagaccgcccttctcctgttccaaagaccgaaagggagtgccgtgatgaggcttgccattggagcaccatcctctccattcgtctctaacgctctgctgtacgaatttgacaagcgcattgccgccgaagtcgctcgtgatcacgtgacttatacacggtatgccgatgatttgactttttcagctcctcggacgggttaccttgtcaacgtggaaaagatggtgcgtactactctggcaggcctggaatatcccaagttattgattaacggacaaaagaccacacgcatcacacggaagtacggacgtagggtgaccgggctcaccttaacgaatgatggccgagtttccataggccatgagcggaagagaatcctgcacgctcaggtccactctgcaacaaaggatcttctcgacaatgatcaaatagcggagctgaaaggcatgttaggcttcgtgaatagcgtagagccacagtttctggacgtgctgcggagacgctatggtcacagcattattacctttatccagcgattcgagagtaaccctcccacactggacctattggagtga

SEQ ID NO: 11738 - RNA, 1071 nt, synthetic construct
  source 1..1071: mol_type = other RNA
atggccggagacggcaataggttgctagagcgggagcgaccaggccaggtgcagcaacaccctagcgggtttgagggtcgcaatgccatgagtggcatcatcgagacactcgctgttgagacagggatcgagcctgggctcgtggatagaatcgtgagaaccgctccgtctcggtacaaaacctatcccatcgataagaggggaggcggcactcgcttgatttctcagcctgcgaaagaagtgaagattcttcagcgcgcactgaacgatgtattgcttaaacacttacccgtgcatgcctccgcaaccgcctatagggaatccctgtcaattagagagaacgccctgccacatgctggaatcggacccatactcaagctcgactttgcggagttcttcccctctataaaacttcacgattggaaaaagtactgcgaaaagacaggatgcctgacggacgtgcacgacgtagagatgagcggcagactgatctttcaccgacctaagggccggagtaccctgcaactggcgattggctcaccgtgtagccccttcgtctccaacgctctgatgcacgagtttgattttctggttgtcgaagccgtagcagctgataaggtggtttacacccgttacgctgacgacctgacattctccgcccctaggctgggacatttacgggacgtcgaaaagattgttagacgaatcctccgtggtctttcatttccacgcttgaggctcaatatcaacaaaactacctatgtcactagtaaattcggcaggcgggtcacagggctgactctgacgaatgctggtggtgtcagcattgggcacgcccgaaaacggaagttgcataccgccgtgtaccgtgccagccagaataacctcaacgcagacgaactagcagagcttaaggggatgttagggttcgcacattcggtggagcccgaatttatagaaattctgaggcggcgcttcggaaatgatatcgtgtccttcatccagtcttatccaatagagcgcaagagatcagccaaagtgattgctgtggaaccagacgaaactagatga

SEQ ID NO: 11739 - RNA, 984 nt, synthetic construct
  source 1..984: mol_type = other RNA
atgaccaacctgctaaggagcatggctatcgagacaggcctcagtgaagtcatcgtgcaaagaataatgcagtctgcccccaaccgctataagcactactcaattgagaaacggtctggtggcaaacgtctgatatcccagccggccatcgaggttaagctgctgcagcgcgcctttgtcagtctttacctgagcaaactccccgttcacgcggccgctatcgcatatcgccccaataaatccattctggacaatgccctccctcatgtgtccagtggctctattctaaagatggacttcaaggatttcttcccatccatccgcaaggctcactggatgaactattgcgccgagttcggaatctttgaaactcagagtgaacgggagttggcagctagcctgctcttccaccggccaaaaggaagcagcgtcatgcagctggcaattggcgcccctagctcacctaccttgtcaaacgtgctgatgtacaagttcgatgagataatctcttctgaggtggctactgataaagtcatatacacaaggtatgcagacgacctcaccttttccgccgatagaagttggaatttggtggacgtggaacgaatcgtaaaaaagactctccagaacatttcttacccaaaacttcagctccatccttccaagacgatccacgtaaccaagaagttctcaaggagcgtgaccgggctgatcctggcaaacgacggcagagttacaatcggtaagaaacggaagaggattatccacgctgcaacacatgccgcatccttaggaagactggatgaccgtcagcttcaaaaacttgccgggatgctggcttttgtgcattcggtggaaccctcatttattgcgttgctggagagaaagtacggttttgagacgattaaagggttacaaaagattggcgcgaatgatcggaggaatttacgagctgccgtcggggaagccgacttcggaacttga

SEQ ID NO: 11740 - RNA, 966 nt, synthetic construct
  source 1..966: mol_type = other RNA
atggtatcgctgctccgggccatggccatcgaaacaggactgagcgaggtggtggtgcagcgaatcatgcagagcgccccgcatcgatacaagcagtacaagattgacaaaagatccgggggcaaaaggctgatctctcaaccagccaccgaggtcaaactgcttcaaagggcatttgtggagctttacctctcaaagctcccggtccacccagcagctatggcatatcgtcctaacttatccattttcgacaacgctacagcccatgcgggttccggatccatcctgaaaatggatttcaaggatttctttcccagcatcagaaaggctaattggatgagttactgcgccgagttttcaatactagagaatcacagtgaacgcgaactcgcagcctcattgctcttccagcgacctagaagcagcaacgccatgcagcttgccattggggcaccatcttcccctgctctgtccaatgtcttgatgttccaatttgacgagataattagtgcgggcgtggccaaggacaaagttatatacaccagatatgctgatgatctgacattcagtgcggacagaagctggaacttggtggatgttgagaagactgtaaaaagggcgctgcgtgaaatcgcttatccccggttacagctacacccagataaaaccactcacgtgacgaagaaattttctcggtctgtgactggcctgatcttagcaaacgacgggcgtgtcacaattggtaagcgccgcaaaagggccatccatgcagctacccatgccgcatcacagggaaggctcgatgatcgccagcttcaaaagctggctggcatgctggcctttgtgcactctgtcgaacccggcttcatcgacgttttggaaaggcggtatggactcgagacgattatgcggctgcagaccattggggctaaggacagacggaatctgcgccctcccgacgcctga

SEQ ID NO: 11741 - RNA, 981 nt, synthetic construct
  source 1..981: mol_type = other RNA
atggcgagttttcttcggacaatggccgttgagactggactgagcgaggtggtggtgcagagaattatgcaatcagctccacatcgctataagcactacgaaatagataagcggtctggaggtaaacggcagatctctcaacctgccaccgaggttaaactgttacagcgcgtgttcgtggaactctacttgagcaaactgcccgtgcatcctgcagccatggcctacctgcccaacaaaagcatccttgacaatgccaatgcacacgccgaagccgggtcaatcctcaagatggactttaaggacttcttcccatccatcaggaaggcctcgtggatgtcctattgcgctgagttttctatcttagagaaccacgcagagcgcgatctggcggctagcctactctttcagaggagcaaaggaagcggcgccatgcaactggcgattggcgcacccagttcccctgctctgtccaacattctgatgttccagttcgacgaagtaatctcgagtgaagtgtccaaggataaggtcgtttataccagatatgcagacgaccttacattctctgccgatagatcatggaatctggtggatgttgaaaaaactgtgaagagggccctccgtgaaatagcttaccccagactacagttgcacccagataagactatccatgtcaccaaaaaattcagtcggaccgtaacgggcctggtactggctaacgacggccgtgtcactattgggaagagaaggaaacgagctattcacgcagctacccattctgcctctctgggtcggctcgatgatagacagatgcagaagttggctggcatgctggcatttgtccactcagtcgagcctgcctttatgggggtgttagagcgccgctacggatccgagacaataatgcgattgcagaccgtggggagccgagacaggaggaaccttcggccgattaatgagacactcgacaagaagtga

SEQ ID NO: 11742 - RNA, 987 nt, synthetic construct
  source 1..987: mol_type = other RNA
atggtgactctcctccgtgccatggccattgaaactgggttgtccgaggtcatcgttcacagaatcatgcaaaccgcgccccaccgttacaagcagtacactatatctaaaaggagcggcgggaaacggctcatatcccagcctgccacagaggtgaaactgctgcagagagcctttgtggacctctacctgagtaagctgccggtgcatccagccgctatggcgtatcggaccagtctctcgataagcgacaatgccaaggcacacgctggatcaggatccatactgaagatggattttcgcgacttctttcccagtatcaggaaggcttcctggatgacctactgtgccgaattttctatcttggacaactcctttgaaagagaactgagcgccagcttgttgttccagcgccctacgggctcacatggaatgcagttagctatcggggcccccagctccccagcattaagcaatttactccttttccagttcgatgagattattagtgccgaagcagctaaagataaggtgaaatataccaggtacgcagatgaccttacattctcagctgatagatcatggaatctagtggacatcgagcgcacagttaaaagggtcctgcgtgagattgcatatccccggctccgcctgaaccctgataagaccatccatgtcacaaaaaagttctgcaggaacgtgacgggcctaatcctggctaacgacggtcgagttaccattgggaaaaagagaaagcgcactattcacgctgcgacccacgccgcatctcaaggtcgcctggacgatcggcagctgcaaaagctgggcgggatgctggcctttgtaaagtctgtggagccagccttccttgacgtccttcgaagacgatatggattcgagactattatgaaactgcagacaatcggcgcaaaggaccggcggaatcttaggcctcagattgatgctgtagagatctctggcggttga

SEQ ID NO: 11743 - RNA, 987 nt, synthetic construct
  source 1..987: mol_type = other RNA
atggtttctctattgcggaccatggccgtggaaaccgggttaagtgaagccgttgtacagcggatcatgcagtcagctcagcaccgctacaagcagtattacattgacaaacggagtggggggaaaagattgatctctcagccagccactgaagtgaaactgctccagagagctttcgtcgatctctacctgagtaagctacccgtgcatcccgccgcaatggcgtaccgtcctggtaggtccattctggataatgccagcgcacacgcagattctggcagcatacttaagatggactttaaggacttctttccatccatccgcaaggcaagctggatggcctattgcgctaatcatagcctttttgactcgcagtctgagcgcgagctgagtgcctccctcctgttccagaggccgaagggcgcttcctctctgcaacttgccattggagccccttcatcaccagctttgtccaacgtcctgatgtttcagttcgatgagattgttacgggcgaggtgagcaaggacaacgtgacatacacccgctatgcggatgatctgacattttctgccgagagatcctggaacctggtggatgtcgaaaaaaccgttaaacgagctctgcgcgagatcgcgtatcctagactggtcctcaacaccgacaaaacaacccacttgacaaagaaattcgggagatcagtaacgggcctcgtgctggctaatgacggacgtgtgactataggaaaacggagaaagcgggaaattcaagcagcaactcatgccgccagcctggacaggctcgatgcacgacagatgcaacaactagcgggcatgttagcttttgtgaacagcgtagagcccgacttcttaggagtgctcgagaggcgatacggtatcgagactatcatgaggttgcagaaggtcggtgctaaggaccggcgtaatcttaggccccagacacttgaagaagatgccggccacctgtga

SEQ ID NO: 11744 - RNA, 948 nt, synthetic construct
  source 1..948: mol_type = other RNA
atgtccgcgttggttgcaaagctggtgctggctactggaattgatcagtcttccgtgaggagaattatgctgtctgctccacggcgatacaagagctattatatcgcaaagagaaatggtggtcttagaaagatctctcaacccgctcgagaagtgaaagttcttcagcgcgcccttatagacctcctgctgagcgatttaccagttcatcggacagctatggcctaccgggtgggaacatcaatcaaagacaatgctaatgcacacaaaacctccgggcccattatcaagatcgacttcacgaacttttttccaagtataaagagaagcgattgggctgattactgtcaaaagaccggttgcctcaacgatcctactgagatagggcttacaagttcgctgctcttccagtaccaaaaagaacacgcctcacagaggttggcaatcggcgcaccctctagtcctatgctctcaaatatactgatgtacgagtttgatagcgagatcgagtcccgtctacagggaactcgcattgtatataccaggtatgctgacgacctgacctttagcgccccaaggaccggctacctccatgatgtcatgaaaattgtgcgggaaactatgcgtgccatcccttatccccgcctcaagattaaccctgacaagacgacatacgtgaccactaaatatagacgcagtgtcacagggctcaccctgtctaatgacgggagggtcacaattggatggcgcaagaagcgggagctacatgcggccgtgcacaacgccaaactggacaaattgaatgccaagggcctgcaggccttagccggctacttggctttcgtccagtcagtcgaaccgagcttcttatccgtactgaggaacaaatatggcaccgagattatcatgaaaatcaaggcagccaacgtgaaaaaggcgctgcgatga

SEQ ID NO: 11745 - RNA, 978 nt, synthetic construct
  source 1..978: mol_type = other RNA
atgtcccagttgctggacaaactctcattcgagacaggaatgagagcgaatgagcttcgccgcatcatgtacaccgcccccaatagatataagatttactcgatccctaagcgtgtggggggctttaggagtatagcccagccagcacgagaggtgaaactcctgcaacgcaccctggcaaagacctttctgacgaccctgccgacacacgcggcagctacagcttataaacccgagacttctttgcggtcaaatgcactgcctcatgctggtagaggtcccgtactcaaactggatttccgggatttctttcctagcataagggatagagattggattgcctactgtcgccagactggctgccttaccgaagacgaagatatctatttaaccagccggttgctttttcaccgtaggaagggggaaagtcacctgcggcttgcgattggagcaccaaccagccccatcctgtccaacattttgatgtatgagtttgacgtccgtgtggtagagacagtcgtcgccgacggcgttacatacactcgatatgccgacgatatgacgttctctgctcagcgcactgggaacttaactcatgtcatccgggacgtagggcgagtgctgcgggacattcagtacccacgccttgccctcaaccccgaaaaaacaacgttagtcacagccaaatatggaagaagagttaccgggctcaccctggccaatgacggacgagtgaccgtgggcagagactccaagaggaagataagggccgcagtgtaccaagccgttaacggaaggctggatcctgagcaaatgcaggtgctgactggtatgctcgcttacgttaacgctgtggagcccgaatacctagatgtgctccggaggaagttcggcactcaggcaattctgaagatccagcgcgctccgagaggcgaaaagatcagaaggcgatctccagccctagctcagaatcggtga

SEQ ID NO: 11746 - RNA, 987 nt, synthetic construct
  source 1..987: mol_type = other RNA
atgactgagctgctgcgccaactgtccactgaaacaggattggcagagagcgctgtgaggcggattatcgcgaacgcgcccgaaagatacaaagtgtaccatatcctgaagaaaaacgggggaaagcgcaaaatagctcagccagctagggaattgaaactgcttcagagagcactggttgaactgctccttagcaaattacccgttcaccctgccgccaccgcctatgtaaaaggtcggtctattagggataatgcagagcgccattgtcacagtggcccagtgctcaagatggacttcaaggacttttttccttcaattactgatcgagattgggccgcgtactgctcacagactgggtgcctcacggacgcagaggatatccgcctcaccagtctgctgctgtttcaccgtccagtcggcggacgagtgctacgcttagccattggagctccttcttcccccatcgtctctaacttgatcatgtttcccttcgatgccatgatttccgaagtggttgccgtcgatcacgtgatctacagcaggtacgcagacgacttgactttcagtgggccccgcacaggccatcttaccggagtggcccggtccgtgaagagggcattaagggagataccatttccgaccctcaagataaatgccgaaaagaccacatatgtcaccatgaagtatcaccggcagatcacaggtcttacgctggctaacgatgggagagtcaccattggccgggacaacaaacgagccctgagagcgcaactggatcactattcgaagggtacaatgcctaaagctgacgtgccgcgtctcgctggcaggctagctttcgtaaagagcgccgagccatctttctttctgaatcttttggaaaaccatgggtgggagagaatccaggagattctcagacagtcaaatcagaaggccagacgggccaaacctctggctagcgacgagaatgacttcgcaggctga

SEQ ID NO: 11747 - RNA, 978 nt, synthetic construct
  source 1..978: mol_type = other RNA
atgacagagctgctgaaacagctttccattgaaaccgggctggtggagtcgactgtacgtcaaataattgcaaatgcccccgagaggtacaagacctatcacattagtaagaagaacggcgggacacgcaaaatagctcagcctgctagggaggtcaaactgttgcagagagcactcacagctctcctactgagtaaactaccagtgcacccagcagccaccgcctatgtgaagggaagaaatattcgcgataatgccgagcttcactgtcatagcggtccaatcctgaagatggacttcaaggatttctttccctcaattacggcacgggactgggctgcctattgcactcgcactaactgcctcgccgaccctgaagatataaggctgacgagcctgctcttgtttcacagacctgcaggagggcgggtcctgcgattggctattggcgccccctcctctccaatcgtgtccaacctgatcatgttcccttttgaccagatgatctcagaagcggtagccgtcgatcatgttatctacagccggtacgccgacgaccttactttttctggccctcgaaccggccacctgacagttgtggctaaagctgtgaagaatgcgttaaaggaaatccaatacccgagcctcaaactgaatcccgaaaaaaccacatatgcgactatgaagtaccatcgacaggtgaccggtcttaccctggcaaacgatggacgcgtcacaattggaagggatagaaagcgggccttgagggcccaattagaccactactataagggtatacttccactgaaagagatccctagactcgcaggcaacttggctttcgtgagatcagccgaaccgagttttttcttcaagttagttgagcgtcatgggtaccagaagatccatgacatcctgcgccagtctaaccggaagaataaaaaactcccctccggcaggaacgagtctcccatctga

SEQ ID NO: 11748 - RNA, 981 nt, synthetic construct
  source 1..981: mol_type = other RNA
atgcgagaaatgacggacctcctgaagcggttgtcggtggagacaggtcttcctgaaagcaccgtaaagagtattataagtaatgcacctgagaggtataaagagtacctgatccacaagaaaaacgggggataccgtaagatagcccaacctgcgagagagttgaagctaatccagagggcttttatcgatatcgtgctctccaaactgccgattcactcagccgcaagcgcttatcggcggggaaagaacattcgcgacaacgctatgccccactcacactcagggcctatactgaagatggactttaaggacttcttcccttccattaccgagagggactggagcgcttattgtcagcagacaggctgcctcaccgatcccggcgatatacgtttgtctagcctactgctgtttcacaagccctctggaggaagaattctcagattagccatcggtgcaccgagttcaccaatcctgagcaacgtcatcatgtttcagttcgatgaggccatctctaatgctattgcaaagcatcaggtcatttacacccgatacgccgacgacttgaccttcagtgcaccacgcactggccaccttaattccgttgctaaggccgtgaagaatgctttaaaagaaattccctacccccaacttaaaatcaatcacgagaagactacgcatgtcacaatgaaatatcatcgccaggttactggactcacactggccaatgacggccgcgtgaccatcgggagggatcacaagagatccctgcgggcccagttgcattatttcattaacgggaagctggatgaagcagaaactgcgcatctggccggcaaaatcgcgtttgtgaaaagcgtggaaccagagttttacttctctctgcttgagaaactgggcgccgaaaagatcaatttcctcttatccaaaagcaacaggaaaaagctgtcccttaaaaaatctccaaagctcaactga

SEQ ID NO: 11749 - RNA, 981 nt, synthetic construct
  source 1..981: mol_type = other RNA
atgacagacttattaaagcaattgtccattgaaaccggcttgccagagtataccgtgaagagcattatatccaacgcaccggataggtacaaagagtactatatcaagaagaagaacgggggatcacggctcatagcccagcctgcgcgggaactcaaactgattcagcgcgcatttgtagacatcctactttcgaaattacctgttcatagtgctgcgacagcctaccgtaaaggcaagtctattagagacaatgctctgccacactcccattccggaccaattctgaagctggacttcaaagactttttcccaagtatcacggaatccgattgggtagcttactgcaaacatacgaagtgtctgaccgacccaaatgacgtgagactgtcctcattgctgttgtttcaccgaccctcaggcggacgcctgctaaggctcgcaataggtgccccttctagccccgtcctttctaatatcatcatgtttcctttcgatgaagccatcagcgctgcggttgcacacgatcatgtgatctattctcgttatgctgatgatctgacattcagcgggccgaggactggtcaccttactggggtcagcaaagccgtgaagaaggccctcagagagatcccctaccccaccctcaaaattaaccacgagaaaactactcatgtgaccatgaagtatcacagaaaagtcacaggcctcactctgagtaatgacggccgggttacaattggtcgggataacaagaggacacttcgagcccagttgcaccattaccttagcggcaaactgaacgagagtgaggtggcacacctggccggacgcatcgctttcgtcaagagcgtggagccttcattttactttaccctgatagaacgccactctgacagagtgatccaaatgctcctgaccaaatctaatcagaagcatgccaaggagaagaggcagcccatttcgttcgaaggagggtga

SEQ ID NO: 11750 - RNA, 948 nt, synthetic construct
  source 1..948: mol_type = other RNA
atgagcgaaattattgaaaagctcgtggctgcatctggcctgaatcctttcgtcgttagacgaatcctggccactgcccctcggcgctacaaagagttctccgtgccgaagagaaacgggggcaagcgtaaaatagcccagcctgctaaagagttaaagattctgcagagagccttcgtggatgagttcctgtcagaattgccaatccaccccgcggctaccgcatacagagctgagacatctattaaagacaatgccgaaagacatgcaggctttggtcctatcctgaagatggatttcaaggacttttttccctgcataaccgatcgcgactgggagcattattgtcaacggaacaatctcttcgaggatcccctcgagagacgcctatcaaccttattgctgttccaccgcccgaaaggcggaagcaaacttcgcctggctataggggctccatcaagccccacactttcgaacgtgcttctctttgaattcgacaggtatatcagtgagctcgttgcccccgataaggttctctatacaaggtatgcggatgacctgacgttcagtgcccctcgtactggccacctgactggtgtcaaacgagcagtgagcagggccatcaaccatgtggattttccaacccttcggattaatagggagaagacgacttacattacaaccaagtttcacagaagtgtgacagggttgactttagcgaacgacggacgcgtcaccattggcagggacaaaaagcgggagatcagggcctccgtacataggtttacattgggtaagctagacgaagattctatcgaacggctgcacggatacatcagcttcataaattctgtcgagccagaatttatcgacgtgctgaccaagaaatacgggtccggaatgatgcagaacctgcgtgacgcctccgtagcaatccggcgagcttga

SEQ ID NO: 11751 - RNA, 918 nt, synthetic construct
  source 1..918: mol_type = other RNA
atgtcagagtattctatccgtaaaattcttgccactgcgcccgaaaggtataaagagtatcgcatacccaagaagagcgggggctatcgagatatcgcgcagcccgccaaggagctgaagattcttcaacggggcttcgcaaacaattttctgatgaagctaccaatccatcataccgctatggcctaccggcacaaacagggtatccgcgataatgctcagcgccatgcaggcttcggacagatactcaagatcgattttaagggcttcttcccaagtattagagttgaagattggaggtcctactgcgccgccactgggtttctcatagaggcagaggacattgacctgagctcgctgctgctgttccaccgtgctcgcggtacgaggggactacggttagccatcggggcccctagctctcctatcctgtctaatattctgatgtacgagtttgaccaacgggtcagcgagatagtcgcccaggataaggtgatctacacacgctatgcagacgacttgacatttagtgctccgagaacagggtacttgctggacgtgaagaagaatgtttccaaaatcctggacgaactgcagttccctcggctggaaatcaaccacaaaaaaaccactcacgtcactaccaagtatcaccgagtagttacgggcctcacactggctaacgacggaagagtgaccgtgggcagagagagaaaaaggctcattagagcaaccatacatgcatacattcaaggtcgacttgtggctgaggatgtggggaggttagcgggactcattgccttcgtaaaatccgccgaacccgaatactttggcctcttgaagcaccagtacaccccagaaaagatcatcgagattctaaaatggtcatccggaacattgaaccttttcgacgattga

SEQ ID NO: 11752 - RNA, 948 nt, synthetic construct
  source 1..948: mol_type = other RNA
atgaagttcctaattcaggagtcaggcttgtcagagcaaactataaagagaatcgccatagacgctccccagcgctacaaggcttacgagatcaaaaaaaagaacggaggcgtgaggcagatagcacatccagctagggaactgaaaatccttcagagagctatcgtgaaacacgtaattagcggattacctgttcacgacgccgcgatggcctatcgcaagggaaggaatatcagagacaatgccaagcgccacgccggcaccagtattattctgaagatggacttcaaggacttttttccgtctattaaggcgcaggattggcatcagtactgtgaagataacagaattctgacatcctcggaagacatctggctcactagccaaatcctgttttatcgggcccgggggacacgacttctgcgtttggccataggggcaccttccagtccagccctcagcaacgctctgctgtatgattttgataagagggtgacagagcttgtgtctcaagaggaagttgtctatactcgctatgctgatgacctcaccttctccgcggcacggacaggttacctcaccgggatccagaaattaatctccagggccctgcgcgagatggaaactcccaagattaaactcaaccacaaaaaaacaacccatgtgaccactaagtactctcgcaacgtaacgggtctggtgttgagcaacgacggacgggtcaccatcgggagagagagaaagcggaaaattagggctatgattgatcatttcatcaaaggccggctgaataataggcagaaagcccacctatcaggcatgattgcattcgcaaagagcgcagaacccgagtattacacctacatatccgagaagtacaacaatgtcctgcgagagatccttaatagtagagctaaaaagacgtgccgtatcgaagcctctcgatga

SEQ ID NO: 11753 - RNA, 978 nt, synthetic construct
  source 1..978: mol_type = other RNA
atgactcccttgattagggcactttccgccagcagcgggctgagtgctgccgatacactcaaactggtgaaggatgcccccgatagatacaaaatcttcgacatcgacaagcgccggggctctgaaaaaagaaaaatcgctcagcctgcagcagaggtgaagtacctgcaaagaatcgtcgtcgagattctactgtccagacttccggtgcactcagcggccactgcctatataaagggagggtccctgcgggataacgctgctccacatgcaggtgttggccggccaattctgaaaatggaccttaagcagttttttccaagtatccgctctagggactgggaaagttactgcagcgacaatgaggtattttctgatgcacaggacgcatacttgagttctaggctgctctttcacagaccacctggtggccgtgtcctgaggttggcaattggggccccctcttcacccatgatgtcgaatatcctgatgtacgaattcgacaagcggattagcgccgcggtagaggaggacgaggtcacctataccaggtatgccgatgacctcactttcagcgcccggagaacggggtatctcgtcgatgttcgcaaaagagtttaccgagtggtgcgagagttaaattaccctaagctcgatattaacaggagcaaaacagtgtatgcgacctcccggtaccaccgagaagttaccgggctgatcctatcaaatgacggccgcgtgaccattggccgcgataagaaacgtgtgatctattctatggtacataggtacttgaagggtggacttaacggagctgaaatacaacacctggctggcatattagctttcgtgaaatcggccgaacctgatttcctcctgaacattgaccgtaagtacgagataggaacagttagcgacatcgccaagacagctggacgaatccatgtgtcagatcgccagtcctattggcagtcctga

SEQ ID NO: 11754 - RNA, 978 nt, synthetic construct
  source 1..978: mol_type = other RNA
atgctgacccaatatcttgctcaggcaacaggcctaagcaccttagagatcgagaggatcgccagatcagccccacgccggtacaaagactatatgattcctaaagccaatgggggccacaggttgatctcgcacccggctcgcgaagtgaaagcccttcagcgagcactcgtggagtggctctcagataaattccccgttcatcattgcgcaacagcctacaagaagggtgggagcatcgcgctcaatgcagatcagcacgcacaaaacggtcctatcatgaagatggactttaggaacttctttccgagcatcaaaagccacgactggattaaattcatcacggagaacaatttcccactgaacgaattcgatcgtgagctgactcgcacgattctgtttcataagaggccttctatgcccgacctgagattagctattggcgctccaagtagtcccttcatcagcaatatcatgatgtatgatttcgactgttacgtacacgacaagacaaaagctgaaaagatcacctatactcgttacgccgacgacttgacattttcctccgcccgcgcctggaatctacgcgatgtggagcccattatcaagaaggccgtgagggaccatgctttttccaaactggagataaacaacgaaaaaacccgggtcgttactactaagttccgaaggatagtcaccggagtgaccctggcgaatcagggccacatatctgtgggtcggaacgctaagcgggagttgcgggctattatgtccagactttctctgagacaaaccccaaaacagaacccttcccagattgtcgggattttgggattcctgggatcaatagaacccaagtatctccagtctctgaaggagaagtacggcaaggatacatttgactttctttacagtctcgcgggggatctgcgaacagacaatagacagggacaggccgatgcagccactgaagattga

SEQ ID NO: 11755 - RNA, 969 nt, synthetic construct
  source 1..969: mol_type = other RNA
atgtccaagatcattcgcgaccttgttttggagactggaatctcagcaagcactctgcaggtaatcatcaattctgccccagaatcctacaaggttttttcaattcctaagaagacagggggaactcggatcatagctcaacctagcaagcagctcaagatcatccagagagccttaattgaagttctgctgcacgacttccccatccatgaggcagccaaggcttacgtgaaagggtcatcaatccgtgtgaacgcggatcagcatgccggcagtcaacccatccagaagtacgacttctctgatttcttcccatccataaccagctctgactggcgcaagtattgcgaccacaatcaggtgaaccttagcacagccgacctgcatctgtgtacgaaaattctctttcggcgggctcacggagaaaggaccctgagactgtccataggcgccccgacctccccaattctgagcaatattctgatgtttgacttcgacaagaagatctcggaaaaacttgcaggcgacgaggtgaagtatacccggtatgctgatgatctgacattttccgcacccaaaactgggtacctgaacgctgtcccgagggcgctacgcgaatgtatccaggagatacagttccctacactcaaattaaatgcgaaaaaaaccgccaagattacagccaagcacaggaggatagtgaccggtttgacactcgccaatgatgggcgagtcaccatcggtagagataaaaagaggctcattcgcagcaaagtacacaagtttaagctaggtcaactggatagactggccttagataaacttacgggcgagttggcatatattaacgctgtggagccagagtacatttctgtcttgaaacgtgtgtatggagacgagtgcattagtaaaatcacccgaaacaaacctctccggaagtacactccccccagtagaaacggcagttga

SEQ ID NO: 11756 - RNA, 912 nt, synthetic construct
  source 1..912: mol_type = other RNA
atgctcggggccaatgacctgctgtctcagatgtcaagtgattttgggatgctgccaaaccaccttcagagtattgtgaggaccgcccctatcaggtacaaggtcttctatatccccaaacgatcgggaggcttgagagaggtggcccaacccgctagagaagttaaagcaatccagagatggctgatggcgcattttggccctctcctgcccttgcatgaggcagctactgcttatcgaccaggagcctcaataaagaataatgcgctgcggcacgtggacagcgactaccttttgaagatggattttcgcaacttcttcccaagcattctgatgacagatataatccggcacttgaaaatccactgcggccagcagtacgatgcctctgcaatcaaacttattgcctacgtgtgcacttgggctcctgggaggcaagggcctttacgactatgtataggtgcaccgtcctccccgctgctgagcaattccgttatgtttgacttcgatacccaactgagctccgtggcggccgctgatggagtgaggtatacacggtatgctgatgacctggcattatccgtatgtcgttctggtgcactgaagaactacccctctctcgtatcaaaaatcgtcgccgacctgaaatatccacagctcaagcttaacgaagggaagaccgtcttcgccagtcgcgctggaagacgggtggtgacgggagtcaccctcacagccgaccaccagctctcaattggtagaactaggaaacgcgagatccgggccatgtaccatcgcatggttttgggcaagctcagcgctgaggaacagcgtgaactagcaggcttaattgccttcgctgacgacattgagcctggctttgccgcgtggcttagcagtcccaagaagctgtga

SEQ ID NO: 11757 - RNA, 918 nt, synthetic construct
  source 1..918: mol_type = other RNA
atgctctctgccaatgacctgctgtcccagatggccagtgacctcggcatgctgcttagccaccttcagtctatcgtgcgcactgctcctatccgatacaaggtcttccatattcccaaacgcagcggcggtttacgcgaggtagcacaacccgcgagggaggtgaaagcaattcagcggtggctgaccgctcatcttggtcagttactcccactacacgaagccgcaacagcctatcgtacgggggcgtccattaggagcaacgcactgcagcacgttgactcagactacctcctgaagatggattttaagaacttctttccctcaatactcatcactgacattatccagcatctggaggtttactgcggacggcaatacgactcaagcgccataaagcttatcgcctatgtatgcacttgggctcctaagcgccagaagccgctgagactgtgtattggagccccgtcaagccctctgttgagcaattcgataatgtattcctttgatatgaggctttcttctgccgctgcggccgacggcatatgttacaccagatatgctgatgatctgacactgtccacccaccacccaagagtgttggcaaactaccccgctctagtggctgacatcgccgcgagtctgaactatcctcggctgaaattgaacgagaaaaaaagtgtctttgcaagccgatctgggcgacgtatcgtgaccggggtcacgttgacaccagatagacacttgtccatcggacgcattaggaaaagagagattcgggctatgtaccataggatgacactgggccaattaaatcaggaggaacagcgggaacttgccggcctcatcgccttcgcaaatgatgtggaaccagggttcgctgcctggctctccggcagtaagaagctcgaaacctga

SEQ ID NO: 11758 - RNA, 912 nt, synthetic construct
  source 1..912: mol_type = other RNA
atgctgcgggccaacgacctattgcaccagatgtcttccgacttcggaatgctgaccagccacctgcatgggatcgtgagaaccgcccctattcgctacaaagttttctacatcccaaaacggagcggcggacttagggaactcgcccagcctgcccgtgaggtgaaggcaattcaaagatggctcatggagcgcttagaacccctgctccccttgcatgaagcggctaccgcatatcgcgccggagcatcaataaagtctaatgctctgcgacacgtggagtctgattacttgttaaagatggactttaccaacttcttccccagcatactgatgaccgacatcgtgcgccaccttgagacgcattgcggccagcagtacgatgcatccgctataaagctgatcgcctatgtctgtacctgggcccccaaaaggcaaggcccgctgaggttatgcattggggctccaagtagccctctgctgagtaattcggtaatgttcgattttgacaggagactaatggatttcgccgctcacgatcagattacatatacacggtatgctgatgatctctcactcagcgcccgaacttccggggcactcaatgcgtaccctaaacttgtggccgagttgaccgagagtcttgaatacccaaagctggcgctgaacacaaagaagacagtctttgcttccagggctggtaggagaattatcacaggcgttactctgacgtcagaccatcaaatctccattggtagagcacgtaaacgagaaatccgcgccatgcaccatcggatgacaatggaccagctcaacctggacgagcagaagcggttggccggcctgatctcatttgccgaggacattgaaccagggttttctgcatggcttactaaaactactgaggcttga

SEQ ID NO: 11759 - RNA, 912 nt, synthetic construct
  source 1..912: mol_type = other RNA
atgctctgcgcgaacgacctcctgttgaaaatgtcttctgacttcggaatgcttgccggccacctgcaatcaatcgtgcgcacagcaccaatccggtataaagtgttttatatccccaagcggaccgggggcctaagagaagtggcccagccagcccgggaggttaaagctattcagcggtggttgataaagaggttgaaaccacttctgcctctgcatgatgccgccacagcatatcgcagcggtgctagtatcaagaagaatgctcagcgacatgttgagtccgactacctgttaaagatggattttcgtaacttctttccttcaattctcatgactgatattgtaagacaccttgagatacattgcggccagcaatatgatccatctgccattaagctgatcgcttacgtgtgtacttgggcccccaaacgccaaggaccgttgcggttgtgtatcggagcgcccagcagccctttactgtcaaactcagtgatgttcgacttcgacaagcagctgtccagcgccgcagctagtgatagcgtaacctacactagatacgctgacgatctggcactgtccagtcgtaccagcgggacgcttaataactacccgggcctcgtcgcgaagttagctggctctctgaattatcctcagctcgagctgaatgaacgcaaaactgtctttgcatcgagggcagggcgaagggtcattaccggggtgacactaaccgccgaccgccagacaagtatcggcaggaagagaaaacgggaaataagagctatgtaccaccgaatgattctgggtaagctctcccccgatgagcagagggaactggcaggactcatcgccttcgccgacgacattgagcccggtttttccgcctggctttctaaatccatcgatacgtga

SEQ ID NO: 11760 - RNA, 912 nt, synthetic construct
  source 1..912: mol_type = other RNA
atgctgagtcaggccgacatcctgcagagaatggccgcagatctggccatgctccccagccacttggccaagatcattcagactgctccacttcgctacaagctattcgagatccaaaaaaaatctgggggtcgcagagaggtagcacaaccggctagggaggtgaaggctatccaacgttggttaattcgcgaactgggcccacgattaccagtgcacgagtgtgccacagcttatcgggaagggtctagcatccgcaagaacgctgaagcgcatgcctcaagcaggtacatgctcaaactggattttaccaacttctttcccagcattgttcgcagcgacctgcatgctcatctcgatcggcactgctccgattacctggatccgtcagctagaaagctcattgcacacgtctcttgttgggcacggcaccgagaaccacctctgaggctttgcatcggggcgcccagttctcctctactcagtaatagtctgatgtttgagttcgacaatcggctggcggccgttgcaaaggacgatggggtcgtgtatacccgctatgccgatgacattacactgtcctccagggatagaggtaaaattgacagatacaccgagatagtgcagacccttctggaaagcctgcagtaccccaagttgactttgaacgagggcaaaacggtcctcgcctcacgagcaggcaagagagtagtgactggactgatacttacccctgaaggatccgtgtccatcggacgtgacaggaagcggttaatcagagctatgtatcataggtcgctgacaaaacagcttgactcaaaggagacacaggttctcgccggcttgattgcattcgccgactctatagagcccggatttagccagcggttgaaaggctccgtgaggccttga

SEQ ID NO: 11761 - RNA, 909 nt, synthetic construct
  source 1..909: mol_type = other RNA
atgcagcgtgaacctgacataattcttcagatggcggccgacctgggcatgctgccttctcatattagcttattgatccggacagcgccactccgctacaaggttttttatattccaaagaagagcgggggtatgcgggaagtcgctcaacccgccagggaggtgaaaaccatccagagatggctgatacgatacctaaaagacaggctcccgatccatgaggccgctaccgcctatacaaccggaagttctatccgggccaatgcagccgcgcactgccattcccgctacctgctgaaactggacttttcaaactatttccccagcatcgtcaagcatgacattcagatgcacctcgagcgctattgcgccgatttcctgggagaatcagctagggagctgattgcacagacttgctgttggatgccccgcagagagcaccctttgcgactctgtatcggagccccaacaagtccaatgctgagtaattcggtgatgtacgatttcgatcggctcctggggaacatcgccaatgatgagcacgtgacatacaccagatacgctgatgacatcactctttccgctgaggagccggggaaactcgatcgatacgtggaagtagttatgcagttactgagggaccttgcttatcctaggatagaattgaacatggcaaaagtcgttagagcctctagagcatccaagagagtggtaacgggtctagtcctgactccctctggatcaatctccatcggccgcgacaggaagagattaattcgcgcaatgttccacaggaaaattcagggcaagcttaacgcagaggaagctcaagtgttggagggcttcgtggcctttgctgaaaatatagaacccggctttcggaagcgtctcgagcggagcatgctgtga

SEQ ID NO: 11762 - RNA, 912 nt, synthetic construct
  source 1..912: mol_type = other RNA
atgacaagtttactggacgatatggcaattgcatttgggatgcctaggaagcggcttttgaatatcatccgcaccgctccgctgaggtacaaggtcttcttcattaagaaaaaagccggaggtttacgagaagttgcccagccggcgaaagaggtgaaggctattcagcgttggcttatgtcatctctcgctgagcatctaccactgcactcagctgcaactgcttacacacctggcagctcaattaaacggaatgcggaagcgcatctgggtagccagttcatactcaagatggatttcgagaattttttcccaagtatctccgaagacaacattaaagctcacctcaggaacttttgttctgattattacacggaaaacgacattgccatcatcgccagggcctgcacatgggcacgcaaaagaagtcccccattgcgcttgtgcatcggagcacccagctcccccctactgtccaatagcgtgatgttttcgttcgatgacatgctgtttcaacacgccaatcaagacgaggtaatctatactcgttacgctgacgatctgactctctcaagctctcaccctgacgtcttgaaggaatatcctaagattgttgccggaatcctggagaaactcgcataccccgccctgagtattaaccagagaaaaaccgtgcacgcctctaaggcagggaacaggacagtcaccggcttagtgcttgcctccgatgataagatctccatagggcgggagagaaagagactgatacgcagcatgtaccatcggtataagaccggcaagctggacccagagcttatacctaaactcttcggcctgctgaattttgctgaggatatcgtgcccggcttccgagccaacctcgaaagagggtatgagaacgtggacatctga

SEQ ID NO: 11763 - RNA, 930 nt, synthetic construct
  source 1..930: mol_type = other RNA
atggcttacccggatctgctgaggaagatggctggcgacttgggtatgctcccccgccagctggccagtattatcaaaacagcccccttgagatataaggtctttgccatcccaaagcgtgatggatcacctagagtgatagcccagcctgcgagagaagtaaaggcaatccagcggtggctgatcaacgaactgaggccacagcttccagtccatgaggatgtgatggcatacgagccgggaacgtccataaagaagaatgcagaacgccatctcggctctcgctttatgctcaaaatggacttctccaactttttcccaagcatctccgccgaggccttgcacatgcatcttgaaagctattgcggtaacacatacactctggtggacagacaactcattgtgcgagcgtgtacttggctgccccagaggacgcgtgctactgcattgcagctgtgtatcggggcacctagttcacccctccttagcaattccgtgatgtatgagtttgactgcgccgttagcgagaaggcccaatccgagggggtggtgtacactcggtatgctgatgacattaccctgagtaccactgaacggggcatcctgtctgagtacgctgattttgtgtctgacaccctggctaccttggcttaccctcgagttacagtgaataggaggaaaacagtccacgccagccgggctggccttcgaatggtcaccgggattgttctgacaccagacggaggcctgtcggtaggacgcgacagaaaacgccttgcacggagcatgttccacaggcggaccttagggctactgaccgcggacgagagtgccgagctagatggcctgttagccttcattgattcagtcgaacctggtttctctgcaaccctcagaacatcattactcaacaaaaaaccccacccctga

SEQ ID NO: 11764 - RNA, 933 nt, synthetic construct
  source 1..933: mol_type = other RNA
atggcccacgccgatattttactgcgtatggcagccgactttggcatgctgcctacccagctcgccagcataatcaaaactgcgccactgcggtataaggtctttgaaatacccaagagggatggatccccccgcactatcgcccaaccagcaagagaggtgaaggccgtgcagcggtggctcattaacgaactgcgccctcatttaccgattcacgatgctgtgatggcgtacgagccagggacaagcattaagaagaatgccgaaacacatttgcggtcacagttccttctgaaaatggacttctcgaacttctttccctctatcagtgccgaggccctgcgattacatctggagctgcacggaggctcaaggtacacactcgctgacagacatgccatagtgcgagcatgtacctggctgcccgagcggacagagtggacctcatccctgcaactttgcattggagctccatccagccccctcttgtctaatagcgttatgtacgaattcgactgcgtcatcgctgagaaagctcagtttgacggcgtgacatacaccaggtatgctgacgatatcaccttctcttctaacgaacgcgggatcttgacactatattccgatttcgtcaacgacactctcggtaaactcgtttatcctagaatcacggtgaatggcagcaagactgtccacgctagcagggcaggcaggcgtgtggtaactggtctagtgctcacgcctgacgggcagatctccgtaggtagagatcgcaagcgcctggcacggagtatgtttcacagaaaaaccttggggctgttgagtgctgaggaagcagccgagctggacggacttcttgcgtttattgactcagttgaaccgggattctctgatagactgcgagatggcaccaggaatagtcagcagcacccttga

SEQ ID NO: 11765 - RNA, 924 nt, synthetic construct
  source 1..924: mol_type = other RNA
atggcacatgcagacattcttgctcgaatggctaatgatctgggaatgcttcctggtcagctggccaatattattaagaccgctcccctgcgttacaaagttttcacgatccctaaaagagacggaactcggaggactatcgcccagccagccagagaagtgaaggcaatccaaaggtggttgattaatgagctccgtccccagctgccaatacacgatgccgtcatggcctatgagcctggcacatctatcaagaagaacgccgagatgcacttgcgctcacaattcatcctgaagatggacttctccaacttttttccaagtattagcgccgaagccttacggttgcaccttgaactccattgtggcaatcgctactcgctcgccgataggcattccatcgttcgggcctgcacatgggcacctgagcgagcacctaccctgcagctgtgcatcggtgcaccctcttctcccttactcagtaacagcgtaatgtatgaattcgattgtgcaattgcccagaaagcgaaatccgagggggtcacatatacccgctatgctgatgatattactttctcagctactgagagaggcatactggccccatactttatttttgtcaaggagatgctgcagcagctggcctacccgaaaatcaccatcaacgaacgcaagacagtgcacgcttcaagggccgggagacgggtggtgacaggactgatacttaccccggatgggaagatctccgtgggcagagacaggaaacgtttggcgaggagcatgtttcaccgccgggctctcggcctattaagcgcagacgagagtatcgagctagacggactgctggctttcatagactccgtggaaccagggtttagcgaccggctcagagctgcggcacgaaactctcgcccccatccctga

SEQ ID NO: 11766 - RNA, 930 nt, synthetic construct
  source 1..930: mol_type = other RNA
atgcgcaacagccgaatctttcaggagatggcagaagctctgggcatgttgcccggccatctcgaaaagatagtgaggaccgctccgctgcggtacaagaaattcagtattccaaaaagggatgggacccctcgccttgtagcacaacctgcccgtgaggtgaagttgatccagagatggttaataagcaatttgcgggatcatctacccgtccacccgagcgccacagcatatgagaaggggtcatcaatcgtgatcaatgctagtgcccaccaggaaagcaactactttatcaagatggacttccagaatttctttccctccatcaaaggaaaggatattgacctacatctgcaatccctcagtcggattaatttgagccaggaggaccgagacgtggtggtaaggagttgtacttgggccccacaccggattcctccacttgaactgtgcatcggggcaccctcttctcctgtcttatctaactccattctgttcgaatttgattgcgccgtggagtcttacctcatcgaggagaaactgcccgtcagatatactcgatatgcggacgaccttaccttttctagcctatcaggaggctggctgcacgacgtgcgtaaccaggttaagatgatagtgcgcggcctcgagtatcccaaactccgcattaaagaagagaagacagtgttaggatccagggctggtagaagggttgttaccggtctggtcctgacaccagacaagaagctgtcggtaggaagagagcggaaaaggacggctagagcgatgtaccacagattctggaagggggagctggatgaatccgaagtcatgcagctggaaggtctgctcgcctttgtggagtccgttgagcctggcttcaaatcacgccttcaagattactaccggaaaaagaacccagccgcctga

SEQ ID NO: 11767 - RNA, 930 nt, synthetic construct
  source 1..930: mol_type = other RNA
atggataaacttgagtcctctcatctcatccgggtgctcagcctcgagagcggactgctgcctgaacaggttgcaaatatcgtgaggacggctccctttagatacaaatccttcaaagtgaagaagagaacaggcggtttacgccagcttgcccagccagctaaggaggtaaaatggatacagagtagggtggtcgattttttgcgacctttactgcctatgcacgacgcagtcaatgcctacgaggtcggctcgtcaattaagaagaatgcagggatccatgcctcttcccggttcttgcttaaaatggacttcagcaatttcttcccaagcatactggaatccgatatcgttgcccacattaattgctttgctccatctattagcgaagttgacgcttttgttatcaccaggtcttgcatgtgggctaacggcaggaagttcccactccagctgtgtattggggctccctcatctccctttctgagtaactcagtcatgtatagcttcgacgacctgatctcaaagaaagccgcggaacgggacatcacttatacacgttatgccgacgatctaactttttcctcccggagagaaggcatactggcggactttcagtccatggtggaggtggtaatcagtgaaattctctacccccgcctgaaactgaacaccgccaagacactccacgcaagtagagcgggtcgccgagtagtcaccggcatcgtgatcacccctgagggcgagctttcagtgggacgggatcgaaagagattggtgcgcgccatggcccatcgcgacagtatgtctcaactagatagcgatggagtggacaagctggagggtttgattaacttcattgatggaatagagccggggttcgcacaaaaggcccgtaggtggaggaacaaaaaagtggcaggggcttga

SEQ ID NO: 11768 - RNA, 909 nt, synthetic construct
  source 1..909: mol_type = other RNA
atgaagatctcagaatcccagttatttgggcgaatgtgccaggacctatctctgcagagcgagtccctgaagagaatcatctcgacggcccccctcagatacaagaaatttcggatacccaagcgatcgggtgggtggcgggaagtagctcaaccagcacgggaggtaaaaaagttacagtactggatcattcgcgaactgggtgatatcctgccggtttccgaccacgcgacagcctaccgtgactccattagcatcaaaaacaatgcccttgttcacgacggctctaattacctgcttaagatggatttcgctagcttcttcccctctattaaattttccgacctgtcacagcatctgagcaagtatgtgaaggagctgaccgctgacgatattggcgtgattgccttgaccacactgtggactccaaatagggaacctccactgagactgtgcataggcgctcccagttcccctctcttgagtaattccatcctttttgatttcgacgctttggtgagcaagagcctcccagactctgttaaatacactaggtacgcagatgacttgttctttagtacccaggagtcaaaccaattatcttatgtcgagaggcttgtgagggaaaccgtgcacgagctagcatatcctgcccttagcttcaacgataacaagactgttaatgtgagtaggaactcacgccgctcagtgacaggcgtcgtcctcaaacctgatggaggactgagtgtcggaagagagcggaaacgaattgccagagcaatgtgtcataagttgtcaatcgggcgcctgagcgccgatgaagaggcgaaactccgcggcctcctggcatttataagctctattgagccccgtttcgccgaacggctcaagtctaaatattccatctga

SEQ ID NO: 11769 - RNA, 927 nt, synthetic construct
  source 1..927: mol_type = other RNA
atggacggtctgatcagtaatgtagccgccctcgttggcgtgtccagcgcaagttgtaggaggattgcgaacggcgcccacaggaggtacaaggtgttcaccatcgccaagagaggcggtggtaggcgagttgtcgcccagcctgctcgcgaagtgaaagcagtgcaacgagccgtgtgtcagctcctttcagagaacctgcccgtgcacgatagcgctacagcatacaaggcaggcaccagcatagcggctaatgccgctgcgcatgccggagctcaatttctcaccaagttggacttctctgacttttttccatccattagtggggacttgattagcgatcttctgcgcagacgctgtgaacatttgacggaagctgaaatcgagtttgttgtcgatgtgtgcacatggcgtcctgacggccgtaaagtactttgcatcggcgccccctcttcccctctgctagctaatgcagtcatgttcgagttcgactgcgaggcgttcgaggccgcctctgagatgtgcgtctcatataccagatacagcgatgatattgccctgtcctctatggtgccagacacactccggcaggcagagactgcagtgagacgtatcatcgcttcaaggcccgccttgagagtcaacgagcggaaacgcgtggcagtggggagaggcacttccatggtgataaccggactaacgctgactaaccaggggggcgtttcggtaggtcgctcacggaaacgaggagttcgggccggggtgaatcgctatctccttggggaactcgacgaggctgatactctgaagttaaagggagaagtggcctttgtcctgagcattgagccggaattcaggggagtcctggtacggacctatggactgagagtttggacattactgccacggatggtggctggcgggtga

SEQ ID NO: 11770 - RNA, 924 nt, synthetic construct
  source 1..924: mol_type = other RNA
atgatcgggcttgtgagcaaagtgagctcactggtcggggtttctactagcagctgtcgcatcattgcacggggggcataccgtcggtataaaatcttcgccatcccaaagaataatggcggtagaagggtagttgcgcaacccgctcgggaagtcaaggccgttcagcgagccatttgccagatcctgtcagacaagttagaaatacatcagtctgcaactgcctacaagccaggctcctcgatattagccaacgccgcggtacacaagggagccaaatatctgacgaagctcgactttaccgacttctttggctccattgatggcgagtccatattccacctggtggagtccagatgccccgacttgtccgctgccgagctgaaattcatagtcgacgcgtgcacctggcgacctcaaggacgtgctgtgctatgtattggggctcctagttccccttttctcgctaacgccatcatgttcgaattcgatgccaaagccttcgacttggcaaacagagtggatgccaagtacacccgatattctgatgacatcgctatctcgagtctaaagccggatttgctgaaaggattagaggagaacatcaggaatctggtgcgcggctctcggctcccatatattaggctgaacgatcagaaaagagtggcagttggccgcagcactagcatgagtattacaggtcttacactgaccaatcagggcggcgtatcagtgggtagagaaaggaagagaggggtgcgggctggagtctctaggttttttaatggacagctgagtcccgcagagattgcaaagctcaagggggagattgcgtttgtgttgagcatcgaacctaacttccgcggagtccttatcaatacatacggtctgcgcgcttgggagctcctccccaaatcacagtga

SEQ ID NO: 11771 - RNA, 918 nt, synthetic construct
  source 1..918: mol_type = other RNA
atgaacggtcttgtagcacaggtcagtcagatggccgggatctcctctagctcctgtcgactgattgccaggggcgctcatagaagatataaaaaattcaccatccggaagaagaatggggggatcagggtggtcgcccaacctgctagagaagtgaaggctattcagcgagcgatatgcgtcatactgtctgaaaaactgtttgtccatgccagcgccaccgcctacaagatcggcagttccatcctgtcaaatgccgctgcccacgcagagagccgttatctcagcaaattcgacttctcagatttcttcccctctattggggcagactcgctgatcaatttgctggctatcagagtgcccaatctctccgaggccgaggttcgcttcgtggtcgatgcctgtacatggcaacccaacggccgcgccgagttgtgcattggagcaccgtcgtcccctctgctgagtaacgctgtgatgtacagcttcgatgaaaacattttctccgcgttggctgagatgggagtgagctatacacgctactctgatgacatatcaatctcaagtaagcgcgaaggaattcttgctgacgccgagctgttactcagggctgcagtggcacgatcccgctttccagttctcagaatgaatgaggagaaaagggtcgccgttggccggggagtgagcatgacagtgaccggccttactctgacgaaccagggtggtgtgtctgtgggaagagccaggaaaaggggggtacgggcgggtgttgaaaagtttgtgagatttggcgctaccgaggtagaatttgcacgcctcaagggcgagttagcatttgtcctgtctgttgaaccagagtttcggcaggtgttgatcaggactcacggggaacggattctacgtctacttcctcggtga

SEQ ID NO: 11772 - RNA, 951 nt, synthetic construct
  source 1..951: mol_type = other RNA
atgataggcctggtcagtaccgtgtcattcttagccggcattagtacggatagctgcagacgcattgccgcttccgctcaccgtagatacaaagtcttcactatcccgaagaagaatggcagggacgtgcgcgttgtcgctcaacccgcacgcgaggtgaaggccattcagcgggcgatatgcgctgcccttaacgaatacctgcatgtgcatccaaccgccaccgcctacgtcaagggcagctcgatcattgcgaatgctgggatgcacaaacactgtaagtacctgactaagttggatttcaagagcttctttccctccatagacggtgagagcatcgagcgagccctccgctctaaaatcgctgacctatccgaatctgagatacagtttgttctcaacgcatgcacatggcgacccgaagggcgccaggttctgtgtattggggctccttcttctcctcttatgtctaatgccgtgatgtatgattttgaccagctggcaaacattgaatgtcgtaacatgggtgtcatctatacaagatatagtgatgacatctcaatctcaagtgagcaaccagataagctgtctctggcagagaatcggattagagaaatcatccagatccagagccaacctaggctcttcttcaacgattcaaaacgagtagccgtgggtaggggaacagcgatgcgggtgactggactgacactgagcaatgaggggaaagtgaccgtaggcagaacgagaaaacggggagtgagggccggcattagccggtatatgcggggactcgtagacgaagaggcattgcagaagttaagaggagagatctcctttgtgctttcggtcgagcccgaatttaggaaagtgctaatccgcacttacggcatatccgtggttaggatcttgcctccaaggattgcatccaaaaccggggacattaagtga

SEQ ID NO: 11773 - RNA, 936 nt, synthetic construct
  source 1..936: mol_type = other RNA
atgtccgaattcatcgatcaggtggcagcatctcttggtctgagtagaggggtgtgcgaaaacatcgcaaggacagcacaccgtcggtacaaggtgttcttaattcctaagaagaatggaaggggatttcggacagtagcgcaacccgctcgcgaggtgaaggccattcagcgcaccctggttctcatgctcgatcagctgctacctgtgcatcctgccgccacagcttaccgaccagggtcaagcatcctcaggaacgccagagcccatgtgcgggccaagtacatcacaaagcttgacttcgaagctttttttccgtatatagataggactagcctgggtcgccacttaaggcagcacttgtcacacctggacggcgatgatattgccttcattctgtctgcctgttgctggacccccaaaggaactacgacccagcgactgtgtatcggtgccccaagcagcccaatgctcagtaactctataatgcacgacatagactccgacatccagacctattgcgaagaggtcggagctgtttatactcggtactctgacgacatctgtatctccgccacaatgcctgatgtcttggcaccattagagcaacgcattcgtcatcggattagagagagcactagacccactcttaccctgaacgaggccaagagagtagcagtcggtcgcgggtcggctatgaatgtcacggggcttgtgttgtccaatgaaggaacagttaccgtgggcagggagagaaaacgcggcgtgagagctggggtcatgcggtatctgaaaggcgccctggacctgaatgaaaccgcaaggctaaaaggggagctggcttacgttatcagtatagagcccggcttccgatttgtgctcgctaaaacctacggcatggagatccaggcgttgctcccgtcagcgggcatttga

SEQ ID NO: 11774 - RNA, 936 nt, synthetic construct
  source 1..936: mol_type = other RNA
atgatcggactcgtgtctcaagtggctgagaaagttggcatcagctcacaagcttgtcgaagaatcgccagctccgcatatctgcgctacaagaaatttgtgatccctaagagcaatggccgcgatttcaggttcgtcgcacagcccgcgaaagaggtaaaggcaattcagagggccttagtggaaattctaggagcgtatctccccgtccacgactctgctactgcttataggattggcctgtctatctgcgataacgctcggcgccacgccagtgctaagtttatcaccaagcttgactttagtgacttcttcccctcgatagacgcacctgcgctgagcgcacatttacgggcccacattgccaatatctcagacgcagaggtgatgtttattatgaacgcatgtctgtggcgacctgaagggagacaggtgctttgcataggggccccatcttcacctatgttgtccaactccgtgatgttcgagtttgatacactgatctccgggctagcttcacaggccgatgtcgtgtatactcgctacagcgacgatattaccgttagctcgagagaaccggacaagctcaggggcattgagatagctatcaggaaagcttgcgccacgatgtcccatccaaaactcgaaatcaacgagaagaagagagtagccgttggtagaggtaacgccatgcgggtgacagggctcaccttgacaaatgccgcggatgtaagtgttggtcggctgagaaaacgtggagtgcgtgcaggaattaaccgatacgtcaatggcgatctggacgacgatcaggtggagaggctgaaaggggagttggccttcgttttaagcgtcgaaccaaattttgctgaagcccttctgcgctcttacggcgccatgtccctgagtaagatacttccacggaaggtcctgccctga

SEQ ID NO: 11775 - RNA, 930 nt, synthetic construct
  source 1..930: mol_type = other RNA
atgaatggcgatctcctcagctttgtggtggctcagacaggcctgtctcgccaggccgtcatccggatatcagagacggcgcggcatcggtacaaggtcttctcaattgataaaaaacggggcggaaaacgcatagtcgcccaacccgcgagggaagttaaagccgtgcagagggccatcgtagccgctctgtctagcagactgcctgtgcacgagagcgcaaccgcatatgtcccagggtccaagttgattaacaatgctattccccacgcggggcagaagtacctgttgaagtttgacttcgaaaacttttttcctagtatcgacgatagcgccataaggaaggcactttccggcgagacacaaaacggcttctctcaggatgatatcttgctggtggtggggtcttgtctctggaggccccctggatccagcctccttggcttgtgcatcggggccccaagtagcccttttctcagtaatgctgttatgttcgaatttgacggcatcgtatcccgattagcccgtgagctgggtatttcgtatactcggttctcagacgatgtgaccttctctggccccgacgctagttctctgtccaaaatggaactggggttcagggagacatgtagagagttaaatgccccaaagctagtcgtcaatgagaagaaacgcaccttctgctcacggggagcagcaatgagagtgaccgggctaacactttcgaacggaggaggagttactgttgggagggctcgtaaacgaggagtgcgcgccggtgtcgacaactacctgagaggtaccctggacctgaagaaggtggaaagactgcgcggtgaggtagcttttgtgatttccatcgaaccactttttcgtgatgtgctcattgcaactttcggcgaccgagtgagagacgttcttccgagctga

SEQ ID NO: 11776 - RNA, 942 nt, synthetic construct
  source 1..942: mol_type = other RNA
atgacactgggactgataagtgctatcgcatcagaagccggcatcagcaaggggtcagctctgcgcgtggccgtaagtgcgtataagaggtacaaggtgttcaagattaagaaacggtctggcgacggaacacgtactgtggcccaaccagctcgggaggtgaaagccattcagagagctatcgtccagttcctttcttcccgtttgccagtccatgacgcagctacggcatacgttggcgggtcttctatatatgcgaacgctaactttcacgctggggcccgctatctcctgaaaatggactttagcaacttcttcccctccatacgacccctggatatcgaacgccacctgctgagacacctcgggagtgagatttcgccagcagaggtttcctttgtgatccaggcatgcatttggagggatccagagatgggtggctttggattgtgcatcggcgcccctagctcccccttcatcagcaatactattcttcacgagtttgatacatcagtcaggtccgtgtgtgacgagtatcttgctaagtacacccgctacagcgacgatatgaccttttccgcagatggccctgatgtgctcgccgaagttgaaagaagggtgcgcgccgtggtaaaggaaatgcgaagccctgtcctgttgctgaacgagaataagcgggttgccgtgagcaggtctgcagccttccgagtgaccggactcaccctacctaatcagggaggcgtgtcagtgggaaggaaacggaagagaggggttagagcgggtgtgcataaattcgtcttagggcagttggacgccaagggcgtagaaaaactaaaaggtgagttagcgttcgtcctcagtattgagcccgagtttcggtacgtcctggtagaaacttacggcggagccatccaccaacttctgccgggtaaatggcattga

SEQ ID NO: 11777 - RNA, 957 nt, synthetic construct
  source 1..957: mol_type = other RNA
atgaccactagactggtgaaccgcctgtctcagcaggtaggcctccctgcgggtgacatagagaggattatctcctcagctccccggaggtacaaagagtttaagatccggaaacgcagtgggagcggtttccgtgatatcgcgcagccttcccgcgaactcaagattttgcaaaaggctgtcgttgaggagctgaagcctcacctgccaatacatgactgcgtgcatggctacgttattggccgggggataaaaagtaatgctgcagctcaccggaagggccggttcatcctgaagatggactttgccgatttcttcccatccattaaacccgtagatttccgtgcccacctccgagaatcccttcctgacagatacgatgatatcgaagctaggcagctggagcttttactcttttggctcaagcggggcgagagaaccttgcgcatgtgtataggagccccgagtagcccaagcatctcgaattacctgatgtatgcaatcgactcacgaattacggagaactgcaggttaaacgcagtgacttatactagatatgccgacgatctcaccttcagctgtggagaagagggaatcttaggggaagtggaaggtgccgtgtctagaattgtcggagagacagtccatccaaggcttcgcattaatccggataagaccattcacataagccgcaagcagagacgcaccgttacaggagtgaatatcacacccacaggagaactgtccatcggccgagatcgtaaaaggctaatcagagcaatggtgcataggcacattcgggggctgctggacctgagaggtcaaaacgaactgatcggcctattggggtttgctcacgacgtcgagccctcttttgcccagaagatgtgggcatctttgaaaggcgcccccgcccttaaacgatcaaggcgggtggactatatgctggaggggtga

SEQ ID NO: 11778 - RNA, 939 nt, synthetic construct
  source 1..939: mol_type = other RNA
atgacaaccaacttggtgcatctcctgagcagagaagtagggcttcccatctccgacattgaaaagattattgcaagtgcaccgagacgatataaggagttcaagattctgaagaagaacggcaggggcgttagggacatcgcgcaaccgtctcgggaactgaaagcgctccagagagccgttgtgtccaaaatagcaccacgactgcccgtgcacgattgtgtccacggatacgtcctgggccggggcatcaagagcaacgctcaatctcatctgggaggaagcttcattctcaaaatggatctgtcagacttttttccaagtatcaaaccagtggatctgcggcaccatctgaacaaattcttacctgaggagtttgacgatgtggagcttcgccagttagaattgatcctgttctggataaagaaaggcacctctattttgaggatgtgcattggggctccctcgtcacccctcataagtaatacaattatgttcgacgtggacctggaaatcgacaatctttgccgccagtatgacgtcaagtacacccgttacgccgacgatttgacatttagctgtagtgagaagggtgtgctctcactaatccagaggggggtcagcctcatcgtgcggtcatccaagagccctatcattaaaatcaacgaggagaaaactcttcatctaagcaaacgggctaaaataaatgtcactggggttaatctgaccccagatggttccctgtctatcggaagggagcgcaagcgactgattcgtgtaatggcccaccaccactccctgggctctctggatgccgaaggccagaataagcttatcgggttgctcggttttgccttcgatatcgaacctaactttgccatgggagtgtggggggctttagccggtgcacctaagctactcagaacggagagacgctga

SEQ ID NO: 11779 - RNA, 927 nt, synthetic construct
  source 1..927: mol_type = other RNA
atgtccacacctctggtcaaactcctgagcatgagcgttgggcttaccccaacggacgtgatgaggatcattagtagtgctccaaggcggtacaaagagttcctgattcccaagaacaatggccgcggccataggaagattgcccaaccttcacgggaagtgaaactgctccagcgtgccttgtgcgagtctgtgctgaccggctttcctgtgcacaatgccgcacacgggtatgtacggggaagggggataagaaccaatgctgaagcccaccagtctgcgaacttcattctcaaaatggattttgagaacttcttcccaagcatgaaacccaacgacctgagactacatttgcagatgtacgccagtacgagatttgatgagaacgaagtccggcagcttgaattaattctgttttggcttgagaagggttctgattccttgcgaatgtgtatcggagcaccgtcctcccccatgctaagcaacacatttctttattctatcgacgcgcagttaacagcagtctgcgacaaatcgggcgttacctacactcggtacgccgatgatttaacattcagttccagcgaacccaatctgcttaaggaaatccagaatgagactgagctgatcataggtaaggccgattatcccaaactcaaaataaacaaggacaagaccatccatatcagcaagcgacaacgcaggactgtgacaggcataaatattactccttccggaaaattgagcatcggccgcggacgcaagagactgatgagatcaatggctcatcgtcactcacagggaatcctctctaccgaggaccaaaagatgctcgggggtttgattgccttcgctgcagacatcgaccccgggctcgctgtggatattaagctgtcactgctgaatcacccaccgctggcaaagtga

SEQ ID NO: 11780 - RNA, 945 nt, synthetic construct
  source 1..945: mol_type = other RNA
atgacaacaggtcttgtccagatgctcagccaaaggagtggcctacctcaggccgacatagagcggatagtggcctctgctcccagaagatacaaagaattcactattcccaagaaaagtggaagaggcctgcgggaaattgcccagccttccagggaacttaaactgctccagcgcatcattgtggacgcggttctctctaggatgcaagtgcacgagtgcgcacatggttacgttgcaggccgcgggatcagaaccaatgcagccgcgcacgccaggtccaagtatatcctgaagatggactttaaggacttcttccctagcctggtgccactggatctgcgcagctacttgcagaagcaccagccctccgggtttaccgaacaagaagttaggcagttggagcagatcttattttggaggaaaaaggggagtaacgtgctgcgaatgtgtgtaggagctccgagcagcccagcactgagcaacgcactgatgtacgagctggatcagtcaattagcgatgcctcatccacacgaggcgtgacgtacactcgttatgcggacgacctgacctttagctcaagacaaaaagatgtcctcggctcccttctgaccgaggtcatcgctatagtgagtgagtctaagtctccctatctaaggattaatccctcaaagactatctccatctctagaggtcagcggcgaaccgtcacaggcgtaaatattacccctgacgggcgcttatccatcggacgggagtcgaagcgtctcatcagatcaatggtcaactatcatgcctcgggcaaattggacgaggaagggcaggctcgcctcatcggacttattggattcgccactgatatagagccagatttctccgcccgcatgcggattgctttgctcaacagtccacctctgttagctacgccgtctcggtctgtgtga

SEQ ID NO: 11781 - RNA, 936 nt, synthetic construct
  source 1..936: mol_type = other RNA
atgactacaagactggcctcatccttatccaagtggtctggctttgcactcccagatgtggagcacatcatagcaacagccccgcgtaggtataaagtgttcactatccctaaaaagagaggcggcctaaggcagatcgcacagcccagcagagagttaaaaagtttgcaggtgctgctgattggccgcgtcctccatcatctgccagtgcacgacgccgcccacggatacgtgattgggaggggaatcaagaccaatgcgcaggcccactccaaatcaaactacctgctaaaaatggacctcagagatttctttccaagcattcggccccgagatctgcgcgcccatctgaaggtgcaagcagagggatatctgacagacgaggaggttggtcagctgtgtaatctcgtgttctggcgaccaaagggacaacggggcctgcgtctatgcattggtgcaccctcttctccttttctcagtaatacgattatgctcggggtagaccagaagctcgcggaggttgccaggtccttaggggtcctgtataccagatacgctgatgacttggctttcagcagtaacgaggctgacgttctccctgctctggaggcaagggtgatagatgtcgtggaaggcagtcgattccctaagatcttcgtcaaccgggaaaaaaccgtgcatatctcccgcgctcaaagacggatgctgaccggcctgatcttgaactcagtcggtgacgttagccttggacgggatcgcaaaaggttgatacgcgctatggtgcagagctctcgctacgggaggctggatgaaaaggaattggaaaagcttaatgggcttctttcgtttgcccacgatgtcgagccgggctttgccatgaagatgagagcccggatggctctgccccaggtagacgacggacttggggaagtatga

SEQ ID NO: 11782 - RNA, 963 nt, synthetic construct
  source 1..963: mol_type = other RNA
atggacctcatactccaactagccaacgatttggggctcgctaatagagatattttactgattgccaactcagccccgtatagatataaggaatacaagatccccaagaaaaagccaaatacctttagagacatcgcacagcctgcccgggaggtgaaaatattgcaacggtgggttattgagaatgtgctgaccaagctcccaatccacaacgccgctactgcgtatattaaggaccgaaacattaagtacaacgcaatgctgcatgcaggcaatccgttcgtgctgaagatggacttttctaacttctttcctagcattgtcccaaaggactttaagacccatttgcttaggcacttacccaacatgtacactgaggatgagattaatctgctgctccgcattcttttctggaggaacaaaaaagaagagcggtttcagttgtctatcggtgggcctagttcccccaatctctcaaactccataatgttcgaatttgactcactgatcagcgatgagtgcaacagcttgaatatagtgtacagcaggtacgctgacgatctggttttctcctccattgatttcgaccttctgaagcgtatccacaatcaggtggccatttatctgaaaaagatcccttaccccaagctcaccctgaacaatgacaagacaatgttcctatcgaaaagaggaaaccgcacggtaacaggagtcatcatcactaatgatgggagtctgagtcttggacgggatcgcaaacgtgagatcagctgtcagatcaattggcacaaaaagggcaacttaaaaaggtctgatactctaaagctgcatggcatgctgtgcttcgctaatgacattgaaccaggttttatcgatcgaatgcgcacaaaatatggcatcgataccattcacgaactgatacatcttgacacgtctaaagaccagaagacaatcaaaatctga

SEQ ID NO: 11783 - RNA, 924 nt, synthetic construct
  source 1..924: mol_type = other RNA
atgaagctgctccgggaggtggctattgagaacggcctcgcccccgaggaactgatctacataggcccctccttgcccagtcgatatcgagaattcgccattatgaaacgtgacggaacacctcgctggatcgcacaccctgctagagaacttaaaggcatacagcgctctattgtgagatcactaatatcccagtttccaattcacgactccgctactgcctacaggctggggtttaatattagaaagaacgtggagccccacgtgcgccaggagttcatcgtaaagatggactttgcgaatttctttccgagtatccgccctcatgacttgatttcctatctttcgaacacccagtttaagctctcagatacggagataaaattcctaactcacgccctgttctggaagccaaagaaggcttctgacctgaggctcagtattggcgctccaagcagccctccgctgtccaatgcccttctgtacgattttgatgtacatgtggacgccttatgcagagtcaatcaagtcaaatataccagatacgcagatgatatgacgttcagcgctactaatacacagagcctggaagtggttcacaagcagatcgtcaggtttgtcaaagagatgaagtctccaagcctgcgtttgaacacaactaaaaccatctggttgagcaaggcacatagacgcaatgtcacaggtctgatcgtgacccctaacggagagatctcaatcgggagggaccggaaaaggttaatctctgccaagctgcatcactactcattaggacggctcggcgttgcggaaaccaaacacctccatgggctgctcgcattcgccaacgccattgagccccagttcgtggatcgaatgcggcggaagtatggtgttgaagtgcttgcactgaggcaccaaaaatga

SEQ ID NO: 11784 - RNA, 954 nt, synthetic construct
  source 1..954: mol_type = other RNA
atgtctctgctttcagaactcatctgggccacaggtttaccacagccggagctgatgagaatcatcacgactgctcctagccgatacaaagtttaccagatacctaagcggactggaggatggcgggaaatcgcccacccagcaagggagttaaaagcccttcagcggctgatgcttaacaagtatctgattaacttccccgtgcatcaatcagcaatggcctatgtgaaaggccgaaatataggagataatgccgcgattcataccgactcaaactttttcctaaaactggacttcgagagattttttccaaatattaaggtcaaggactggattcggttcctgaaaaataacaacttccaacctttcctctcggacgagatccccattacttcccagattctgttttggggcagcggacaccgtaagccacagtgcttatcaatcggggcaccgacaagtcctatcctcagtaatatcttgctgtacgacctggatgttgaactcagtgcccacgcgcaggccatgggggtaaggtacagcaggtatgccgatgacattaccatatccggccagaccatcgaccagatcattgctttcgagtccttggttcggcaacgcatcagacacctggcatctcccaagctgaaattcaatgatagcaaaaggggcgtatacgggcgtagcgtcaagaggatggtgaccggtttggtggtgacacctgctggcgctgtctccataggaagagatcgcaagagggctatctcttcccttgtgcatcgcttttctctcggccaattggatcaggatcagctggggtacctaaaggggatgttgggctttgccaaggctaacgagcccgaatttctcgatcgcctccgagcgaaatatggtgacgctgtgattgacgccgcaacaaaactgcacctgccacccagaaaccgcaaggactga

SEQ ID NO: 11785 - RNA, 966 nt, synthetic construct
  source 1..966: mol_type = other RNA
atgaggctccttgaggagttggccatcaatctgggattagggactgccgaaatagaaaccatagtcgaaactgcaccggctcggtacaaagtctacgacatacctaaaagatcaggcggcacaaggactattgcccagccatctagggagctgaaggcccttcagagatatattctgtccacgaaactggtaaagttcccagtgcacaagtcggctatggcctacttacccggcaaaaatatcgctcgaaacgccgaggagcacttaaatggtaatatcctcctcaaactggatttcgaaaacttcttcccttctatcttggttaaggattgggagagctttgctaagaagcaccccgtgcaagtcattcccgtcgaggacatcaagctgtactctaaaatcctgttctggggtcagaggagcaggacacccagatgcctgagtattggtgcgcctacaagcccgatgctgtcaaacttgctgctgtttaccctggatgagcagctggatgaggctgcccggaagtgtagtgtgaattatacacgttatgccgacgacatcaccgtgtctggatccactgttgagcaggttaccgcatttgagaaacttgcaaggaaaattgtgaagagcctccgcagtcctcggctgatttttaatgaagaaaagcgcggcctttatactcgtggacaacggcgaatggtaaccggactcattattacccccaacggcaccctgagcatagggcgagaacgcaaacggacgatctccgcgatgctccataaggcacttctgggtgagctcgacctagagtccacagggcatctaaaggggcttctcggcttctcactcgctaacgaaccattgtttgtgaacagaatgagagagaaatacggagatgcaatcgtggaccgcgtgctgcgcttgaagttgccagaaagaatcctacaggaagggaagcagggctga

SEQ ID NO: 11786 - RNA, 969 nt, synthetic construct
  source 1..969: mol_type = other RNA
atgagtctgttaacagagctcgtgcaggaattcggccttgggcaatcggacctcctgcgtattatcgacaccgccccagctcgatattcagtctatcctatccgaaaaaggaacggaggcttccgcactatcgcacagccctcacgtgaggtgaaggcaatacaatactatatcctggagaagaagctgggtgtgtttccagttcatccctctgccatggcttacgtcaaaggtaggaacattcggcagaatgcggctagccacgccagttctggacctatcttgaagctagactttcaggaattcttcccaagtattggggtgagagattgggaacggttcgtgaagtcccatcctgtggacgctattgatctttccgacctcaaatactacagcaagattctcttctggggtcaacaccggaagtcaaacgtccctaaatgcctgtccattggcgcccccacctctcccattatctctaacatcctgctgtatgaccttgatgtgaagatgtctgccctggccgagctgctgggggtagtatacagccgctacgccgacgacatcactgtgtccggccagtgtgttgatgaggttctggagtttgagaggctagcacgccgggaagtcaaatcagctaagtccccgaaacttactttcaatgaggagaagaggggactctattttagagggcagcgtcggctggttaccggtctggtactgacaccaaccgaacgcgtcagcttggggcgaaaaagaaaacggacaatatccagtctcctacacaaaagcacgctcggccagttagatccgaagagaagagggtacctcaagggcttattgggatttagcgtggctaatgaacccgagtttttgggcaggcttagaaggaaatacggagatgaagccgtcaatgcggcactggtgtatttcgtgcctaagcgcatagatcaggaagcattgttttga

SEQ ID NO: 11787 - RNA, 984 nt, synthetic construct
  source 1..984: mol_type = other RNA
atgtctctgatccttgagttagctgaagcgactggactgtcatctggggacatcgaacgggtaattcgcacagctccagccaggtataagacctacccgatcgaaaagcggagcggcggcatccggatcattgctcagcctagtcgagagctgaaggtgatacagaactatatactgaaagagaaactcaaggactttcctgtccatagctgcgccatggcatatgagaagggaagaaatatcttcgataacgcagcctcacatgtcggcagcagagtcctcatgaagcttgacttcaaggatttctttccaagcattaaggtgaaggactgggaacgttttatcgcggcttcatccgtggaaaccatttcccccacagaggtctatctctactccaaggtgttgttctggggcgagaaacgccgctcatctgtacccaaatgtctgtccattggtgccccaacaagccctaaggtgtccaatatcctgctgtacgattttgatatgactatgagcggtaaggctagatcgttgggactgtcgtacacaaggtatgccgacgatattaccattagtggagatactgtggagcagatccttctgctggagcgggaggccaaacagattttaagaaagatggcacaccccaagttgaccttcaatgaagcgaaacgaggtatttactctaaagggcaacggcaaatggttacgggcctaatagtcacgcctcaggcagtggtgagcatcgggagagaaaggaaacgcgaaatatctagtctgctccacaggagtttactggggcagctcgacaatgaccgccggtccctcctgaaggggctacttggtttttgcgtggccaacgagcctgagttcatcggccgtttgaggaggaaatacggcaacggagctgttaacgccgccatgaaattccacgccccaaaacgagcaagagttcagccgcccccccctccaaccctcttttga

SEQ ID NO: 11788 - RNA, 951 nt, synthetic construct
  source 1..951: mol_type = other RNA
atggagctggttgaggcaatagggttgagcgtggccgacatcaatcatgtaattgacacagcccctgccagatatcgcgtgtaccctatcgaaaagagatctggcggcgaaagaatgatcgcccagccatcacgggagctgaaagccatccaaaggtttattcttagggagaagctttcctccttccctgttcatcactgcgcaatggcttatgaggagcacaggagcatttacgcgaatgctcagatgcacaagaatacccgggctatccttaaactcgattttcaggagttcttcccgtcactgaaggtagcagattgggagatgctcgtgtcaaagcttaagcccaacgcaattaatatctctgacattaagctgtactctaagatcctgttttggggccagcagaagggtagcaaattccccaggtgtctgtcgataggagcacccacttcacctaaaatgagtaacctactgatgttcgactttgatagcattgtggccgaaaaggccatcgagcacggactcaactattcccgatacgccgatgacatcaccatttctggcgattctactctcaagattaccactttggaacgcgatatccaaaaactggtcagaagtatgaagtccccacggctgacatttaatgaagagaagcgaggcctgtacacgaaagggcaacgccggatggtcacaggtttgatcatcacgccagctaaagatgtgagcatagggcgtgatcgcaaacgaaacattagttccatgctacatagagacaccctgcgcaaattagacgtcgacagcaggggtcagttgaaagggttcctcggattctgcgcggctgtggaaccacagtttatcgaccgtttaaggcacaagtacggagatgctgccattgaccgggcgatgaaatatcatacccccaagagaagtataaacgaaacatga

SEQ ID NO: 11789 - RNA, 957 nt, synthetic construct
  source 1..957: mol_type = other RNA
atgtctctgctgctcgaattagtccaacatacagggctctccgccgctgaattgcgaaggattatccagaccgcccccaagaggtaccgcgcatttcctattagtaaaagaaacggaactgagcggatcatcgctcagcctagcagggaggtcaaggaactgcagcgctacctactggaccagaaactcacagggttccccgtgcacgatagcgcgatggcctacgaggcaggtacttcaatcagaaaaaatgcctaccgtcataaaaacggcaactatattttgaagctagacttcaaggagttctttccctcaatcaaacccagggatctggagaatctgattaggcggtcaaaacgggaggagattgctgtttccgacatccctatctaccttaagatactcttctggggcggactggataagtctaccatcccacagtgtctttctataggctccccgtcaagtcctcgcatcagtaatatactgatgtttgacattgacgagcgcatctgctccgaggttcagaaattcgacgtgatgtatacacgctatgccgatgatattactcttagcggcaaaggattggaagtggtacgggccgcagaagacaaagtggtccaagtcgttcgaaagtccagattcccaaagctggaatttaaccgggataagagagggatctattcgagagctgtaaggcgaatggttaccggcctggtgattacaccagtgggcagcattagtataggacgtgaacggaagcgggagataagcgccctgctgcaccgctctagcttgaatcagctcgtgaccgaggagagaggtcacttaaagggtcttctcggattttgtgtcgcatgcgaaccagagtttgtggggcgaatgagggaaaaatatggccacaagacgatcgacgaagcgatgaaataccatgtgccgaagaagcgtgggagatga

SEQ ID NO: 11790 - RNA, 951 nt, synthetic construct
  source 1..951: mol_type = other RNA
atgcctattctggatgatttagtgagtgacctcggttttagtttcaaggacgtgagccggattatttccacggcccccgccagatacaaagtatatgggattccaaagagggatggcggatttagaattatagctcagcccagtcgggaattgaaactcatccagaggtatatcctggagaacaagctgaacaaatgtaaaatccacgaatgtgcaacagcttacgtgaagaataagagcatttatgagaacgccgaagtgcataagtctgcggacaagattatcaaacttgacttcatcaacttcttcaacagcatcaaacctcgagattggcgcgccatggcccctaagcttgatgggtgcctgtttgaagcctcggacttggagatctatatcaagattttcttctggggccatgtgaaaaatagctccgtcccgcgatgccttagcgttggcgctcccacctccccatctatctcaaacattctcatgtacgatttcgaccaagcagtttttgcagcggcaaaggaccttaatatcaactatactcggtacgccgatgatattaccctgtctggcgactctatttcccatctccacaaaatggaatcacacgttagaaagtccctgaagatcatctcatttcccaagatctcaatcaatgagaagaagcggggtctgttcaccagggcaggtcgaagatcggtcactgggctcatcataacccctgacggaagcatatccatcggccgcgataaaaaaaggctgattagcgccatggtacaccacttcgtgacaggagagatgacagaagaaggaaaagctaaactgaaaggctggttagctttttgcgtggacaatgagattgagtttgtcgagcgtctgcgcataaagtacgggaatgaggctatatctaaggccctaaagtactacataaaaccattgagttga

SEQ ID NO: 11791 - RNA, 981 nt, synthetic construct
  source 1..981: mol_type = other RNA
atgactatcgggctcctgaaagagctcgggattaaactcggaatggggaggtccgacctgctgaggattatttctaccgctcctaagcgttacaaggtgtatcaaataccaaagagaagaggaggcacacgaactatcgcccagccctcacgtgaactgaaggctattcagagagtgcttctaaaggccgtgctgtcaaagtttcctgttcacgccgctgcaacaggctacgtggagaatcggtctatacttgacaacgccgtcgctcacatgtcttctcgggttctgctgaagcttgatttccgcgatttctttcctagtatcgtcccggatgactggaggaggttggcgagagcaaagttcgttgatctggacgaggatgaggtgtggttaagcactatgatcttgttttggggccaaaaaagcaccaccccccggtgcttatccataggggcgccaacgtcacctatgctgtctaatattgtgatgtatagccttgacgtgaggctcgctgaagccgctgccgctactaataccacatacactaggtacgcagatgacatcaccgcaagcggacccacgatcgaggatgtgcgccagtttgaggcctacgcgcgggagatcgtgggcagatccgtaagcccacagctgacattcaacgaccagaagagaggtatctactcttcggggcagcgacgcatggtcacaggtttagtgctgaccccgagtaatagcgtcagtatcggcagagaacggaaacggttgattagttccatgctggaccattggattaaggattccctcgacaacgaacgcaaggccaggctaaaaggtctgctcgctttttgtatcgcagccgaacccgcattcgtttcacgcctccgtgccaaatatggcgacggccccgtcaacgatgtattgcgatatcatatagtacgcaaaggaccacctccacgacaggccggaaaatcgagctcctga

SEQ ID NO: 11792 - RNA, 963 nt, synthetic construct
  source 1..963: mol_type = other RNA
atgtcgctgttcgaggatctgctgtttttcaccggtctgagcgccccagacctcagaagaattattgccacttcacccgcgcggtacaagcagttcactatcgccaaaaagagtggtggcgagaggttaatcgcccaaccttctagggacctcaaggtgctccagcgttatatccaggggaatatcctgtctaagggtaccatccacgcctccgctacagcatataaaaatggagcgtctataaagcacaatgcgaacatacataagtacaacagggtgatcttgaaatgcgatttcaaggactttttccattccatcaagccacgagattggattctttatgcccaggagaatttccacagcttgtcacaagacgacgtggggctctgtgcccgcgtcttattttggggcaggggcaccagtaagcccgcttgtctttccataggcgccccaacttctcccgtcctctccaacctgatcatgtttgatctagacgagaaactgacacggtctgcagaaaagatcggggctacatacacacgctacgctgatgatatcaccctaagtgctgacaagattgaaaccgttctgctgcttgaaaaacgtcttaaatccgctgtagcaaaaagcaagtatccgaaactcacttttaacggggataaacgaggactgtatacgaccgcacatcgacgcaatatcacgggactgaacattacacctgatgaagaaatcagtataggacgggacagaaagcgcatgatttcatcaatgatacacaagtacagcatcgggcagttgagcgagaaggacgccggcaaattgaaaggctatctggccttcgcatacgactgcgagcctgactttattgagcggatgattagaaaatacggagaagagcagatcagcattattcggcagttacacctgcctcccaggcaaagagatattgaattcccagagtga

SEQ ID NO: 11793 - RNA, 954 nt, synthetic construct
  source 1..954: mol_type = other RNA
atgacgcttttcgacgagttatcaatcctgactggcttgggagcgtcagatctgaaccgactcatatacaatgctcccgctcgctataaggaattcccaattaagaaaaggagcggagaggaccgtatcatcgcccagccgagcagagaacttaaaattgtgcagcgatatatagcaggactcgtgctcaacagactgcctatccatagcgccgctaccgcatataaggagggggccaacatctttgccaatgttcagtcccactcggccaatagaatcatcctgaaactagacttcaccgatttctttcacagtatcaaacctactgactggaggaactacgcaaaggtgcatatccccagcctctccaaggaagatgtggaactctctgctaaggtccttttttggggtatgaagagtaatagacccatttgcctgagtatcggtgcaccaacatctccagtgatgtctaatctcattatgtatgacctggacgagcagtttttccaaattaccaatgatatcggcgtaacgtacactcggtatgctgatgacatcaccttgagtgggtctaataaagaaagcgttatcgaagcggaaaaagccatccgcgtcgcagtgcggaaatgtaagtccccaaagctgcttttcaacgagtcaaaacgcggcatttactccactgggcaacgcaggcatattacagggctgaacataacaccgtccggaaaaatctctttaggccgtgagagaaagcggatgatatctagcctgattcacaagtactcactgatgctcctggacgccaacgatgtcgggaagctgaaaggctacttggctttttccctagcctgcgagcctgagtttctgggtcggatgaggattaagtacggctcgacattgattgaggaaatacagaagacccacattcccgccaggaccttacctgagagctga

SEQ ID NO: 11794 - RNA, 966 nt, synthetic construct
  source 1..966: mol_type = other RNA
atgtccgagctagaccttctgcgcacagtggccctgaatgtaggcctgagtgaagagtctacgcttgagatcataagggacgcaccccagcgttacaaggtgtatccaatcccaaaaaagggcaaaggtcaccggatcatggcacagcccgcaagagaactgaagcccattcagcgcagcattgcagacattgtgctggagaagtttccagtgcacccgagcgctatggcctacagaagaggagttagcattgccgataacgcaaaggtgcacgccggcaagaatagtatccttaagctggactttgagtcattcttcaattccatttcagcggccgcctggcggaggttcatgaaagctcaggagatcatcgagctggaatctcatgaactcgccttgctgactaaggccttgttctggggcgccggccaaaggacaccatactgcttatccatcggagctcctagcagtcctctggttagcaacatcatcatgttcgaatttgaccgccagatgcacgactttgcggaaaaacatgggattcgatataccagatatgctgatgatatcaccgcatcggctcgcgaatttaaaaatttagctgccttcgaacgtcatcttcgaacttacatatctaggaacaaaacacccagcctgaagattaacgaggagaaacgcggtatttattcatcgtctgacagacgactcgtaaccgggctagtcctcacccctgatgggaaggtcagtctgggcagggagcggaagcgagagatcagctccttagtgcataaatctactctcggtcaattggatatagagcagttgggatatctccacggaatgctggcgttcgccatttcttccgaaagggattttgttaaccggctccggataaaatacggggaggacgctatctcatccgtcctgagatacagagtgcctaggcgcgatggaacagctcggtga

SEQ ID NO: 11795 - RNA, 921 nt, synthetic construct
  source 1..921: mol_type = other RNA
atgagtgacgcctcagtgctggagattatccagaacgcaccaaagagatacaaagtgtatcgcattccgaaaaaaggaagtggatttcggataatagcccaaccagcacgtgaactgaagacaatccaaaggtccattagcaagcttgtactagagaagttacccgtccacgcttcagccgctgcgtaccgacctaaaatcggcattttccataatgccgcggtgcacgcagggacttccccaattttgaagctggacttcgaacggtttttcaactccatcacggctgaggcctggcggcgatttgtggcttcacaggaggagctaaggctctccagaagtgagatggccctggttacccgtgcgctgttttggggtgagggcagtaaaaatccctcttgcctgagcatcggcgcacctacatctcccctgatctccaatgccatcatgtttcagttcgatgtcgaaatgagcaactttgctgaagaacgcggattgaggtatacacggtatgccgacgatatagtggcttcggcaaaggacttcaaggtgctgcaccacttcgagcggcacgttcggcagtacattaaaaagaacaagactccgagccttaccattaatgaaagcaagagagccatctattcacctggcgaccgccgattggtaaccggtcttattctcaccccagatgggaaaatcagcctcggtaggcatagaaagcgagagatatcatctctgatccatttcttccgcttaggacagctcgatcatgagaggctcgggtaccttcaggggctcttgtctttctctctgtccgtcgaacacgactttgtgagccgcatgagcagtaaatacggcaatgatgtcgtgtctgccatcctgaactacagggttcccagacgtgatggctcccctagatga

SEQ ID NO: 11796 - RNA, 960 nt, synthetic construct
  source 1..960: mol_type = other RNA
atgagcttgttagaggagcttcagacttacagtggacttgggtacggcgaactgggagctgtgctgcgaacagccccgcgtagatacaaggcctatctgattcctaaaaggagcggaggccacagaatgatcgctcaaccggcacgggaactgaagaatcttcagtattttctcatcgataggactttatcaaagctccctgtccattccgcagccgccgcctatagggagaacgtcggaattcgaagtaatgctgccgcgcatgcccgcaatgaggtaatcctcaaactcgatttttcagacttcttcccttccattaaaccaagggactggatgctgttctgcggctctctggatccagaagtggctgaggcatcaggcctagcaaccggggcagacgtcatgttagctaccaggctgctgttctgggggcgtgggacattcgagcccaagtgtttgtctattggtgctccctcatccccagtgctgagcaacgtgctcatgtttgcgtttgacacagcggtcgccgcccacgcaatccagaacgatgtggtttatacccgctacgctgatgatataactctctccagtgaccggtctaagcagattctgctagtggaggccgccatacggcgctacatcaagcggtaccgttcccccgctctcaccatcaacgaggaaaaaagaggtctgtataccagcggtcagaagaagatggttacgggccttgtggtcacacctgagaagcgggtaagcctcggcagagacaggaaacgaatgatctcttctctggttcacagatttacgcttactcaactggaattgccaaaaatagcctacctgcagggaatgctggcattcgcgcgcgacgtggaacctagtttctacgcatcgttggaacggaaatatgggcagcccaccatgagagctctgttggcctttcgcctacccaagagctga

SEQ ID NO: 11797 - RNA, 936 nt, synthetic construct
  source 1..936: mol_type = other RNA
atgtctgtcgaacccaaacattctctgattagaacttgtgccttggccacaggcctcacaatcaatgaagtggtgagaatagccggcattggccccaagcggtataaaatctaccaaatccctaaacggtccggtggccagagaacaatctgccacccatcacgcgagctgaaggccttgcagtatgttttcttgagagatatccttgcacagttaccagttcactcagccgccacggcctataaaagtgggagttctatcaagcagaatgcctcacgacatcttgcatctcggatcatcttgaagctggactttgagaacttcttccacagcattaaagtggccgactggatggcctatgctaaggcaaccttcccccactggactgcccacgacattgaatttagcctcttcgtgatgttttggggagccggtgggtacaagcctgtgtgcttgtcaataggagcgcccacttcccctctggtgtccaacgcccttatgtaccaatttgacggagtactgagcaattttgccgctgctaatggactcgtgtataccaggtacgctgacgatattacgatatccgcggagggccgtctagataaggacgcaataatggctgagattcatagcgctctcgacttaatcgaatacccgaggctgaaactgaacaccgctaagacaaaactggcttctaaggcaacctccaggcgcgtgaccgggctagttctggcgaacgatgggagcctgagtctggggagggagcggaagcgactgatttcggcaatggtacatcgcgcagtcaggggtcttgctgagcctgatgcgatcgcacatctccgcggcctcctggcttttgccaacgacgtcgaaccaagtttcgtcgcaatgctgcgtaaaaagtacggaagcttcgtcttagatattctccactga

SEQ ID NO: 11798 - RNA, 903 nt, synthetic construct
  source 1..903: mol_type = other RNA
atgtcaagtctcattgagaaaatttccgctgagactcgaatcagcattccagacgtgaagctcaccgtgcggacggcatcaaggaggtataaggtgtactctatccctaagagagacgggacagcccggataatcgcccaccctgcgcgagaattaaaagccatccagcgggccctgatcagtgagtctcccgcaagcctcagggtacattccgctgcgagtgcctatgaagacggatcatccattgcaaagaacgcaaatatccacgttaaaaattcttggcttgctaagttcgacctggagaatttctttaatagcatcactgtctccgcctggcagatgtatttgagcaaactggaggtcgatgacgagtacgtggaattgtcgtccaaagtattcttttggaaaccagagaggagaaagtctgacctttgtctaagcgtcggggctccatcaagcccgttcgcctccaacagatacatgttcagctttgaccagtacgtttccgactactgcaccaaaaacaacttggcctatagccggtatgctgatgatattgctatttcctctcaatctgaaattgaactgatccatctgcaggaggtgatagaggaaggcctgaaggagagtcggctcaagctaaattcacgcaagacattactgctgggacccggtcaacgccgcgttgtcacaggtgtgatcctgaaaaacgataagaagatttcacttgggcgtggcagaaagcgtataatcgaatccatggtgcacaattacgcaaaaggcaagccttcgtctagtctggaggtgataagaggccatcttgccctgttgaaaatgattgatcccgatggatacaacaggatccgaaagcgctatgaaaactgcaccagcctctttaaatga

SEQ ID NO: 11799 - RNA, 954 nt, synthetic construct
  source 1..954: mol_type = other RNA
atgtcacgagttctgaccgatatcgctgagcacctgggtgtcggaactgaggatgtgaggaagttcatctttgctgctcccgccagatacaaggtcttcagcatacccaaacgacgcggagggcagcggaccattgcacaaccgagtgccccgcttaaggagatccagcggttcgtggccgccaatcaactggccaccttccctgtccatgacgctgccgcagcgtacataacaggcaagtctattgcagacaacgctgcaagacacaggaaaggcaaatatctgctgaagctggatttcgaaaacttcttcaactctattactgtgaaggactggaggcgcctagtggctctgacacctaaccacgggattaccccacaggaccttcctcacctggaccgcatactgttctggggcggtggaacattttcccctatcatgttatcggttggggctccatcaagccccactatcagcaatatgattatgtttcggtttgataccgccgttagccagaaggccgcggaggtaggtgcagtatatactaggtacgcagatgacatctccatcagtgcccctactgccaaaacctgcttagaggtggagagatttgccgtgtccgcgctccgtgcactcaaatatccaggcttacgctttaaaacggacaaaagggggttgtacgggccaggtcagcgtcgactcgtgacaggcctggtggtaaccccagataatagagtctcacttggccgcgaaagaaagcggaatatttcttccttggtgcataaagccagtctcgggaagctcgatgcccccgagatgcttgaattgaagggactcctgggcttcgtccattctgctgagccccggtttttgcagacgctgaagacaaaatatggcgctgaactggttcagagaatcgcagcgtttgaagtgaagaagctaggagacggatga

SEQ ID NO: 11800 - RNA, 945 nt, synthetic construct
  source 1..945: mol_type = other RNA
atgagtcttagggatgaaatttgcattgctacaggcatcgggttaagtgagtttgctaggatcgagaattctgctcctgtccgctacaagtccttctctatcgctaagaagagtggtgattaccgcatcatcgcccaacccagcagagaactgaaaattattcagcggtggatttgcgaaaattatctggctagcttccccgtgcacaatgcagcctacgcctatcgcctgggcagaggaatcagtcataatgccagggtacatgcaggatcgaggtacatccttaagatcgacttcaaggactttttccattcaatcactcctaacgatctcttcgtgcgaatcaagttggccaataaggatctctctaaggcagacaaacggacattgtctcagtgcctgttttggggaaaaggtgttaacatgccactctgtctatccattggggcgccaagctctccaatgctgtcaaacattgtcatgttcgactttgatgaacgaatcgcccggatatgtaaggacaagggggtgaaatatacccgttacgccgacgacatcacagttagctccgagggcatagatgagctgttattcgtggaacgcggcatccgggagactgtcaagaactcgaaaaatcccaaaattgagataaacgaggacaaatccagacggtttggtcctggacagcggaagctcgtgacgggcctcaaccttacctctgagggcggcgtgtcaattgggcgaggtagaaaaaggaaaatccacagcatgatgaactccgcaaaatatgggatattgccggatcacgacatcggcatgctgaaaggactaattgcgttctccattagctgtgacgatgatctggtcacccttctgcgcaagaagtacggatcagacgttgtggataggatactgtcctttaaggtacccagcagacgtagatga

SEQ ID NO: 11801 - RNA, 1005 nt, synthetic construct
  source 1..1005: mol_type = other RNA
atgggcaccttttttgatccagagaactccaagctctgcctacgtttggcccgcgaaactcggatgccttacagcgcactttaccgactggtccttaccgccccgtaccgctacaagacttataagatacagaaggtgggacggccaggacaggttaggatcatccatcaccccgccagagagctgaaaaccattcaacggtggctcgtaaaaaatgtcctctatagcatgcccgttcacagcgcagcctgcgcttatgagaaaaatactgggattaagctcaacgcctccaaacacgtcaataacaactacatcctgaagatggattttaaggacttcttcccctcaatagtgccccgtgacatttttttaaggatgccggctgacacaccttggaacagcaacgatttttattttctgtctagggtgctgttctgtaagaaggataccggcacgaaactctctctcagtataggcgcacccagctcacccaaaatcagtaacatcgtaatgtacgaattcgaccagaaagtgagtgagtattgtaatcagaagaatatcacctacacacgatatgcggatgacatgacgttcagtacaaatcgcagggaaattcttcaggagtgcgaagatttcatcaacggtttggtgagggagatggattccccacatctggaaatcaatgcttcaaagactttgcacacatctaaaaaacaccatcgcagaattacaggactcgtgctgtcgtcccaggggttcgtttctttaggtcgagagagaaagcgcctgattagagccatgctgcataactataagtacaatcagaactcagacgctgacaaaacccaaaagcttaaagggctgttagcttttgcctgtgattgtgagccaatcttcatagacaatttgaaggcaaagtacgaggcggaaattgactgcctactgagcatgaaacctgaaaaaccttacatccggcggctgctgggctctagatccaagtcctga

SEQ ID NO: 11802 - RNA, 1014 nt, synthetic construct
  source 1..1014: mol_type = other RNA
atgaagtcgctctacgatatttcagaattcacagagaagtctgttgaggagataattgctaactatctaaccgcacccagaaagtataaggagttcaaaatcaagaagcggaatggcggactgaggaccatatctcagccgtccaaagacgtgaagttctatcagtatgccattattgagaagatcctcaaaaacttatcgatccacgattctgcaaccgcctacagggacagcaaatccatttaccataatgcacttcctcacaaaggttctagttggattctgaaactggacttcaaggatttttttcattcaatacgtcccgaacatctgaagagttttctcctggacgcctatgaagacattagcagcattgaggtggatattctcaatcactacctgttttggctggatcggacagatcgaaagctgaaactgagcataggagcgccatccagcccaatcatctccaacatcgtgatgtacaactttgacgagagtgtttgtgatatttgctccaagtattccgtcatttacacgcgctatgccgatgacatcaccctctccgccagttctcgcgagtgcttattggaagccgaggaggagcttaaagttttgatcgaagagacacagactcccctacttgtgctgaacgataaaaagagggtgttgatcgggcggaatagaagcaagcgcgtcactggggtcgtgatcacgcatgaaaacaagctgtcagtcgggagatacaagaggaaaaaagtgcgagctatgctgcacctttactccaatgacaaactgaatgaacaggatatccctatactgcacggtaccttaagctatatcaaatcaatcgaggacaacttctatagaagtctccgggacaaatacggcgatgctgtatttacaaagttggctaaggaatctttcaaaatctcaaagctcaagtactacggcaaggaagagtctgaggaagaaaagactcaaagcaaagacgacaatgacatcgtattctga

SEQ ID NO: 11803 - RNA, 987 nt, synthetic construct
  source 1..987: mol_type = other RNA
atgctttgggggttgatcttcgatatgaagagtctcctcgaaatcagcaaattcaccggaaaggacgtgacggaaatcatctctaattatttaaccgccccacgaaagtacaaggagttcaaaattaagaagagatccgggggcttcagaacaatcagtcaaccctccaaggacgtaaagatttaccagtatgcaattatcgagaacgtcctgaacaatctgagcattcacgatagcgccacggcttaccgtaaaggcaaatccatctatcataacgcctttccgcacaaggattctatgtggatcctcaaattggattttaaggacttcttccactcaatcaggcccgagcacctgaaatcctatctgctggacgagattaagggaatctccagtattgaagtggacatcctcaatcactatctcttttggatggacaaaactgatcggaagcttaaactctccataggtgctccctcaagcccaatcgtaagcaacatcattatgtacaagtttgacgaaaacgtgagcaacatatgctcgaagttcaatgtgatatatacccgatacgctgacgatctgactctgtctgccaattctagggagtgtcttctagaaaccgaaaaagaactgaaagccttagtggaagagacacagattcctctgctcgttctgaacgacaaaaagcgcgtgctgattggagagcataagtctaagcggataacaggcgtcgtgattacacatgagagtaagttgagtgtcggcaggtacaaacgcaagaaagttaaagctatgctgcacctttatgcaaatggtaagttaaacgaggaggatatccctattcttcatggcaccctggcatacataaaaagcatcgaggacaattactaccggtccctaagagataagtattcagatgcgttctttactaaactgtaccaggagtcattttcaatttctgagcgcaaatacttggggaaggaatga

SEQ ID NO: 11804 - RNA, 975 nt, synthetic construct
  source 1..975: mol_type = other RNA
atgaaaatcctatcagatatctctgagtgtctgggaaaaggcatcggagagattatctctaactatcttacagccccccgaaagtacaaagagtttaagataaagaagcgcaatggcggatttcgccagatctcccaacccagtaaggagattaagaactatcagtacgcaatcatatccaaagtgctgaatgaactccctatacacgacgccgccaccgcctatcggaataagaagtcaatctatcacaatgccttgccacataaggacagcgcatggattctgaagctggacttcaaaaatttctttcacagcattaggcccgagcatttaaagagttatctgactgaggcttacgaagagatcagttcaatcgaaattgacatacttaaccactacctcttttggatggataagaccgataggaaactgaaactgagtataggtgctccttcctcacctatcatttcgaacatcatcatgctcaaattcgacaatgcagttagcgacatttgctccaagcatgatgtgaattacacacggtacgcggacgatctcaccctgtccgcccaatctaaagaaagcctggagaaagctgaagaagagctaaacgcgcttgtcgaggagactcagacgccattccttattctcaacgacaaaaagcgtgttctcatcgggaacaaccagtccaaaagggtgacaggcgttgtgattacccacgagaataagttaagcgtaggcagacataaaagaaagaaggtaagagctatgcttcacttatacgtgaacgaaaagttggaaaagaaggatattcccgtcctgaacgggttgctctcttacatcaaaagtatcgagctggagtattatctgtcattgaaggacaagtacggtgatgtggtcttttctaaactgagcctggaaagcttctctatttccgggatgttgaagaaaccggaaaaaaaaatgaaggcatga

SEQ ID NO: 11805 - RNA, 981 nt, synthetic construct
  source 1..981: mol_type = other RNA
atgaaataccttctcgacattttggagcacagcaagaaaaccatcgacgatctgattttcaattacctgactgctccaaggaaatacaaggagttcgagattaaaaagcgctctggtgggtttcggaaaatctctcagccctcatttgatgtgaagctgtatcagtatctgataatggaaaacattctggcaaagctgcctatacatgatgcagcgaccgcctacaggtaccataaatcgatctatcataatgccttaccacataagaactctgactggatactgaagttggactttaaggatttcttccacagcatcaggcccaaacatctcaagtctattctcactgatgtctataaagatatcagttccattgagattgacatccttaatcactatttgttctggatggatagaggggaccaaaaactcaagctgagcattggagctcctagtagtccgatcgtctccaacattgtcatgtacaagtttgatgaaacagtgttcaatatgtgctcagaaaacaacgtgatatacacccgttatgcagacgacatcacgctgtctagtgatagcagaaacattctgttgaaggttgagtcagagctgaaaaagatcattgccgatacccaagagccccttctcatcttgaataataacaagagagtgctcttaggtaaacagaagtcaaaacgcataactggcgtggttatcacccacgaaaaaaaactgagcgtggggcggtacaaacgaaagaaaacgaaggccatgcttcacctctacgtaaataacaagctaaaaaaaggcgacatacctatcctacacggaacactgtcctacatcaatagcatcgaatccgagtattaccagctgttagaacttaagtatggcaaggctacatttcggaaactgacaaaggacgccttttatatctccaagatgaagtacaagaacattaacaagaacgacatggacaattga

SEQ ID NO: 11806 - RNA, 1005 nt, synthetic construct
  source 1..1005: mol_type = other RNA
atgaaaatcctgaaagacttaagtgagaaacttgatatcgatgttgacgatatcatctcaagttatctgactgccccacgaaagtacaaagaattcaagatccccaaaaagagaggggggtttagggatattgcgcagccttccaatgagataaagatctttcaatacggcctaattgacacctttcttaaaaacttccctatacacgactgcgctaccgcctatatggagaacaagtccatttacgataacgccctaccccacaaggacagtaagtacctgctgaagttagatttcaaggacttcttccattccattagacccgaacacctcaagttctatataaacaagtacaatgagggcatctcgaatatcgagatcgacataatcaataacttcctgttttggatggataaggaagataataagctgaaactttgcatcggagcaccatcctcaccgatgattagtaacattgtcatgtacgactttgacctggagttggaatctctgtgtaacactaacaatgtgatctatacccgatatgctgatgatcttacactgagcagcaactcaaactcatctctgatggaggtcgaaggattcctgaataaaatcgttgagcggacacagatccctctacttgaactgaacgattccaagcgtgtgtgtataggggacaaaaaaagcaaacgcgtgacaggcattgtaattacgcacaataatcagctcagcgtgggacggtataagaggaaaaggattcgggccatgctccatttatacaactgcaataagctcaatgagaacgacatcccaagactccatggtctgctctcttttgtgaaatctattgagcccgactattacgatttgctcaagttgaagtacaatgaaaatctgctgaagcagttggcaaaagaatcctacattatttctcgcaaatggtatgtaagctttaataacgacagcttgaacgtgggtgacgaggacgatatagtcttctga

SEQ ID NO: 11807 - RNA, 981 nt, synthetic construct
  source 1..981: mol_type = other RNA
atgaatatcttaaaaaccctcatagaggtgctgggcgtttcgtatagctctattttcaaggactccctgacagcctcaaggaagtataaagaattcaccatcccgaaaaaaaagggagggcggcgtaaaataagccagccctcagaagatgtgaaaatcgtgcagtctgccattagctcagttctactgaattccctgccagtgtctgattatgcttacgcatacattagaaacaggtcgatttacgataatgcattcatacacaaggaatcctctttcctgttgaagctcgattttaaggattttttccactgcattcggccagagcacctcaagtattacatcaagaagaacattagtgacatctccgatatggaagttgacatcgtcaacaatttcctgttttggttcgacaatgacgacaacaagcttaaattatgcattggcgcccctactagccccctaattagcaatatcgtaatgtacgagtttgacgagaaaatatccaagatctgtgaggattttgatgtaatctacagtaggtatgcggacgatattacactgtcttccaataacagagacgacatcgatacagtcgagatcaagataaacaacctgattaaggagactaacatccctcttctcaagctgaacaaaaaaaaacgagtgtttgtctcacagcatatgagcaaacgcattacgggaatcatcattacccacgacaataagctttctgtggggcggtacaagagaaagaaaatcaaagccctgctgcatctgtacaataaccgcaagttaaaagacaaggatatcccttatcttcacggtttcctcagttttatcaaaaacatcgagcccgagtatttcaataagttgaagtccaagtacaacgaaaagttgtttcatcaactcgctaaggaaagttacatactgagcaaaaaggagaaagagaaggaaatgattacccatgaaaaattgtga

SEQ ID NO: 11808 - RNA, 1008 nt, synthetic construct
  source 1..1008: mol_type = other RNA
atgaacaagttgaacatactcaatgagatttccaacgacattgacgtcaatatcggcgagttctttaattttagttccatggcaccaacagcctatagtacgttccaaatcagaaaaaagagcggcggtactcgcgagatctctcaacccgcccagtggctaaaaagcgttcagtatgcgattatccaaaaactgttagaacagctccctatccactataccgctactgcctatcagaagggaaaggggattaaacagaacgctgaagcacacatcaacaaaactttcatactcaagaccgactttgagaacttttttccaagcatcctgcagagcgatctggaactgatcttgaaacggaataacatcgagattaattcctttgagtactctgtcatttcacgattccttttcaagaagaagaatgactcgaataaactggagctctgtattggagcacccagcagccctatgatctccaatgtggtgatgttcgaaattgattctttattgtccgagaagtgcaatgagttggatatttcctatacacgatatgccgacgacatgacgttcagtagtgacaagtacgaaaacgtagagttcatactcgagtttctgaaacagacaatcctgaaggtggaatcaccgcagctgatcctaaacaacaaaaagaccaagatcatctcaaagggaaggtcccaacgggttacaggtgtgattctttctaacgacggccgcgtatcaatcgggaggaataaacgtcggagagctaggaccttgcttcatctgctggaacttgataaggtggacgataaatctctggtggaactgtacagtatagtgtctttcatgagaaacattgagcccgagttctacgagatattaaaggaaaaatacgggtacaatctgtttaagaagctctacaaaaagttcagcctcctggtcgaaaaacataccgatcagtcaactggcatgaagcttaagtttaaaggctttaacgttgattga

SEQ ID NO: 11809 - RNA, 1038 nt, synthetic construct
  source 1..1038: mol_type = other RNA
atgaatattgttaaagtgatctccgatctgatcaaccaggacattacttatatgttcctgttgagtgcaacggcacctgaggcttacagcaccttttacattaacaagaaatcgggagggataagggaaatttcacagcctagtaaggaagtcaaggaagtgcagtacgtcattattaaggaaattctttccaagctccccgtgcacgagtgtgcgaaagcctataagaagggtgtaggcattaagcagaatgccgttgaacacctgaacaaagagttcatcctcaaaaccgacttcagcaacttttttcccagcatcaaaccggctgacctggaatactatttcaagaagaacaacatcgagatcaacaatctcgagttcgacattataagcaagatcctcttcaagaagaaagaaaattccaataagctggaattgtgcatcggggccccttcctctcccattatttctaacatcgtcatgtacgagattgatgagcttctgtactctcattgcaaggaacgcaatatctcctacacccggtatgccgacgatatgacctttagcagtaattccatagaggacctaaaggagatcctgtcaactctcaaaaaggtgatcatcaagaacaaaaacccagagttaatcctgaatcaaaagaaaactcgactgatctcgtcaggaaggtctaggcgcgtaaccggggtgatacttagcaatgaaggcaaactgtctgttggtagaacaaagcggcgtagaactagaaccctgttgcacttacttagtaagtcatccattgacgacaaatctataatagaactgtacagcaacatctcatttattcggaacattgagccagagttctatcaaaaactattgtccacacatggccagagtacgttcaacaagctgaataaatcttttcagagcctcatcgagaaaaacacagacaataatggctttacatggcgatttggaataaatggcgatagcttagtgaaaaaagtgatctatgaggatgatgatatccagttctga

SEQ ID NO: 11810 - RNA, 966 nt, synthetic construct
  source 1..966: mol_type = other RNA
atgagctatatagacaacctctcccgggtactgaactgcagtgtcatgtcgctcatttctggctacattaaagcccccaagaaatataaggtgttctacatcaagaagaagaatggtaaaggacttcgcgagatagctcagccagcccccgatatcaaggaagtgcaacgagctatcgtttctactctgctggctaagttaccggtccatgagtgtgcaaaagcctatatcaaggaaacaagtatcctgaacaatgcggagcctcataaggaaaacaagtatattctcaaggtcgacttcgagaatttcttctatagcattaagccacaggatctgtacttctacctcctgcgcggagaaataaagttgacccagtttgagtacgagatcctgtcccactacctgtttagaaggaaaaagggggaaaaaaaactgagattatgtataggcgcgccatcatcccctattattagcaacatcgttatgtacgacttcgactgcatcttgtctgactattgccacctaaacaatattgcctacactagatacgcagatgatatcacactatcctcagagtcatacggcaaaatcaaagatgcttacagctttattgcccgcgtggtgagcgacctgaaaaaacctgaactgaagataaacagtgacaagaccaagatcataggaaaaggccggagtaggcgaatcacaggcgtgatcatctctaatacgggggaattaggagtgggtaggtttctcaggaaaaagattcgtgcactgacccacctgtattcaaaccacaaactttccgaaagagacattccctacctcctggggatgttggcacatattaaaaatatcgagccctcctattatgaggccttggtatctatccacggcgataatctttttaagaagcttgggaaagacagctatcggattctcgagaacaagcggggtaatgataactga

SEQ ID NO: 11811 - RNA, 954 nt, synthetic construct
  source 1..954: mol_type = other RNA
atgtcttacattgacgaattgtcaaaaacccttaattgcactcctaagaccataatctccgggtacatcaaagcccccaagaaatacaaggtattcttcatcaagaagaagaatgggaaggggttgcgggagatcgctcaacccagcccggatgtgaaaaaagtccagagggctatcgttaatagtctgctgtctcttctccctgtgcatgaatgtgccaccgcttatatcgaggagaaatccatctttgacaatgcagaaccacataagaagaacgagtatattctcaagatggactttgagaactttttctacagtataaagcctcaggatctgaattacttcatctccaagaacgacattaaactgaaccacttcgaatatgaagtgattagccattatctgttccgcagaaaaaagggcgagaaaaagctacgactgtgtatcggagcccccagctcaccaattattagcaacatcgtcatgtacgattttgatgagaagctctttaaccactgcaaagagaatgatgttatatacacgcgctatgcggatgaccttacattctcctctgacagtttcgataaacttaacgacgtaaagaactttgtgattgacttagtgtcactgcaaaaaaaaccagaactcatcatcaataccagcaagacaaaattcattggcaaaggtcggtctaggcgtatcactggagttgtgataagtaatacaggcgacctgggcgtgggcagatttctaaggaagaagattagagccctgttctacctctattccaacaataagatcaaccacaaagatattccttacctgttgggaatgctgagccacataaagaatattgagcccgactactattattcgctgattaagatcaacggtgaagacaagttaaaacagctcgggaaggattcatttgcagtcttgcagaagaaacagtga

SEQ ID NO: 11812 - RNA, 969 nt, synthetic construct
  source 1..969: mol_type = other RNA
atggggtacttgaatgatctggccggcagtttagacagcagcgttgctagcctcatttccggctaccttcaagccccaaggaagtacaaggtcttctatatcaaaaagaaggggtctgacaagttacgggaagtggctcagccttctccggatgtaaagaacgttcagcgcgccatcgcctcaacactgctgaaccagctcccaatccattcttgcgcaaaagcctacatcaaggacctaagtatatatgataacgctaaagagcacaaaaccaacacatatatccttaaaatggactttcgtgacttcttcccctcaatccgacctaatgatctgctcctgtgtctggagaagaatagtataaagctcaacgattttgagtacaccattctcaagcactacttgttctggagaaaaaggggggacaacggtcttagactatgcattggagcgcccagcagtcccattatcagcaacattgtcatgtatgacatcgactgtaaaattgatagcatatgccaagctttgaatatcccttatacacgatacgcagacgaccttactttttcaagcaactcaatcgataccctgaatatcgtgttcgacaaggtcaaaaatattatatcgtcccaggaatctccacgtctgatcatcaaccacaacaaaaccaagtttattggaaaaggcaggtccagaagaattactggtgtgatcattacgaatgatggacaggtaggagtgggcaggtacctgcggaaacgcgtgagggcactgctgcatctctactctaataaccgcatcaaggtgaatgatattccttatctgcaggggatgttatcccatgttaagaatatagagcccaagtatcacgaagagctgcttaagaaatacaacgagtccctcattaaacgcctgaatttggatgcctcccggattatcaaggaaaaccggagaaatggcgtgatatga

SEQ ID NO: 11813 - RNA, 960 nt, synthetic construct
  source 1..960: mol_type = other RNA
atgtcgtacctggagcacctcgcgctttcactgaattcttctgtggcaagtttgatttcaggttatctgaaggctccccaaaagtataaagtgttcaagatccgcaaaaaaaacaataagtccttccgggagattgcccagccatcccctgatattaagaacatccagagagctataaccagcacactcctgaagaatatacctatccacccctgtgctaaagcctatatcgaagggctgtccatctacaataatgcctacgagcatcgggagaataactacctgttgaagatggatttcaaaaatttcttccccagcattaccccaaatgacctgttactctgctttaagaggaacaacatcgagctgaacaattttgagtacaacattttgaagcactacctgttttggagaaaacgcggagaaagatctctgcgactttgtatcggagctcctagtagccctaccatctcaaacatagtgatgtacgaatttgactgcaagattcacgagtactgcataactcacaatatcccctatacacgttatgccgatgaccttacgtttagctccaatgaaatcgaaaagctccatgccatctatgattacgtaacctctgttattctggagaacaagtccccgaacattacaattaacgattcaaagacacggtatatcggcaagggtagaagtcgacgggtcactggcgttatcataaccaacgaaggcaaattaggggtcgggaggtatcttaggaaaaaagtgaaagccctcctctacatttacaacaataaggacttacgcaaggaggacattccgtatctgcagggaatgcttgcgcatatcaagaacatagaaccatcttattacgagaaactgctacagaaatacgagccaagtctactgagcaggttgggcaaggaggcagcaactattatcaaagaacgtagcctcaattga

SEQ ID NO: 11814 - RNA, 972 nt, synthetic construct
  source 1..972: mol_type = other RNA
atgtcctatctggatgagctggcaaactatttagagaagtctgtcccatatctaatcaggaattacattagtgctccaagaaagtacaaggtcttttacatcgacaagaaaaatggatccaagaaacgggaggtagcgcagccgagcaaggaaataaaagagatccagagagctatcgtgaaaacccttctggagaatattcctattcactcttgtgccaaagcatacatgaagaactcctcaatctacgataatgcactgcctcataaggacaacgtgttccttctcaagatggattttagagatttctttcctagtatcaagccctccgatcttctgtacttcctggagcgaaatggtcttaagttcgatgccttcgaaggcacaattgtgacaaattatctgttctggcgacgtaaaggggaaagaaaattgagcctgtgtattggagccccaagtagccccataatctcaaacatcataatgcacgacatcgacagcgaaattaacacttactgcgaaaaggaggacattatctatactcggtatgccgacgacctcacatttagcaccgataatattgttaaactccagaagatccatgactttatttctaacctcaccaatcgcactgagcatcccaagctgctcatcaacaaggaaaagaccaggtatataggcaaagggcggtccaagagggtgacaggtgtggtcattacgcacgaaggagaattgggggccggccgctacctcaggaaaaaaatacgcgcaatgatctacctgtatagccaaaagaaactgaagaaagaggatatcccctatttacacggcatgctatcacacatcaacaacatagagcatgactactacatcaagttgaaaaagcagtacggagccgcgatgttttctgctttgtatcaagaatcgttctgcatttcaaaaaaggagaaagaggctgacaaagttatttga

SEQ ID NO: 11815 - RNA, 975 nt, synthetic construct
  source 1..975: mol_type = other RNA
atggaacttatcagcaaagtcgccgagcaccttggactgcctatgcatgagctaatttccaatatgcgctccgcaccaagcatgtacaaggcattctctattaaaaaacggaatgggggggatcgtatcatacgccagccttcccccttcgtaaaaaatatccaacgcgctattgttgatattgtgttttctggtatcgaccggtcagaattcagcatggcatatgagaagggcaggtcaataaaggacaatgccctgatccataccggagccgactttctgctcaagatggacttcaaggattttttcccgtctataaaacctagcgacctattccggactttgggtgatctcggatacgattttaacgatcttgaccggatgtttctgagtagatatttgttcgtggaggtcggctccttgctggagctgagcattggcgccccctcatctccaatgctctccaatcttgtgatgaagcactttgatattgctatcggggacttctgtcataaaaactccatcagatactctagatacgcggatgacctcaccttttctggttgttgctataaggatctcaaaaaagtagaagctcacgtggtccatattatttcgttagacaacaagagtaacctcctggttaacgacaagaagactaggctgatagggaaaggaagaagccagcgcgtgacaggcgtgatcctgacacacgacgggaatatctcggttgggcgaaatttgaggaaaaagatcaggggactggtccacttgtactcaaataagaagctgaacaacagtgatatcccctatttacacggcatcattagtcatatgcgtaacatcgagccagaatattacgaaaagcttatagtgctgcacggcgacgtgctgttcaaaaggctggccaagcagagctacgctattggcaagcatctccgatgcgcccacctgaaaacgggtttagtcaagtga

SEQ ID NO: 11816 - RNA, 960 nt, synthetic construct
  source 1..960: mol_type = other RNA
atggaaatcatctctgatctggcggaggagttaaatgtgtcgatcattgagctgataaatcagatgcagcaggccccaaagaaatacaaggtgtacagcatcaagaagaggtccggcgggtctaggattatagcacaaccaacagccttcgttaaaatggtgcagaagggcctatgcacatcttttctgagtcagtttaagtattccaacagcgccatggcttatgtaaaagaacggtcacccatctcgaatgcaaacgtccatgtcggagccaaactgatcctgaagctcgatttcgaaaatttcttcccgtccattaaagctgctcatttcattgagttcttagagcgcaataaggtgaccctggaatcacttgagattgactttctgattcgatatctctttagaaaagtgaaaggcagctatgaattaagcatcggggcgccttcctcccccctgatcagtaatgtgatgatgtatgattttgacctcgaaattgaagaagccctcaaggattctctaatcaattatacccggtacgcagatgacctgactttctctgccaacagctttgaggagcttaacgaagctaaactcttcgtcgaggctgtaattctgtctaagagatacagtttcttgaagatcaacgaagataagtccaagatcatcggccgcgggcgatcacaaagggttacaggaataaccctcactcacgacagtaagattagtatcggaaaatcattgaggaaaagaatacggggcatgcttcacctttacaaccagaaaaagttgaagaagaacgacatcccctacctgcacggtattattagccatatgcgtagcgtggagcctgactactttaagaaactgatcgacgtttacggtgcagagttgttttcacgcctggccagacagagcttcatgatatccaaggagacgaaaatgaaactcatggagtga

SEQ ID NO: 11817 - RNA, 957 nt, synthetic construct
  source 1..957: mol_type = other RNA
atgtcaaacgagagcattaccgatataatttgtaagagcttgagtcttctcgcccacgagcttctgatcaaagcgatgaaggcccctctgtcatacagagtttatactatccccaaaaggagcgggggtaaacgtacgatcgctcagccaactgctgaaatcaagaagatccaacgctgcatcgtaaagacagtgctggaccccctccctactagcgacattagtacagcctacaagaaggacatatcgattaaagataacgctgaacgccatctgggcaagaagttcatcctgaagatggacttcaaagacttcttcccatcgataaggcctgaagatctcataaactctctggaaagaaataatgttcggctgtcttccgccgacagaaagattctcatcttattcctatttcgacggaacaactatggacgttttgaattgtcagtgggcgctcccagctccccgattgtgtccaacataattatgtacgagtttgatatcgcagttaaagagtactgcgagaagaataacatagtgtttacacggtatgcagatgatcttacgttctcctctaactccattgaggacatcaaaaaaacccccgccattatcaagagcaatctaatgctgatggattctccaaaattgtctatcaacgagaaaaagacccatattgtgtctaagggtagaagtcagcgcgtgaccggagtcacccttacacacgataacaaattatccatcggccgaaatctgaggaaaaagatcagggcaatgctgcacctctacaagaataacaaactggaacacaatgacattccatacttgcacgggattatctcccatatgcggaatatcgagcctgagtattttaataagctgctcgaatcatatgacgatgtcttatttaaggacctggccaaagtcagtttcaatgtaagcaaagtgtacaagtga

SEQ ID NO: 11818 - RNA, 966 nt, synthetic construct
  source 1..966: mol_type = other RNA
atggagaatctgcttaaggaaatctgttcctcaagcgacctgtccattcaggatgtcatcaaggggctttctacagcgcccttggcttataaagtctacacgatccctaaacgcaccaagggcgagcgggtaattgcacagccttctccttttgtgaaggaagtccagcggactctgatttctgttttcctcacgaagtacaaaccgagcgaagtgtctaccgcctatgtggagggcaagagtatcattgacaacgcagaggcccacaaggacaacgactggatcctgaaattggactttaagaatttcttcccctcgctcaaacccaatgaccttttcacattcctggaaagggagggggtggtgataggtgaatttgacaaaaagattctctcctcatacctctttagacgaaataaccgcaaattggaacttagcatcggtgccccatctagccccttggtaagcaatctcataatgaagtccattgacaataagatcgagggctattgcaacgataactcaatcgtgtataccaggtatgccgacgatctaaccttttccaccatggatctggataagatcgacgctctaaaacaatacatagccgccgtcttaagtgagacaaagagccctaaactgtctatcaacgatagtaagacaaaggtgattggccgcggaaggagcagaagagttactggaattgttctgactcatgagaataaactgtccgttggacgatatagtaggaaaaagatccgggctatggtgcatcactactcgaaccgtactatcaaaaagagtgatattccatacctgcatggcgtcattagccacatgagatcagtggaaccagactactaccagaaattagagataaagtatgggagcgattttttctccaagctggctatggattcctacaaaatctcaaaagcagtgaagctcaagaagctggtaaaatga

SEQ ID NO: 11819 - RNA, 966 nt, synthetic construct
  source 1..966: mol_type = other RNA
atgaccaatcttctcaaagagatttgtgaaaactctgagatccagttgaccgatattattaagaacctgaacacagcatctatttcctataaagtgtacgacataccaaaacggaccaaaggcgtgcgcactatcgcccagcccagttcatttgtgaaggacgtgcagaaagtcatcacaaaagttttcctctctgagtttaccccaagcgatgcttcattcgcctatatcgagggaaagtcgattgtggataacgccgctatccataaggacaataagtggatactgaaaattgacttcaaggatttcttcccgagcattaaacctgaggacctgtttaatttcctggaaaaggaagagatcaagctgtctgaatttgacaagaagattatctcctcttacctgttcaggctgaacaatagcaagttagaattgtcaatcggggctcctagtagccccgtaatcagcaatcttgtgatgaaagaattggatcaggaaatcatccacttttgcgaggaaaaatctattgcgtattcccggtacgcagacgatctaacatttagcacaaataacatagcctacttttcggacctcttaccctacatctatgagcttcttagctacactcaatcacctaagctcagtataaacgacaaaaagaccaagattatcgggaaaggtaggtcccaacgaattacgggagttgtcattactcacgaaggaaaactatctgtcggcaggtactttagaaagaaaataagagccatgttgtactcctataactcaaacaagatcaagaagagtgatattccatatctccatggcctggtaagccacatgcgtaatgttgagtattcctactacgagaagctggaggagaattatgggaaagagttcttccgcaaactggcaatggattcctacaagatcggtaaggctatcaagctgaacagtataaaatcctga

SEQ ID NO: 11820 - RNA, 912 nt, synthetic construct
  source 1..912: mol_type = other RNA
atgtcgactgctatcgaaaaggtgtgtaaggacctggggtttaccgaagagaaattcattgagttctgttccctagcccctcaccggtacaagaagttctttatcccaaagaaaaacggtgccggactgcgcttggtggctcaaccggctcggccactcaagaaggtgcagcgttggctggtcagcgaatacctgtccaaattaccaatccatgaggccgccgccgcctatgtgtcagagaagagcatcctagacaatgccaagaagcacgcaggcaacaaggtgctcgtgaaatacgacttcaaggatttctttccgagcatcaaaccctctgatttccttaaactgatatcaaagaacgatgtaggaatcagtgcatatgaggcagaaatatttagccgccttatattctggtcccctggtaaccggcctggccttgagctttgtattggggcacctagtagccccgttatcagtaatgcagttatgttcgattttgacaatgctgtctctgagttttgctcatctgaatccctgatttacaccaggtacgcggacgacatctgcatatctggctacgacaattcaatttttgagcatgtggataggttcattaagaaacaggtgtttgaaatcgaaagtcccaacttactgctgaaccccaataaaacgcaattcattaacgaaaacaccgtcaaaaaggtcacaggactcttcattacacagaatgaggagatcactgtcgggagaaaactcaaaagaaaggtgagggcgatggttcataattttcacaaaggcaatctctctgctaaggataaagagcgactgaagggctatctgtgctatttgtccgatgttgacccctcctatttgagaaaagtagccccagactttcagagctgggatctgtga

SEQ ID NO: 11821 - RNA, 1941 nt, synthetic construct
  source 1..1941: mol_type = other RNA
atggatactattatcgaatacttcagcaagatcgatttcactaaagtgagaaccaatcagcctcctgagttgatttttctgtgtggaggcaatagcgaccaaaaggcaaataactttcgcccgaaattgcaaaacgagctcattaaaaagcagagaaatgtggtactggccgagaatgcgatgaactggcagggcggccaagttttcgctaaagaccttttggagttagaaaagtactacgccgccctggtaagcattattccacttatttgcgagagttatggggccgccgcggaattcggagcatttgtgactgatgagttcataaggaagaagctcttcattattatcaaggagcagttttactcaggggagaactcaagcagttttattcggtacggccccattaaaaaatatgaggactcggagaatagagagacatactgcattaacaacgagaaccccgaagaagacttggaggacctctgtgaaacactgctggcctgtaaacccaaaacctcaaaatgcaatttcgatgaaggttacttccggatattgttactcatcgatatcatcaacgtgctaagtatctctacacataaagagatcaagtccattttcgaaaaagttttgtcaatcatcggattcgatcagctctctatcgacacgtattgcgtggacctgaatgagatgctgtttgtcctggaaaagctccgcctgattaaactgcgacagaaggggcagaggagcttctatctgtctgtgtctcaggagttttacctagagtaccgctttatcaaagattctaacgacaccaaactgtcaaccatacgaaaaaatgttctggactatatctacgctcaggaaactcgcatccaaaaaaccaaggtcagtatactcaaggaagaattgaagaaaggcgaaataaaatggctgcaaaccaacatttcccttgacgacattaatattgacgagcttctaaagacggctccattacaatataaggtgtacgagattccaaaaaagtctggagggaaacgaaccattgctcagccaactgccaagcttaaaatactgcagagagagaagatcctcgaattggaaaatacattccctgtgcataactgtgccaaggcatacaagaagaacaataatggtatcttcgagaatgctaaggcacaccaggacaactcgtatttttataagttcgacttcgaggatttctttgaatccatcaaagcacgggattttaaccagtatctgctgcagttcggttactctctgaatgagcggatcgatctcatcatgctctttttcaggtttaacaagcagtccgataagcgtaagacaaacaagatctataagctgctatacaacagcgacttcaacaagtctaacaacatgagccttcttaatgtcatggtgaatgagttttctaacgagtttcagctgtccgtcggagcaccttccagccccttcatatcaaatgctatcctttatgagttcgatgatatgacgcagaaatgggcttccgaaattgggatcacctacacacgctacgccgacgatattacccttagcagtaggtctaagtttgagatcgcggacctcgaaaaagagatactgaacatatcctccaagatgaattttcccaaactgaagctaaataagaggaaggagaaatactgcagctttaaaaatagagtctccataacaggcctgaacatcaccccggatcataaaatttcgatcggtaggaagaagaagagagaaatcagttcaatgattcaccactttaagttaggaaagctcagcaaggacaaaatgaaccggctgcgtggctggctgagttattgtaaagccgttgaaaattccttcctggataagatgaaaatcaaatatagcgaggacactatcttagaaatcctcaagaagaactga

SEQ ID NO: 11822 - RNA, 1941 nt, synthetic construct
  source 1..1941: mol_type = other RNA
atgcagataatcacagattatttcaagaaggttgacttctctaaagtgcgcactaatcacccgccggaactcattttcctctgcgggggcaataacgacgaagaagcaaacaatttccgccctaaactacaggacaaactcgtaaagaaacagcataacgtgatattggccgagtcagcgatgaactggagaggcggccagaaattcgccaaggatctgctcgagttagaaatttactttgctgccctcgtttccattattcccttgatatgtgagtcatatggatcggccgcagaattgggtgcttttgtggcggaccagtttatccgcaagaaactcttcatcataatcaaggaacagttctactccggagaaaattcatctagctttatccggaacggtcctatcaaaaaatacgaggacagtgagggccggaaaacttattgtatcaatgacaagcaccccgagcaggatctggacgatctttacgaggctcttctgtcatgtcgtccaaagactagcaagtgttattttgataaagggtactttcgaatcctcctgcttatcgacatcattaacgttctgtcaatatccaccttaaaggaaattaagatctcctttcaggaggtcctatctatcatcggcattgatcagcatgagatagagagttattgtgacgacatcgatgagatgttgtttgtgctggaacagttgaatctgatcaaatatcgcaacaagggacagcaaggattttatctggctgtgagtcaagagttctatttagagtacagatacgtcaaagacagtgacgataccaaactgagcaccattcgtaagaacatcctcgacacaatctattctcaggatagcaggattaacaagaccaaggtcagtattctgaaagaagaaagaaaaaagggggagatagcatggctccagacaaatatcagcctggatgacatcaacgtacacgagcttctcaagacagcacctctgcagtataaagtctacgaaatccctaaaaagtctggaggcaaaaggacaattgcccagccaacagcagagctgaaagcccttcagagaaagaagataagtgaattagaggacaaactccccattcataactgcgcaaaagcctacaggaagaataagaacggcatactagataacgcgaaagctcataaagacaactcgtacttttacaagttcgatttccaagatttcttcgaatccattaaggcttgcgattttaaccagtttttagagcagcacggatactctttttccgaacgagtggaccttatcaaattgttcttcaggttcaataagcagagcagcaagcaaaagaccaaacgggtttaccggtacctgactgacaactccttcaatcggaataataatcccgctctgcttaatctgatgattcaagatttcgccaatgagtttcagctgtctgtgggcgcaccctcctctccttttatctctaatgccatactgtttgagtttgacgacatgatgcaaaattgggccaacgagaacgacatcacctatactaggtacgctgatgacattacgctgtcatccaagagtaagattgatattagcagcatggagaaggagatcctaaacatatgctccaaaatttcctttccaaccctgaagctgaataagaagaaggaaaagttctgctcattcaagcaacgggtgtcaattaccgggttgaatattacgccagatcacaagattagcatcgggaggaatatgaagcgcgagattagcgccatgatccaccatttcaaatccgggaagctgactgtggataagcttaacaaactgcgaggttggctcagttattgcaaggtggtcgaaagcgagttcatcatcaaaatggaaaacaagtacagcaaaaacaccatctctgccattctgagaaaaaaatga

SEQ ID NO: 11823 - RNA, 1515 nt, synthetic construct
  source 1..1515: mol_type = other RNA
tacattattttctccgatattaatcctcacgatgaacttgacgaaatctgcacgatcattaacaattataagcctgagactatcaacagcaatttcagccacaactatttcaaaattctcctggttctggacttaattaacgttctcgcaatcagttccatagacgaaattaagatacatgcggaagcagtgctcaagaagtttgacaaaaactatgagatcaacagaaagaccgttaaggagatgctgtttgtactaaaaaagctcgatttggtcgtggagattaacaagatcaaccagtctttttacctgagtaaatacgacgatctgttcctggactataacccccatcagtataagctgttcaacattaagaaggacatcatcaatagcttctatcagtcagatgagagtaacactagcaactatcggaaatatcaaatattctccaagtactaccgttactataaagaccaggagaacaattcgaccaaaaaagatatcgagaaagaggtgaaatggatcaataagaccctggattacgaacatattgataccgatcaagtgattcagatcggaccaatgttgtacaagaagttcaagatcaagaagaaaaacaagggttatcggacaatctgtcagccaacagctgagctcaagcaaatacagaggaacgaacttaaaaagctttacaagcaattcctgatccatgatgccgccaaagcgtacaagaaaaacattaacgggatcttagaaaacgcctcggaacacctgggtaacaactttttctacaagtacgatttcaccgactttttttctagcataaaagccgacaatttcattggctttctcaaacgcaattcttttgaagacaataagatccttcgcctaatcaagctgttttttgtgttcgacaagaataacaagtctgagatcaagaaggcttatgagattctaaaaagcaaccgatccgacataaatgcctttccgcgatggtttaaagacaatctctctctgtccataggcgctccttcttccccctttattagcaatatcattatgctcgagttcgatagcatagtctttgattgggccaaaaagaatcagttggtgtatactagatacgcagatgaccttacattttcaagcaaacacagtttcgagtccaaactgattcagaagctgatcaacgacacaatcaaaaatatagactacttgaacctgagacttaatatttccaagatccggcacttcaacattaaagagcatgtgtccataaccggcctctcaatcactcccgataataaagtctcaatcggaaaaaagaggaaaaaggagatcaatgcattgatccaccagtataagaataacgacaattacagtctgtctaggcaacagatcctgcgcattaaaggcttactggctttttgcaaaaatgtcgaaacggatttcttcttgaatctccagaaaaagtacgggaataaggtaattaaagacatcctgtcagaaaagtga

SEQ ID NO: 11824 - RNA, 1041 nt, synthetic construct
  source 1..1041: mol_type = other RNA
atgtcttacctcataaaggtcccttcatatgttgagttcctaaaaaaggtgtactctctgatcagcaagatttccaacgatctgcttatttccgaggagaagattaagaacgtcattgatagatcatccctgctgtatcatgagttcacaatcgttaagaacaacaagtcccgagtaatccataacccagctaaggagttaaaggctatccagatctacttgactaatatgttcatcaaacaggcaccaatacacgactgtgcctttgcgtatcgggaaggcatctcgattaagaactgcgtggagaagcatattgatagtaactacttcttcctgacagactttaaggacttttttcactccattatgttcgatgacatcttgaggttcctgaaattaaccaacatctcgcaatatctgagccgagatgaagattgcagtgactttgccaaagtgatgtgtaggtacaaacggctgaccattgggtccccttctagtcccagccttagcaatgcactgtgttttcggcttgacgaagtgataaacaggttttgctgcaacaataacctcatctattcacgctatgccgacgacatttgcatctcatcagagaataagatcaattgtaacctcgtccgcaaaagcatcctctcttctatccaggaggccaatgtaattcgcagattacgggtcaaccccagtaaaacaagaactcttaatagggctaaacgtgttaagattctaggtctgaatatcaccagtgatcgaaaaatctctataggaaggagcaaaaaacgcgaaatcaaaagcatggtgaatatgtggaagtacaaccggatcaacaacattgagcgttcatatctgagcggctatatttcctattgtctggctgtggaggaagatttcgtgatgggactgtaccagaagtacgggtccacgttgattaatagaatacgcgaatacaatgcctcttacgcaagagaaaagaatctcctcttggaaaatagcctcatggacataaatcactccgactacaattga

SEQ ID NO: 11825 - RNA, 924 nt, synthetic construct
  source 1..924: mol_type = other RNA
atgatttcaccatttaacctcatcttgaaggattgtatgatcactaacgtcaagattatgaacattgctcaacgcgcgaaacatatgtataaaacatacgccatcccaaagaagaatgggggaaggcgcataattgaccaccccgcaaaacctctgaaggcgatccagaggtctattgtgagcgccgtgttaagggaccttcccgtacaccagagttgtaccgcctacgaacccggccggtctgcactcttgaacgctcagactcaccaagattccagatacttttaccagctggatttcaaggattttttccactccatcaaacatcgcaatgtcagtgccttcctggagagctcaaccagactcgatacagaggaaagcgagattatttctatgatatgctgcaaaggggaccacctggttattggagcaccgtcttcaccaatccttagtaatcggataatgtttcgattcgacagcgaagccacaattataagccagtccttgggctgtatctacactagatatagtgacgatatcacgatctctacgaaaaatgacaccaccgccatcaacgaatgcatacgagctctgattgattttatcgggtcacccgacaacaactggctgcgcatcaacgaggccaagacacgtcattcctccctcaaacgtagagtggctgttactggttacaatatcacaaatgaccacaggcctgtcgtgcctaggtcgtataagcggactgttcgggctctaatccataaggcaattatttgcaacaacgacgaaatcgagcttgataaggtgctgggcatggtagcctatattgagggaagcgaacctggcttcatcgagtccttaaaggggaaatatggtccagaggtgataaatcggctgagaaaacacaataccaccggccattga

SEQ ID NO: 11826 - RNA, 918 nt, synthetic construct
  source 1..918: mol_type = other RNA
atgacagaaattattaaagagatcatgaggcataccggattttggccttctgatatcgtacggatttctagggacgcccctcgttcatacaaggtgttcagtatccccaagcaaaatggctcttctcgaacaattgctcagcccaccaaggagctgaaagcaatccagagagccattgtagaatgtctccgtaaaatactaccagccgagcacaccacagcaacggcatacgttaagggtaaatccatcatagataatgccaaaccacacaggaatagcaggatcttcctgaaaaccgattttcagaacttctttcctagcatcatgccctcgcatttcgaccagcttttaattcagaacgagatccactgggagcctgaaatctgcaacctcattaagagacttctgtttttcgggaaccgcactagcaccccacaatgcctcgctatcggggcgccctcaagtccgtacataagtaatgccatcatgtaccaatttgaccttcggttctcccagtattgtgccagcaacgaactgatttatactaggtatgctgacgatgtgaccgttagcgggaatggaaaaatgaatcagtcagcagtgctcaacgagatcgaccgcaatttggcctccgtgggactgagtgcgttgaaaattaacccatccaagacacgggtcttctcccacaagcatggcgtcaagatcacaggcataagagtcacttccgatggtgagataaaggtggaccgcgagctacggagagagattcgagccagattacataagatccgcattcagtcagcttcgactgaaatgattgctgaaacgcacggcttgctgagctttgtgcacatgatcgacgaagagctggaagagaacctcctgagccagtacaagctggattcttatgactggtga

SEQ ID NO: 11827 - RNA, 954 nt, synthetic construct
  source 1..954: mol_type = other RNA
atgtccgaatacaacttccgcgagcacttgagcgacgaattcctaatttctgaacacgacgtaacacgacttttgctcagggcaccatacgcctacaagaggtatactatccccaagatgaatggaggcatacgccaaatcgcccaacccgccaaagaaaccaagatatttcagcatttcatgatgcgcgagtggttttcaaaaatgcctatccatgagtgtgccgcagcgtataagcatggcgcaagtatcaaagacaacgctgagcgtcacgccgggagtacatacctgtcgaaattcgacttcgtgaactttttcggaagtattacagagcggaacattaaagtcctgttgtccaccgtttttaagggagagctctccgaaaagagtatcgtcgacatggcccgtatgtcctgcattagagatcgcgcgactggtaggttagtgctcagcattggcgccccgtcaagccctgtcctgagcaatgctgtgatgtttaatttcgactcagttgtccacaaatggtgtgtagagcagggcatcatctattctagatacgccgatgatctcaccttctcttgcaatgagaagggcaaaacctttctggtggaagaattcctccaggtgactctgaaacagcttcccgaacctctgctgacgctaaacgctgataagaccatccacgcgagcaaaaagaaccagagaagagtcaccggtttggtgctgtcaaatgagggatccgtgacaatcgggcgggaccggaagagattaataagcgctatggtgcaccgatttgcaattggcgcactcgataacaagtctattgctcatctgcaggggcttattggtttcgctcaggatatagagccactttttgttgccaagctgagggagaagtatacttctaaagtgatcacggagctgatgcgggttagggggaagaaacggaattga

SEQ ID NO: 11828 - RNA, 954 nt, synthetic construct
  source 1..954: mol_type = other RNA
atgtccgagtacaattttcgtgagcatttatcagctgaattcatgattagtgagcatgaggttgtaaggctgcttgtcagggctccatacgcatataagaggtacacaatcccaaagaagaatggcggaatccgccctatcgcacaacccgccaaagagactaagatcattcagaacttcatgatgaacttttggttttgcaaactgccagtgcacgagtgtgcggccgcttacaagcagggcgcatccatcaaggataatgccgaacgccacgtgggaagtagctatatttccaaattcgactttgtgaacttctttggctcaatcaccgaatttaacattcagacactgctgagccgggctttccagggtcagctctcagagcgcagcatagccgatatggcccggatgtcttgtattcgggacaaggtcactggacgacttgcactttctattggggccccgagtagccctatgctgagtaatgccgtaatgttcaactttgactccgtggtgtctcagtggtgcttcgagcgtgatataacctattctagatacgcagatgatctcacattcagcagcaacgaaaaagggaagacgttcctggttgaagagttcctacgcggagcgctgaaagaactgcccgaacccggattgttgctaaatgctaataagaccttgcacgcgtcgaagaaaaaccaacgaagggtcaccggcctcgttttatccaatgacggcaatgtgactataggccgggacagaaagcgactcatctcagctatgattcaccactttatacaggggcagctggatagaaagagcattgcccatctgcaagggctcatcggttttgcccaggacatcgagcctcttttcgtggccaagctgagaggtaaatatacatccaaagtcatcaccgaattgatgagatctcggtgcgagaaaaggaactga

SEQ ID NO: 11829 - RNA, 954 nt, synthetic construct
  source 1..954: mol_type = other RNA
atgtcagaatacaatttcagagagcatcttagcgatgagtttctgattgcccaacacgacgtggtcagactcctgctgcgggcaccctacacttacaaaaggtatacgatccctaagaaaaacggaggcgttaggcacatcgctcagcccgctaaggaaacgaagattatacagcgcttcatgatgggcgagtggttcagcaaactgcctgtccacgaatgcgccgcagcctataaagatggagcttcaatcaaggacaatgccgagagacatagcgggagcatttacatttctaagttcgactttgtgaacttctttgggtccatcaccgagggtgacatcaagcgtatcttatctcggacattcgggggccagctgagtgaaatatctattgctgacatggctaggatgtcctgtatcagagatcgggccaccggccaactagtgttgtccatcggggcgccgagtagcccagtgctttccaacgcagttatgttcaactttgatagtgtcgttaatcagtggtgtagcgagcgtgatatcacctatagccgatatgcggatgacctcactttttcctccaacaaaaaggggaatactttctgcgtggaggaatttataaagggagcacttaaagagctctccgagccatcgctgtcattgaattctgacaagaccatccatgcctctaagaagaatcagcgcaggattacaggactggtgctgtcaaacgacggcaaagtcacaataggtcgggaccgcaagcggctaattagcgctatggtgcacaggtttgcacatggcgaactggatgataagtgcgtagcccacctgcagggactgcttggtttcgcccagggcgtagaacccttatttatcagtcgcttgcgatcaaagtacacctctaaagttattacagacctcatgcgattcagaagtaaaaaactcgattga

SEQ ID NO: 11830 - RNA, 954 nt, synthetic construct
  source 1..954: mol_type = other RNA
atgagcgaatataactttcgtgaacatctctccgatgagtttgtgatctcggaacacgacgtgtccagactcctgttaagagctccttacgcatacaaacggtacaccattcccaagaaaaacggcggagtaaggcatatcgctcagcccgccaaggaaactaaaatcatccaacacttcatgatgagtgagtggtttagcaaactgcccgtccacgaatgcgcagcggcctacaagagtggcgcttctattaaagataatgcgcaacgccatagcgactgtgcctacatttctaagttcgacttcgttaacttcttcgggtctattactgaggtggacatccggaatcttctggtggaagtctttggaagccagctgtccgagaagagcatcgctgatatggctcgcatgtcttgcatccgggatcgagtgaccgggagactggtcctgtcaataggagcaccgtcctccccagtcctgtcaaacgccgttatgttcaatttcgatagtgtggtgaatcagtggtgtagggagcacgacatagtttattctcgatatgccgacgacctgactttttcctcaaatcgcaagggtgtgacattccttgtagaggacttccttcagggaacattgaaggaattacctgagccaagtctctcactcaacaccgaaaagacagtgcatgccagcaaaaaaaaccagaggcgcgtgacgggcttggtcctgtcgaacgacggtaatgttacaataggcagagacaggaagcgtttgatttccgccatggttcaccgatatgcactaggcgagcttgataacaggtctatcgctaatctccagggtctactggggtttgccctcgatgtggagcctttgtttgtagcaaagctgcgggggaagtacaccagcaaagtgattaccgagctgatgagagtccgggccaagaaagatgattga

SEQ ID NO: 11831 - RNA, 948 nt, synthetic construct
  source 1..948: mol_type = other RNA
atgtcgcactacaatttccgaaagcagattagcgaagagtttatgatctctgaacatgacgtgtcacgtcttattttgagagcaccttatgcttacaagcgatacaccattcccaagaaagggggaggtgtgaggcacattgcccagccggctaaggagacgaaaattatccagcaccacatgatacatgagtggttctctaaattgcctatccatcattgtgccgctgcctataaaactggcgccagcattaaaaagaatgccgagttgcacagcaacagtacatatatttccaagttcgacttcgtgaacttttttggcagtattactgccctgaatatcaagaacctcctgcagaacgagttcaataacattatcagtgaggcatcaatcgaggatatgtccaggatgtcctgcatccgcgataaggccaccgggaggttagttctctctattggcgcaccctcttcgccaatcctttccaatgcggtcatgctaaacttcgataccgtcgtccaccaatggtgcagcgaaaggggaattatctacagtcggtacgctgatgatctgacattcagctccaatgagcgtggggcaactctcaagatacaggactttatccagggcacgctgaaagagctgcccaacttgaatctgatccttaacaccgataagacaatccacgcctccaagaaaaatcagcggcgggttactggcctcatactcagcaacgacaacaaagtgacaataggaagagacaagaagcgcctaattagcgctatgatccatagattctcacataacgaactgaattccaaagaaatcatgcaccttcaagggctggtgtcttttgcacaacacatcgaaccactgtttgtagcgaaattacgcggtaagtattctaccaagctgataaccgaactgctccggtcaagaggagacaaatga

SEQ ID NO: 11832 - RNA, 948 nt, synthetic construct
  source 1..948: mol_type = other RNA
atgtccctgtatgatttccggaagcatatgtccgagatgctgagccttagcgaacatgatgtggccagactaatcgtgcgcgctccctacgcctacaagcgctattttattcccaagaaaagtgggggaatgaggccaatcgcacagcccgctaaagaaacaaaggttatccagaacctcctcgtaaatagctggttctctcaactgccagttcatgaatgcgccgccgcctataggcaaggctcatctattaaggccaacgctgagcggcacaaacagaatagctatatcgcgaaattcgactttagcaattttttcgggtccattaccgaatcagatttagtcaaccacctctcatacgtcctgtgcgggaaactgagcgttcagtccataaaggacatcgcaagagtgagttgtattagagatagagcaaccgctagacttgctctgtcaatcggtgcaccttcttctccgatactttccaacagtattatgtactacttcgacctggctgtagaatcgtggagcttggagaggaatattgtgtatagtcgatacgcggacgacttaactttcagtacaaatgataaaggagccacttcggagattgagaaatttatcctagaaacgttggagtccataccttaccctcggctccacatcaactctgagaagaccgtctacgcatcaaaaaagaagcaacgccgaattaccggcctgataatttccaatgataacgaggtgagcctcggtcgagacaggaagcgtctcatctccgccatgatccacaggtatgcccatcacgaacttgatgagaagtctatcctgcacttacagggcctgatgggatttgcccaggacatcgagccactgtttgtggcgaaaatgcggggaaaatatacaggccgcctgatatctgacttgttgcggcagcgtggcaagaagtga

SEQ ID NO: 11833 - RNA, 954 nt, synthetic construct
  source 1..954: mol_type = other RNA
atgatcttgtacgacttccggaaacacatctccgaggtgctctcactcagcgagcacgacgtggctcgactcatcgtcagggcgccatatgcatacaaaaggtactttatccccaaaaaatctggtggaatgaggccaatcgcgcaacctgctaaggaaaccaaagtgatccagggcattttaattgagtctctgtttgctcagctccctgttcacgaatgcgctgcagcctacaagcaaggctcatcgattaaggacaacgcagagcgccaccgacagaactcttatatcgccaagtttgatttctcaaacttcttcggaagcatcacagaacttgatcttatcaaacatctgtcctatgtcctgtgtggaaagttgacggcccagtctattaaggacattgcccgggttagctgtgtgcgagaaagaagcacctctcggctggcactctccataggtgcccccagcagtcccattctgtccaatagcattatgtactactttgatttggctatggaaggttggtgccgcgaccgctccatagtctactctaggtatgctgacgacctgactttcagtaccaatgataagggcgttatgtttgatgtagaggccttcattttggaagtactggaaaacattccatatccgagactaaagattaacagcgagaagactgtctatgcatccaaaaagagacagcgccgtatcacaggcctgatcataacaaacgataataatgtgtccctgggcagggataagaagagactgatcagttcgatgatacatcactacgtgcagaataaactagatgaggagagtatccttcatctccagggattaatggggttcgcccaggacatcgagcctctgtttgtggccaaaatgagagggaagtataccgggaagattatctcagacctgcttcgtcaacgggggaaacggataaaatga

SEQ ID NO: 11834 - RNA, 954 nt, synthetic construct
  source 1..954: mol_type = other RNA
atgagtctgtatgagttccgtaagcagatcagcgtggcactcagcctttccgcccaggacgtggcaagactgattgtgcgagccccttacgcctacaaacgctatactattcctaagaaagggggcggtgtgaggcccatagctcaacccgccaaagaaaccaagataatccagtccattctgatctccgattggtattgtaggctaccggtgcatgagaatgcagcagcgtataagagcggcgcgtcaattaaagctaatgcggaacggcataaaaacaatacatttgtcgccaaattcgactttaagaacttcttcggatcaatcacttattctgatcttgtcaaccatttgtcatacgtatttgtgaacgaagttacgaagcagtctatcctcgacatggccagagtgagctgcgtgcgcgatcgttcaagtggagatttgaccctgagtattggcgctcccagcagtccagtgttaagcaattccatcatgtacaattttgacttagcagtggttgaatggtgcgctgagcgagatgtggaatactcacggtatgctgatgacctgaccttctctgcaaaagacagaggggtcctgttcagtgtcaaggactttctgctctctaccctggaggagataccataccctaagctgtccctgaacgaggaaaagacaatatacgctagcaagaaaaaccaacggagagtaacaggcttgatcatctctaatgagaacaaggtttccctcgggagggaacgcaaaaggctaatctctgccatggtacacaagtactcgcaccaggatttggacgagaaagccgtcactcagcttcagggcctcctggcttttgcccacgatattgagccacttttcattgccaagctgaggggtaagtattccagcaaagttatcatggacctcatgcgcaagcggggaaagaaaattaagtga

SEQ ID NO: 11835 - RNA, 951 nt, synthetic construct
  source 1..951: mol_type = other RNA
gatgtgtacgatttccggaaatacgtcagtgacacattagccattccgatccacgacgtgttaagactgttggtgagggcaccttacacctataaaagatacgagatccctaaaaagtcgggtggcagcagatccattgcccagccagcaaaggagacaaaaatcatacagcgcctgctgatggacgccatcttcagtcagcttcccgtccatgagtgcgctgttgcctataagcacggcgcgagcataaaaacgaacgcacaacagcatagatataaccagtacctcagcaagtttgatttctccaacttctttggatcaattacatccgaagacatcgctgctcacctgggccagtgtctgggagacgagttgtccgaacagtccgttgcagacatcgctaggatctcctgcataaggaataagatcaatagcggtttgtgcctgtcaattggtgccccatcttctccagtcctcagcaactctatactgtacaatttcgacgtaagcgtcagtgcctggtgtctcgaaaagggcattgtgtatacccgatatgctgacgatctttcatttagctccaaccagaaaggactctctgggagtattgagccctttctccgccaaactctaaaagatatctcttacccctcactggtgttaaatgagcgcaagactatacatgtatcaaaaaagcaccaaaggcgagtcaccggacttgtgattagcaatgacggctccgttagtctcgggagggaacggaaaagacttatctctgcaatgattcaccgttgtatcaacgataagctggaggaagcggatatttacatcttgcaggggctgctaggctttgcccaagatgccgagcccatcttcgtggcccggatgagggctaagtatgggtcgctggtgatccgcgaaattctgcggaagcgtgtgaagctgcctcggtga

SEQ ID NO: 11836 - RNA, 948 nt, synthetic construct
  source 1..948: mol_type = other RNA
atggacatctacgactttagaaagcatgtcagcgaaaccctggccataccttctcacgatgtggcacggttgatagctagggctccccacacctataagaagtatgagatcaagaagaaagacggaggtagccgatccatagctcagcccgcaaaggagacaaaagtcattcagagattgcttatggaggcactcttttgcgatctgccagtgcatgagtgcgccgttgcctacaaattaggatcctctattaagaagaacgcacagctgcaccgccagaatcaattcatatccaagttcgacttcagcaacttttttggctcaatcacagaaaaagatgtggccgcccacctgagacatgtcttcattggcaagatcagtgaacaaagtattctggatatcgccagaacctgttgcatccgtaatagtctgacggggattttgtgtctgagtatcggggctccttcctctccaatcctatctaactccatcctgtattatttcgacatcgcgattcaaacgtggtgtaatgagagggacattatctacacaaggtacgcagatgatatgactttttcttcaaatgaacgcggtgtaacttcgttagttgaaaagttcctgacccatactctgaaaaacatcaaatacccccatcttattcttaacgaaaagaagaccatccacctaagcaaaaaacaccagcgacgcattacaggactggtggtgtcaaatgacgggttagttagcctcggtcgggagaaaaaacgcttgattagcgtaatgattcaccactacctcctcaagaagctcgaccataaagacatacctatcctgcagggcctcctgggctttgcccaggatgccgagccacttttcgtggcgcggatgcgtggaaaatatgggtccccggctatttcagagataatgaggggccggatcaagaagtga

SEQ ID NO: 11837 - RNA, 978 nt, synthetic construct
  source 1..978: mol_type = other RNA
atgtccattttcgattttagaaaacacttgtctgagagcctcgccattccaacccacgacgtggtaagactgatcgtgcgagcccctcatacatacaagaaatacgagatccctaagaagagtggaggtgtgcggctgatcgcacagccagctaaagagacgaagctcatccagaggctgatgatacaggaaatctttactgaattgcccgtgcatgaatgtgccgcagcttacaaagagggggctagcataaaggcgaatgccgaacagcacaagaacaaccaattcatctctaagtttgatttcgtcgactttttcggctccataaaagaagccgacgtggcaagtcatctggcgtatgcgttgccaggaaaggtttccgagcagagtatcaaagacattgcacggattagctgcatcaagaataagacactcgggggtctgcagctttcgattggggcccctagctctccgatcctgtccaacagtatcatgtattacttcgatgtggctgtagccgcttggtgcgctgacaagggcgtcatctacacccgctacgcagatgatctgaccttttcatcaaatgtcaagggcttacccgcccagatcgagcccttcctgactgaaatactcaaggaaatcccgtatcccactctgtctctgaacaagaaaaaaacagtgcacgtgtcaaaaaaacaccaacgtcggataaccggactcattattaataatgatggggctatttcccttggacgcgagaggaaaaggctgattagcgctatgatccaccgatttattctgggcacacttgaggtggaagccatcctaaacctccaaggcttactgggcttcgcccaggacgccgagcctcttttcgttgtccgcatgagagacaaatatgggcatcaggtcattaccgagcttctaagacataggggtgttagcaaggacaagccaaaagcatatttgaagaactga

SEQ ID NO: 11838 - RNA, 957 nt, synthetic construct
  source 1..957: mol_type = other RNA
atgagcgtttacgactttcgggggaatattagcaatgctctcgtggtgagctccaacgatgtgagccgcctaattataagagccccccacacatacaagacctatgagattgataagaagaatggcggcaagcgatctattgcccagcccgccaaggaaaccaagtacattcaaaggcttctcatgacgcaattgttctctagactgccagtccactcatgtgcagtcgcctataaagatggtgctagtatcaagaaaaacgctgaactgcataaaaacaaccagtacatctccaaattcgactttacaaacttctttggatccatcaaagaacctgacatctccgcacacctagcgtctgtgtttggcgacgagctcagcgatgagacaataaaggatatcagccgcatctcatgcatcaagcataaagacttgccagggctctgcctgtcgattggagccccctcctcgccagtgttgagcaacacaatcatgtacctttttgaccagatagttcatgaatggtccgtagaacgcgggatcaccttcactaggtatgccgacgacctgaccttttcttcaaatacgaaaggactgttcagtgaaatagagcccttcctgagtcaggtcctcaaaaaattgccttatcctgtgttaagtctcaatagcaaaaagactatccacgtcagtaagaagaatcagcggcggatcactggcctggtgttagataacgatggtagagtttcattaggacgtgataggaagcgcctgatttccactatgattcaccattactcctgtggaaggctctcagacgaggaaaccatgagactgcagggcctgctggggtttgcagaggacgctgagccgcttttcgtgtctcgtatgcgggggaaatatggcatcctggtaatttctgagcttttccagaagcgaggtaaaaagctggagaagtga

SEQ ID NO: 11839 - RNA, 963 nt, synthetic construct
  source 1..963: mol_type = other RNA
atgtcttcatacgaatttagacaagacgtggtggaattcttctccgtctcggagcatgatgtattcagattgctgcagagggcaccccacacctataaacggtatgagatagacaagaagtctggcggtaaacgcctcgtcgctcagccagccaaagagacaaagattttgcagcgctacctcatgcgagtggtatttaacgacctgccaatccacgagtgcgcgactgcatacagctctggtagctctgtgcgaaagaatgctgagcttcacgtggtcaatccttatatctcaaagttcgacttcgttgatttctttgggtcaataaaggaatccgacctaattttgcatttttctaggttcctgggaggaaaagtgagtgaacaatcaatcaaggacattgcaagagtgtgctgcatccaacacaagggtagggccgaccattgtctttccatcggtgccccttcctcacccgttctgagcaattctataatgtacgatttcgacgaacaggtggaggcctggtgtaaggaaagaggcatcacatacagtcggtacgctgacgatctaacgttcagcactagcggaaagggcgtatcggctgagatcgagcccatgatccgtggcctgctgaacgacctcccttatccaagactcagtctcaacgataaaaagacccttcatttaagcaaaaaggtgcagcggagggtcaccggggttatattaaataacgaggggaagctcagtctggggcgagaacgcaaacgtaaaatttccagcatgattcacaggtttagcctgggccagttagatgaaaaagatgtgtttcagttgcagggcctgctgggatttgccgaggatgttgagccgctgtttgtgtcccggatgcgcgggaagtatggaattggcgtcattagtgcccttttccagaaacgctccgagggacggatcaacaaactgtga

SEQ ID NO: 11840 - RNA, 966 nt, synthetic construct
  source 1..966: mol_type = other RNA
atgtccaagttcgaattgaggttgaggctttgtagagaactgctgctcaccgacaaagaggtcgcccgcctcataagccgagccccttacacttacaaggtgtattccattccaaaaaagaatggaggacgaagggtcgttgcgcaaccggcacgggaaaccaagattcttcagaatttcctcatcgaaaacgttttcaaagaactgccagtgcacgagtgcgctaccgcttacaaggcggggtcatccatcgccattaatgccagcgcccacgtaggtaacagctacatatccaagtttgatttcagcaatttcttcccctctattacaatgctggacctagtgcggcatatcaagagcttttttgacggacggctcgatgatttggagattatcgacattgccagagtatgttgcatcaaagaccgcgtgacggataggttccatctgtccatcggcgctccaagttctcccatcctgtctaacagtatcatgtattttttcgatgtcgccgtgcacaaatggtcgtctgagcggggagtttcctacacaagatatgccgatgacatgactttttcaacaaacgagaagagtatgtctcgggagattgagctatttctggtccgccaagtggaggctatgaagtcacccagattaagtataaaccacgagaagactatccacctgtctaaacgtaatcagcgaaaggtgacaggcttagtgctgagctcagagggcaaagtgagcctggggcggaataggaaacgcgaaatctccagcctgatccatagattcgctcttgggcagctcgatcccaccgacgtttttcgcttacaggggcttttgggctttgctaacgacgcagaacctgacttcgtagtgagaatgaggaagaagtatggtgacctcgtgattgcagcactgtttgaaaaacgtaaagcaccttcagtcataagtgatggctga

SEQ ID NO: 11841 - RNA, 951 nt, synthetic construct
  source 1..951: mol_type = other RNA
atgaccatcaacctgcgcgagtctcttcaagaatcactggggttgtctgaggcgcagctaaatcggcttatcgtgcggtcaccacatacctataaggtctacacgattcccaaacgtacgggcggcaagagaactattgcccagcccgcaaaggaaacaaaattcatccagaactggctcattgaaaacatctttaacagtctgcctgttcattcttgtgccagcgcctatcagccaggctccagtataaaacgcaatgctgatgctcataaggctcagagatacctgactaagttcgacttcaagaatttcttcacctccattaaatcggacgatcttatagagcacatgagagtgcacctgggggaagtgctggatctagatgccatccacgacatagcgagagtcagctgtattcaattaaaggctggcgaaaagttgtgcctcagcattggtgcacctagctccccgcttttaagcaattccatcatgtttgagttcgatagtctggtaaatgaatggtgcagccgagagcgcgtggtctatacacggtacgcagacgacatgaccttttccactaatgagaggaacaagtctgccgtaattgagaagtttatccgaggcgtggtgcgtgacgttgggtatccaagcctgcggttcaacaacaaaaagacaatctctctgtcaactaaacactcccggagggtcacaggaatagtgatcaataaccagggacagctgtcgctgggacgagacaggaaaagagaggtcagtgctttggtgcacaaatttatgttgtccgagctcccccaagccgaggtttacaggctccagggtttactcgggttcgcctgcgatgtggaacctgattttctggcacgcatgaaaaggaaatactcagacgaactgatcaggaccatcctcgagattcgcaagaagtctgacgcctga

SEQ ID NO: 11842 - RNA, 951 nt, synthetic construct
  source 1..951: mol_type = other RNA
atgactatccacttgcgaggggccctcagggattcacttgggctgagcgacgcccagctcaatagacttattgtacgctcaccacacacgtacaaagtgtacacaattccgaaacgtaccggcggaaagcggaccatcgcccaaccagctaaggaaacgaaattcatacagcattggctaatccggaatgtcttttgccaccttcctgttcacgcctgtgcaagtgcttatcaggacggtgcttccatcaaaaagaatgcagatgcccatcgactgcaacggtacctggcaaagtttgatttcaagaacttcttcacatccattaagtccgacgacctgatcattcacatgcgccggcatttgggctcgatactggaagagagcgctatcgacgatgttgcgaggatatcatgcattaagctcaaggcaggagggaagttatgcctcagtataggtgccccttcttctcccttgttgtctaatagcatcatgttcgacttcgacagtctggtgaacggatggtgtaaaaaagagggtgtgatctatacaaggtacgcagacgacatgacttttagtaccaacgagcgcgataaatcaagagagattgaagagttcatccgaagcgcggctagagacgtagaataccccgccctgaggtttaacaccaagaagactgtgttcctatctacaaaacattcccgtagagtgaccggcattgtcattaataaccagggcgaactgagcttaggccgcgatcgcaagagagaagtctccgccttagtgcacaaattttcttttgaagagctccccgagaaggaggtttataggctgcaggggctgctgggattcgctaaagatgtcgagcctgattttcttgaaaggctgaaacgtaagtatagcgacgagctcatcagacagatcctggccattcggaaggagcgggatgtgtga

SEQ ID NO: 11843 - RNA, 942 nt, synthetic construct
  source 1..942: mol_type = other RNA
atgactatcgcactgaggaaagagctccaggagagcttaggcctgagtgaagcccagcttaacagactcattcttcgggcaccccatacatacaaggtgtacaccattccaaagcgtactggaggcgtacgtgtgatcgcgcagccagcccaggaaaccaaattcatccaaaactggctcatcaagcgggtgttcggagaactgccggtgcattcctgtgcaaccgcctatcaggcggggtcatcaattaagaaaaacgctgccgctcacaaggaccaccaatacctagcgaaatttgactttaaagacttcttcacgagcattaaggcagatgacctggtggctcatatgagtcgacacctggcaggcctgttgagcagatcagaaattctggatgccgccagaatttctagcattcagcaaaggcagtctgagtccttgtgcctgtctatcggagccccttcttctcccttgctgtcgaatagcgtgatgtttgaattcgactccctggtttccaactggtgtgtagataggggaatcatatatacacgctacgctgacgacatgacattttccacgaatcggaagggtcgctcaggggagattgaggaattcattcgaaatatcgctcgcgggctcgattatcctcgacttaggttcaattccaaaaagaccgtcttcctgagcaagaagcaccagcggcggataactggcatcatcttaaacaacgacggtgagctcagcctagggagagatcgcaaaagagagataaaagctttagttcacaagtttacctgcgatgagctgcccggcgaggaagtgtatcgcctccagggcctgctcggttttgccctggatgttgagcctacttttcttcaagcccttaatgtcaagtacagtgaccaggtcatagagacaatcttgagtatcaggaaagaatga

SEQ ID NO: 11844 - RNA, 945 nt, synthetic construct
  source 1..945: mol_type = other RNA
atgaaaatcgcattaagaaaggcactccacgattcgcttggtctgcctgaggatcagctaaatcgattaatactgcggagcccctactcatacaaagtgtatactattcccaaaaggtcaggcgggctgagagtgatcgcacaaccggctaaggagacgaaattcctgcaacattggttaatggcaaatgtgttcagaaatctgcccgtccatgagtgtgctaccgcttatcaggccgggtccagcatcaagaaaaatgccgaactccacaaaaataactcttacctggtaaagctggacttcaagaacttttttccttccattagcgcccgcgatctgatatcccatatgcgaagacatctggacggatcacttgacgaagaagcccagcgcgacatcgctaggatttcttgcattaggttgccagatgcccctggcctgtgcctctcaatcggagccccatccagccccatgctgagcaattccgtgatgttcgagttcgacacagccgtccacggatggtgtaacgagcggggcgttagatacagccggtatgccgatgatttgtccttcagtacaaacgagcgcggcgcaagtggtgacattaaggagtatgtactgagtgttgtggaacgcctcgaataccctcgcctcagtttgaatgacaagaaatctgtctttctgtcgaagaagcaccagagacgtataaccgggctcattattaacaacgaaaaccagatcagccttggccgggataggaagcgtgagatctccgctctcatccacaagtttagtgtgggagcgcttccggactctgaaatcttccggttgcagggtctactggggttcgcgagggacgttgagccaaggttttttgtgtcaatgtccaaaaagtacacctctgatactataagcaacatcctttctacacgaaaaaagccatga

SEQ ID NO: 11845 - RNA, 954 nt, synthetic construct
  source 1..954: mol_type = other RNA
atgaccgaccatttgcggcacggactgcaagagtcactgggtcttagcgactgtctgctcaaccgtctaattcagagagctccacactcctataagatatatacgatcgcgaagcgcacaggcggacagaggaccatcgcacaacccgccaaggaaaccaaattcatccagcggtggctgattcagaatatcttcaacaagctccccgttcacgagtgcgcaagcgcctacaaagatggagctagcattaagaaaaacgcgaatgcccacaagaaccattcatacgtaatcaagctagatttcaaagacttctttccctctataacgttttccgatttagtcaagcacatcgccaaacatctggggcacatcctcaggactcaagacatccaggatatagctcgaatttcttgtatcaggctccacgggaaatcggacctgtgcctttccgtgggcgcccctagcagtcctgtgctgtccaatacaattatgtacaacttcgacagtgaagtgtctgcttggtgtactcaacagtgtataacttacacaagatatgctgatgaccttaccttcagcaccaatttcaaggggggcagctctgagatcgaagcctttgttaggtccattactcagaagctgacttacccaagtttacggctgaataacaataagacaacacacctgtctaagaaacatcagagacgcatcaccggaattatcattaataacgagggtaacttgtcactcggccgcaatagaaagagagaaatctgcgcactgattcataaatttagcctcgatctgctgccagaatccgagatatttcgcttacagggcttgatcgggttcgccaaagacgtcgagccgttgtttgtggcacgtatgcggggcaagtatagttcaaaacttattgaggaggtgctgcagaagaggaaacctggtcgactctgctga

SEQ ID NO: 11846 - RNA, 939 nt, synthetic construct
  source 1..939: mol_type = other RNA
atgacggaccacttacgacacgacctggaagagagtctcggactttccgactacttaattaatcggctcatcgacagagcaccctacagctataaagtgtacacgatcccaaagagaagcggcgggcagaggacaattgcccagcctgccaaagaaatcaagttcattcaacgctggctaattcaaaacatttttgacaaactcccggtgcacgagtgcgcctctgcttataaggacggcgcttctataaagaaaaacgcaaattcccacaaaagtcactcatacatcatcaagttggactttaaggattttttcccaagcatcacctccagtgatctggtgatgcatatctctaagcatcttggacgaacatttggagcgcaggacatccaggatattgccagagtgtcctgcatacgcctccatggtaaaggcgacctgtgcctatcagttggtgccccctccagtcccgtgctgtcaaacaccatcatgttctccttcgatagcgaggtcagtgcttggtgtgcccagaatggcattacttataccaggtacgcggatgatttgactttttcgaccagcactaaagggatttgttcagagatcgaatcattcgtaaagggggtcacccaggagttggactaccctaatctgacactgaactttaataagactacacatctcagcaagaagcatcaacgtcgcatcaccggggtgatcataaacaattttggagccctgtctctgggccggaacaggaagcgggaaatcagcgcattgattcacaaattctctctggatatgctgccagagagcgagattcttaggctgcagggtctgctcggcttcgctaaggatatagaacctcttttcgttgcaagaatgcgcaggaaatattcttcccgtttaatagaagaggtcctgaaaaagcggaaatga

SEQ ID NO: 11847 - RNA, 966 nt, synthetic construct
  source 1..966: mol_type = other RNA
atgatgataggcttagacatatcggagcagataagtaaggatctctatgtcagtgctttccaggtagaccgtttgatcaacagggctccacatgcctacaagattttctttatcccaaagaaaaccgggggccaacggaaaatcgcccagcctgcaagagaagtgaaatacattcagaggtggttggtggataatatctttaatcaactcccggtccacgaggctgtgaagtcataccgcgaaggcctggggataaaggataacgccacatggcataagaaaaataagtacctggttaagcttgatttcaaagacttcttcacctccattaaggaggccggactgtttgacttccttttgagaaaactgtctgacagctattctgacgagtcgctgaggaagattgccagggcatcctgcatcaagtataaacacagagaagacctgtgcctcagcgttggcgccccaagctcacctgccatctccaatgcaattctgtatgccttcgatgaagcggttaacaattggtgttttgagaacagcatctcctatacaaggtacgcagatgatttaacgttttctaccagcgtgcccaacgtgtccagcctaatcgaacccaaagtccgccaaatttctagcgatttcccctatgtgaatctcagattcaataacgcgaaacgaactcacctttcaaaaaagtaccagcgacgtgtgacagggattgtgctgactaaccagggagagttatcagtcggacggcttcgcaaacgggaggtaaaagctctcatccacaagtttaagactggtctgctgcctatgaatgaagtccatcgcctgcagggcctgctcggttttgtgtctgacgtggagcccatgtttctagagcggatgagagtgaaatacagttctgctaccatcgacgatattctgaagtccgttaagcaggacaagttggtaaacagttga

SEQ ID NO: 11848 - RNA, 945 nt, synthetic construct
  source 1..945: mol_type = other RNA
atgaacaagtctctgctgcaggaaatctctgagagctttttcatgtccgagatccagatcgaacgcattttcgtcagggcaccatatgcttacaaactgtacacaatacccaagaggtccggaggtctacgaaacatcgcgcaacctgccaaagaaaccaagtacgtgcagtcctggttgattcacaatgtgttctcgagcctcccggttcatgactgtgccatggcatataaaagcgggagcagtattaaggagaacgctctggctcatgtggaaaaaccctacttggttaagttcgacttcaaggatttttttacgtcaatcaaggaggccaatctgatagcccactttcaactgtacctgggcggaagatttagctcagaggaaatcaagtacttagcgaggatctcatgtattaagtataaacacgccacagaaaagtgcttgtctgtaggggctccctcttcccctatcctctccaatagcatcttgtttgagtttgacaaatccgtgcatgagtggtgcgtcagcaagaacattgtttatacccggtatgccgatgaccttacattctctctgagggagaaaggcatggctagtaccatcgaagccgaggtccgaaacttcgcaaaaaccaagtgcgtggtgaatctgcggttcaaccagaagaagactacccacctctcaaagaagtgtcagcgcagaataactggtcttgtaattacgaatgaggacaaaatttctctagggcgtgatagaaagcgggaaataaaggcacttatccatcagcacctgttaggcatgctgaacgccgatcaagtgagtaatctgcagggccttctcggatttgcaaaaaacattgagccatcgttcctcttctccctctacaaaaaatatacctttgaggtcgtgaatggcattatcagaagtcgcaaaactaaatga

SEQ ID NO: 11849 - RNA, 945 nt, synthetic construct
  source 1..945: mol_type = other RNA
atgactaatagtccgctggtgaacatctgcgccgacacattgcacatctccacaagtcaggtcatgcggttgattctccgggcccctcatacctataaggtgtactcaattccaaagaaaagcgggggaaggagaatcatagctcagcccgctaaagaaaccaaatacttacaggacgttatcataaaacgctatctgaatctgctgcctatccatgaggcagcctctgcatataagatcggatcttcgataaagaacaatgccaacgcccacaagcataataagtatttcgtgaagcttgacttcaaacgattcttcgagagcataactctggacgatctagtgactcactttgagaaatacctcccaacacctcttagcaaagaggatacggtgtatctggctagaatttgctgtaggtcctcagatggacgagcagcgctgacaatcggcagcccggctagtcctgttttgtctaatactgttatgtacgactttgacaagattatcgagtcgtggtcaagccagaacggctttacctacacaagatacgccgatgatttaactctcagcaccagtacgccaggagcctccgcgcaagtaatccccgcagtccttaatgccctggaaaaaattgaataccccaaactactgctcaacaacgagaagaccgtgtttctgagccgtaaaaataatcggcggattaccggtatcgtaatcaacaacgatggccgcctttccctcggcagggagaagaagcgtctgatttctgcaatgatataccactatcagcaggggaggctctccgaggaaaaccaattcaagttacagggcctcattggttttgctttggacatcgaaccaattttcgtctccaggctgaactcaaagtatgggcgcgacgtgatttctaagatcctgcagagacgccagcccaaacaatga

SEQ ID NO: 11850 - RNA, 933 nt, synthetic construct
  source 1..933: mol_type = other RNA
atgatcgcacacaagacactcgaaaaaatgctggccgatctcagtctgtccagtgagcagctcgtcagagtcgtgtccagggccccttattcctacaagacttacagcattcccaaaaaaaatggaggcctgcggatcatctcacagcccgctcgtgaaactaagtacgtgcaacattggctgattcataatgtttttcatctcttgcccattcacgaagccgcatccgcgtatgtaaagggagcctcaattaagaagaacgccgaggctcacaggactaatgagtacatggtaaaactggacttcaaggactttttcccatctattaagatcgacgatctgattgcccactttcaaaagtctttgccgttcctcgacctactggagatccgctacatagctagactgtcctgcatcaacaggggtaacggaggcgctctgtctatagggagcccagcctcacccattctttccaacagcataatgtatgagttcgacagtgtcgtggccgattgggcgagccagaataaatttgtgtacaccaggtatgctgacgatttgacgttctctaccagcctgccttacgcaagtgaatcggtggtgcctgttatcaaggatttactgagcagcctgaaatacccacggctctctttaaatgtggacaagacaatccacttgagtaaacgagggtcacggagaataacaggcctggtgatcaccaacgatgataaagtttcccttggacgcgacagaaagcgagagatttcagcacttgtccataagtatggccttggcttgctagagcagaaagacgtgtttcgcctgcagggtctgctgggtttcgcagctgatgtcgaacctctgtttctctctcggttagggaaaaagtatgggatgaaaaccatcctaaacctccttcgcaagcgtcagtga

SEQ ID NO: 11851 - RNA, 951 nt, synthetic construct
  source 1..951: mol_type = other RNA
atgagcaataaccccctcattgatgccctgctatctgacttagccctctcgaaagaacagttcttaagaattgcgagtcgcgcccctcgtacatataagatctatcccatactcaagaagaacggcggcattcgggtaattgcgcaacctgctcgtgaaaccaagtacatacagtcatggctggcgaataatgtctttgggctgcttcctgtccacgatagcgctaccgcataccgcaaagggtcttctatcaaagtgaatgctcagatgcatgctgccaacccgtacatagtcaaactagactttaccaatttcttcccatccatcaagtccagtgacgtctttgctcacctcaagcagtttttgatcggagccacagattctgagttgaagatctttactctgttgagctgctttaataacaatggagaactctgcctgagtatcggtagccccctgtccccaggactgagcaacagcattatgtacgagttcgactcaattatctccgattgggccgccgggaacaacttcatctatacacggtatgcagatgaccttacgttctcaactcctattaagggcgccagcgaagccgtggtggacaaggtgagagaggttattggcaagatcgcatacccaagacttagcctgaatgaaaaaaaaaccatccatctcagtcgaaaaggatgtcggagggtgactggcctggtccttagtaactcagggtccgtgtctatagggagagacaaaaagagagagatctccgcaatggttcaccggttttcaatcggtaagatttctcatgatgatctgaggaggctccaaggtctgctgggcttcgttcaggacgttgagcccctgttcatagctcgcttacgagccaaatactcctccgcagtagtggtggacttgctgaggaggcgcgtgaagaaagagtcggataagtga

SEQ ID NO: 11852 - RNA, 957 nt, synthetic construct
  source 1..957: mol_type = other RNA
atgtcaaaccagagtactctcagcagactcctggatgaactggctttagaaccccaccagtttcgacgtattgccctgagagcgccgtatacctacaagacatacacaattccaaagaagaacggcggtgcccgcgtaatatcccaaccagcccgggaaaccaaatatattcagtcctggctgattgaaaacatcttcaagaaactgcctgtgcatagcgctgccgccgcatatgtgaaaggcgcgagcatcaagaaaaacgcaaatgctcataaggacaacccatttctggttaagatggacttcgagaatttctttccgtctatcaaatctctggaccttcacttgcactttcgcaagcatcttagtttcctttccgaagaggaaatcctgctcgttgcacgtctctgctccgtcagggggatggtgcatgacggtctatcaatagggagccctgccagccctattttgtccaattctgtcatgtacgagtttgatagtctggtcgcggagtggtcccagcggaatggctttgtatataccaggtatgctgatgatctgactttcagcacgtcgaccaaagaagcatcggctgccgtggagcccatgatcagggacgtgataggggcaattggatacccctctctgactatcaataataggaagactttgcacctcagcaaaaaaacaaatcggacaatcacaggagttatcatcaacaaccaaggacagctgtctttgggccgcaccaaaaagagagagatttcatctcttgtccaccggtacaccctggagcaactagatgtgagtagagtgcacaaacttcaggggctcttgggatacgcctatgatttagagcctaagttcataaacgccctctcaaagaagtactccttaggcgtgatcaatgagattctgcgccgaagaccacccaggcaggaggctaacacggactga

SEQ ID NO: 11853 - RNA, 972 nt, synthetic construct
  source 1..972: mol_type = other RNA
atgacaatcgcactgattgaagagatacaagcctctcttggactgagtagcgagcagatggttcgcctgattgtaaggagtccatacacatataagacctacacgatccctaaaaaatcaggggggtttcgagtcatcgcccagcctgcgaaggagactaaattaattcagaggtggctgatttctaacctgttcaataagctacccatccacgattgcgcaactgcctacaaggagggctcctctatcaaactgaatgccaacaaacatcgcgagaacgaatttctctcgaaattcgacttcatcgattttttccaatcgattaaggaagaggatataaaggcccatcttatggagtgcttaggtgggtttttgtccgaaaaggaggttgcgtgggtggctaggttgtcatgcatcaaaacccagaccagcaagaatttgtgtctgagcgtgggagctccatccagtcccctcctcagcaattctgcaatgttccagtttgacagtaagctgaacaactggtgtcaagagaatggcataatttacaccagatatgctgatgacttaaccttctcttcctccatcaagggagccagcgccgagatagaaggcgctatacagaacgtgctgacggagatggcaagaccgaaactgctcttgaacaacaagaagacaatccacgtgtctaaaaaacaccagcgaagaatcacagggattattatcaataacgaagacgagctcagcctgggtcgggaaagaaagaggatgatctccgcccttattcataagttcactcttaatcagctagcttcctttgaaattttccggctgcagggactcctgggcttttcaaaagacgtcgaacccgcatttctgattcgtatgcgggacaaatatgggagcggcgtgatcgagatgatcctcaagatccgcaaggataacaacggcaagaatggtgatttcaattcatga

SEQ ID NO: 11854 - RNA, 942 nt, synthetic construct
  source 1..942: mol_type = other RNA
atgaactcaaacgacctaatcggtcggttaattagccacctgggattgaatgaaaaagatgtgctcggcctcatccgacgagctcctttcacctacaaggtctatactataccaaagaaaacgggcgggaacagggttatcgcccagcctgcacgcgagactaaatacatacagaattggctcatcgaccatatcttcctggctctacctgtgcacgaaagatcaatggcttacaagaaaaagatcggattgatcaacaatgtcttaccccacaaaaacaacaaatatctcgcaaagtttgactttaaggatttctttcactccatcaagttcctggatctggttaatcattttaataagcacctccatcacctcctgtccgaggccgagattcaatatgtggcaagggtagcctgcattaaacagagagattcgggctctctgtgtttgtctgtgggggccccaagctcaccgcttctctctaattcattcatgttcgaattcgatagcgccatggacgagtggtgccaggagaatgagatcatctatactcggtacgctgacgatctgaccttttccacaaatattagtggcgcgacgaataagatccagcagacaattgtaggaattctgagcttaaagtatcccaacctgtttttgaatcacgacaaatccatccaactgagtaacaagaacagaaggcgggtgacaggacttatcattacaaaccagcaacgcattagtgtggggagagacaggaaacgtatggtcaccagcatgattcataagttttccataggtgagctgcgtgccgaagacgttttctacctgcaggggatgcttggcttcatcaagagtgtcgaacccacctttctggtgtctatgaaccgcaagtacggccatgatcttctgaccaaaattataagcatacggaaagagtga

SEQ ID NO: 11855 - RNA, 954 nt, synthetic construct
  source 1..954: mol_type = other RNA
atgatcgacaacttatctgggctcatccacctgtcattgggcatttccactacgcaactggatcgaataattcagaggtccccattcacttacaagatctacaccataaagaagcgtagtggagggtaccgcaccattgctcagcccgccaaggaaactaaattcattcagaattggctaatcgagaacattttctctaccttcccagtgcatgaatgtgcctcagcctataagaatggagcgtcaattctcaagaacgcagagctgcacaaaaaaggagaattcctgtccaaatacgacttcaaggacttttttagttccatcaaggttaaggatcttgtgctgttttttacacatcagctggcccatcgcttctccaaattagatatattgcggatggcgcagatttcttgcgtaagacacacagagctgtcagggctgtgcttgtctataggcgcacccagtagccctatcctgagcaatgctattatgtatgactttgacgccaagatatacgagtggtgtaacaaaaacaacatttcctactccagatatgcagacgacctcacattttctacgaatgaactgggcaggagcgatgagatcactagcctcgtgaatgccgctatcttagagaataaaatcgtcaagctccaaatcaataagaagaaaaccgttcacctgagcaagaaatatcaaaggagaattaccggtctaattatcaccaatagtaacatcgtctcaattggtaggagccgaaagcgcgaaataagcactcttattcacaagtttagcctgaacatgctttctgatgatgagaaatatagactccagggcctgttgggcttttcgaagaacatcgagcctctcttcatcgaacggatgaatgtgaaatacggaaaggatcttatcaaccagatcttcaaaatccggaaaagtacagacacagcttga

SEQ ID NO: 11856 - RNA, 948 nt, synthetic construct
  source 1..948: mol_type = other RNA
atgaaatattcactgccacagctgctacaggagaatattggccttcacccgagtcagtttgagagactgatccgtagggccccagacacttacaagcactacaccattaagaaaagaaccggcggtgatcgctggattgctcagcctgctaaagagactaagtatatccaacattggcttatagacaacatcttcctgaagttccccgtgcaccggtgcgctatggcctacaaggcaggaactagcatagccatcaacgccgcagctcattccaaaaatagctatctcgcaaagttcgactttagcaatttcttcaactccattaagtaccacaatgtcaatgacttccttagcttgctcctggaagacagcttctctcccgacgatatcgataacatggcaagggtttcctgtgtgagagagcctgatttcggtctatgcctgtccgtgggagcccctagctctcccttattgtctaacgcgattctctatgaatttgactcccgcatcgagtactggtgccaagaaagaagtataacatatacacgctatgctgatgacctgaccttttctacgaatgaaaaaggggcgtgttcagagattcataagttcttggtggattcactcatagactttgactgccctgtcctcaggttaaatgataaaaagaccatccattcctctaaacgtttccagaggcgggttacaggccttattatcaataacgatgggatggtatcactgggccgcgggcggaagcgagagattagtgcaatgatccacaaatttcggtgtaaagacctggccgaatcagagagctacagactccagggcttgctggggtttgccagggatgccgagccatcctttgtggaatctatgaacaagaagtacggaaacgagatcctgtcgagcatctacagtctgcgaaagcccaaagaaagttga

SEQ ID NO: 11857 - RNA, 957 nt, synthetic construct
  source 1..957: mol_type = other RNA
atgaactctaaattactgacccagatccgtgccgaactcggcttacctgtggcacagatagaacggttaatcgaaagagctccctacacatacaaagtttacaccatccccaaaaggtcaggaggggatagaacaatagcccagcccgccagggagacaaaactgattcagaagtggctcatcgagcatatcttctgtaccctgccgatccatgacgcagctgccgcttatagacctggcgcaagcatcaagaagaacgcagaacggcatgcgaattccaagtatatggtgaagctagattttaaggagttttttcccagcatcaagtaccaagatttggtgaatcacttttgtgtgcacttgtcagacgcctatgaagacgacgatattaagaggatggctcttatatcctgcctgcacattggtggcagggatttcgccctgtctattggttcccctgcctcgccttgcctgtccaatagtatcgtctacgagctcgataaaaaaattaagtcctggtgcaaggagaacaaggtggcctatactcggtacgcggatgacttgacgttctcaacgaatcgcccagatatctccagcgaggtggaaaagatggtcagtttgactctgaaggagattgagtacccacagctcaagctaaacaagaaaaaaagcatacacctctcaaaaaggcataaaagagttgtaactggggtcatcattaactctgaaaacaatctgagccttggccgggatcgcaagcgtgagatcagctctctgattcacaagtacagtattggactgctgtctaaaggcgacacatatcgaactcaaggactccttgggtttgctcgagacattgagccagacttcgtagcacgcctcaacaccaaatatgggaataagctgctggaagagatcttcaccctgcgcaaagctgaggaagaggacgacctttga

SEQ ID NO: 11858 - RNA, 948 nt, synthetic construct
  source 1..948: mol_type = other RNA
atgtcctccaagttgctgactcaaatcagggctggcacaggcctgccaattacgcaaatcgaacgacttatcgtgcgggcaccttacacctataagatctacacaatccccaaaaggagtggaggggagcgcattatcgcgcagccagctcgcgaaaccaaactgattcagaactggctggtcgagaatgcattcgggtctttacccatccacaaggcagccacagcctatagatctggggcctcaatcaaacataatgccgagatgcacgctaagtcacgctatatggtcaagctggacttcaagaacttcttccctagcatcacgtacaatgatctagtggctcactttagccgacacctcagcgaacagtatgaaatcgaggacattaaacggatggcaataatctcctgtttgaacattggaaggctagatcttgccctctcagtgggaagccctgcctctccctgcctctctaataccgtcatgtacgagctggataacattatacagaattggtgcgacgacaaacatataacttacacaagatatgccgacgatctgacattctccactaaccagaaggatatttcgaccgaggtggagataatgatagcttccagtattgctactgtgcagaacccacgtctttccatcaatagtgaaaaaactgtacacctgtcaaagaagtttaagagaatggtgaccggcgtggtaataaacagccagaataacatcagcctcggtcgcgaccggaaacgtgagatcagtgcccttattcataagttcagcattggcatcctgtctccggacgaagcatttagaacccagggtttactggggtttgcgaaggatattgagcccgactttgttgttaggatggataaaaaatacggcaatcaattgctggagcagatctttaagctccggaaagttaccgaaatttga

SEQ ID NO: 11859 - RNA, 966 nt, synthetic construct
  source 1..966: mol_type = other RNA
atgaagatagacctgtctcagcggctccaagaaagtctgggagtaagcagcgatcagctagcccgcttggtggccagggctccttatgcctacaaggtgtatgagatcaagaagcgtagtggtggcatgcggacaatcgcccaaccagcacgagaaacgaagtttattcagatttggctgatcgagaacatcttcaaagagctccccgtgcacgaaagcgctacagcatacggtaaaggctcctcaatcttgaaaaatgcagtggctcataaagacaatagatttatcgcgaagtttgatttcaggaatttcttcccgtcaattaaatacgaggaccttgtcgagcacttcactagacatttgtcgggtgtcgtgtcagacgcagacgtcaagatgatggctagaattgcctgcatgcgctcaaagaccaacggaaggatgcagctcagcatcggggcaccttcttctccaatcctgagtaactccattatgttcgaatttgacagccagatttccgcatggtgtgtcgagcaggggatagtatatacccggtatgccgatgatctggcttttagcaccgatgtgatcggggcgacagctaaaattgaacccattattcgccaagccctgagaggcatcaattaccctgctcttcagataaacaacaaaaaaaccgtgcagattagtaagaaattccagcggcgcgtgactggcctggttatcaataacgagggcgacatatccttagggagggaccgaaaaagggaaatctcctccctggttcacaagtttactctgggcggactggccgacgatgacattttccgtcttcaaggactactgggatttgccaaggatgtggagccacagttcatcgtcagattgtctgccaagtacacagcggagatcataaacgttatcttaaagctccggaagccccccaagctcaaatctgattttaattga

SEQ ID NO: 11860 - RNA, 951 nt, synthetic construct
  source 1..951: mol_type = other RNA
atgaacttaagtctaaaaatgcaggaggaattaggaattactggcgagcagtttaccaggctggtcgctagggccccctacgcatacaagatatacgagatcgacaaacgctcaggaggtactcggacaattgcacagccagccagggagacgaaattcgttcagagctggctgatcgagcatgtgttcggagcgctaccaatccacgagtgcgccaccgcctatggtaagggcgcttctattttgaagaacgtggatgcccataaagaaaatagcttcctggccaaatttgacttccgcaattttttcccatcgatcaagtatgatgacttgttgcttcactttagtattcacttatctaacatcgcctccgtggaggatgtgaagatgatggctagaatcgcttgtatgagatcaaaagctagcggccaactgcagctttccattggtgccccgtcttctcctatcatcagcaacagtgtcatgtttgaattcgactgtcgagttgcggcttggtgcgcagaacaaagaatagtgtataccagatacgctgatgatctcgcgttttccactaacgtaaaaggggcaacggtaaaaattgagcccataattcgtaaagtgctgcgtgaaatcccctaccccctcctccagctgaataacaagaagaccatacatgtttccaagaagtatcaacgccggatcacagggctggtcataaataatgcagacgaagtctcactggggagggagcggaagcgggaaattggggccctggttcacaagtccaccctcggcctgttgaatgacgatgacgtctttcgactccagggcctgcttggattcgctaaagacgtggagcctcagttcgtgatccgcctcagagccaagtacacatgcgaagtgatcgatgcaattcttcagctgaggaagcctagcaaagccaagtcatga

SEQ ID NO: 11861 - RNA, 981 nt, synthetic construct
  source 1..981: mol_type = other RNA
atgtccatcctggaaggactcgcaatggcttcttcaatattcagccggatgcaagaggcttacgctctctcagacgaacagctgaatctgcttgtgaagagaagtccccactcttacaaggtatacagtatcccaaagaagagtgggggcaataggcagatcgcccagcctgccaaggagactaagtacctacagtattggttgattgaaaacgtcttttccctgctccccgtacacgaatgtgcctccgcctaccataagggggcctcagtgaagagcaacgcagccgcgcactcaaaaaaccagtatctatccaagtttgacttccgcaacttttttccctcgatcgttttttctgacctcgtgcggcattttgagaaacatctgaatgatcatgtgcaagccgccgacattctgctcatcgcacggcttgcgtgcatcagaccaaaaggaacgagcaatttgtgtctgtctataggtgcaccgtccagtcctatactcagtaactccattatgtacgagttcgatgaaaggattagcgggtggtgcaaggatcacggcattgtgtatacaagatatgctgacgacttagccttttccaccaacataaaaagcatttcttacgcggtcgagaaggagctgagggaggtgctggcaggtctgcaatatccaaaattagttttgcatgctgagaagaccatccacgtttccaaaaaatatcagcgtaaaatcacaggcgtcgtgatcaataaccagaatgcattaagcattggccgagaaaagaaaaggatcgtctcgtcactcatccaccgattcgctcttaatggactgagcgatgccgatatttctcgggctcaaggccttctggggttcgcccacgatgtggaacctttgttcgtggtcagaatgcgccagaagtacggattccgtgtgattgaccagctgctgagcttccgcgttcagtctgaggagaaaaaatga

SEQ ID NO: 11862 - RNA, 942 nt, synthetic construct
  source 1..942: mol_type = other RNA
atgtctactaacctaagacgcgaaatcactggctccttagggatctcagacttgcagatcaatagaataatcacacgcagcccctatgcgtacaagacctatagtattaacaagaagtcaggcggaaaacggataatttcccagcccgctaaagaaactaaattcattcaacgatggctagtcgaaaacgtgttttcaaagcttccaatccatcagtccgtaacggcctatagagcaggttctagcattaaaaagaatgcctctattcacaagaacaacaagtatttcgccaagttcgatttcaaagatttctttacctccattcgatccgatgacttaatagcacatctgaataagtacctcagcgacaaatactcatacgaggagattatggatattgctaggatcagttgtaagaagaataaaaggagtggaaagctgtttcttaccatcggagccccttcttccccaatcatcagcaacacagtgttgttcgacttcgacacactgctctactcttggtgctgccagaataacattacgtatacacgttatgctgatgatttgaccttttccactaacgagaaggagagcaccaaaaacatagaaaagaatatacggtcgatcatccgggccattgagtacccgcggctgattatcaatagcaagaaaaccgttcacctctctaagaaatctcagatcagaatcaccggtctgatcatcgacaataacaaaaacgtctcaattgggaggaaacgtaaacgcgaaatttcgagcctgatacacagcttctcactcggcgcactgcccaatgacgaggtgtacaggctccagggcctgcttgggtttgctaacgattccgaacctcaatttctggagagaatgcgcagtaaatacagcagtgagaagattgacaatatcctgaagatcaggaagcagtga

SEQ ID NO: 11863 - RNA, 945 nt, synthetic construct
  source 1..945: mol_type = other RNA
atggatgaatcccgatttaggcagttactcaaagacgagttgtctatctctttctctgaatccgcacggcttattgctagggctccgcatgcctataaggtttaccgtataaagaaagtgggcggagggtatagggaaattagccagcctgcaaaggagactaaatttgttatgcactggcttgtgggaagattttttgagaaactgcctgtgcacgaatgcgccaccgcgtatagctccggctcaagtatcaagaagaatgctatcattcacgccgagaaaagttacatcgcaaaattcgatttcaaggattttttcccctcaataactaagttcgacgtcgagaaacatctcggctgctttaacagggaggaacttgacggcaaaagcctgtcggagatagccagactgtgcacagtggcgaaagggggatcagataatttgtgtttatctatcgggagccccgctagtccagttctctccaattctatcatgtacgccttcgacaggcgcatttatgagtggtgttgtgacaattccgtggtatatagcagatacgcagatgacctgaccttttccaccaacgtgaagggtctaagcttcgaactgccagagctggtccgcacagtattggacggtatcgagtacccatcaatcagcctcaacaacgagaagacggtcttcgcctcgaaaaagggccaccggcgggtgacaggtctagtgctgtcaaaccccggcaaagtgtctctgggccgaaagcgcaaacgcgagattagtgccctcatccataagtttagtgtgggagctctttccaaggaagacctgctgcggttacaaggattgctggggttcgtcaaagatgtggaacctctgttcgtcgaaaagatgatttccaagtacgggtacagagttattgtaaagatcctcagctttcgtaaggattga

SEQ ID NO: 11864 - RNA, 939 nt, synthetic construct
  source 1..939: mol_type = other RNA
atggatgaatccaaattcaggagactgcttaaagaggagctcagtatctcttacagcgagagtgccaggcttatcgccagagccccccatgcctacaagaaatacaggatcaagaaggcagatggaggcttcagggagattagccaacccgctaaggagacaaaatttgtaatgcactgggtgattgaccgcttcctgaaaccactacctgtgcatgagtcggccgctgcctatcggaagggtgcatccgttaaaaagaacgccgcgatgcacagtagcaatagctacctggccaagtttgacttcaagaactttttcccctcaattaagatttctgacatcgaacgtcatttagcattacatggcgacagaggtcttgacgagagatcagtaagcgagatcgcccgattgtgcacgatagctcacatggaggggaaatgtctgtccatcgggtccccggcgtccccattcctgtctaatagtatcatgtacgacttcgacgaaaaagtgagccgctggtgcgcggaaaatgctctgacctatacacgttatgcagatgatctcaccttctcaactaacgttaaaaacctctcctttgaggtgcagggcttcctgattgaggtcatacagagcctggagtatcctgcaattgaactgaatgaaaacaagaccgtctacgctagcaaaaaggggcaccgccgggtgactggagtcgttctctctaatgccggcaatgtgtctctaggcagggaacggaagcgggaaatttctagtctgttgcacaagtttcgcataggagagttgtcccgcgaagaagtctataggctccagggtctgcttgggtttgctaacgatgtcgaacctgtgtttgtggagcgaatgcgaaaaaagtacggacacgatttgctctggcggatcatgtcactgtcaagagagtga

SEQ ID NO: 11865 - RNA, 948 nt, synthetic construct
  source 1..948: mol_type = other RNA
atggatgaaaccgtctttcagtcacttctgcagaaggagctggccatatccacttcagaatcaggacggctaattgcccgggccccctatgcgtataaaacctacagtatcaagaaggctaatggcggtcgcagaaccatcagccagcctgcaaaggagacgaagtttgtgatgaggtggctggtggatcgaatcttttcaaagcttccaatacacgagtgtgcatccgcataccagaagggaagtagcatcaagagaaacgccatcacacactctaacaatggatacatcgccaaattcgacttcaaagattttttcccctccatcaaacgtgaagatatcgagacacatctctaccagtatttacctaaggacctggaactggatagaaaaagcattagccaaattgctagattgtgcaccatatcaactggtggaggtaggctggccctatctgtaggctctccggcaagtcccgctctttctaattccatcatgttcgactttgatactattatcgccaattggtgcttctcgaattccatattctacacgcgctatgcggacgacctcacatttagcacaaatcgaaagggcttgtccttcctgattctggaacagattcacaacaccttgagcgaagtcaactaccctcaactgagcataaacgacaggaaaactgtttactccagtaaaaaaggacatcgccgtgtgaccggggttgtgattaacaataacgggaagctgtcgttaggccgcgagagaaagaggaaaatcagcagtatggtgcacaagtcttgtctcggcgtcctctctgatgacgagacacggcatcttcaggggctcctgggctttgctaaagacgtggagccattgttcatcattcggctcaagaacaaatatgggaagagggctatccaggagatcttcaattcccaaattatttga

SEQ ID NO: 11866 - RNA, 960 nt, synthetic construct
  source 1..960: mol_type = other RNA
atgacgctccaagaatttctgcttaagatatcaagcgccctcgcaatttctaacagcgaacttctccatttaatagctaaagccccgtacagttacaagtcttacaaaatcaagaagaagtccgggggagatcgggtgatcagtcagcccgctaaagagatcaaatatctccagaacatcataatggaggccttcctgaataaattgcctatccatgagtgcgccacagcctacaaaaagggcggctccataaagaaaaatgcagcagctcacacatccaacacatacatcagtaaattcgaccttaaggatttcttcggatctataaaggccaacgacgttagtcaacacctggagaaacacctcaatggagatttacccccagcttcatatcagctgatcgcgcgaatttgttgcatcaaacataaaggtctagaagaactgtgcttatctatcggtgcaccctcatctccactgctctccaattccattatgtacgaaattgatcagaagattagccagtggtgtcgtgagaatcaggtaacctatacaagatatgccgacgacctgactttttcaagcaacatcaagggaatcagctttgaaatcgaaggtctgctgagcgacattctttctacttcgcaatcccctagattgaagattaacgagaagaaaaccatccacgtgagtaagaaaggcaccaggagagtgactggcatcataattaccaacgacaataagatgtcactcgggcgcgagagaaaacggctgatttccgccatgatccaccggaatctggtccagaggctggaggagaaagatattgagaggctgcaggggcttctggggttggcgaaggacattgaacctattttttgtgccaggatgcgcaagaagtatggcgctgcagctatcagcgagattctacagtaccgacgcgaggaattgaaggaggattga

SEQ ID NO: 11867 - RNA, 960 nt, synthetic construct
  source 1..960: mol_type = other RNA
atgacttttcaggagttcctgctgaacatttcttccgcactggcaattagcgactcagagcttttgcatttagtggctaaagctccctattcatacaagtcctataagatcaagaagaaaacgggaggtgaccgagtcatttcccagccggcaaaagagatcaagtacatccaacacgtattgattgagttcttcctaaacaagcttccaatacacgagagcgccactgcctataagaaaggcggctccataaaaagcaatgcggcagcgcaccgtgagaacacttacattagcaagttcgactttaaagacttcttcagctctatcaaggccgccgacatctcactgcacctcgaaaagcacctcggggatgatctgccacccgagtcctaccagcttataagtaggacatgttgtatccgacataagggcgccgaagaactgtgcctgtccattggagccccctcgagccctctgctgtcgaatactatcatgtatgaacttgaccagaaaatatctgaatggtgccaagaaaatcaagtcatttacacccggtacgccgatgacttaacgttttctagcaatatcaagggcaaatcttttgaaatagagaatgtgctgagaagcattctcagtgccacccctagtcccaaactgagtattaacaacaagaagacaatccatgtgtcaaaaaaagggacaaggcgggttaccgggctcatcatcacaaatgatgataagatttccctcggtagagagaaaaagcggctcatttcttccatgatccatagaaacctgacccagggattgaagtcaaaagatatcgagaagttacagggcttgctagggctcgctaaggacatagagcccattttttgctctaggatgcgcaaaaaatacggagctgctaccatcagtgaaatcctgcagtatcgccgcgaggagccagaagaagattga

SEQ ID NO: 11868 - RNA, 951 nt, synthetic construct
  source 1..951: mol_type = other RNA
atgtctcatcacgatttcttgcatgatattgcatcaacactgacgctgagcctccaagagttggtataccttatcgcaaaagctccccacagctacaaggtctaccggattgaaaagaagactggaggaaagaggatcatcgcccagcctgcaagacagatcaagtatctgcagcgggccctaatacacagcgtttttaaagagctcccaattcattcttgtgccacagcctatgctcacggctcaagcatcaaaaaaaatgcggagccccacaaaaacaacaagtttatctccaaattcgacattagtgatttcttcggcagtattaaggagcacgaccttataaaacacttcaaccgtcatttggccgaaaatattaacccggactactttagatacatcgccagatcctgttgcataaattataagggaacccaggagctggttctctctgtgggggctccttcctctccaattctgtcaaacagcatcatgcacgagtttgactgcatcattcacgattggtgcacctcaaaaaatatcacctacacacgatacgcagacgacttaacgtttagttcgaacactaagggcgtcagtttcgaaattgaaaaagccatcaccgaggcactgaatagtctggactatcccaccctgaaattaaatactaagaagaccttccatgcctccaaaaagagccaacgcaggattacaggcctcattatctccaatgagggtaaaatctctctcggccgcgacaggaagcgaactatttccgctatgatccataaattcagcaacggagcgctgcctgaagaagatataccaaagctacaggggatgcttgggttcgccgaggatgtggaacccgtgttttcctctaggatgcgggctaagtatggtgtgaaggctatctcagagatatttcagtatcgcaaacagaagaagtga

SEQ ID NO: 11869 - RNA, 945 nt, synthetic construct
  source 1..945: mol_type = other RNA
atgaagcaggagagccctattatagccgccctctgttcggagctcgggtttagttctaaccagctgatgcgcctgatcgctcgggcaccccatacctataagacttacaaaatccctaagaagacttccggatttaggacgatcgctcagccagctcgcgagacaaaaattctgcagaattggctgatccacaacgttttcaaggatctgcccgtctctgaaagcgcatccgcctacaagaagggagcgagtattaaaaaaaacgcgtctcaccataaagactccagctacctcctgaagatggactttaaaaacttcttcgaatcaatcgacatcgagatgatcaaaaatcacctcatctcatgcttagacgtgtcacgattagatgctagtgccatagcccgtatatgctccattgacacacaatccagcccaaaccatcacctgagtatcggcgccccatcttcacctattctatcgaacagcttccttttcaatttcgacttggaagcagagcaatggtgcaaggaaaacaactgtatatacactcggtatgcagacgatattttcgtttccacaaatgccaagagcaaaacaaaagaggcagaacagttgattgaaaagttggtcaatgagctgctgccgggccttaagttaaatcacaagaaaaccaagcatctgtcaaagaaattcaatagaaccatcaccggacttgtgatctctaacgataatgaagtgaccctgggtagagataggaaaagggaggtgcggaagagtgtgttcctctatactaaagggctgctcgaacatgagcaggtcgagaaacttcagggtaccttgagctttgccaagcacattgatcccgtatttctgtctagcctacaagagaagtttgggtccgacatcattggcgagatatttaacgctcgaagaaaaacgaagtga

SEQ ID NO: 11870 - RNA, 936 nt, synthetic construct
  source 1..936: mol_type = other RNA
atgaccactactcctagtttcctgtctaaactcgctaaggcctataagctgactgaaaccgacataaagaggctcgtggctcgggcacctcatacatacaaaacctacgaaatcccaaagaagagcgggggtaagcgcacaattgcccaacctgccaaggagacgaagataatccaaaattggttgattaagacggagtttaaaggcctgccagtatctaactccgcgtcggcctataagcccggcagtagcattaaaatcaatgcactgaaacaccggaagaacagatacttgctcaagatggatttcaagaacttcttcgagagtatcgacgaaacaatggtcaaagagcacttattcaagtacttacagattcccgagtcagacgcagctactatttccagggtttgttgcttccagaagaaacactcaaaaaagctgagcttgtctattggagccccctcttcccccatactgagtaactccattatgtacgagtttgacgccgaaatcgaaaattggtgccgcctgaatgcggccatctatacacggtatgctgatgatctgttcataagcaccaatcaatcaggcagaacagcagatgctgagcagtttatcctgactctgaccaaagagctcttgccgaaactcgacatcaataagaacaagacaaaacacctgagcaaaaagtgtaaccgaaccatcactggacttgtgatcaccaacgaaggcggagtgtccctagggcgtgacaaaaagcgaaatatcaggaaatcactgtttctccatcagaaaggacttttagacaaaaagcagctgagcacccttcagggggagcttggtttcgcaaaacatatcgatccagactttattaccacgctaaatgataagtttggcaaccagttcattcacgccatatttacacatagagaatga

SEQ ID NO: 11871 - RNA, 945 nt, synthetic construct
  source 1..945: mol_type = other RNA
atgaaatctaagctcagggagattatcaaaaagaagtttgccctctccgatgctgaagtcgccatcttgatctctcgagcaccagtctcttacaagtcctataagatcaagaagaagaacgggggacatagaaagattcatcaacccgcacgcgaaataaaggctctgcagagatggatcctggatgctgtattcagtaagttaaaggttcatcctagcagtacagcttacgaaccagggtccagcattaaagagaatgcaaagcggcacctcgacaactcttatttcatcaagcttgacttcaaggatttctttcacagcattaaatctgaggacatcattcagttcctcacggataagggtatcaagctgaataaccgtgacttgtccgacctggtgcgaatcctgtgtatcaaagacggcgagagcctatgcttatcaatcggcgccccctcaagtccgaaggtgagtaacgtgattctgtatgattttgacgaggccgtcactaattggtgcagcgaaaatgaagtaacttacacaaggtatgcggatgatcttacattttccaccaaacgcaaggggatcggacacctgatagagaagcaagtgttggagattatttccgagattcagtaccctaaaattgagctgaaccttagcaaaagagtgtctgtgtcgaagaaggattgggttagcataaccggcctaaccataactacccagaactccatctcagtggggaggaagcggaaacggtttgtcaaaagcctcatatacaaacacctgtcagacggccttcaggaaaaaaaactgggtgaactgaatggcctgatctcatttatcgaaaatattgagcccggtttcaaagacaaaatgctggagaaatacggagatgttcctggattgaacctcaaaaaggccaaagacgaggtgagtgacttatga

SEQ ID NO: 11872 - RNA, 945 nt, synthetic construct
  source 1..945: mol_type = other RNA
atggaaaataagctgcgcgagatcattaaaaaacaatttgcactgtcggacactgaagtcgccatccttatatccagggcaccagtgagttataaggggtacaggattaagaagaaaaatggaggacacagaaagatacatcagccagcccgggaaatcaaagccttacagcggtgggctttggatgcagtttttagcaagcttaaagtccatccttcaagtaccgcctatgaacctgggtccagcattaaagagaacgcgaacagacacgtgaacaacgactattttattaagctggacttcaaggactttttccactctatcaagtctgaagacatcgttcagtttctcagtgataagggcatcaaactcaacagcaaggatctgaccgatctcgtgcgaatcttatgtatcaagcatgaggacagcctttgcctttccattggcgctccttctagccccaaagtgtctaatgtgatactgtatgacttcgatgaaaaggtcacatcatggtgtaatgagaacaacgtaacgtacacccgttacgctgacgacttgacattttccaccaaacaaaaaaacatgggtcacctcatcgaggagcggatcctgaagattatctacgatatgaattaccccaagctggagctcaatatctccaaacgagtgagcgtttctaagaaagattgggtcagtattacaggggtgaccatcacttgccagaagactctgagcgtgggtcgcagaagaaagcgcttcgtaaagtcaatgatatataagcacatgtcggagggcctaaaacagcataacctgtcagaactaaatggcctgattgccttcatagaacacattgagcccggcttcaaaaggaaaatgattgagaagtacggaaatgtggctggattgaacctgaaaaaggagtccgacgaagatccggagatctga

SEQ ID NO: 11873 - RNA, 930 nt, synthetic construct
  source 1..930: mol_type = other RNA
atgagtgaaagtaaactgcgccaactgatctcttcatctttattcatccctgagaaagacctcagcctattcattgcaagggcgcccgtcgcatacaagagtttctttatagccaaaaaggatggagggttcagaaaaataaaccagccggcgaaggagacaaaaaaactgcagaggtgggttatagagaaggtcttctcacacctggacatccatgattgcgcaatggcctatagagctaaagtgagcataaaagacaacgctctcgtgcactccaataacaagtacttcctaaagctggacttcgaaaactttttcggaagcatcaaatccgaggacatacagaatttccttcacgacaagaaaatcaagctggatgatgatgatgtgagggacttggccagaattttatgtattaaggacgagggcaagctttgcctttccgtaggtgctccatcctcgcccgctgtctctaatgctatcctgtacgcctttgacgaggagatctccttttggtgccttgaacgcaagatcgcatatactcgatatgccgacgatttgaccttttctaccaaagaacaagaagcctgttacagcatcaaggagaaagtgaagtctatcttggaatctatggcctatcctcggctgaagctcaacgaaagcaagaccctcagtctctcaaagaagaataatattaaggtgacaggcattacggtaacttccgataacaagattagcattgggcgaaaacggaagaggtttatcagatcacaggtgtacaaatacaaaaaaggagagttgaagccctcaagtgttcctcgtctgcgcggcctgattgccttttttgaacatatcgagccaggggcaattagcaaactcgagatgaagttcggcaaagagctgatggttcgggtcgtgaagggttcctga

SEQ ID NO: 11874 - RNA, 981 nt, synthetic construct
  source 1..981: mol_type = other RNA
atgcatatcctggagaggatttcccatgacctcctagtgccccaaagcttgcttgaagatgccctcagaagggcccatgttcggttccggaagatcaagatacctaaaagaagtggcggtgagagagtgctgctgcagcccgctgccgagctgaaattaattctctcatgggccgactcctacgtgctgcgcaaggctcccgtgagcaatgtcgccacagcctttgagccagggacctctatcgtgcgcaacgcccagatccatagtaaaagcgattatagcgtcagagtggacttgtctaatttctttcctagtatcaggagccacgacttgcttagggctttgagcaaggcacgacagcactttcccgaatgggtgttcgaaagggatttcgaagacatgctgagaaaagcatgctttgatagagccgattccctcccggtagggtacatgacgtcaccaaggatcgctaacatcgtcatgctggacgtggacactaccctgcagactaccatatcatccaatcctgaacgcttcggacgcgcttacatcactaggtacgctgatgacttcgtcttttctactaatcggaagggagcatgtaacgagtttgtagaggagttacgtacactgctcgcaagccgaccgtcgccaaagctcgctataaatgaagcgaaaacccggtttatgtcacgcaagggcggcacaacgctgattaccggactacgggttaacaatgatggggacgttggggtccacgcaaactatagagatcacattcgactgcttctgaagctgttcgccacaggccggttagagcaggcggaaaacgagtccttgcgtggacacctcgctttcattgaacacgccgacccaagtcttttcacacgcctgtcctatcgttatcacgccgagattgccaagttacgaggccatgcgggtctgaccgcactccctgcaccccaaaaactttcttcttga

SEQ ID NO: 11875 - RNA, 957 nt, synthetic construct
  source 1..957: mol_type = other RNA
atgaacatagtggaaaggatgtccaatgaactcagtgttccccagtccttgctggagagcgcactgctgcttgcccacgtgcgatttcgcaagattaaggtaccaaaacggtctggaggtgaacgcgttatgatccaaccggccagtgagctgaagttggtcctgagttggctggacagtcgagtattgtccaacgcccctgtgagcccaatcgcaaccgcatttgagcccggcacatctatcgtgaagaatgccagaactcactcaaagtccctttattccgtgcgcatcgatctgtcaaacttcttcccaagcattcgcagccgtgatctcttattggccttatcaaggtcgagagaactcctgcctgagtgggcctcaggaggagattttgagacgttggtgagaaatgcctgtttcgatcgggctgacaggcttccagtcgggtacatgacttctcccagaatagctaatatcgtgatgctcgagctagacacagccctggcgacggctgtgagtagggacactgtccggtttgggcaggcggtgctcacacgttacgctgacgattttgttttctctactgacaaaaagggcgcttgcaacgaattccttagcgagatgcgttcccttctcgcgagcacacccagccctaagctgtctattaacgaagcaaagaccaggtttatgtctagaaaagggggcaccaccttaataaccggactgcgggtcaataatgacggtgacgtcggtatccatgcaaactaccgggatcacatcaggatgctgctaaagctgtttagcaccgggcggctcaaacctgcagagaacgagaaactgcgcggccatctggccttcattgagcacgctgaccccgatctgttcacacgcctctcattccgatatcacgctgaaattgccaaactaagaggccatccttccctgaatccggcctga

SEQ ID NO: 11876 - RNA, 921 nt, synthetic construct
  source 1..921: mol_type = other RNA
atgctcgatgacgcaatccaggcggcctacttcaggtttaagaagtttaccataaagaagcgatcaggcgaggatcggcacctgattcagccagccgcggaactgaaactcgtaattgcttggctggacgctgtcgtcctttccaagctgcctgtgtccgaccttgctactgcattccaaccaggtacttctatcgttatgaatgccgaggcacatcgaaagtcggcctattcagtccgcttggacgtcagtggctttttcccgtctatcaggtcaaaggacctgattcgcgccataaatgacgctaaaccccgttttgaggagtgggtgtttacccccgcattcgaacaactcgtgcgcaaggcttgttttgaccggagcgataggctgccggttggctatcccagctcccctcgaatcgcgaacgccgtgatgtatgaactggatatgcggttaaaccagctcattgcagccgctcctgaaagattcggacaggccgtgcttacacgttacgccgacgattttgtgttctccaccgataaacagggagcttgccggacattcgcagatgagcttcagacaattttagccagatgcgccagccctaaattgagtataaacgtcgcaaagacacgctacatgagtaggaaagggggctctactttaatcaccggtctacgcgtaaatatggacgggaaagtgggcgtgcatgctaactacagagatcacatccggctgctcttgaaattgttctctgtgggaaagctagactttgaagagcatgagaaactcagagggcacctggcctttattgaacacgccgatccaaggctgttcacgaagctgagcttcaaatattacaaggagatcgccagcctgagaatgaaaaaggctgttcccgaacaggagtccccacaatga

SEQ ID NO: 11877 - RNA, 954 nt, synthetic construct
  source 1..954: mol_type = other RNA
atgacagacttccctgccctcatcggcgagaagactaacgtccccacagagatcatcaaatccgccgtggatttggcgcacatacggttccggaagattaaagtgaaaaagcgatcagggggtgagaggatcattatccagcctgccgccgagctaaagctggtgctggcttggctcaataacgaagtcataagcaagcttcccatttctccgatagcaacggcctttcgaaaagatgcttccatcctgaagaatgcctcggaacacaaggccagcttgtacagtatcagggtcgatatcaaggagtttttcccatctattcgcagcagtgacctggtgctcgcaattaagagctctccaattgaacttcctcctttcaccgccgaggcaggctttttcgactttatccaacgttgctgtttcgaccgcgatggacggctgccaatcgggtatcccacatctccagccatcgctaacgcagtgatgcggaacatcgatgtagcactgctgaataaaattaacattgaccccaccaagtttgggcaggcgaggctgactcggtacgctgacgatttcgtcttctcctccgacaaacctggtgcttgccgatcatttcttgatactttgcaggagacgctcattagaactacctccccacgtctggcaataaatagtaaaaaaacccgcttcatgtcacgccgtggaggcagcacattagtgacaggactaagaattaatcaggacggattagtaagagtgcatcccaaatatagggaccatgttaggctcctgttaaagcattttgctaacggctcaataagcgccgacgatgttccgcgccttgttgggcacttggctttcgttcaacacgccgatcccaggctgttcaccagactcagttttagatactttgaggaaatcgcgagactgcggggcaagcaggaaaatacctga

SEQ ID NO: 11878 - RNA, 942 nt, synthetic construct
  source 1..942: mol_type = other RNA
atgacaaatttccctgtgctcattgccgatcagatgaaggtcccagttgtgttagtagaggacgcccttaagctggcattcatacggtatagaaaaatccgtgtccccaagaggtccggcggttaccgcacaatcatacagccggcagcggagctgaagctagtgcaggcctggctgaacgagaaaattttcaaacacctgccccttagcagtgttgcaaccgcgttcagacccggcgctagcatcacaaacaacgctgctatccacaggaactccttgtactccgtgcgcgtagatatcaaggacttctttccatctataaggagtgtggacctcattcgcatcgtgcggagcaaccgatcggctcttcctccatttgtgatggagacggggtttacgaatttggttcgccaggcctgtttcgatcgagaggggagactgcctatcggataccccacttccccttctattgccaacgccgtgatgcaccaaaccgacaagatgcttattaatgaaatcaccagcgatgtcagcatctttggcaacactcaattaacacgttacgccgacgactttgttttttcaaccgacaaaagtggggcttgccatgagtttgtgcgcaaattggagagactcctctcaacactcgaatctccgcggctgaaactcaatacttccaaaaccaagttcatgtcaaggcgggggggaagtactcttgtcaccggtctgaggataaatcaggaaggactggtcagagtccatgcaaattatagggatcacgtacgcttgctgctgaagcacttcgcagccggctctctccagtcagacgatgtgattcgactggtgggccatctagcctttgttgaacatgcggatccaaggctgttcactagactgagcttcagatattttgaagagattgctcggctgcggggaaagtga

SEQ ID NO: 11879 - RNA, 951 nt, synthetic construct
  source 1..951: mol_type = other RNA
atggatagcatcgtgtcaaaaattagcggagatctgaaaatacccattgccactctggagattgctattaggctcgcaaagactaggtgtaggaaattctctatcttgaagaagaatggcgacacccggcaaatcatccaaccttcagtgaaagtcaaacccatcctgtcctggctcagccttaatgtcctgaactccttaccagtacacgacgcggctacagcctttcgaagggggaagtctatactcgataatacttctaagcacaaagaggccgactactctgttcgattagacctgaaggattttttccctagcatcaagccagaggacttgtggagagtgatgctcgacagtcgccacttgatacccgaatggtcgattaaggaagacgcgttttggcttattagtaacgtatgctttgaccagaacaaccagcttcccatcgggtattctacgagtcctgctatagccaatgctgtgatgcatcggattgataccacgctggccaacgccgtgatggacgactcacgtttcggagcagccacagtgactcgctacgccgatgatttcgttttttccacaaataagcggggggcatgcaagaacttctcagatcttctgcatgatgtcatcaaaaccacaaacagcccaagcctccagattaatgaaaacaagacacgctatatgtcccgtgcgggaggcagtaccattatcaccggtctgagagtcaataatctgggcgccgtcgttgttcacggtaactaccgcgaccacgtgcggctgctcttaaagctgtttgactccggcagactggcattggatcaggtgccgcagctggcaggccatcttgcttatatcgaacacgtggatcctgctctattcaccaaactgagcttcaaacattacaagaggatcgaggagatcagatccctaagactcgtggagtga

SEQ ID NO: 11880 - RNA, 936 nt, synthetic construct
  source 1..936: mol_type = other RNA
atgctcgctaaaattagcgatgacctcaacataccaaggccgcttctggaaaatgctttggccttagccgcgacacggttccgtaagatcacattcaaacggagatctggcccacctagagtggcctaccagcctgcggttgaactgaagcccatccttgagtggttggacatcaccctgataagcaagctgcccgtcagccgcatcgcaacagctttctgcgcaggttcatctatagttcagaacgctcaagtacaccgagactccctgttttcaattagggtcgatatctcgaacttcttcccaagcattaccagttctgaccttgtgactgctatcgaagcaacttctcacctgccagaatggagcaatgcaccgactaccctcagggtgctgaaacaggcctgttttgatatcaacgaccgactccctattggatattccacgagtcccaggatcgcgaatgccgtgatgttctccctggataacctgttgatccaagctattagcgatgagcggcgatttggtaactccctacttactcgttacgctgacgactatttattttcaaccaatcagcgcggggcatgcgcagagttcctgaaggagatcagaaaaattctcaatagtgtccagttccctaaactgcagataaataacgagaagactagattcatgtcccgcgccggcggatccaccttaatcaccggactcagaataaagcagacgggcgagattggggtgcatgcccattatcgggatcacgtacgcttgctaatcaagctgtacgccgccaataggctgcgggccgaagagtttgatagccttcgcgggcacctcgcctttgtggaatacgctgaccccaaactgtttacacacctgtcattccatttttctgacgagattacaaggattagatcgaccgatagtttgtga

SEQ ID NO: 11881 - RNA, 939 nt, synthetic construct
  source 1..939: mol_type = other RNA
atgagcaacattatcgacttaattgcagatgatctacagctgccaaaaaccttagtcaaatctgcggtcgatttcgctcgatccaataaccgcaagataatcttccccaagaaaactgggggcaaacggactgccctgcagcctagcgtagagagtaagcctattatgcattggctacggctgaagctgattgaattgttgccgattcacatgatcgcaacgggattcagagctaatcactctatcctcacaaatgcggatcgacacagacaatctgcatacagtgttcggatcgacattgaaaacttcttcgagtcaatctcctttaacgactttaagaaaacacttgaatcgaataaggccaccctgccaagttgggccctggaggaagccactctgtcactggtcgagaagatctgtttcgatcgcgacggcaggcttccaatagggtaccccacttcccccggcattgccaacgccactatgtttgagatcgactctgccctcgaatcccttatcctggatacaaccacattcgggcaggctatagtgtcccgctatgcagatgacttcaccttttctaccgaccttagaggaagttgcagggcttttcttgaaaagttggagctcctgctggcttcacagaccagccctaccctgaggatcaacgccaaaaaaacacggtttatgtccaggggcggtggaagcacgttggtgactggtttacgtataaataattgcggggtggttgtggtgcatccagagtatcgcgaccacatcagattgctcctcaagctgtactcacgcaataccctcaagcaggaagatattcccaggctcctaggacatctggcacacattcaaaacgtggaccctggctttttcacaaaactgagctatcgttaccatgaggagataagccggatcagaaaaaagtga

SEQ ID NO: 11882 - RNA, 939 nt, synthetic construct
  source 1..939: mol_type = other RNA
atggacgatattttagaactaatggcagcagatcttagcctgagcaaaactacacttaagtccaccatcttctccacaaagcggaaatatcgcaaattctcaatcgaaaaagcttctgggggtcaacgagttattcaccagccgagcattgagcttaaacccatcttgtactggatccagatcaatatactcgataaactgcccgtccacaaaatctcaaccgcctttaaaaagggcagtagcatcttgaacaacgcctcattacatcaggaatcactctattccattagagtagacattgacaatttcttcaacagtatacaaccccaagacttgattagcgcgatccgggaaaatcaggcaaacctgccagagtggactaaagatgggtacgtggatgagctggtgacactgtcctgcttcatttcgagatcctacctgcctatcggatacctgacgtctcctcagatcgccaacagtgtcatgtttaagattgacagcctgctcgacgaggaattttctaatgaaggcaagtacggcgtggccaaaatttctaggtatgcagatgacttcatcttttccaccgacaagaagggggcctgtaaggacgcgctggaaaagttgaaaagtataatcgaagagtcgaaacacccaaatcttgctataaacaagaagaagaccacttacatgtctcgaccaggaggctctgctagggtgaccgggctccgtatcaataatcagggaaagattatagtgcatgcctgctatcgcgatcatgtgaggctcttactgaagctgtataaggagaatcggctgaacgaggagggtggaaaggagaaactagtcggtcacctggctcatattcagaacgttgatcctggcctctttacaaaactttgtctgaagtactccagcgagatccacgagctcagaaagtga

SEQ ID NO: 11883 - RNA, 939 nt, synthetic construct
  source 1..939: mol_type = other RNA
atgtcctctctagctacacttgctgctgccgagtgctgtgtgccagagtcttgggtgaacgatgtggtcagacagggaccgtcccgcgtaaagacgttgcggatcgaaaagagtacgcccggaaaatttcggatcatctctagacccagtgcagagctggaaatcttacagcggtggttggttttgcgctttttcgaaaaaatggaggttcacgacagcgctatggcattccgacgtggccgctcaatccttactaacgcccaggcccatgctaagtcaaggtttttcgtgagagtggacttctccaatttctttccatcaatcagatatgcggatttcagcttcgctctcggaaaatcaaagaaccttgggtattttttctcagagtatgcagatgcaggcaattttatccaaaggatatgcttcgattcgaacctgaggctgcccattggttatataagctctcctacaatttccaatgcagtgatgtttgaatttgatgtaagaatggaaggtatggtcgcggccaacggcggggatcttggcaatgccaaggttacacggtacgcggacgacatagtgttcagcaccgacaagaagggcggctgcgcaaaatttgtcgagctgctgcgtgagctggtgaagacctgggcctccccactcttgagtattaatgagaataagaccatcttcagttccagctctggtgggagtgccattgtcactgggctgcgggtctgtagcgatagccacattaccataacaagggaatacaaagacaaaatcaggctaatgctgtctctccacgccaagaaatgcctgcgccctgaggacctccctaaactgaagggacatctcaactacattcgatacgttgctcccgcctttttcagcactctgtgtgccaaatacacctccgtgatcgacaagttaatttga

SEQ ID NO: 11884 - RNA, 939 nt, synthetic construct
  source 1..939: mol_type = other RNA
atgccatccatcgttaccctggcggccgctgaatgctgtgttcaggaatcctgggttaacgacgtggtgaggcaaggtccatctagagtgaaaaccttgagaatcaagaaaagtacaccaggcaaattccgggtgatttcccgtccctctgccgagctggaaatcctccagaggtggcttgtgctgaggtttttcgagaaaatggagatccatgagagcgccatggcctttagaaggggacggagcatcttaaccaacgctgaagtgcacgcccagagtcgcttctttgtacgtgtcgatttttccaacttcttcccttcgatcaggtatgctgactttgcatttgcgttggggaaatcaactgagctggcatacctgtttaaggaatactcggatatagggaatttcattcagcgcatttgctttgattctaacctgaagttgcccattggttacatctcctctccggtgatcagcaatgctgtaatgtttgagttcgatgcccggttggaaaatatcgtagctgcaaacggagaagatctgggctcagctcgggtgacacgctacgccgacgatattgtcttctcaactgacaagaaaggcggctgtacgaaattcgtcgagattttacgatcacttgtgaagtcttgggcgagccccagtctcagcatcaacgaggacaagacaaatttcagctctagcagtggaggcagcgccatcgtcactgggcttagaatatgttctgacaatcacataaccgttaccagagagtataaggacgaaattcgactaatgctgtccctgctcgtgaaaaactccctacgccctgaggacctcagtaagcttaaggggcacctcaattatgtgcggcatgtcgcacctgcattcttttccacgctgtgcgccaagtatacatcagtcatagccgagctgatttga

SEQ ID NO: 11885 - RNA, 939 nt, synthetic construct
  source 1..939: mol_type = other RNA
atgagctccctggtcaaacttgccgctactgagtgctgcgtgcaggaacggtgggtgaatgacgtcatccgccagggccctagcagagtgaagacactaaaaattaagaagccaaagtcagccaaatttcggatcatctctcgtccttcagccgaactggagatactgcagagatggcttaccatcaggtttttcgaaaagatggagattcacgactcggctatggccttccgcaccggaagatctatcctcaccaatgctcagttccatgcgaagtccctgtatttcatacgcgttgatttcttaaacttctttccatccattcgatacgcagacctcaacttcgccatcgggaaatctaagattatccgcaatatcttcactgactacgcagatgctgggtcttttatagagagggtctgtttcgactccaacttgcgactacccattggttatataagtagccccattatttcgaatgcagttatgtttgagttcgacgtgcaactgcaaaagctggtaacggcaaacacaaacgaactgggcgacggccggatcacccggtatgctgatgacattgtgtttagcacagacaaaaaaggcggttgtgccaagtttttggaattaattcgcagtttcgtcaagacatgggcgagccccagcctgtccgtgaatgagaacaagactaccttttcatctagaaacggcgggagtgccattgttacgggactgagagtgtgtaatgatagccacgttactatcacccgtgagtacaaagataaagtgaggctcatgctctcacttcggggaaaacaggtgctccgaccggaggatgtgagggtactgaagggacatctggattatataaggcacatcgcccctgccttcttttccacattgtgcgcaaagtacactggggtcatcagtgaatttatctga

SEQ ID NO: 11886 - RNA, 939 nt, synthetic construct
  source 1..939: mol_type = other RNA
atgcctaattttgcaagccttgccgcaactgagtgccacgtccctgaagactgggtagctaatgtggttaggcaggggccacgtcgtgctaaaatcttgcgcatcaagaagaagaacagcgataagtttcggagtattgctagacccagcgctgaacttgagatgctacaaagatggctgctgttgaagttcttcaaccaactcgaactccatgatagcgccatggcctttcgcgatggccattctatactgacaaatgccgtccggcacaaggggtccgcctacttcattcgaatcgactttaaagacttcttcagcagtatcaagttgcaggatttcatcatggccatgtcccagaccaaattctttggctttcacctgaccgagtattctgactacatggagttcatcggaaaaatatgctttgactccagaggaaggttaccaataggttatgtgacttcacccatcatttcgaacgctgttatgtaccggtttgacgtcgccttatcaaacgcaatttccgcccgaaccaaggaatttggtgtttctgtgctgacaaggtacgccgacgatatcgtgttttcaacagacctgaaaggcggctgtgccgctttcttgaaattctttcaggagttcgtgtccgcatgggcatcgcccagtctggtaattaatacggagaagaccatattctcctctaaagcgggcggaagcgcgatggtgactggactcagaatttgcaacgacaaccacatcacggtgacacgggagtataaggataagatcaggctgatgctctccctttatcagaaatctaagctgaatgaagatgagctgccggcacttcgcgggcatctgtcatacgtgaaacacgtctctcctgcgtttttcagtgccatttgtagcaaatacctaaccgctatcgaaaagctcatttga

SEQ ID NO: 11887 - RNA, 939 nt, synthetic construct
  source 1..939: mol_type = other RNA
atgcctagtctcataacgctcgccgccactgagtgtttcgtccccgaaatttgggtgagggatgtcataaggcttggcccaagccgggtaaagagactgcgtatccgaaaaaagagtagcgctagctatagagtaattaagcgaccttcagctgagttggaaattctccagcggtggctgacactaaaattctttgagaatctggagatgcacgatgcagcgatggccttccgtaggggtaggtcgatactgactaacgctcagcatcacgtggactcaaagtactttctgcgcattgactttaccaatttcttcccgtctataaaatacgatgaccttaagaagtccgtggataaaagcagtaagaacaaaggaacctttgatgcctatcatgacgctgacctgtttatcaagcgggtttgcttcgatgagaatgagcgcctgcccattggttacatcagctctccagcaatttccaacgccgtgatgctggaatttgatgagaaagtccacaggcttatcgaaagcaacgaggaaaaacttggcgcgggaaagtttacaagatacgccgacgatgttgtcttttccactgacaaaaagggggggtgtaccgaattcctcaaaatcttctccagtctcgttgacggaacgacctctcccaagttgtcaatcaatgagaaaaagaccatcttctcttccaaattaggcggctcagccatcgtgacaggcctacgcgtctgccgggattcgcacattacagtgaaccgggagtataaagaccaaatccgcctgatgttgtccctctacgaaaaggggaagttagacaaagaagagcataagaatttgaaggggcacctgtcttacgtgagaagcgtggcacctgcattcttttctagactgtgcgctaagtattttaagtccatcgaggaattcatgtga

SEQ ID NO: 11888 - RNA, 972 nt, synthetic construct
  source 1..972: mol_type = other RNA
atgtccaatcttgtaaaactcgccgctaaagattgttatgtgagtgaggagtggattaaaagcgtcatcgacagcggtccaaacaatgttaagatcatccacatcaagaagaagggagatcctaacaaaaccagaataatccataggccctctgcagagctggagacgttacaaagatggctcacactgaccatcttcaaccagttagccaaccacgagatcgccatggcattccttcgcggcaaatccattctgtctaacgcagaacgacacaggaagagtaagtactttattagggtggatttcaaagacttctttaagtccattaaggccgatgacctattcaagacaatcaagttctacaacaagagtaacagcttaatttcgctgtctgaatccgaccagttttttatcaagcgcgtctgctttgacaagctggggcggctgccaatcggatatatatcctcacctgcgatcagtaatgcggtgatgtacgactttgacacccggttgctgtctttggtgaatgataataaagccaaactcggggctggtattataactcgatatgccgacgatattgtgttcagcacggataccaaaggcggctgcttggagttccttaatctcttcaaaatcatggtcaacaagaatctgtcaccccgcatctttatcaacgaaaagaagaccatattctcctcaagagctggcggaagcgcaatagtaactgggcttagggtttgccaggactcgcacattactattacacgggactacaaagataagattcgtctgatgttgagcctcttcgaaaaaggcaaactcatgcaggaagacacagctaccctaagagggcatctgtcttacattgagcatgtggctcccgcctttttttcaaagatttgtgccaagtacctgtatggaatatctaaaatcctggatccgactccaagccctcaacagaacaattga

SEQ ID NO: 11889 - RNA, 951 nt, synthetic construct
  source 1..951: mol_type = other RNA
atggagatatatagcattatcgatttcgaaaccctgatgcgaagcggctttacatctgaagtgatgcggtcccccgagccgcctaaaaaatgggacatccctaaaaaaaatggaggggttcggactatttaccatccagcatcaaaagtcaaactcattcaatactggcttataaacagcgtcttgataaatctgcctattcacgaagccgcttatgccttcatcaaaaaccggtctattaagaagaacgccctgcgtcacgcatcagcgcgcaacaaatactatgtgaagatagaccttaaggactttttccccagcattcactatgacgattttgagtacgccttcaagaagtacagggatcatatcgactaccccgaaaagcttgattctgaattattgccactcatcaaaggagtatgttttatctcagatctaaccctccctataggcttcccaacctccccatttattgctaattttgttgccagagagttcgacgagaaactaacgaagaatctgaattccatcgacaggctgaacgccacttatactcgctatgcagatgatattatcatatccacgaacaagaagggtgcttctaagcagatcatcaacagcgtcaagtccaccctgagaaatattaagccggactttaagatcaaccccaaaaagatcaagatctgcagtgcttcaggcgggagtatcattgtgactggattaaaagtgtgcgacgatttccatattaccctgcacaaaaagacaaaagataatgtgagactcttgctgtcgctcctgagtaaaggtaatctgaagaaggacgattacaacaagttgagcgggtatattctgtacacaaaaagtatcgacccccatttctacacaaagcttaataggcgattctttaaggagatcaaattcctcgagaattaccacaacaaaaagaactga

SEQ ID NO: 11890 - RNA, 951 nt, synthetic construct
  source 1..951: mol_type = other RNA
atggaaatatacaatattatcgacgtggaaacactgatgcgaaaggggttcacaggcgaggtaatgcgaagccccgaacctccaaaaaaatgggacatcccaaaaaaaaatggcggagttcgtacaatctatcatcccagcagtaaaatgaagctcatccaatattggctgattaatagagtgctcaccaatctgcctgtgcatgacgccgcttatgctttcattaaggacaggtcaattaaacacaatgcgctgcggcacgctaccaccaagaacaaatactatgttaagatcgatctcaaggacttcttcccttctatcaaatataacgacttcgaacatgccttcaaaacgtaccgcgacaggatcgacttccccaataatttggataccgaggtgttgtttcttataaaaggtgcctgtttcattcctgatttaagtcttccaatagggtttccgacttccccaatcattgccaactttgttgcccgcgagtttgatgaaaaactgacagtcaagctgaattccatcgataggctaaacgcaacttacactcggtacgccgatgatatcattataagcaccgggaagaaaggatgctctaagcagattattaatgcagtcaagtccactttgaaggacattaaacccaactttaagatcaaccttaagaaggtgaagatctgttcggcttcaggcggttccatcatcgtgaccggactgaaggtatgcaacgatttccacataactctgcacaagaagaccaaggacaaagtcagactgcttttgagcctcttagcgaaggataagctgaaaatagaggattataacaagctgtctggctacattgcatacacgaaaagtattgacccccatttttacacaaaactcaacagacggtattttaaggagatcaagatgctagagaaccaccacaacaaatcagagtga

SEQ ID NO: 11891 - RNA, 951 nt, synthetic construct
  source 1..951: mol_type = other RNA
atggaaatctacaagctgatagacagtgagacattaatgaggaaagggtttacctctgaggtgatgaggtcccctgagttaccaaaaaagtggcacattcccaagcggaacggaggcgtcagaaccatctatcatcccagttctaaagtgaaattgattcagtactggcttatctccaacatatttagcaatctgcccatccacaatagtgcttacgcgtttgttaatggtcgtagtattaagtccaatgcacttctccatgctaccgccaagaacaagtattatgtgaaagtggatttgaaggacttttttccgagcattaaatacagcaatttcgagtacgctttcaaactgtaccgggatcggattgaattttccgacgtttatgacgctgagctactgcagctcattaagtcaatttgcttcataagcgacgaatcactgccaataggattccctacctccccaattatcgccaatttcgtggccagagaattcgatgagaaactcacacttaagctcaacagcattgataggctgaatgccgtctacacgcgctatgccgacgacatcatcatttctactaacctgaagggggcaagcgtgaagatacttaacgcgattaaatcaactatcaagagaatcgagcctaacttcaagataaacaacgacaaaatccacatctgttctgcatccggcggttcaatcattgccacagggttgaaaatctgccacgattttcacgtcactctacatcgctctatgaaggacaagatccgactgtatatctctttgctgtcgaaaggaaggctcaaacaagaggattataataagctgagcggctacatcgcatatgccaagtcgattgatccccacttctacacaaagctgaatcgaaagtacttccaggaaattcgcggcatcgaaaactcccataacaaagtaatctga

SEQ ID NO: 11892 - RNA, 951 nt, synthetic construct
  source 1..951: mol_type = other RNA
atgagaatctattcactgattgactcgcagacgctgatgactaaagggttcgcctctgaagtgatgcggagtcccgagcccccaaaaaagtgggacatagcaaagaaaaagggagggatgcgcactatttaccacccttccagcaaagtgaagttgatacaatattggctgatgaacaatgtgttttctaaattgccaatgcacaatgcagcgtatgcgttcgtgaaaaaccgctccattaagagcaatgccctgctacatgccgaatccaagaataagtactacgttaagatcgacctcaaagatttctttccctcaatcaagttcaccgactttgagtatgcctttactcggtacagagatagaatagagtttacaaccgagtacgacaaagaactcctgcagctcatcaagactatttgctttattagcgattcaacacttcctatcggtttccctacctccccgcttattgctaacttcgtcgccagggaactcgacgagaaattaacccaaaagttgaacgctatcgataaactcaatgctacctacacacggtatgctgatgatattatcgtctccacgaatatgaaaggcgcctcaaagctgattctcgactgctttaagcgtacaatgaaagagattggaccagacttcaagattaacatcaagaagttcaagatctgtagcgcaagcggagggagcatcgttgtcactggccttaaggtatgtcatgattttcacataaccctgcatcgaagtatgaaagataagatcaggttacacctaagtctgctgtctaaaggcatattgaaagacgaggaccacaacaagctgtctggttatatcgcatatgccaaagatatcgacccccatttctacacaaagcttaacaggaagtacttccaggagattaaatggatccagaatctgcacaacaaggtggaatga

SEQ ID NO: 11893 - RNA, 951 nt, synthetic construct
  source 1..951: mol_type = other RNA
atgtcgctgtacacactgattgataaggaagtgatgatgagagacggatttacccaatccgtcatagatagcagtgaaccccctaaaaaatggagcatcccaaaaaagaatggcggttacaggtctattcatcatccaagcagtaagaataaactcctgcagtattggctgctgacgaaagtatttgacaaattgcctcagcacgatgctagctacgcttttgtgaagaaccgttctataaaggacaacgcgcttcgacacgccaaggagaaaaacaattactacgtcaagctagacatcaaggatttttttccatctattgagttctcggacttcgagaagtgctttttaaggtaccgcgaactcatatcaatccccacaacttgggatgaaagcctcttgtttctgatcaaggagacttgtttccttaaacctcagaaaaatcttcctgtgggattccccagctccccggcaattgcaaatttcgtcgctagagagcttgacgagctgattttaggtgagcttgccagttacgaaaagtataaccccatctatacccggtatgccgacgatctcgttatatccgttgcggagaaggggttatccaaggagatcatcaaagcagtgaagaaagccatcaagaactgtacctgtaatttcagtctgaacgaacagaagataaagatttgctcagcctccggagggtctattatcgcaaccggcctgaaaatctgcaacgaccaccatctaactctccacaaaaagatgaaggatagcattcggctcaaactgtccttgtattctaaagggaaactgaacatcgacgagttgaacaagctgtccggctatattgcttttgccaagtcaatcgatgaacatttctacacaaagctgaatcgcaaattcttcaaagagttgtcttcactcgagaatgtgcacctgaaggaatga

SEQ ID NO: 11894 - RNA, 948 nt, synthetic construct
  source 1..948: mol_type = other RNA
atgatcctgtacaagattatcgacacggacatcatgatgagagacggcttcacagaatccgtaatcaagagctctgaacctccgaaaaaatggacaatacccaaaaagagtggaggtgttaggagtattcatcaccccagcaccaagaataaacttctgcagtactggctcttgaccaaagtctttaataaccttccccaacacccagcaagctatgcatttatcaaagggagatctatcaaggataatgctctgcgacacgcagagtctaagaacaattactacgtgaaactggacatcgaagactttttcccatcgattacctacgacgacttcgaacgctgcttcgtcaagtatcgggatctcattaccacgccgactaagtgggataaagatctgctacctctgatacaggacgtttgtttcttaaagccacagaagatcctgccaattggattccctaccagtcctgccatagctaacttcgtagcccgagagttggacgacatcataaacgcggagatggcctcttttgagaagcataaccccgtctatactaggtacgctgatgatctcatattttccgtggctgataagggtctatccaagaaaattattacagccgtgcggaagtccctcagaaaatgcagcagcaacttcaagttaaatgccaacaagatcaaggtttgctcagcgagtggagggtcagtggtggtgacaggcctgaaaatctgtaacgatcatcacctgactctgcacaaaaagatgaaagactcaatcaggctgatgctttccttacactctcgcggcaagctcaaagaggaagatttcaataagctctccgggtatattgcctttgccaaaagcattgatgagcatttttatactaggttgtcacggaagcattttaaagagttgcgcacccttgagaatcgtcacctgctgtga

SEQ ID NO: 11895 - RNA, 978 nt, synthetic construct
  source 1..978: mol_type = other RNA
atgatgttatacgatcttatcgagaatgatctcaaaatgaagactggattcgtgagtgatatcctctcgagcccggaggaacctcggaggtggaccatacctaagcgcaacggcggcatcaggtttatttatcacccatctgccaaacgcaaggtgcttcaatattggctcttgcagcgggtcttctgtctgatacctttgaacgacgctgcgtttgctttcataaagaacagatccatcaaggataatgccctgagacactctaagtctaaaaacaagtacttcgttaaggcagatataaaggacttctttccctcaatcaacttcgacgattttctgtatagctttaaccgatatcgtgccgatattaactttcccaaagagtacgacaatgatctcctgcgaatgatcagggaagtatgcttcatcggacccaaaaaaacactacccatcggctttccaacctctccattcattgctaattttattgctcgtgaactcgacgagatcatccacttggagctgaagaacattaacgatgccaatccaatttacacaagatacgccgacgatctggttatcagttcatgcaagaaacggatgcattccgagctgattagtattatccgcaagagtattaacaagtgcaatgcgtcattctccctgaacgagaagaaactgaaaatttgttctagcagcggtgggagcgcaatcattaccgggctaagaatttgtcatgacgggcacctgactgtgcataaaaagatgaaggacaagattaggctttacctctcacatatcaacaaaaagggacttgaagagtccgaaatcaatatcttaagcggttatctggcctatgtgaaaaatgcagacgccaatttttacacaaaaatctcccggaaacacttcaaggagataaaggagatagaaaatcactatacgtacgcagacttgaaacctcatgacgaagtctcctga

SEQ ID NO: 11896 - RNA, 942 nt, synthetic construct
  source 1..942: mol_type = other RNA
atgagtataatcagcgaagtatcaagggagctggatatggtcgaagattccttcagagaacagattcgactggctagagggaagattaagcacatcaagatcaagaagaagaacggcaaagggttccggaggatcgtgattccaccctgggagtttaagattgtgcagtattggacgatcctgaactatttacgcaatgtgaagatacaccgcagcgctactgcctttcacgaaggagcctctatccgtactaatgctctctgccataggaaaggaaactacttcgtgaaaatggacctgtccgactttttcccttctgtcggcgtagacgacttcaagaatgcactctacaaatatcaccccgaatttatctggttggagaaagagttatccgatagcgagtttctggagagtatgttccacaagggcgtgtgcgcaatcggttttccggcctctccctacatagcgaacatatgtatgatcgaaattgatgagctgattgaatcaaagctgaaaaataacgtggagcggtttggtcggttcagttataccaggtatgccgatgacctgacaatctccattgaaagaaaggggttcaaacgagaggtcgagggcgttgtctatgaggctgtccgggaagcctctctgaagaacatcaaggttaacaaggagaaaacaaaatacggctcaaaaagcggcgggagcgcattcgttaccgggatgcgcatctgcaaagatggacatattaccctccatagaaaatacaaggaccatgtgcgtctgttgctcagtctctacagcaaaggaaaacttaaacctgaggacaagggcaagttgcttggtcacctaaattattgtaagtcctctgacccagagttttacaataaacttgtgctgaagtacttccaatcgattgaaaagctaaagaattcaaacggatga

SEQ ID NO: 11897 - RNA, 936 nt, synthetic construct
  source 1..936: mol_type = other RNA
atgggaatcattaaaagcatcgccaaagaactgggaatgcctgagccagtgttcagggagcagctgaatactgcagcaggcaagatcaagcacattcgaattcctaaaaaatcccagaagggttacagaaagctggtgatccccccctgggagttcaagatcgtgcagtactggctcatatacaatcacctgaaaggtttcccaatccatccaagcagtacagcctacaagcccggcgcgtcaatacgcaaaaacgccttaaagcatgcagagggaaagtatttcgtgaagatggacctttctgactttttcccgtcaatcggcgctgaggaattccgtaacatcattgaggagtactaccctaaacacaattggttgattaaagagctcgaagattccgactttgtctctagcatcttttatgataagaagtgcgccatcgggtaccctgcaagcccctatattagcaatatcatcatgttcggcgtcgatcaacacattgacagagctctgcaggacaagcagcagaccttcgggaactattcatacacccggtacgctgatgacattacgatatcgattgagaacaaagggcataagaaagaagtggttcggctagtccatgattccataaagaagtctgggattaagaacttgaaggtgaaccagaataagactaagtatggctccaaaaaaggaggttccgcgtttataacaggcatgagaatttgcccggacggacacatcaccctccacaggaaatataaagataacgtacgcttgctgctgagtttatacaatagggggaaacttgacgttgctgaacggtctaaactggccggccatctaaactattgtaaggatgccgacccacttttttataataagctcgccctcaagtacttttcaagtatcaagaaactgcaagaaagctga

SEQ ID NO: 11898 - RNA, 933 nt, synthetic construct
  source 1..933: mol_type = other RNA
atgtcagaagaatcagtcagaaaccagatacacgagggtagacgtcaaatcaaaatcaagaagattccgaagaaagatggcaacttccgcaagattaccattccacctcggatatttaaactcgtgcagtattggaccatcaagaatatcctccattctctgcctgtgcatgaggccgccaccgcatttaaaccaggtagctctattcgtgagaacgcttttcggcaccgggacggccagtacttcgtaaagatggacgtcacaaatttcttcccaagtatcaagtccgacgacttctttagcgttctctcgaggatgcagcacgctgaagcggaccccctgctggattccaaggacgatgaagattttctggatgctatgttccgcaaccgggcctgcgagatcgggtatcctgccagtccacacattgctaacatcgttatgtttgagaaagatacgcgaatcgacaatgcattgcgggatcgcaagcaagagttcggaaattccacttacacaagatacgcagacgacattaccgtgagcattgaccagaagggatataaggacgaaatcactaggctggtgagcggcgtggtcgaagatgattccgaacccacattgaaaatcaaccccaataaaaccaggttcggcacgagaagagggggaggggcctttgtaaccggactgcgagttctgcccgagggtcgactgactttacataagagttacaaagacgacgtgcgcttcctactaaaactttacgaacaagataggcttgagcgctggcagatcagcgccttgcagggccatttaaactattgttcatttgcggaccctgatttctacactagactcatgattaagcaccttgattctatagaggagataaaaggggaggggctgaggtctacagacggcactacagagaattga

SEQ ID NO: 11899 - RNA, 945 nt, synthetic construct
  source 1..945: mol_type = other RNA
atgaagctgatcagggacttctgccacgagatgggcctacccgaagaggagtttacggtctatgttgacgacgcacgcgagcgggttaagaaggctaagattaaaaagaaggacaaaacaactcgggaaattatcatccctagttgggagctgaagattatacagtattgggtgatcctcaactatttgaggaaactccctgctagcgaatctgccaccgcatactataaaggcgcttccatcattaaaaatgcccaggcccatagaaagggaagctactttgttaaagtagatatagagtccttcttcccatcgcttaccctcgacatctttatcacttcattgaagaaggatctggagtcaaacccagagaacgaagtgatacgatatctacttgaagcaactaatgacgccagcttcaaccagtcaattttttataacggtacatgcgtcatcggctaccctgcttctccctatatcgcgaattacatcctcaaggcctttgatgagaatgtggtggccgaattgaatgagataagcggcaagctcgggattttcaactttacacggtacgctgatgatattgtggtgagttgtgaaaacaaaggaaataagactgaagtgctgaaaattcttcacaattgcttagagcaaaagttcgatggagccctcaaactgaaggccaccaaaaccaaatctacaaccagaagcggaggtagtaccatcattactggggtcttgatatgttctgacgggcgcacaacactgcccaggaagtacaaagacaaagtccgtctgcttttctccctgtacgcaaaggagatcctggaaaaggaagagattccggcgctgacgggccatctgaattatatcagatcagtggatccagtattctacaacaagttatactccaagtactacacccagatcaaaaaactgtcctga

SEQ ID NO: 11900 - RNA, 954 nt, synthetic construct
  source 1..954: mol_type = other RNA
atggaaaaagagatgtcgattattgatgaaatcgccaaggagttacgaataaacaagaagatcattgagagccaactcttcgcaagtcgaaagcaggtcaagaagataagggtgcccaaaaaaaatggcgcccataggagcatctatgtggcaccgaaaagctacaaaatattccagtactacatcctgaacaactacataaagcacgttaagaaaagtcacgctgcttctgctttttggaagggaagttccatcctgaagaatgcgaaaaagcatagagaaagaacctacctggtccgtattgacattagtaatttcttcccttccatccacatcaacgattttatctccgtactggatgactccgagaataatatcattgacctgtttagcaaccccgaaaacgccgaagtgatcatggaaacgtgtctctctgacgaggggtacctccgcgtgggttatccaatctcacctttcatagcggatatcgccatgcgtgagattgaccaggaaattgccaaatatttggaggagaagtttcaggagggcacattctcttattctcggtacgcagacgacctcgtgattgggtttgacgaaaaatgcggcaaggagatcgagattgctatctccgagattatagagaaaagggaccaccctaaattgtctatcaaccacagcaagactcggtattttaaccggaacgttggcaatgcaattgtgactggggtccgcatttgccaagatggaagactaacacttccaaaacagttcaaggatgatttacgatttcgcttgtcactacttaataagggtaatctggccaacgaggagctgagctcactcgaaggatgtctgaatcattgcagagacatcgatccctcattctataccaagcttcagaccaggtacttcaagtccatcgccgaactgaaaaatcggaacaaaaactga

SEQ ID NO: 11901 - RNA, 942 nt, synthetic construct
  source 1..942: mol_type = other RNA
atgcacattaaaaaggctattgccaatgatctgtctatacctgatggactgatcgacgaggccatctccgtggctagggctcacgtcaaaatcttccacattcaaaagcgcagcggtgggtcgcgggagatatgccacccttcaaagaaactgaagaccctgcagtattggcttattcactctgtgttttcccagatgcaggtgcatgatgcctctatggcttatcgagatggcgtcagcatcctccacaatgcggagaagcatcgtagtaacaggttctttctgaaaatggacttagagaactttttccacagtatttctttcgaagatttcatccccatcctgcggagctggcatagaaaatccaacccaaagtggatcttagatgcagaatgcgaggacatgatacgcagaatttgcttttacaagaatgacagattggcaataggctacccatcatcgccgattatcagcaacattgtgatgaatgaattcgattccaaggtgagtacacttatttcagataggaaatatgggaaggtcatttacaccaggtacgcagacgatttggtgctctccactgacaaaaaaggtgcctgtagcgaaattataaaggagatcatcaatctgatccaaggcacatccagccccaacatctccgttaaccatagcaagactaagctagggtccagcaccggaggctctgcctctgtaacaggtctgaagatatgttcaggcggacacattaccatccatcggaaacagaaagaccatatccgattgcttctctctctgtacagaaaaggaaaacttgagcaggaagaggaaaatagcttgctggggcacctgagttattgtcattatgttgcccccgacttttacacgaagctcagtaagaagtactttaaagagatctatgacctccgctcaaaggacctatga

SEQ ID NO: 11902 - RNA, 942 nt, synthetic construct
  source 1..942: mol_type = other RNA
atgcatatcaagagaactatcgctaacgagctttccatcccagacaatttgatcgacgaggcaatacgcgttgcccgatcccacgtgaaaattttccacattgagaagaagagtggcggatctcgagaaatctttcaccctagcaaaaaactgaagaccatccaatattggctgatccatagcgtgtttagtcagatccccgtacacgatgcttctatggcttaccgtaatgatatatctatcctggataatgcccgcaagcataggagtaacaggtttttcttaaagatggatctcaaggatttctttccctcaattagctttaatgacttcataccgatcctacgggactggcatgctaaggcaaaacctaactgggtccttgatgaggaagcggaacatctgatcaaaaaggtgtgcttctacaaaaatgactgcctggccattggctatccatcaagccccaccatttcaaacatagtgatgcgcgattttgactcgaaagtgagcacactgatttccgcggaaaaatatggcaaagtcgtatacacaaggtacgcagacgacttggtgtttagcactgagaagaagggtgtctgctctgaaattaagaaggagctgcagaccctcattcaggccaccacatctcccaacatcaaggttaacaaccttaaaaccaaactggggtcatctacaggaggtacggcctccgtgaccgggctaaagatctgtagtgatggccacattactatacataggaaacagaaggatcacattagactcctgctcagcttataccggaaagggaagctgcggccagaggacgagaaatcgttgcttggacacctctcctactgtcactatgttgcccctgacttctatacgaaaatctccaagaagttcttcaaggagattcacgaactgagaactaatgacttgtga

SEQ ID NO: 11903 - RNA, 942 nt, synthetic construct
  source 1..942: mol_type = other RNA
atgcacataagagatgcgatcgccattgacctctccgtccctgtctctatcgtcgatgaggctctcaaagaaagtcggatctacgtgaagaagttcaccttacccaagaaatctggtgggagtagggaaatcttccaccccagcaagaagttaaagactgtccagtactggctcatcttcaatattctcagtaaactgccaattcactcatcggcggtagcctatcgcgacggaattagcattctgaataacgcaaagaagcattgccacaataggttcttcttgaagttggacctaaaagagtttttccattccatcgtcttttccgacttgctgcccctgatagaggattggtaccagaacatttccgtggattgggtttttgggccagaagagaaggatttgattaggaagagctgtttctacaaggaggaccgactggccatcggatatccttcaagtccagtgatctcaaacgtggtgatgtaccaatttgacctcaacgttgagtctttagtttccagcggccgctttggggatgtatgctatacccggtatgccgacgaccttatctttagcacagataagaaagggggttgcaaagtgctgcttcgagaaatcagcgacctgataggcaggcataaatcccccgacattactttgaattctgctaaaacaagactgggttcttcaaccggcggcacagcatccgttaccggactcaaagtgtgtaataacggctatataacggtgcatcgtaagcagaaggatcacattagactgcttctgtcactatacgccaaaggagaactgaaaccggatgagtacagaagtctgcttggccatctcgcttattgtcactatgtggcccctagcttctactctcgcctggcacagaagtactttaaagagatccacgaactgcgggctagcgtgttctga

SEQ ID NO: 11904 - RNA, 942 nt, synthetic construct
  source 1..942: mol_type = other RNA
atgaatatcaagtcaatcattagcaacgacctaggaattcccgaaaagttaatcgaagaggcgctgtccagctcgcgcacctacgtcaaagtgtttaagattaaaaagcgaaacggcggctttagagagatccaccatccttctaaaaaactgaagaccctgcagtactggctgatccataacattttcaagaacctctcaatacacaagtcttccgtggcatatcaagatggcgtcagtattcttgataacgccaagatgcatagttccaatcggtttttccttaaaatagatctggagaacttcttcccatctatcaagtacactgatttggaacccattgtcgacaagtggcacagcgagaataaaatcagttgggagctggaccaagaagctaaagaactcattaggaagtcatgcttttataaagaggatcttctgccaattggatatccttcctcccctatcatttctaacgctgtaatgcatgactttgacactgcaatcaaccagatcattctcgataaccggttcggcgaaacagtttacaccaggtatgccgatgacttggttttttcgactaataaacacggcgcctgtagcaaactaaaagacgttatccgtacgtttatcgggggatacaatacacccaacataaagatcaatacaagcaagacgaagatggggtcttccactggtggttccgcaagcgtaacaggactgaaggtgtgcgagaatgggcacataaccattcacaggaaacagaaagaccacatacgcttgctgttaagcctgtatgccaaggggaaactcccggaatctgagaagtccagtcttgccggtcatctcgcttatgtgcagcacgtggctccaagcttctactcaagtatctcaaataagtacttcaaggagatcttcgagctgagagccaccaatgtgtga

SEQ ID NO: 11905 - RNA, 942 nt, synthetic construct
  source 1..942: mol_type = other RNA
atgcgcatcgaggaagtcatctctcgagatctaaaagtgcccgagtccctcattaacgaagcaatatctggcgccagagtacgggttaaaaagtttcagatccctaaaagatccggcggcagccgcgagattttccacccaagtaagaagctgaaggtcattcagtactggctcatgcatagcgtgttttgtaatatgccactgtcagatgcggccatggcataccgggagggaatctcaattctgcacaatgccagggtgcacagtctgaatcggtattttctcaggatggatttcaaagacttctttccttccattcggttcgaggacgtggaaagccatattaaagcctggcatcgtaactttaagccggaatgggaccttaacgacaagtccctggagttcattaatcagagttgtttctataaggacgctagattggccgtcgggtaccctagctctcccgctatctccaatatcgttatgagagactttgacagcaaaattttgaacgaaatcggatctgaaaagtacggtgatgtggtttatactcgatatgctgatgatatggtgttttccacaaaccaaaagggggcctgcaaggaaatcatcaaagcagtcaaggagatcgtttctgtgtgtaagtcgccagtcctggagattaatgagtcgaagacgaggcttgggagttcaactggtggaagcgcgagcgtgaccggccttaagatatgctcagatgggcgcataacaataaaccgtaaacacaaagaccacatacgcctcatgttgtcactgttcagcaaaggaaaattagatcctaaggaagtgccctctctggcaggccatttagcctactgccactacgtagctcccgactttcactccggtctatccagtaagttcttcaaagagatccatcagatcaggaccatggacctgtga

SEQ ID NO: 11906 - RNA, 945 nt, synthetic construct
  source 1..945: mol_type = other RNA
atgaacatcaaacagctgatttcagagagtatcgatgtcccactgagtatggtggacaacgccataatactggcccgctcccacgttaagaaattcgaactgaagaagaagaatgacaagttccgtattattcaccagccaagcaagaaacttaaggtgatccaatactggctgatctacaacatctttaaagagatgcccattcacgcggccgctgttgcttacagaaatgagctcagtatcctggataatgcagagaggcacaagcgaaacaagtatttcctgaagattgacttcaaggactttttcccttctttaacatttaacgacttgctcccttttcttgagtcatggaaaagttcccggaccgatttgttcatcaataacgagctaaaggaaattatcaggaaatcatgcttctataccaatgacaaactggtgattggttatccctcatccccgattatctctaacatcataatgttcgacctagatgaaaacattcagtctatcatctctgacaataaatacggcaatgtcatatatacccggtatgctgatgatatcatcataagcacagataaagccggcgcatgtaaagagatatacaaggaaatttccaccctgattaagagcacgattactccttctctgagcattaacgtggaaaagacaaagttttcctcaagcagtggaggctctgcaacagtcactgggcttcgcgtatgtcacgaccaacatatcactatccataagaaacagaaggatcatatcaggctgcttttatccttgtacgccaaagggatactcaatgagaaagacgagaaatccctcatcggacatttggcgtattgccaccatgtggatcccgctttttacagcaagctcagcaaaaagtactttaaggaaattgccaccatcagatcgagccacatgaaaaactga

SEQ ID NO: 11907 - RNA, 969 nt, synthetic construct
  source 1..969: mol_type = other RNA
atgagggatctggtggaggtgtgttctgcggatttaggcatttctaggcaagagactttgcacttagccaagtccgcaccctaccgaatgaagaggttcgaactgtcaaaacgcgggggaggtagacggacaatatggcgggccgctattgagactaagggtcttcagtatagcctgatcaaaaactacctggagcacctcccagtgcacgcagcaagccaagcctttagcccgggatcatccatcaaaaaaaacgcctcaattcacgtgggaaaccattatttcctgagagtggacctcaaggatttcttcccctccctcacattcgaaaatctgcgaaaggcgaccctgagcagtaacgccaagtttgactttagcctggaggggtccgacagttttgccctcatccagggtgcttgctttgatcgcgatggtaagcttcccatcggatactccacctcaccttttatcgccaatgtcgtgatgtttgaattcgacgagtcgctcgaagttaccctccagtccgagttcggggccgggaacttcaactacactcggtatgctgatgacatggttttctccacatctacaagaggcgtatgccgcaaggcttatcgtaagataaagaatttcgtcgccgacttcgatggagcgagtctgagtgtcaatgacagaaaaactcactttggcagcacaggcaagggcacagcatttgttaccggcgtccatatgctacctaatgggaagttggccgctacgcgtcagttgagggaacgggtgaagttcctattatacctgctgacgaaaaaacgaattccagaaaaagagtactctcagctgatcggcctgcttgctcatcttcggtcagtggatcctgcttaccatactaaactcagcaccgacttttatagtgtatttccaagattggggaaagacaggactgcaaccacctcttctgagcgcacctga

SEQ ID NO: 11908 - RNA, 936 nt, synthetic construct
  source 1..936: mol_type = other RNA
atgctggatttgctggatatctgttctagcgcgttgggtaccacccgcgagaatgccctggttattgctaggactgcaccctatagattgaagaggatcgagatacccaagcaggatggctctaagaggataacttggcaggcggcaattgaaactaagggactgcactacccactcattcaatattatcttcgtcagttaccagcacaccctgcttcacaggcctttagcccaggaagcagcatcataaaaaacgccggaatacatctggggaataagtacttcctccggattgatttctccgatttcttcccctccattaagttcaactccttcaagaagattatcaaccagacaaagtccatcttcgaaaactttaacaccgccactcctgaaagtatgttgctgctagagaaagcttgctttgccaaggactcttccctccctatcggctatgcaacaagtccctatatcgctaactgtactatgttcgaatttgatcgggagatcatagacctgcttcgggcaaaattcgcttcagccaatgtcacgtatacaagatacgccgacgacctggtgttttcgaccaatatcaagaatgcctgccgagacatttacgatgtgattgtacagtttgtgaagaagtacagagctattgacctgaccatcaatcataaaaagacacactttgggagtgtgccgaaaggtaccgcctacgttacaggcgtgcatatgctagaatcaaatcgcacggctgctaccaaaaccttaaggtctgaggcgcgctttctcctgagcctccgaaaaaagaacaaacttgatgacgacgagcagaaacggctgtttgggcttctggcacatatcagacaaatcgaccctgcattctacactaaactcgcctcagacttccacgtcgcctttccacacacaaaatga

SEQ ID NO: 11909 - RNA, 942 nt, synthetic construct
  source 1..942: mol_type = other RNA
atggatctcaagtcccggatatgcaaagatctgcagataccagaaacactgtttgactcctccgtcagtaatgcacgacgcgccgtgtatcagttcaagatccctaagaagaatggagacgagcggactatctatcaggctgctgcaaagacgaagaccatccagtactggctgctgaagaacatatttgagaaagtgaagagccatccttcttccatggcatttagtcagggctgttcgatcttgaaaaacgccgaatgccatagaaacaaccggttctttctgaagatcgacttactgaattttttccctagcgtgacattcgaggacgttaagggggccttgatcaaaaactgggagcaaatcgacagtcttcccccggacaaagacctcttcgaattgattaggaccgtatgtttcttcaagggcgatattctgcccattggatacccaacatcaccaatcctcagtaacattgctatgctaaacttcgatgagatggtgatgtccacccttgagagctctttcggaggtgatgtaacctatactcggtatgctgatgatatggtcttctctactaatgttcccggtaggacccacgaagtctttaaactgattcgccaactaattacaacgaatacatcacccaaaatctctatcaaccctgacaagacaacgtcagggagctcaagcggcggcagtgcgatcgtgaccggcattaagatctgcccaaatcacctgaccattactaaaaaacagaaggatgagattaggttgttactctccctttacagcaaaggacgtctgaggtcttccgattacgagagaactatcgggctgataagctttgcccgaaatgttgacccgtctttttttactagagtgtcagagcgcttctttcgtgaaattagagccataaaaaaggaactcagcgacacctga

SEQ ID NO: 11910 - RNA, 942 nt, synthetic construct
  source 1..942: mol_type = other RNA
atgaaattttgggaacagatcgagacatccttcgggctaggaaaacctgagatcaacaggatcattaatgattctcgccggtgtgtcaaacacattaagatacccaagcacaatggaggtttcaggctggtagtgcagcctaccagaaaggtcaaactgatccaatactggctgatagataacgttttcagcaaaatggaggtgcactcatctgccatgagctatcgcccaaatatatccattcggagaaacgccgaagttcataagaacatgcgatactttctgaagcttgatttcatcgacttcttttggtctttgaactactcagactttgtcgtcgtcttcgacagttttctcggtcgtaaaaagatcctgtggagcgataataagttcgaccgaaatctgatgcggtgttgctgcttttataaggacgacgctctgccaataggatatccttcatccccgattatcagcaatatcattatgtacaacctggatgtggcaattaagaacaaactcgaggtgctggaggagaagatcggcggcaaaatcgtgtacacccggtatgcagatgacttagtgttttcaacgaatattcccggtgcttgcgaagagataaagaatagtatcatttcgcttgtgtccgggtgtaacagccccaaactaaagttcaactacaacaagctcaaaatgaccagcagttctggcggatccgccgtggttactggcttgagaatctgccatgatgggcatatcacacttagaagggaatacaaggaccaggtgaggtttttcttgaatctcatggccaaggatggcttaaaaaaggaggacatttttgtgctgcgcggccacctcgcgtatgtgcaggacgtagatccagttttctatactaaattgcaggagaagtacttcaaacaaattgaaggggtagaaaagtga

SEQ ID NO: 11911 - RNA, 921 nt, synthetic construct
  source 1..921: mol_type = other RNA
atgtccgaagagcttaatatacccgtggacagcctaagcgataccatcgagcagtctcgttctttcgtgaagcggatcaagattaataagaaaagcggaggcgagcgaatagtttaccagcctgccaggaagataaaggtgattcagtattggctcatgagaacgatattttccaagatcaccattcactccgcttcgatggcatacaggaaagaaggatcaatcaaggagaacgccctcaaacatagtaatggtgggtactttctaaagctcgatttcaaagacttctttccctcgataaaatttagcgaccttaacaaaagcatcattgcgtttaggaagaacaacaacgcaatttttaagtacaccaaagctgaccaggaactgatcaggcgagtttgcttctacaaaaatgataaactgccaatcggatacccttcctcaccgattattagcaacatcgtcatgtacaaattcgatattagagtgacagatgagatgcccaagtttagaaaatacgggaatgtggtttatacccgctatgctgacgacatgatttttagcaccgatcggaaaggcggttgtgaaaagatcttcagtttcctgtccgtgctgattaattcttggtctactccatccttgctgttaaacgaggccaaaactcggttcgtgtctagttcagggggcacagccatagtcacaggcttacgcatctgttacgatggccacatcactctccatagacattacaaggacatcgtccgccttctgttgtcactgtataagaaggggaatctgaaagaggaagacgtatatgtgttgaagggacacctgtcttatatccaaaacgtagatagtgtcttctatacgaagatctgcaagaagtatttcgacattattgacgagatcaaaacaaagtga

SEQ ID NO: 11912 - RNA, 954 nt, synthetic construct
  source 1..954: mol_type = other RNA
atgaacatcagggagcgaattgccgctgatctgcatgtgagccatgagctcatcgatcgagccgtgtgggagtcgcattcgaaagtgaagaagttccggattaaaaagcgtaacggtggcaccaggccaatattccatcctagcaagaaaaccaaattaatccagcagtggataatccacaacatactaaaccatctccctgtgcacgacgccgctatggcttacagaaagggattgagcaccgtcgataatgccagaaagcatcgccagaaccgttacttcctgaggatcgatctgaccaacttctttccatcaatcacctacaacgacctggagcctcttattagggaatggcactctcacgccgagacagactggacgctggacccgacaagcgaactattactgaagcacacctgcttttctcaagatgaaacgctgcgcatcggggatccttcttccccaagtatctccaatgcagtgatggcatccctggacgaaacaatctccaatactgtacgcgcactcagcaagaatccaattgcctacaccagatatgccgatgacttgatttttagcacaaacgagaggggattatgcaaacccatccacgaacacactgttgctgttatagaggagtccaccagtccccttctctctgtcaatcgaagaaaaactcggtttttgtctcgctccgggggatctgcaattgtcacaggtatcaagatcaatcccgacggctcattgactctccccaagtcatacagaaatgaaattcggttcaagctggacctgtacagaaaaggcaaactgggagacagtgatgtgcgcgagctgcggggccatcttgcttattgtaagcacgccgcggcgggctattatagtcggctctgtgggaaacactatagggaaattgaggaaattacaacttcacttcaggaccacagctgctga

SEQ ID NO: 11913 - RNA, 966 nt, synthetic construct
  source 1..966: mol_type = other RNA
atgatctaccgcgaaattagcaaattctataacatcccccaggaggaagtgcaggacttcattagctccaacaagaccaaatactttagattcgaaatccctaaacgaaacgggaagtttagaactatcacccatccgcgtcatgaattaaagatagtgcagtactggttggtagagaaggtgttctcccggatgaactacgtctcttgcagttcctacgcatacatcaaggaaagggacatacttaaaaatgcacgtaaacatcaacgcaattcgcacttcctgtcagttgactttagcaactttttcgagagcatcaccttcaagctactagagcccttcctggagaaattttaccactccacagaggttgagtattctttggaggaactgaaaaatgtggtgaaacggagctgttttgatagttatggccgcttgccagtggggtttgtcacctccagcatcatctcaaacatagtcatgttcgatttcgatctgagaattaacgtgctcctcatgtcaaggaagatgctcggtagggtggtatatactcggtatgctgacgatgtgactatttcaacaaacaaggagggagccattagggaaatttacgaactgttttgcaagggactcatcagtgaatttaactctgagattaccctgaatgcttccaaaacgaaggtgagacataagcggtgtggtaacgttcttgttacaggcctccgcataacaaaggacagtaggatcaccattcacaaaaattataaggaacgagtcaagaagctgatccacgataattacaagagtgaggatctttctgtcgtctctagaataattggccacctgaatttcatcaagtatgtagacgccaactactcacacaaactgaatatcaagtacttctctgagatcaatgagctgaaactgcggtatcaggcgttatttagcgccaaatcctatatttga

SEQ ID NO: 11914 - RNA, 972 nt, synthetic construct
  source 1..972: mol_type = other RNA
atggccaaatctttgatcgatatggtggcaacctacctcggccacacccgggaacaggttctgcatctttcctacagggcacctatgacctatcggcgatatactattcccaaaaaaaagggcggtcgcagacttatcaatcaccccgccaaacagaccaaaagcctccagtacgctcttatgaacatctttctgagtcaattacccatccacagctgcgccgccgcgtacaaaaagaaaaccgcgtctgaacatattccaagccccctgctgaaaaatgccatcctgcatgcaccttatagctattctgtacggattgactttacagacttcttccattccatttcaagtctcgatctgttcaatcgcatcagtaacaatgacatcaacttgtcaatatccgataaggagtttattgagaactgcctattcgttcgcgtgccagaaggacagaagggcctcgcaataggagccccgtcatctccaataatctccaacattgtgatgtattctctagacgagcagattaatgcaatcgccaacgggattagtgacagagtcgcgtatagccgctatgccgatgatattatatttagcaccaacttaagggggggctgtaattacttttacagggctatgtccgagctggtgactagaacaagtagcccgaagctggtcattaatcggtccaagacaatgttctccagcagggcttctcgacgcgtggtaacggggttgtttatcagacctgacggtggcacttcgctcggacgacaaaacaagcgttatatcaggaagctgttattcgacctcaaaagagacaatatcgagcctcgtaagttgacttacctttcaggttacctggctttcgccctggatgtcgagccagacttctacaaccggctggctcacaagtacggggcagaactgctcgctgttgccatcggaaagacacaccacgatgtgtcatga

SEQ ID NO: 11915 - RNA, 972 nt, synthetic construct
  source 1..972: mol_type = other RNA
atgagtcgaatcattaacctgaaaaatgacgtggccaagtatgtgggcatcactctggagagggtcgaatccctagcggctgtcgcccccaagagctatagaagggatgaggggagtaaaagaagcggacgcggcagcagagtgatattccacccttctaaaaagactaaggccctgcagtacgggctgatcaagattctgttagacgacttgcctgtacatgcgagcgcctacgcctatcggaaagggttgaaggcaccgctgctgaaaaattccatgctgcatcaaaaatacagtttttccattcggattgacttcaaggacttctttccatcaatagtcccagaggacttgtttaaggtaattgatgaatccggacttttccctgcagctcttgacagtgccgataaacgattcttggaaaatgtgcttttcatccgtcaccacggactcatgcatctggcaatcggcgctccctccagtcctagcatttcgaacgctataatgcattccctcgatgtgctcttttcagcatttgctcgggacaaggattctgtttactctcgctacgtcgacgatatcatcttcagcacgaaccgaaagggcatgtgcgatgagtttctgagattcctgtcaacaaccctctctggtaccccctcacccatccttcaggtgaacgccacaaagacactggtaatgtccaggggcactaggcgctgtgttaccgggatgtttattaccccagagggtggagtctcgatcggtcggacccggaaacgtaagctgcgcacattgctctacaggtattctaaacaccttaagggggaagacgtgctcagcaaagaggatctgaattatctaaagggcaacttagccttcgtgttagatgttgaaccagactattacaacagactcgtgcagaaatacactgccacgatggttaattctgcactgcacgcttcagtgagctga

SEQ ID NO: 11916 - RNA, 942 nt, synthetic construct
  source 1..942: mol_type = other RNA
atggacttgattgagaagattgccctgtacctgggcttctcaaaggaacagatcgttaaacattctaaaaggtgcagcaagacatatcggctttataagattcccaagaagggcaagcttacgggatttcggaccatataccaccccgccaaggaaactaaagctatacagtacgctctgatggagatcttactcggggattttaaagtcagcgaaagcgccatagcatacaaaaggggcctcagcagtcctttgcgcgagaacgccttgctccacgcgccctataaatactccgtgcggattgattttgaaaacttcttcctaagcctgcagcctagagacttggcacgaatggctaagagtaaattcgatctgaacgataaagagatagacttcctgatcaaaagcctgttcgttgacttggggagtggtcgctctggcttaggtgtcggagcaccatcttccccaatggtcagtaatatcattatgtatgagctggatgaggagatccagaaaatcgccctgaagattgacccgaaatctgtgtattctagatacgccgacgacatcatcttttcaaccgaccagaaaggagcgtgtaagcaattttatgaccagctggcatcagtgattaagtcctcaaaaagccctagattaaagatcaacgatctcaagaccatctttagctcgcgcggttccaggagaatgattacaggcctgatcgtgactccaaacggcgacgtgtcaattggacgtcgaaataaacggtacatcaagaaactgctctttgacttctcgaagtccaagatatccgataagaataagagttacctcaaggggtatctttcctacatcgaagatgtagagcccgatttccttaattccctgtctctaaagtacggggccgctctcctggaaaaaattaggatggatcaattctga

SEQ ID NO: 11917 - RNA, 918 nt, synthetic construct
  source 1..918: mol_type = other RNA
atgagcttaatcgagaacgtctctcgttatctgagctttaatgaatccgagcttttatcattcgctcagaaagcaccaacaacctacagaacctaccagatccctaaaaagaacggtaggctgcgcacaattcatcatccagccaaggaaacaaagtccctgcagtacgccttgatcaatctgatcttcaagaattaccctattcattcatcagcagtggcatatcggaaaggggttaaaagccccttgaagctgaatgctgagagtcactctaagtatctctacaccatcaaaatggactttaaagatttcttccactcgatagtgtttgaggacctgaaaaacattctagattctccttacacgcaacaagagcttgaattcctcaaaaatgtcctcttcttaaactaccagggaatctattgtctggctatcggagccccatctagcccaattctaagtaatatcgtgatgcacggctatgatgagtccatccttaaaatagtcacgaagattgaccccgatgctacatataccagatatgccgatgacattaccttctccagtaataagaaaagtcattgcctcaactttgccaaagaactgaacaagctgaccaaggacaaactgactccgtctctcaagctcaattccaagaagactattctgttgagcaaggcaaatcacaggatggtgactggccttgtgatcaccccccagggcaatgttagcgtagggcggcacaacaagaagtacataaaaaagttgctgaacgatctgaagtacgacaaaatctcacctattgcctttaagtaccttaaggggtactttgccttcgtacgagacgttgaacccaagtttgtgaactccctcactaacaaatatggtgcggcgctgataaacaaaataatcatttga

SEQ ID NO: 11918 - RNA, 915 nt, synthetic construct
  source 1..915: mol_type = other RNA
atgaagattattgagaagatcagcaacatttacgggctctccttcaatgagacaaaaaatttgatcaacaccgcccagaacaattatcggatttacaagattcccaagaaaactacaggcacacgaaccatctatcatccaagcaaacaggtcaaagcagtgcaatacatcctcatagacctgatactcaagaaactgcaggtgcataacgcagccgttggctacatcaaaggagtaaaggcaccaatcaaaagaaacgctgagcaacacgctaagtttccctattcaatcaggatagactttaagaacttctttagctccatcagcttttccgacctgaagaaagttttggaaaactctagcctggaactcagtctggatgactataaggtcctggagctagtactgttcaaaaacggtttgccaataggggctccttcatcccccctgatttctaatatcgtgatgttcgaactcgatgaattattagccagagaggccttgaaagtcgactccaatagtctttatacccggtacgcggacgatattgtgttctcaacaagcaagaagaatggatgcaaagattttctcaagaaactgaagagcgtcctgatcaattacaatcaccctaagttaacgatcaacagttcaaaaaccaagttcatgtctaggaagtctaaacgcatggtgactggcctcataattaccccgcagggcaaagtttccatcggacgtgaaaacaaggagttcattaagatgctgctttaccagtataacaagaagctgctgaatcccgagcaggtgtcttatctaactgggtacctgtcgtttattattgatgtggagcctgccttctttaatacgcttgtcatcaagtacggcgctgtggtgagtaaccttcttaaaaaaatctga

SEQ ID NO: 11919 - RNA, 942 nt, synthetic construct
  source 1..942: mol_type = other RNA
atgccagataaactgaacttagtgggcaaactgtcatttttcctgggcgcctcagaagaggatatcaagacttctgcgaattctatgagccggaaatataagcagtacaaaatccccaagaaaaatggaggtagccggactatcctgcacccttgcagacctctcaaagcactgcagtatgccatccacgaggtacttcttaataaattggaagtccatcctatagctcatgcttatgttcccaatcaaaagtctccgctgaagcagtccgctaaagcccacacgaactataagtacacaataaggattgacttcgagaatttctttcccagcatcaggccggaggacctggagctgcagatcaacaagaactttattctgtcaaagacagataagtacctgctgcgaaccgtgttattttaccagaagaacagaggaagcaggcccatcctaccaattggcgcaccaacctctcctactataagcaatattgtgatgttcaacctggacgagctcctattgaagacatcaaaagaacatgatcgggattccgccctcaccaggtacgccgacgatatctactttagtaccaacattaagggctgctgtaagcttttctatgacgagattttccaactcctaaaacgcattgacagtccccgcctgaagatcaatacaaacaaaacgttgttcctctccaaaggtactaagagagtggttaacgggcttttcgtgacccctaacggaaaggtcagtattgggcgtaagcgaaaaacacagatcaagagcctgatctacaaacactcccagaccgctcttatgggcaaggaattgctccagactcgcgggttgttagcattcattcaagactgtgagccagaattttataataccctcgccctgaaatacggggtccacttttattccataaaggaatcgtga

SEQ ID NO: 11920 - RNA, 930 nt, synthetic construct
  source 1..930: mol_type = other RNA
atgtcccggatcatcgatatcataagcaagtacactgggcttgacccgcacaaaatcctgaagattacctatgactcccccaccaactataagctttactacatcaagaagaagaacggagactcaagagcgatctttcacccatctaaagagacgaaaatgctgcagtatgcactcatggaaaaattccttaagaagattccagtccatgaatttgcaatggcctacaaaaaaggtattaaaagccccttgaaaaagaacgctttataccatctgaatactcagtataccctccacatcgattttactaacttcttcccctcaataattcctgaagatttttggagagctgtaagcgtggcctttcctggaaaagagttcgaaacaagtgacatcgaactcatcaataatatcctgttcatcaaggttaaggggaaatgcttcctgtcaattggcgctcctacttcaccaatcatcagcaacatagtcatgaaagagatggatgcccagtttttgaaactatgcaaaaccctggacgaatatagtgtgtatacacgttatgccgatgatattaacatctccacgaatattaagggtttctctcagaagatatactactcgataaagcaacacctcagcgagacagagtctccaaaactcaccattaatgagaagaaaacctacttcctgtctaagaaggggaatcggctgattacaggcctatgtatcacaaatatgaattccgtggttattccccgcaacaaaaagaggattatcaggagcttgattcatacagagctgacttccaacaaaaaggacaaaacccgactgagtaagatcaagggataccttgccttcattaaggacatcgagcctgacttttttaacaagctggtgataaagttcggcgacggcattaacgatttatga

SEQ ID NO: 11921 - RNA, 951 nt, synthetic construct
  source 1..951: mol_type = other RNA
atgtccatactgaagggcctcctcagcaagtacacctcattgtcgattgacaatatcagcaacatcatcaagaaggcccctgcgtcatacaagacttacagaatcgaaaaagccaatgggggctatagggaaattaaccatcccgctaaagagacaaagaccctgcagtacgccctcatggagatcattttcaaaaaaaacgacgtacacccaatcgctatggcctacaagagaggagttgagagtcctacattcgaaaatgcacggctgcataaggactacgaatattcactccggctggacttcaagaacttttttccttctatcaaacccgatgatataatctccatcgttaaggattcttccaaatacgagttcgatgacacagattattctgacctaaaaaggatctgtttccgcaagaatcacattaaagggtaccagtatggacttgcagtcggagccccaacaagtcccatcataagcaacatcgtgatgtatgactttgatgaggcaatggagaagatttctaaggaactggataaaagctcgaccgtgactcgttacgctgacgacattgtgtttagcactaacgaaaagggtatttgcgcgaaattttattccagcgtacgcgaccacctgaatgatcaggaccttagtttagagtttaatgaggaaaagacggcattcatgtccagagggaccaagaaagtcattaccggcctggtgatttctaataagggtaacgtgtctatcggatacgataaaaaagagaaggtgaagcgaaaagtttacaagtatagtaagggggatttagaagactcagacatacttagcttgaaaggctatctggcttatatccaagatgtcgatccggatttcttcgacaagctgaatattaaatacggcgccgacatattggacgatattatgtcctttgagaacgagtga

SEQ ID NO: 11922 - RNA, 942 nt, synthetic construct
  source 1..942: mol_type = other RNA
atgcacaagttgttcgacgccatgtatcatggaaaataccgctttgatgaatttttagctctctctcccgaggagaattactcccctgtacattggaaagctcgaaccatctacaaaccaagtaggactcttcgggattttcatacttttttgagtggctttgtgcttgagcagcttcccattaatactagcgtgtcatttgcatatcgcaaagggacgacactagctcaggcagttgcccctcatgcaaagtcgagagccttcttccaaacagacttggagcggtttttcgattccataacaacccccctcataagaaggatcttgatcgaaaaccagaccccggtcctcgatctgcaggctcacttggatcacatcctaaagctgctcaccatcgacgacaaactgccaataggatattctaccagccctctggtgagcaacgcctgcatgcacagcttcgaccagcggttagcacagatctcacatgataggggttggatttacactcgctacgctgacgatatcatgctgtctactcaggacagagccgatctgtctgatgcatccaccgtcataacaggctgtcttgcgacggaactcgggtacggcttcaacctcaaccctggcaagtcaaaactgaccaccattggacgcaaggtgaagctcctggggctggtgatcctgccaagtggggacattgcgattgacagagacgttagaaatcgaattgaaagctggatttacttctacctgagggacagggcccggctgtccaagattttcgaagagacatataaggacggcctcgaagagggcttggagcggctgtctggtctgatcagttatgctcacgccgccgatcccggatatctggagaagctgcgttcaaaattcggtactacagtcatcgatagcttacttcaccgttccgcccaatga

SEQ ID NO: 11923 - RNA, 957 nt, synthetic construct
  source 1..957: mol_type = other RNA
atgacaccacagcccttacacaagctcttcgatgctatgtaccatgggaagtatcgttttgacgaattcctggccctttcgccccgtgagaattactcccctgttagttggaagagcagaacaatctacaaaccgtctcgcatgcttcgcgattttcacactttcttgaacggatttgtgctggaacatcttccagtaaatacatcagtgagcttcgcttataggaagggtgcaactctgatccaagccgtggagccccatgcgaagtctcgagccttcttccaggctgacctggagcggttttttgatagtatcaccacccctctgattaggagggtgctcctggagtccgaaaccccggtagcagacttgcatgatcacctcgaccacatccttgggctcctgaccattgatgggaagcttccaataggatatagtaccagccctattgtcagcaacgcatgcctgttgtcattcgaccatagactggcccaggttagccaggaccgaggctggatatataccaggtacgccgacgacatcatgctctccactgaggatcgcgctaatctgagtaatgcaggggctgtgattgagacgtgtctggcgtccgaactgggtgatgaatttaagctaaaccctgccaagtcaaagctgactacagtcggacgaaaagtgaaactgctcggtctagttattctcccaaccggcgacattgctattgatcgggacgtgagaaacaggatcgaggcctggatccacttctacttacgggatcgggcacgcctgctcaaaatattcgaggaaacttactctcagggcatggaggaaggcttagagcgcctaagcggcatgatctcatatacgcacgccgccgaccccgcgtacttggaaaaattgcggagaaaatttggaacaacagtcatcgattccctgctgcacagatctgcccaatga

SEQ ID NO: 11924 - RNA, 957 nt, synthetic construct
  source 1..957: mol_type = other RNA
atgacgccacagcctctccacaaactgttcgatgcaatgtttcatggcaaatacagattcgaagagttccttgccctgacacctgaagagaactgcagccaggtgagatggaagtcacggactatttataagccttcaagtactctgaaggatttccacgtgttcctgagtcgcgtggcattggaccacctactcgtagacacctctgttagcttcgcctatcgtaagggggctactctcatacaggccgtcgctccgcatgcgaaatctcgggccttctttcagacagacctcgagcggttttttgattctatcacaacaccccttatccgacgcgtcctcgtcgagaatgaaactcctgttaccgatttgctggaccatttggatcatattctgcgtctccttacgatcgatggtaaactgcccattggctactccactagtcccatcgtgtcaaacgcctgtctgctgagcttcgatcagagattggccaagatttcagacgaccgagggtggatctataccagatacgcagatgacatcatgctgtctacccaggatagggcagacctttccgatgcgggagccgtggtagaagactgcctggccagtgaactaggagacggttttaacttaaaccaagccaagagcaagctgaccaccattgggaggaaggttaaactcctaggccttgtgatcctgccaagcggagacatagcaatcgatagggatgtcaggaataggatagagtcctggattcacttttatctgcgcgacagagctaaactccttaagattttcgaggagacaccaaatcaggggatggaggagggactggaacggctcagcggcttggtgtcgtacgctcacgctgctgaccccgcgtacttagacaaactgcgctccaagtttggcaccacagtgatcgactctctgttacaccggtccgcccaatga

SEQ ID NO: 11925 - RNA, 957 nt, synthetic construct
  source 1..957: mol_type = other RNA
atgactccacagcctctacataaactgttcgacgctatgttccacgggaaatacgggtttgaagacttcttggccatctccgccgaggagaaccactcacttgtgaggtggaagtcgcgaaccatttataaaccttcttccactctgaaagatttccatgtttttctgtctcgcgtcgttttagatcacctgcccgtggacgcatccgtatctttcgcttacagaaggggcgcaagcctgatacaggccgtggagccacatgcaaagagtcgcgcttttttccaggccgacctggagcgcttcttcgatagtatcacgacaccacttataaggaaggtgctcgtcgaatcacagacccccgtgaccgatctccatgaccacttagagcacattctgaagctcctgacagttgaaggtaaactgccaatcggttttagcaccagtcccattctctcaaatgcctgcctcctgtccttcgaccagcggctagcccaaatatcacatgataggggctggatctacactcgttatgctgatgatataatgctgagcacgctggaccgctctaagcttagcgatgcgggaacagtaatcgaagactgtctctccgcagagattggagacgagtttaagctgaacccggccaagagcaagctgaccactatcgggagaaaagtgaaacacttgggcctggtgattctgccttccggggacgtcgccattgatcgtgatgtccggaaccgaatcgaatcttggattcacttttatcttagggacagagctaagttgctccggatctttgaggagacacctaatcaaggcatggaagagggattggaaagactatcgggccttgtgtcttacgcgcacactgcagaccccacctatttagacaagttgcggagcaagtttggaaccacagtcatcgatagcctcctgcatagaagtgctaaatga

SEQ ID NO: 11926 - RNA, 957 nt, synthetic construct
  source 1..957: mol_type = other RNA
atgactccgcagccgctccagaaactcttcgacgcaatgtttcacgggaaatatcgttttgacgaatttcttacgctgagtcccgaggataattatgtgcctgtccgctggaagacccggacaatttacaaagccagccgaactctgaaagattttcacaccttcttatcctctttcgtgctcgagcatttaccttccgacaccagcgtgtcattcgcttatcgcaagggcgccgctttgatgcaggccgtagagccccatgcaaagtcaagagcattctttcaagccgacttggagcgattcttcgactcgataacagccccactcatccggaaagtgctgaccgaaaatcagacaccagcagctgaccttcaggaacacttggagcatgttctgaacctactgacaattgacggcaagctgcctattggatactctacttcaccactgctcagtaacgcgtgcctgctgccatttgaccggcgcctggcacaagtctccctggaaagaggttggatttacaccagatacgccgatgatattatgctctccacgcagcacaggactgatcttagcgaagctaaaaccgtgatcgaagagtgtttggccacagagttgggagcaggtttcaacctcaaccccgcgaagtcaaagcttacgaccattgggagaaaggttaagctgctgggcctggtaatactgcccaccggtcacatcacaatcgacagggctgtccgtagccggatcgagagcggcatccatttctacctatctgacagggctcgccttggcaggatatttgaacgagagaatgatgaggggatggaagaggggttagaaagactgagcggactgatctcctatgctaatgccgcggatcctgcctacctcgagaagcttcgccggaaatttggaactactgtgatcgattctttcctacacaggagtgcccagtga

SEQ ID NO: 11927 - RNA, 957 nt, synthetic construct
  source 1..957: mol_type = other RNA
atgacaccccagcctctgaggaagctgtttgacgctatgtatcatgggaaatataggttcgaggagttcctggctctttctcctgaagaaaactattctccagttcactggaaaaaccgcaccatatacaaacctagtagagcgctcaaagatttccacttatttctgaatggattcgtgctcgaacaccttccagtaaatacctctgtaagcttcgcttacagaaagggtaccacccttttacaggccgtcgagccccacgcaaagtccagagcctttttccagacggacctcgaacgattctttgactccatcacaacaccccttgtgcaaaaagcattggccgaaaatgagactccagtcgccgacctgtcagaccatttggatcatattctgaagctgcttactatcgatggccagctcccgattggctacagtacttcaccaattttgagcaatgcttgtctactgagcttcgaccaacggctagcccagattagcgcggagagaggttgggtctacactcgttatgccgatgatatcatgctgtcgacacaggaccgagccgagctcctcgatgctcggacggtgatcgaagactgcctgaccactgaactgggtgatggctttaacttgaaccctgcaaagtcaaagctgaccaccactgggcgcaaaattaagctgctcggactggtgatcctgcccaccggaaaaatagccatcgaccgggacgtgcggaacaggatcgaatcatggatctacttctacctgagggatcgctccagactctcccgcatatttgaggagacatacgacgagggaatggaagagggcttagagaggctaggcgggcttgtgagttatgcatacgcatccgatcacgcttatctcgagaagctgcgccgtaagtttgggacgacagttattgatagctttttgcgacggtctgcccagtga

SEQ ID NO: 11928 - RNA, 957 nt, synthetic construct
  source 1..957: mol_type = other RNA
atgacacctaggccacttcagcaactttttgacgccatgtaccacggtaagtatagattcgaggaatttctggccctgaagccgcaggagcactactcactgataaggtggaaaactcgcactatctacaagccaagcaaaaccctgaaagactttcacttctttttaaacggtttcgtcctagaacacctgcctgtggatacgagcgtaagtttcgcttatcggaaagggtctaccttgatgcaagcggtggaaccccattcccgaagccgggctttcttccagaccgacctagagagattcttcgactctatcacgactccattgatccagggagtgttgcagagaaatcagagccctgtggctgatctcgccgaccatttacatcatgtgctgggcctgctgacaatcgatgggaagctgcccattggttacagcacctcacctttactctccaacgcatgcctgcttggcttcgaccagaggctcgcggccatttctcagacacgcgagtggatttacacccgctacgccgacgatattatcgtctctgccaacgatcgtgctaccatagcagatgctagtgctgtaattgaagagtgtttggccagtgagctgggggacggatttaacctgaataagggcaaatccaagttgacaactattggacggaagatcaaactcctcggacttgttatcctccccaccggcgccatcgttatcgatagggatgtgagaaatcggattgagagctggatacacttttatatccgtgaccggagtcgactggcgaaaatattcgaggaggaacgcggagaaggcatggaagagggccttgggaggctctcgggcctcatttcatacgcctatgcagcagatcccggttattttgaaaagctgcgatcaaagtttgggacaactgtcatcgactccctactgcacagatccgcacaatga

SEQ ID NO: 11929 - RNA, 921 nt, synthetic construct
  source 1..921: mol_type = other RNA
atgtatcacgacaagtacagattcgaagagttccttacgctgtatgcaggagatcattatagccaagtgctgtggaagaatcgtacaatatacaaaccatctgccaaactgaaggactttcaccattttatcggcggattcctcctggaacacctccctgttgaccagagcgtctcttttgcctacagaaaaggcgcaacacttcttcaggccgtccaaccccattccaggagccgtgcgttttatcagacagatctggaaaggttcttcgactcaattaccaacaacttgatccggtccgttcttgagcaagccgccacgccagtgtctgacctttcagaccatttggaccacattttgtcactgttaactatcgatggccgcctgcctattgggtacagcactagtcccatactctcaaatgcctgcctgtatggctttgataagaggctggcggccatcagtcacgaaaggggatggatctacactagatacgcggacgatataatcgtatcggccgctgaccgactcgctattgaggatgctcctcaggtaattgaagactgtctagggaccgagctcggcgacggcttcaagttaaacagttccaaaagcaagctcaccaccattgggcgcaaaattaagttgctcggtctggtgatactcccgacaggggcaattgtgatcgatcgggaggtgagacacaggatcgaagcttggttgcacttttacgtgagcgatagaccacgcctagcaaagatctttcaggaggagcggaaagagggtctggaggaagggttacagcggctgtccggactgatcggatatgcccatgctgccgatcccctgtacctggagaaactacgagctaagttcggtaataccgtcatcgattctttcctgcggcgctccgcacagtga

SEQ ID NO: 11930 - RNA, 921 nt, synthetic construct
  source 1..921: mol_type = other RNA
atgtaccacgagaaatatcggtttgaacagtttctagagctcaaacccgaggagcactacagtagtgtgctctggaagaataggacaatctacaagccaagcagtattctgagagagttccactacttcttgaacggattcttgttggaacacctgcccgtcgatacagtagtatccttcgcgtatcgtaagggagctactctgttgcaggcggttgagccacatgccaactctagagcattttatcagacggatttggaacgcttttttgacagcattacctcagatctcatccgaagtgtgctttctaggtatgaaacacctgtttctgacctgtctgactatatcgaccatataatcggtctgctgaccatcaatggctcactgccaatcggctactcgactagccccatcctctccaacgcttgcttactgggcttcgataaacgacttgccgcaatttcggacgaacggaaatgggtgtacactaggtatgctgacgacattattatcagcgccgacgatcgtttatcaattaaagacgctgatcaagtcataaaggagtgtctcaaactcgaattcggcgatggttttagcctgaatgagtccaaatcaaagcttaccacaatcgggagaaagattaagatcctgggcttcaacatcctgccgaccggggccatttctatcgagcgcggagtcagaaatcggatagagagctttctctacttctatgtgaaggataggcctaagctagcccgcattttcgaggaggaacagggtgactccatggaagatgggcttctgcggctttccgggctgatcagctacgtgtacgcagccgaccctgcatacctgaaaaaattacgcgttaagtttggcaacaccgtgattgatggattcctgcatagatccataaagtga

SEQ ID NO: 11931 - RNA, 957 nt, synthetic construct
  source 1..957: mol_type = other RNA
atgactcctcagccactcgagcagctgttcgatagcatgtttcatggcaaatacaggttcatcgagtttatggaacttaaacccgagcaacaccgtgtgcgggtcagctggaagggcagaacaatctacaagcctacaggcgtgctcaaagccttccataggtttttgaaccactatgttctcgatcatctacaggtggatgaaactgtctcttttgcttaccgccggggcaccacattactccaagcggtagagccccacgcccattcccgagcattctttcaaacagatttagagcgtttctttgacagcattaccaccgaccacatccgaacggccctggaaactagcgatatccctgtggaagatctgggtcagcacctgggacatatcctcgagctgcttaccatagacggcaagttaccaatcggatacagcacttctcccattctgagtaatgcatgtctcctgggttttgacagtagactgaagtctcagtcacgcgatcgcggctgggtttacacacggtatgcagacgacataatcctgtcagctgccgacagagagtccttggccgacgccgtggctgttgtggaagattgcctgtccagtgagctaggtgatggattcgcactgaacccgaccaagtctaagcttacgaccattgggaggaaggtaaaattgcttggaagggtcattgtgccaaccggggtcattgttattgaccgagaggtgagaaatcgcatcgagtcatatctgcacttctacatcactgaccagtccaaattggctaggatatttcgcgaagatcgggaagaggaatgggaggatgggcttcagtcattgagtgggctgattagctatgtgcacgtagcggacgtggcttatctcgacaagctgcgggccaaattcggagccacagtcatagactccttcctgcacagatcggcaaagtga

SEQ ID NO: 11932 - RNA, 957 nt, synthetic construct
  source 1..957: mol_type = other RNA
atgacacctcgacccctgcatcagttgtttgatgctatgttccacggcaaatatcagtttgatgagtttttggccttaaagccagaggagcaccgaacacgcgtcagttggaagggacgtacaattcacaaacccagcggcatactcaagaattttcacaggttcttgcactcattcgttctggaacatttactggtcgatgagaaagtttcgtttgcctatagaaagggtaccaccctgttgcaagcagtcgagccacacgcgcagtccagggctttcttccaaactgaccttgaaagatttttcgactcaatcacctccgacctcgtgcgaaacgtgctcaaacaggcagaggtggctgttggcgacctggatgaccacctggaacacatactggcccttctaacgattgacggaaagctgccgatcggatattctaccagccctattctgtctaacgcgtgcctgtctgggttcgacgctaggcttagtagtataagcatcgacagagactggatatacacgcgctacgcagacgatatcatcatttccgccgacgatcggacagccctgatcgatgccgcagcagtgatcgaggaatgtctggctagcgaactaggggagggcttcactctcaaccttgcgaagagcaagctcacaactgtgggtcgcaaagtgaaggtcctcgggcgggttatcctgcctactgggaccatcgtgattgatagagaagtccgcaatcggatcgaatcctggctacatttttacaccagtgatcgcccacgtctcgccaaaatttttagagaggaacggaatgaggagtgggaagaaggcttggagcggttatccggacttgtatcatatgtacatgtggccgatccctcttacctggagaagctgagggctaaattcggtaccactgtgattgactcagtgctccataggagcgccaagtga

SEQ ID NO: 11933 - RNA, 957 nt, synthetic construct
  source 1..957: mol_type = other RNA
atgaatcctcagcctttgcatcagctctttgatgccatgtatcacgacaaatatcgttttgacgaattcctggcgctgaaaccagaggagcattatagccccattccatggaaaagtcgcacgatctacaagccctcgcccactctgaaagacttccacaagttcattacaggcttcctcctggactatctgccagtcaacgattctgtgagctttgcatacaggaaaggggcctcattgcttcaggccgtgactccgcatgcttacagtcgcgcctttttccagacagatctagagagatttttcgaatctatcaccagctccctcattcgaagagtgctggaccaagcgtccacccctgtcgctgacttggcagagcatgttgaacacattgttcgcctcctcaccatagaaggcgcgctgccaatcgggtacagcacgtcccctatcttaagcaacgcctgcctcctggggttcgatgcacggcttgctgccacctcatgcgcccgaaattggatctataccaggtatgcagatgacataatcatatccgctggctcacgcgctgccattaacgatgtgggacaagtcgtggaagaatgtcttcgggccgaactgggtgattctttcagattaaatcaggataagaccaagctgactaccatcggacgtaaagtaaagctgctgggattcgtggtgcttcccactggtggcattgtcgttgacaggaacgtcagagatagggtagagacattactctacttttacgtgacagacagaagtaggttggctaagatttttgctgaggaaaatgatgaggtgatggaggcaggcctggagcggctgtctgggttgatctcatacgtgcacagtgttgacgaggcctaccttgagaagatgcgaatcaagttcggaagcactgtaatagactcctttctacacaagacagcacggtga

SEQ ID NO: 11934 - RNA, 957 nt, synthetic construct
  source 1..957: mol_type = other RNA
atgacgccacgcccactgcgccagctctttgatgccatgtaccacggcaaatataggttcgaagagtttcttgagctgcgccctcaggaacactacaatatagtccggtggaatagtaggaccatttataagccttctaaaaagttgaaggcgttccactacttcctgaacggcttcctgctggagtatttaccagtgaaccagtcggtgagcttcgcttaccggaaaggcgccacgctgcaacaagctgttgccccccacgccaggtcaagagccttttatcagacagaccttcagcgattctttgattcaataaccagcgatctgattcgttccactctagaaggagcgtcaactcctgcttctgacttgccagagcatattgaccacatcctcgaccttcttaccatcaacggaaagctccccattggctatagcacttctcctatactgagtaatgcatgtctcctgaggttcgacgagcggctggcagccatttccaaggatcgtcagtggatttataccagatacgctgacgatatcatcatttcagccgatgataggaagaccattggtgacgccaaggaactgatagagagttgcctggctgcggaactcggaggtaacttcgcacttaacccctctaagagcaagttaacaacaattgggagaaaagtaaagcttctggggctggttatcttgccgaatggtgccgtcgctatcgaccgagatatcagaaatcggatcgagactctgctccatttttatatctccgatcggagcagattggcaaaaatctttgaggaggagcgatccgaaggcatggaagaggggctacagcgcctctccggactagtgagctacacatacgcagccgaccccttatacctggaaaaattgcgcgctaaatttggggccaccgtgatcgacagtctcctgcataggtctgcagagtga

SEQ ID NO: 11935 - RNA, 957 nt, synthetic construct
  source 1..957: mol_type = other RNA
atgacaccgcggccccttcatcaactgttcgacgcaatgtatcacgggaagtatcgctttgaagagttcagcgagctgaacccccgggagcactacacttctgttcagtggaataatcggaccatttacaaaccttcgaagaaactaaaggattttcactcattccttaacgggttcctgctggagttcctgcccgtcaaccagagtgttagttttgcctataggaagggagccacgctattacaggcagttatgcctcatagccggagcagagctttctacaggaccgatctggagcgattctttgacagcattaccagcggccttgtgaggtcagcgctggaaagggctgtcaccccaatcagcgatttggcggaacacattgaccacttactcgatctcctgactattaatggaaagctccctatcgggtattctacatcgccaatcctctccaatgcctgcctgctcggctttgacgaaagattggcatccatctcccgagaacgccagtggatctacactagatatgccgatgacattatcataagcgcagatgataggagtgccatagaggccgcctccgacgtgattaaatcatgtctatcaaccgagctgggcgatgaatttgctctgaacagttccaaaagtaagttcactacgatagggcgtaaggtaaaactgttaggtcttgtgatcctgccaaatggaaccatagctatcgatcgcgacgtgcgtaacagagtcgagagctggttgcatttttacgtgtctgaccggtctagactggctaagatttttgaagaggagcgatctgagggcatggaagaaggattgcaacgcctctcaggtcttatctcctacgtgtacgctacagaccccagatatctggagaagttgcgcgcaaaattcggcacaacagtaatcgactccttcctccataggtctgcccagtga

SEQ ID NO: 11936 - RNA, 957 nt, synthetic construct
  source 1..957: mol_type = other RNA
atgaatccaaggccgctgcaccaattatttgacgccatgtatcatggaaagtacaggtttgaagagtttctagccttgaatcctgaggaacactacacgccggttccctggaatcggagaacaatatataagcctagtccaacacttaaggaatttcaccggtttctcagcgacttcctgcttgattaccttccagtggaccagtctgtatcattcgcctatagaaagggagccactctcctgcaggccgtgacaccccacgcacatagtcgcgccttcttccagactgatctggagcgttttttcgattccattaccctgaacttaatccgacccgttctcaaccgggcggcacatcctgtgtcagatctgcctaaacatatcgaacacatcctgaggctcctgaccatcaacgggaaattacctataggttatagtacttccccaatactttcaaatgcctgcttgtttggcttcgataaaaggctcaccgtgatcagcaacgagagacattggatttacactaggtatgctgacgacatcatcatttccgcaggggatcggctcgctatcgaggatgctagctctgtcattgagaactgtctatcagcagaactcgggaagggctttgtcctgaaccagagcaaatccaaattgaccaccattggacggaaagtgaaattgctgggtctggtcattcttcccacaggagccatcactattgaccgtgacgtgcgaaataagatggaatcgtggttgtacttctacgtaacagaccgcagccgcctagcgaagatattccaggaagagcgcaacgagagcatggaggttggcctgcaaagactctctggcttcatctcttacgcttacaccgctgaccccgcatatctggagaagctgagaaccaagtttggcaatacgatcattgatagtttcctgcaccgatccgctcagtga

SEQ ID NO: 11937 - RNA, 957 nt, synthetic construct
  source 1..957: mol_type = other RNA
atgacaccccgtcctctccaccagcttttcgatgccatgtaccacgaaaagtacagatttgaagagtttctggccttaaagcctcaggagcattacagcccagtttcttggaacagacggaccatatataagccttcaccaaaacttaaggaatttcaccacttcttgtctggcttccttctcgagtttctacccgtggacaggagtgtctccttcgcttacagaaagggcgccaccttgctgcaagcggttgctccccacgctcaatcccgcgcattttttcagacggatcttgaacggttctttgactcaatcacttctgatctcattaggtccgttctggaccaggcagagactccggtatcagacttgggcgaccatgtggaacacatcctcgacctgctgacaatcgacggaacgctccccattggatacagcacatcacctgtgttgtccaatgcttgcctgtttggttttgataagaaactggcggccatctgtcatagtcgtcagtggatctacactcggtatgctgatgatatcattatatccgccgacgatcggctgagtatcgaggatgccgaccaagtcattgaaaattgcttggtcgccgaactcggcggaggtttcaaattaaaccagaagaaatcgaagctgactaccgtaggcaggaaggtgaaactcctagggctggtgattcttccaaccggggtgatcgtcatagatcgcgagattaggaatagaattgagacatggctgtacttctatatcaaagatcgatctcgcctcagtaaaatcttccaggaggatcgaggggagggtattgaagaggggctgcagagactgagcggcctgatttcttatgctagcgccgcagacccaatctatctggacaaactaagggcaaagttcggaaacaccgtgatagacagcttcttacatcgcagcgcacagtga

SEQ ID NO: 11938 - RNA, 957 nt, synthetic construct
  source 1..957: mol_type = other RNA
atgactccgcgcccactgcgacagctatttgatgcaatgtatcacgagaagtaccgcttcgaggaatttctggccctgaagcctgctgaacactatagcccagtccattggaatagacgaacaatctacaaacccagctcgaagttaaaagaattccatcgattcctaaacggcttcctcttggattatctacaggtcaacgaaagcgtgtcttttgcatacaggaaacggacgtccttgctgcaggcggtagcccctcacgctcattcacgtgccttctttcaaaccgaccttgagcgcttcttcgactctattaccagcaacctgattaggtctgtgctggagagagccgatacacccatagcagatcttgctgactacatagaccatatactggatttgctgaccatcgacggtaagctgcccattggatatagtacttcccccattctctctaatgcctgtctcctgggctttgacaaacaacttgccgccctgagcgccgaaaggcagtggatctatacaagatacgctgacgatgtgattatctccgctaacgacagggcgtctatcgaagacgcgagtcaggttatcgaaaattgcctcgcaatcgagttaggggacggttttaagctcaatcagaagaagagtcggcttacctccattggcaggaaagttaaactcttgggactcgtgatactgccaaccggcgcaatcgtcctcgatagagacgtgaaaaaccggatcgagacgtggctgcacttctacgtgacagatcgggctcggctggcaaagatctttcaggaggagaagaatgaggggattgatgaagggctgcaacgtttatccggcctgatttcatacgccttctcagctgatcctgcctatttggagaagcttagagccaagtgcggaagtactgtaatcgacagctttctgcaccgctcagctaaatga

SEQ ID NO: 11939 - RNA, 957 nt, synthetic construct
  source 1..957: mol_type = other RNA
atgaccccacgacccctgcatcagttcttcgacgccatgtaccacgggaaataccagttcgaagatttccttgaactagaacccaaggagcattatactcccgtgcctctttccggccgcaccatatacaagcctagcaaggtgctcaaagagtttcacacttttttgaacggatttgttctggtccatctgccggtgaatactacagtgagtttcgcctatagaaagggcgtgagcttgctagaggccgttaccccccatgctgactcacgggctttttatcaaacggatattcagcacttctttgaatccataaacgtgaagctgatcaaatccgctctcataaaagcagacaccccagtaacagatctcaacgatttttttgaccacattctggatctgatcacagtggacgggtctttacctataggatactctacctctcctatcctctcgaatgcctgccttcacgggtttgacgagcgtcttgcctacatctcctacaagaatgaatggatctatacgcgatatgcagatgacatcattatttcaggcgcggataggaaaagtgtccagaacgctcagagcgagatcaaaaactgtctgctcgaggagctgggtgagggtttcaagctcaacctgaataagagcaagttgaccacagttggcagaaaagtgaagatcctgggtctggtcattttgccaaatggagacatttccattgatagaagtgtccgggacaaaatcgaagcaaggttattcttctacatcaacgatcggaagaagcttgcgaaaatttttgtcgaggaaaaaaatgacggcatggaagacggcttgcaacgcctgtctgggctcatcgggtacgtacacacaatcgacccactgtatctggagaagttaaggatgaagttcggaactactgtgattgattcattcctgcatcgcagcgcccagtga

SEQ ID NO: 11940 - RNA, 1026 nt, synthetic construct
  source 1..1026: mol_type = other RNA
atgcctgacctgaaagcctcctgtcgggttggccattttgtgtgcgcgccaatctccaccatgactgatccctccgtatcagtcaaggcacggtctttagagtacctgtttgaaatgatgcaccacggtaggcacagtttcgacgatttcctgcgtctcccggtcgataaacatttccagagagtggattggcgcaccagaacaatatacaagccttctaaaactctcagggcttttcatagcttcctcaatgtgtttgttttggggtatctccccgtgaacgaacgcgtctgcttcgcctatcggaaaggcgctacactgaccgatgcagtcgctgttcacgctgaaagtcgggcatttttccagacggatttggccaagtttttcgacagtattacatcccaaatggtgcacgatgcacttgcccgtgcgtcaacccccgctgaagaccttccacagttcatagaccgaatcgtcgagttgactaccatcgatgagcgcttagccataggctttagcacgagccctctgcttagcaattcatgcctgattgccttcgacaatatgttggaggatgtgtgtcgggatagacaactcatttatagtcgctacgccgacgacattgtggtgtcaggacagtcccccgacaagctggacggaattgaaaggctaatcgcgcagctgctagacaaggctctggggccgactttccaaatcaacactgcaaaaagcaggatgctccgtgttggtagaaaggtaaagatactgggcttgaacatcctgccatctggccgcattaccgtggatcgggagattcgcgacaaggtagagacacagctacacttttatctgaccgacagggcccgacttatgcgaatcatcgacgccgaacctgatgaggcattacagaagctgtcggggtacattgggcacatccattctgccgatccactgtaccttgagaaactgaggagaaaattcggagccacagtgatcgacagctttctccatagatctgctcagtga

SEQ ID NO: 11941 - RNA, 987 nt, synthetic construct
  source 1..987: mol_type = other RNA
atgaccaagaagcccttgcagatcctctttgatgccatgtatcacaacaagcaaaatttcgaggacttcgccaatggagacatagcatcccatttctctcggaagcctgtcactgatgactctgggaaaacgcgcgtcgttagcgtgcccgataaagttctgcggaaatatcattcctttctgaatctcttcgtgtttaatcagctccccgtgaatgaagaggttgtattcagttaccggaaaggtacgaatgtggccgccgctgtacagaaacacgcagcgagcaagcatttctatcaggcggactttagtaactttttcgagagcatcacaagcgacatcgtgagacactctatcttacgcggcgaagataagatccccgtggccgacatccaccaatatctggaccgaatagtggacctggtcaccttcgaggggagactcccacagggcttctctacctcacctgtcatctcaaacacagctctgctgccatttgacaaggacctggctacatactgtcaaaacaaacatttggtgtataccagatactccgatgatattaccatatcctccaatgacaaggagccgctgtttgagcttgatcacgtcattgccgaaattcttagttcttgcggctacagtgaaatgaagctgaatgaaaacaagaccaagataagctcaaagggaaggaaaattaaaatcctgggcatggtaatcctaccaaacgggcaggtgtcgcttgatgctaagattaaaaacaggatcgagactttgctccatctgtacgtgaacaaccagcagggattgtcagatattacagaaagcgacctagaggacggcctcgcaaaattatccggactgctgaattatgccaacactgtggatcaaggttacttagacaagcttcgtaggaagtacggggttacagtggtcgatattctcattcaccagcctaagaagactgatgctaaaaaagcagactga

SEQ ID NO: 11942 - RNA, 987 nt, synthetic construct
  source 1..987: mol_type = other RNA
atgaccaagaagtcactgcaaacactatttaacgctatgtaccataacaagcagaatttcgaggatttcgcgactggcgaaataaagcagcacttcagtaaaatgcctgtaactgatgctagcgacaaggccagactggtgttcattcccgacaaggttctgcgaaagtaccacagctttctgaatctgtttgtctttaaccgtctgccggtatataatgacgccgtcttttcatatcggaaaggaacaaacgctgccgcggctgtccgaaaacatagtgcatccaagcatttctatcaggctgactttagcaacttcttcgggtccattacgtctgatatcgtgagacgctcaatactgcacggagcagagcaattaccagtcgccgatcttcatcagtaccttgaccgtataatcgacatggtgacggtggagggcagactcccccttgggttttcaacctcacctgtgatttccaatactgcacttttgcccttcgacgaagatctcgccatatactgcagaaggaggcagttagtctacacacgctacagcgacgacattacaatcagttccaatgaacgggagagcttgctcgagttagacgacgcaatttctgatatcctcagcagtcgggggtacagcgaaatcaagctgaacgagaagaaaaccaagatctcgtccaaaggtaggaaggttaagatcttgggtatggtgattttgcctaatgggcaggtttccctggatgccaaaatcaagaacaggatcgaaacactgttgcacctttatgtaaacaatcaaccaggactctctgacgttactaaatctgacctgggcgattccttcgagaaactatctggcctgctcaattatgccaacactgtggatcagacctacctggataaactgcgccggaaatatggcgtgaccgtggtggatattctcatccaccagaacaagaaaaccgattctaagaaagccagttga

SEQ ID NO: 11943 - RNA, 987 nt, synthetic construct
  source 1..987: mol_type = other RNA
atgacaaagaagcccctgagagtactctttgatgcaatgtaccacaataaacagaacttcgatgacttcgccaccggggagattgacaggcattttactaagaagaccattaaggatgatgctgggaaagagcgattagtttttattactgatcgcaccctgaggaaataccatagctttctcaatctgttcatattcaaccggctccccgtgaacgaaggcgtggtgttctcctaccggaagggaacgaatgctgccgccgctgtaagaatgcacgcgggtagcaaacacttttatcaggccgacttcagcaacttctttggtagcatcacaagcgatatcgtccgacaaatcatcataaacggcgaggacgtcctgcctatcgcagacactaaccagtatcttgatcgtattgttgacctggtcaccgtggacgggcggttgcctatgggctactccacttcaccggtcatctcaaatgctgcactgttactcttcgacaaagaattggcgcggtattgtcaatctaagcagcttgtctatacaaggtactctgacgacattattatttcctctgatgaaaaggagccactcatggatatgagtcaggtgatcgccgacacgctgtcagactgcgattattatgacctgaggctgaatgaggagaagaccaagatttccagtaaaggacgcaaagttaagatcctaggcatggtaatcttgccaaacggacaggtgtcgctagacgccaagatgaagaatcgcatagaaacactgctccatctgtacgtgaataatcaagacagactttccgacgccaccaaaatcgattttgaagactcagtggtgcagctttctgggctcttgaactacgcaaacacaatcgaccaggattatctggataagctgagacgtaaatacggcgtgactgttgtggatatattaattcaccagcccaaaaaaaccgatagtaaaaaggctgagtga

SEQ ID NO: 11944 - RNA, 987 nt, synthetic construct
  source 1..987: mol_type = other RNA
atgactaaaaaacccctgcacgtactctttgatgcgatgtaccataataagcagaactttgaagactttgccgccggccaaatcagtcatagactttcaagcaagacagttactaatgagtccggcaagactcgattgatatgtattccagacaaggtcctgcgtaaataccactcattcctgaacttattcgtgttcaatagactacccattaatgaagaggttgttttctcctatagaaagggaacgaatgtagccgcggccgtcaggaagcattcagctggaaaacacttctaccaggcagacatttctaattttttcgggagtatcacctctgacatcgtgaggcggagcatattgcgtggcgaggagcaacttcctgtcgctgatatgcaccggtacctggacaggatcgtcgacttggtgaccgtcgaagggcgcctgccacaaggattttccacctcccctgtgattagcaatacagctatgttccctttcgataaagagctcgtaacctactgcctgaaaaggcagcttgtgtatacccgatactccgatgacattacaatatcgagtcaggaaaaagagccactcttagacttagacagagtcatcgccgatatcctgtgtgattgcgcctatcccgaaatgaagctgaacgagaacaagacgaagataagctctaagggtcggaaagtgaaaatcttgggcatggtgattttgcccaacggacaggtgtctctggactctaagatcaagaatcggatcgaaacactcctgtacctgtacgtgaacaatcagccggggctgtcagacattactaaaagtgatctaggtgacagctttgagaagctcagcggtcttctgaactatgcaaacacagttgatggcaactatctggataagctccgccgcaaatatggcgtgaccgtggttgatgtgctcatccaccagcctaagaagactggggctaaaaaggcaaactga

SEQ ID NO: 11945 - RNA, 984 nt, synthetic construct
  source 1..984: mol_type = other RNA
atgaccaagaaacctttgcagatcttatttgacgccatgtaccacaacaaacaagattttgccgatttcgccacaggcgacatcataaggagagttagctcgaaaaccgtgacaaacgacagcaccaaggagcggctcgtgttcgtgccagacaaggtactcaagaaatatcactcattcctgaaccttttcgtcttcaactacctaccaattaatgaggatgtcgtgtttagttatcgcaagggtactaatgttaccgccgctgttcgaaaacatcgcaacagcaaacatttctaccagaccgatatttccaattttttcgattctatcaccgtggatatcgtgcgcaggtgtattttgcggggagaggaacagacccccgtatctgacatgggagaatttattgaccggatagtagaactggtcacaatggagggcaagctccctctggggtttgcaacctcccccgctattagcaatactgcactacttccttttgatgattctctggccgcttattgcagccataagaacctggtttacacgaggtatagtgacgatataactatcagttcctccgagaaggaacccttgttcgcactggacgacgcgctgagggacatcctctctgcccacgggtttccgaatatgcagtttaatgagcataagacaaagatttcctcgacaggtcgtaagatcaaaattctgggcatggtgatccttcccaacgggcaggtgactctggactcaaaaataaagaatcgaatcgagacactcttgcacctttacgtcaacaaccaaagcgcgctcttcgatctcaccaaatccgatttagacggctcatacgaaactctgagtgggttcttaaactacgctaatactgtggaccagagctatctggacaaactgagaagaaaatatggagtcacggtgattgatacactgatccaccagccaaagaagtctgagtcaagaaagggctga

SEQ ID NO: 11946 - RNA, 987 nt, synthetic construct
  source 1..987: mol_type = other RNA
atgaccaagaaacccttacagtttttgttcgacgctatgtatcacaataagcaatcttttgcagatttcgccacaggcgatattggccgccacctgagcgccaggcaaattaccgacgatgctggaaagaagagagatgtttttgttcctgacaaagtgctgcggaagtaccacagttttctcaatctcttcgtgttcaactatttgtccgtcaacactgcggtggtattctcatatcggaaaggaaccaatgctgctgatgcggtcagatctcacgcctccagccgacatttctaccaagccgatatctcatccttctttccatcaataacagcagacattgtgcggagaagcatccttagggacgaagctcagacacctgtggaggatctgggggactacctcgaccggatcatagacctggttacaattgatggtaccctgcccatcggtttcagcaccagtccggtaatatctaacaccgcactgctgccatttgacgatgcctttgcagcccattgtcttaggaacggcctgatttacacccgctacagcgatgatatcacagtgtcgtctcaggagaaggcccccctactggcccttgacgcagtgattcaggacctcttatgccgctgcaacttgccagaaatgaggctgaacgagcgtaagacgaaaatctcctccactggaagaaagatcaagatcctgggcatggtggtgcttcccaatggggtcgtcacactcgacgctaaagtaaagaatcgcattgagactctcttgcatttatacgtgagaaaccagctagccctccaggaggttatgaaagcagaccttgtggaaagtgctgaaactctgtcagggttgctgaattacgccaataccgtcgatcagggatatctggacaagctacgaaggaaatatggcgtcactgtcgttgacacgctggtgcaccagcctaagcgtactgatagcaaaaaagacaagtga

SEQ ID NO: 11947 - RNA, 987 nt, synthetic construct
  source 1..987: mol_type = other RNA
atgaataaaaagccgctggagacgctgtttaacgccatgtaccacggcaaacaatcatttcaggacttcgctacctgcgacgtcgcgcaacgcgttaccagaaagacgatcagcgacaatagcgctaaagaacggattgtctacgcggcagacaaagtcctcgcaaaataccactccttcctgaatctatttatattcaaccacttgcccattcgcgaggatatcgtgttctcatataggaaggggacaaacgccgccgacgccgtcaaaaagcacgttaattcgagacatttctatcaggcagacatcgccaacttcttcccctctataagcgcagatagcatcaagaaagccattttgcggggaattcaccaggtgccagtttcagatgtggctgagtacctggaccgcatcatagacctggtcactgtggagtccgcattgcctttagggtttgctacttctccctcaatctctaacgccgctctgctgctgtttgacgatgccctttctaacgtgtgcctggaaaagggcctcgtgtatacccgttactccgatgacattacaattagtgcccaagaaaaggagtccctgctcggcatggatgcgaccattactaggctgttagccgaatgtgattaccctcagatgcatctcaacgacaggaagacaaagctcaccagtattggccgaaagataaagatcctcggaatggtgatccttccaaatgggcagttgacagtcgatagcaagatcagaaatcgtgtggagacaatgttacatttttatgtgaggaacaacgacgctctggttgacctgactaatactgatcttgatgaatccgtagatgtactcggtggactagtgaactatatcaataccattgatcagcggtacttggacaaacttcgacgccggtatggtgtgacagtaatcgacaccctgatccatagacagaaaaacaccgatagtaaaaggaataagtga

SEQ ID NO: 11948 - RNA, 942 nt, synthetic construct
  source 1..942: mol_type = other RNA
atggagcagctccggaatctgtttgatgaaatgtttggcggggaactgtccttcgacgatttcctgcacggtgatatctctaaccgggtgattaaaaagatagatggaactagagtcgtatactcggccgaccagacgcttaggagctatcaccgcttcttgcaacgtcacgtaatctcctacctgtatttgaactctgacgtggtgtactcctatcgcaaaagctttaatgttgctgacgcagttaggcagcatgcacaaagcaaatacttctttcagacagatctctctaactttttcaactccatcactagtaagctgatccatagtaccctgtttaagagtagtgagcgaatgaagttcctcaattctaccgaatattttgaccggattgtgatactgctgactgccaatgatagactacctcctggcttcatcactagccccagcatttctaacgcatgtttatctgagttggacgacgtcttccagaagttctgcattcataagaacctcattttcacgcgatattgtgacgacgtcatcgtttcagggcaaagccaggatgatcttcggattgctgctcaggagctgtcgaatctggttgagatctgctacaagggtgaattttcctttaacgtgaggaagtccaaattcaccaagatcgggaggaaaatcaagttactcggaatggtgattctcccaaatggcctagtgacaattgactcaagcttgaaaaagaaaatcgaagtgctgctgcactactacataaccgattcctttacatttcttagaatggtggacaatgatctgggcaagggaacacgctcattatgtggctatataagcttcgtcaatgcggtcgacccaacctatttccttaaactgtgctcaaaatacagttcagccgccatcgagaaccttctcagaatgcccaagtga

SEQ ID NO: 11949 - RNA, 969 nt, synthetic construct
  source 1..969: mol_type = other RNA
atgaccaaaaaaccacttgccgaactcttccgcgccatgtaccacggaaaatatgattatagggacttcataggcgaagctctttccagtaggtacaagccgctgaacgtcgggggtgctcaggtttcaaaagagcgattagtgtacgcccccgataagactttgaagatttaccattccttcttgaaccttttcctctttgaatacttagacgtgaatgaggaagtggtgttcagctatagaaagggagtgaacgtggtgggagccgtcagaaagcacgcacataataaacactttttccaggccgatctgcaggatttttttctgaacatcaatagtacgatggtaagagcggtgatcgaaaatgtggctgcaaggactccaatctctgatgttttagatcacgttgaccggatcatcgagctcgtcaccattgacggcacacttcccattggtttcccagcctcacctttgatttcgaacgctgtactgcgctcttttgatgaccgtttcgaggattactgcgcactcagaggcatggtctatacacggtactcagacgacctgatcgtctctagccagaatagggacgagctaactaacctggcggctgtgattgaagagatgctgcaaagcgttgggctggcccaatttaagctgaatcctgaaaagacaaagatcacatccgtggggcgaaaaataaagttgcttggcctcgtgatcctccctaacggagtcgtgtccgttgacattaagctcaagcagcagatcgagacaatgctgcacttttatataaccgacaatgcaaaattccgggactttagtgagaaagacctgactaaggccaccgagcaactaagcgggtacgtgaactacgtaaatacggttgatcccgcatatctggataaactgcgcaagaagtatggcgtcaccgtaattgataccctgatgcatcagggttctaaatga

SEQ ID NO: 11950 - RNA, 969 nt, synthetic construct
  source 1..969: mol_type = other RNA
atgacaaagaagccattagccgagctgttccgggcgatgtatcacggcaagtacgaatatcgagattttatctgcgaggccttagacgctaggtacaaacccatcaacgtaggcaggactcagacatcaaaggaacgcctggtctacgcacctgacaagactatgaagatttaccattcatttctgaagcttttcctcttcgagtacctggatgttaatgagagagtggtcttctcttaccgcaagggcgtcaatgtggttgaggccgtcaagaagcatgcacacaataaacactttttccaagcggacattcaggatttctttccctctatcgactctatgatggttagactcgttattgagtcggccgctactaggacccctattgcagatcttatggaccatgtggatagaataattgaattggtgacaatcgacggggcactgccaataggcttcccttcctcccccctaatttccaatgctgtgctccaccgctttgacgatagtttcgaagaatattgtgtaaatcgtggtatggtgtacactcgatactcagacgacattattgtatccagtcaaaatcgggacggattgaacaacttggccacagccatcgagaacaccctgaaaagcgtggacctggggcatcttacactgaacccggaaaaaaccaaaatcaccagcataggcaggaaaatcaaactcctggggcttgttatcctcccaaatggaaccgtgagcgtggatatcaagctgaaacagcagatagagacaatgctgcacttttacattaccgatcgggctaaactcagagattttctggagacggatctaagcaaggccaccgaacagctcagtgggtatgtcaactatgtgaacaccgtggatcccggttatctggacaagttgaagaaaaaatatggagtgacggtcatcgacactttaatccaccagggatctcggtga

SEQ ID NO: 11951 - RNA, 954 nt, synthetic construct
  source 1..954: mol_type = other RNA
atggtgaatagagacttcaagtcagctttcgaagctatgtatcatgggaagtatgacttcgaagatttcaagtctggagatataagcgagaagtttaggaagcttgacttgaacaagaaaaacgtgtacgaagctgaccagaccctaaagatctaccacaagtttctcaatctgtttgtgttccagtggttagaattcaacgagaattgtgtgtatagctaccgcaaagggatgaatgttgccgatgccgtcaagaagcacgcccacagcaaacatttttatcagacggacctcaacaacttcttcggctctattcgaagtgactttgtgaaaggctcaatcatagcatctatcgaccggatgccaattacagatgtcttgttatacgttgataggatcatcgagatttgtaccgttagcaataagctgcctgtggggtttagcacaagtccgttgatctctaacgcctgcctgctccattttgataatgaggtcgagagatactgcgaagaaagtggactgatctatacccgctactctgacgatattatcatctcaggcggagataagaaactatacggcactggcgagattattgctgaggtcctgtacaggcagttcgagggtcacctgagcattaattccagcaaaaccaagtattcctcagccggcaacaaactgaaaatcctggggatgatgattctccccaatggaacaatcactattgactccaagctcaaggcggatatagaagttttgcttcacttcttcaccaaagacaagcaaaagtttcttgacaagatagaggccgactccgcaactgcactggcaaaagtgtccggttatcttaactacatcaacacgacagataaagtgtacctgaacaaactgcgtaagaaatatggagcgagtgtagtagatatgtttgtccggggttccgtgaaatcgctctga

SEQ ID NO: 11952 - RNA, 954 nt, synthetic construct
  source 1..954: mol_type = other RNA
atggctaaccgcgatttcaagagtgcatttgaagccatgtaccacgggaagtatgactttgaggattttaaagtcggagatatcgccgacaagtatcggaaactgaacttaaataagaagaacgtctacgaggccgaccaggtgctcaagacataccacaaattccttaaccttttcgtgtttcagtggctatccttcaatgaggattgtgtcttttcctatcgaaaagggattaatgtagcagacgccgtgaaaaaacatagtcagagcaagcacttctaccaagcagacctgaacaattttttcgggagcataagatctgacatcgtgagatcctgcattggcgccagcatcgataaggtcccgatctctgacatttctctgtatgtcgatcgtattgttgaaatgtgtactgttgctgacaggctggcggtaggcttctcaacaagccccctcatctccaatgcttgcctatttaggttcgataatgagattgagcatcactgccacgccaacggcttgatatacacgaggtattctgacgatataatcatcagtggtgttgaaaacaaactgtacggcatgggcgatgtggtggaatcaatactttttcagcatttcaacggagtactgtccattaatctccctaagactaagtactctagcgctggaaataaagttaagatgcttgggatgatgatcttgccaaacggtacagtgaccattgattcaaaactgaaagcggacatcgaggtgctgctctactttttcatcaaggacaagcaaaagttcctggacaaaatcgacaccgactccgccactgcactcacaaagttgagcggctacttaaactacatcaataccaccgacaagatttatctggataagttgcggaaaaagtatggatcgtcagtgattgatatgtttgtgcgcggtagtgtgaaaagcctgtga

SEQ ID NO: 11953 - RNA, 921 nt, synthetic construct
  source 1..921: mol_type = other RNA
atgtaccatggcaagcatgatttcgaggacttcaagtcgggagaaatcctgtccaagtatcgcgcacttgtgttcaagaagaagaaggtttacgaggccggtgccgacctgaaggtttaccacaaatttctaagcctattcgtctttcagtggttggagtttaatgagagatgtgtttactcctataggaagggcatgaacgttgtcgatgccgtgaagaaacacgcaaattctaaacacttcttccagaccgatctgaatgatttttttgggagcatacagggtgatttggtcaaactctgcatccggggaagccttgaccgaattcctatttcagatgcttcttcttacatcgacagggtagtagacctggtgaccgtggagaataaattaccagtagggttctcaacatcccctctcatcagcaacgcctgtctgctgccatttgacaacgcgctggaagcctactgcaatcattcagggctcgtgtatacccgttattccgatgacgtgatcatcagtggaggggactctaagttgtatggcatagaaaaagtcgtggagtatacactcgctcagtgctacggcggggactttactattaacagcgccaaaactaagttctcttccgctggtaacaaggtgaaaatcctgggcatgatgatactgcccaacggaacgattacaatcgacactaagttgaaatcagatattgaagtgatgctccactttttcatcaaagacaagcaaagattcatggacaaggtcgatgccgaaggaacagcagcggcccttgcaaaggtcagtggctaccttaattacattaataccaccgatcccgcttatctgaacaaactgcggaaaaagtacggtgctagtgtggtggatatgtttattcgcggcagtgtgaaaagcttatga

SEQ ID NO: 11954 - RNA, 957 nt, synthetic construct
  source 1..957: mol_type = other RNA
atggcatcccgcgacttcaagtcagcttttgaggccatgtatcacgggaaacacgactttgaagacttcaaatctggagatgtcagtagtaaatatcggacctttgtcttcaacaaaaaggatgtatatgaggccggagctgaattgaaagtgtaccataaattccttagcctgttcatcttccaatggttagagtttaatgagaggtgcgtgtacagctaccggaaaggaatgaatgtagtcgacgcggtcaaaaagcatgcaggatctaagcatttctttcagaccgacctcaataatttcttcggctccatctcagggaagctggtgagggaatgcatactgaggtcgcttgaccgagtacccatttctgatgcaggcctgtacatcgatcggattgtggagttggttacagtggaagacaagttgccaatgggcttctcaacaagcccctctatctccaacgcttgtctccttcctttcgataatgccgttgagaaatattgtgaggagcagggtctggtgtatactagatattctgacgacgtgataattagcggcggagataacaaactgtatggcacagaaaagatcatcgagagcattctcgaggaactatttcagcgtgaaatcacactaaatgcctccaagaccaaattctccagcgtgggtaacaagctgaaggtgctgggcatgatgatcctgccgaatggctccattaccatagataccaagctcaaaagcgacattgaagtgatgctgtacttttttatcaaggacaagcacagatttatcgacaaggttgatgcggagggtactgcagccgccttagccaaagttagtgggtacctcaactacataaacacgactgatcaggtgtacctgaacaagttgcgcaagaagtacggggcttcggtcgtcgatatgtttattagagggagtgtgaagtcactttga

SEQ ID NO: 11955 - RNA, 912 nt, synthetic construct
  source 1..912: mol_type = other RNA
atgtaccacggaaaatttgactttaagcacttcatttcctggccggctgccgagctgttcaaacctattcagatcaaagacagagtagtgtacgacgctgataagaacttgaaggcataccacaagttcctgaaccttttcgttttcgagttcctcgaaataaacactgatgtcgtgttctcttaccgcaaaggagttaatgttatcgacgcagtgaagaaacatgccacaagtcggcatttttttcagaccgaccttaagaacttcttcggaagtatatcgagcggcatgatcaggcgatgcttggaggagaacattgccaatttccccgtcagcgatattggcgaacacctggatcggattctggatctcgtgtcagtagagaacattctaccacctggcttttctacttcacccctcatctctaatgcctgcctttaccatttcgacaataagctggagctcctgtgtgattcaagaggtctgatttacacaaggtattccgacgatatcttgatcagcgggtccgaaaagaaactctatgggttagacgtggagatctccgcgatgctagaaacctcatttggggggcgcttccaaatcaacagggggaagagtagatataattctgtcggcggaaaagtcaagatgcttggtgttgtgatcctcccaaatggtgaaattacaatagacaccaagctgaagagtaaaatcgaggtgctgctccacttttttaccagcgaccgagccaagtttaatagcatgttagaggcagaagacgtgaacggcttattgaaagtgagcggatatctgaactacatcaatacaactgatcccctgtatctgaacaagctgcgttctaaatatggcgctacggtcatagatatgtttatgcggggctccgtgaaatga

SEQ ID NO: 11956 - RNA, 948 nt, synthetic construct
  source 1..948: mol_type = other RNA
atggccaaacaaaaacttgaatcagtattcgaagcaatgtatcatggcaaattcgattttaaggacttcatcagcggcccgacatccgagctctacaaaacaattaagttcaagaaccgtactgtgtataatgctgacaagaaactgaaagcctatcacaaattcctgaatttgtttctcttcgaattcctcgagctgaacacgcgcgtggtctacagttaccgaaagggtgtgaatgtcatcgatgctgttaagaagcatgccactagcagacacttttttcagacggacttaaagaacttcttcggttccatcgatctggacatgattagagccgctatacaggaaaatactgaaaacttcccagtgtctgatgtgaatgagaacatcgaacggatcttagagctggtgtcagtgtcaggggttctcccccctggatttgcaacctcccctctgattagtaacgcctgcctttaccattttgacaatctagtggagaacttttgtctgaactcgggactgatatacacccgctatagcgacgatattataatctccggctctacaaacaagctgtacgggcttgacacccacatcgagagcatgctgaagaaaacattcggagagaaagtgttgattaatgggagtaagtctaagtatatgagcattggcgggaaaatcaagatcctgggagttgtcatcttgcccggcggcgggatcaccattgatactaagctgaaatcaaagatagaggtgctcttacactactttacttccgataggcagaagtttaacgtcatgctggatgacaaagacgttaacggactccttaaggtatctggctacctcaattatattaataccaccgacccagcgtacttgaataaactacggaccaagtatggtgcaacagtggtcgatatgtttatgagggggagcgtaaaatga

SEQ ID NO: 11957 - RNA, 948 nt, synthetic construct
  source 1..948: mol_type = other RNA
atggcaaagcagaccctggaatcattgtttgaggcgatgtaccatggtaagtatgactttaatgacttcatcgaagcccctctctccatgttgtgcaagaaaatcccgcttaagaacaggatcttttataaagcagacgaaaagctgcgggcctaccacaagtttattaatctcttcatcagcgatttcctaaagataaacacgaacgtggtgtactcctacaggaaaggaatcaatgtggtcgacgctgtgcgccagcatgctcactcccgccacttttgccaggtggatctgaagaacttcttcggctcaatagacgctgccttgattgagagttgtattcttcagaacattgtcaatctgcccgcctccgatatcgctactcacataggcaggatcgttagtctcgtgagtttggacgggactttaccccctggatttagcacatctcctccactgagtaatgcatgtctgtttgagttcgataaccaagtggagaactactgccacaaaaaaaatctgatctacacacggtactctgacgatatcattatttctggttctagcgagagactgtatggtctggacagcattatcgaggaatttatcaaggagtacttcaatgagaaactcgaaattaacccagccaagaccaaatatactaccgtcgggggcaaaattaagcttctcggcctggtaatactgcccaacggcgaaataaccatcgatacaaagctgaaaagcaaagtcgaggttatgctccattattatttaaccgacagaccccaattcaacaagatcctggaaaaggattcaactaaggggatcagcacgctctcagggtacctgaattatattaataccacagacccatcctacttagataagcttcgtctaaaatatggagccacaatcgttgatatgttcattcgaggatcggtaaaatga

SEQ ID NO: 11958 - RNA, 972 nt, synthetic construct
  source 1..972: mol_type = other RNA
atggctaaaaaggagctcagttctatctttgacgcaatgtaccacggaaaacacgactttcaggacttccttgctggcgacatcaccactaggtataaagtcacaacacttaaggggatggaactgtataagaccgacgaaaaactcaaggcctaccataagttcctgaatctgtttgttttcgagttcctgaaggtgaacgaaaacgtggtttacagctacaggaaaggcgtgaacgtagcttctgccgtgcagaagcatgccgggtcaagacattttttccagactgacttgaagtcctttttcaatagcattgattccgctctggtgcgcgagacagttaagaacaatttcgactccattccagtgtcagacatcgacagatatctcgatcgaatcatcgagatgagcacggtgaatgatatgctgccgattggctttagtaccagccctattatctccaatgcatgcctgcaaaagtttgactctattctggaggattactgcatagcccagaacctgatctatacacgttacagtgatgatatcattctcagctcctccggggataccaggttatatggaatcgataccacggtgggggaaatgctgaaagagtgtttcggtgagaaactcaacctcaacttcagcaagactaaattctcctcagtaggcaacaagataaagatattgggtatggtcattctacccaacggcgcggtgacaatcgactcgaagcttaagaatactattgaagtactgctgcacttttacgcatctgataagacgaaatttaacgaccggttggaatctgagagctcgaaactaaaaggagataattctgtgggacttttacaaatctcaggctacttgaattacgtcaataccacagatccccactatttaaacaaactgcggaagaagtatgggactagtgtcgtcgacgccttcatacgcggtaccgttaaatga

SEQ ID NO: 11959 - RNA, 972 nt, synthetic construct
  source 1..972: mol_type = other RNA
atggttaagaaagaactggggtcaatctttgaggctatgtatcacggaaagcacaatttccaggacttcctcaccggaaacatcgaacctcactacaagattactaccctcaaaggaatgaaaatctatagaccggatgagaagttgaaggcttatcacaagttccttaacctctttgttttcgactttctgaagattaacaaggatgtggtgtactcttaccggaaaggggtcaatgtcgtcagcgccgttaagaaacacgcgaataataagcatttctttcaaacagacctcaagaacttcttcaattccatagacaaagaacttgtgaggaacactatccatagcaacttggaacatatccccatttctaacctggataaacaccttgatcggatcctggaactgagcacagttgaggataagctgcccattggtttcagcacgtcaccaataataagcaacgcatgcctgcagaaattcgacagtgtgttagaggattattgcgcatccgaagacttgatctacacaagatatagtgatgacattatcctatcaagcggcgggaacactcgcttgtatgggattgaagccaaggtgtcagagattctgcgtgagtgttttggaggaaaactcaaccttaatccctctaaaaccaagttctcgtccgtcgggaacaaaattaaaatcctcggcatggtgatactgcctaatggcaccgtaacgatagacagcaagctgaagaataccatcgaggtgctgctgcatttttacgcgagtgataaagagaagtttaaggaccgattagccagtgagtcttccaagttaaaaggcgagaactccatcggccttctgcagatttctggttacctaaactacgtaaatacaactgacccaaattacctgaataagctccgcaaaaagtatggctccgtggtggtggatgcctttatcaggggtaccgtcaaatga

SEQ ID NO: 11960 - RNA, 969 nt, synthetic construct
  source 1..969: mol_type = other RNA
atggccaagaaatctctttccttgttattcgacgccatgtaccacggcaaacatgattttctggatttcatagagggagatgtagcagacaagtataaggtggccattgtaaagggtatggaagtgtgtaaacccgatgacaagcttaaggtttaccacaaatttctgatcctgtttgtctttgaattcctgcgagtgaatcaggacgtggttttttcttatagaaagggtgtcaacgttgccagcgcagtccagaaacatgccggcagccgccatttctttcaaacagatctcaggagttttttccgttcaatcagcaggagcttggtgaaacaaactcttctgaataacctcgatagcatcccagtggctgatctgcaggagaatctggagagaattcttgatctcgtgaccgtcaatgggggcgtgcctataggcttctccacatctccaatcatctcaaatgcttgcttgtacgactttgacaatcagctggagctctattgtaaggctcacgacctggtgtacacgcggtactctgatgatataatcattagtggtgtggagaacaagctgtacggggtggacggtgtagtcggggaagtgctggggaaatgcttcggggagatgctctccgtgaatgtgagtaaaaccaagttctcgagcgttggcaacaagatcaaaatcctcggaatggttattttacccaacggagtgataaccattgactccaaactgaagaacacaattgaggtcctgcttcacttctattcaagcgacaaggtgaaattcaatgaccggttggaaactgaatcagccaaactaaagggagacaactctttggggctcctgcagatctccggctatctgaactacgtcaacaccactgaccctgcttatctaaacaaattacgcaagaagtacggcgcagcggttgtcgattcctttattaggggaagtgtaaagtga

SEQ ID NO: 11961 - RNA, 951 nt, synthetic construct
  source 1..951: mol_type = other RNA
atgaacaagcagccactgagagatctgtttgatgctatgtaccatggcaaacaccagtttgcagattttatgagctgcgacgtcaccgcacgggcaacagctttccaactgaatgagcggactatgtattcacctgacaagaggctgagggcgtaccactcattccttacgctgttcctgttcgattacttcccggtcgagagcgaagtggctttcggatatagaaaggggagctcagcctatgacgccgttagtccccacgcccgctctcgacatttttttcaggctgatatcacatctttcttcggaagcctagactcgggtgtggtggctaacgtgatagatgaacataaggaacgcagtcctatagaggacgttgagaaatatacggcacgagtgcggtctttagtgcttctcaacgggtccttgcccatgggattctccacctcccccgtccttagtaacgcctgtttgtataaatttgacagagcactgagggagcgttgccagacagcggggctgcatttcaccaggtacgctgacgatctcatcatctcctcaggagacttagagctgactcggagcgccaaggcgattgtggaggaggtcctgctgcatgaatttgacggcaagttgcagttgaatgccgaaaagactaaacttacctctatcgggaggaaggttaagatcctgggcatggtcattctcccaaacggccgaatcaccgtggaccagagaaccaaagatcgcattgaggttctgattcacttctacagagtcgatcaagagcggtttctggccctcgtaaaaaatgatcgtgccggcgggttagaacaccttgccggcctcgtgtcctacgtgaatacagtggaccaggaatacctgggtaaactacgccgcaaatttggtgtaacaatcgtagacagcctcttgcacaagactattctctga

SEQ ID NO: 11962 - RNA, 957 nt, synthetic construct
  source 1..957: mol_type = other RNA
atgaatcggcgccctctcgaacagctgttttttgctaccttccgaggcaaacaagagctaaacgaactactggagctggacgtgcgggctgcctattccgaaaaggactttgatggtcgtgtggtctacagcccagacaagaagctgaagctatatctggggttcttgtctcgcgtgctgtttgacaggcttcccgttgaggctgacgtggttttctcctaccgaaagggcgtgaatgtggtgaacgcggtagagaaacatagcgagggcaagtacttttttcagagtgatatcaagaacttcttcggctcaattgacagagagatgataaggaggtcggtcctggccgcactcgaattatgtcctattagcgatatagaacactggcttgacagggtgctggaccttgtgactgtggatggagtccttccacccgggtttcctacatccccggtgatctcaaatgcatgtttgtacgagttcgacaagaaatttctgtcctggtgcaaacagaatagcctgacctatacacgctacgctgatgatctgatcgtaagcggtggagttgaagagaaaatgcacctcctgatcccctgcattactcaattgctcgacaccgaatttggaggcagaattaaactcaacacacagaaaacgaagtttattcgtccaggtgagaaggttagaatgcttggcgtagcaattctgcccaacgggaaagtctctgttgatgggcggctgaagaaacattccgaaaccgccatgcattgcttattgaaggataagcagatcttcacatctttcttaaaagagaaagacttcgagaaggccctcaaaaagttctctgggcagctgaattatatcaacactgtcgatcctagtttcttggataagctcagacggaagtacggagccaccgccgtcgacaaaatcgtccacatatcagtgggaagttga

SEQ ID NO: 11963 - RNA, 957 nt, synthetic construct
  source 1..957: mol_type = other RNA
atgaacaaacggcctctagagcagctgttttttgccatgttccgagataagcaaaggttcgccgacttcctggagattgacgttaatagcgcctatactaaaaaagactacgatggtcgtgtggtgtactctccggacaaacttttgaagcagtacctgggatttttatcccgcgtcctcttcgacaggctgcctgtcgaatccgatgtggtgttttcttatcgcaaaggtgtaaacgtcgtcaatgctgtggaaaagcacagtgcaaatcgatacttcctgcagagcgacatcgaaaatttcttcggcagtatctcaagatcgacaattcgcaaaagcatcttaagtgccttagatacctgcccaatatccgacattgagcagtggttggagcggatcctggatatggttacagtgaatgatgtgctgccacctgggtatcccacctccccaagcatctcaaatgcatgtctgtactcttttgataagagattccttgactggtgcaagaagaacaactttatctactctaggtatgctgatgacctgattatcagtggcggaggcgaggatgaaatgcaccttatcgcacctaaaatcattgaactcctgaactgtgagttcgagggccaaattaaactcaacacggggaagacaaaatttttgaggcccggtgaaaagatccggattctcggagtggccatactgcccaatggaaaggtttctgtagatgggagactcaaaaaacatagcgagactgctatgtattgcctcctaaacgacaaggataagttcatatcattccttaaggagtccgattttgacaaggcgctgaagaagttttcagggcagctgaactatataaataccgtggaccccagctttctcgacaagttgagacgtaaatacggcgccaccgctgtggaccgggtcattcatgtttccgtaggcagctga

SEQ ID NO: 11964 - RNA, 957 nt, synthetic construct
  source 1..957: mol_type = other RNA
atgaacagacgtcccctggagcaactcttctttgccacctttcggggaaaacaagacttcgcagactttagcaatctcgtggtcaacgaggcctacagtaaaaaggagttcgatggccgcacagtgtattccccgggaaaggcactgaaactgtatcttggcttcctctctcgagtgttattcgacagactgccaatagaaaaggatgtggtgttttcttacaggaaaggggtgaatgtggtcgacgcggtagagaaacactccggcaacaagtatttctttcagtccgacattgctaacttcttcggttccattacgaacaagatgatcgcccggtcagtgctggcagctgtagaccagtgtcccatcagcgatatagaggcctggttggaccgggtcttagagctcgtcactgttgatggggttctgccacctggatacccaacttcacctgccatcagtaatgcctgcctttacaagtttgacagggtattcctcgcatggtgtcatgataacagcttgacctacactagatatgcagatgatcttatcgtgtcaggcgagtccgaagacctgatgcaccaggcttgcaagaaggtcatcgaatttctgtatgctgagtttgggggtgacctaaaactgaatcccaaaaagacccgcttcattaagcctggggacaaggttaggatcctgggagtttctattctccccaatgggaaggtcagtgtggatggtaaattgaagaaggatagtgaaacagcgatgcacttcctaattaaggacaaaaagatgttcacaagctttctgaaagaaccagatttagaacgagcccttaaaaaattttcgggccagttgaactacatcaataccgtggatccttcttttctggataagatgcgcaagaaatacggcgctgctgccgttgacaaaatgatacatgtgagcgtcgccagctga

SEQ ID NO: 11965 - RNA, 957 nt, synthetic construct
  source 1..957: mol_type = other RNA
atgaacaaacgccctttagaccagttatttttcgccacatttcgcggctctctggatttctcagagtttgcttctctgaacgtctcccaggcatactcacgaatagagtttgaaggtcgtgctgtgttcagtccaggaaagaccctgaagaattatctgtctttcttgagcagggtgctttttgatagactgcctgtggaaaaggatgtggtttatagctacagaaaaggggtcaacgtcgtcaacgccgtcgaaaagcacgcgaataataagttctttttccagtccgacatcgagaacttcttcggcaatattactaaggagatcatcaagaagacaatcttgtccgccatagaccagtgccccattaccgatattgaaacatggatagaaaggattctcgatctggttacagtagagggggctctgccgccaggatatcccacttctcctgcgataagcaatgcctgtctcctctcatttgacaaacggttactggcctggtgcaatgaacattccctgacctataccagatacgcagatgatattatagtgtcgggcactaatgacatctggatgaatagcctgagttacaaagtaacggagctgcttaacgaagagtttaacaatttcatcaagctaaacccacaaaagaccaaaatcattcggcccggggagaaaattaaaattctcgggatcgctatcctccctaacggcaaagtgagtgtggacggaaaacttaaaaagcggacagagacagcaatgcacctcctgcttaaagacaaaaagatgttccaatccttcttcaaggaggctgatttggataaggcattgaaaaagtttagcggccagctgaactacatcaacactgtggacccctcctttctcgacaagctaaggaagaaatacggtacggccaccgttgacaagattatccatatcagcgtggcctcatga

SEQ ID NO: 11966 - RNA, 957 nt, synthetic construct
  source 1..957: mol_type = other RNA
atgaaccgcaggcctttggagcagctgttctatgctacgttccggggaaagcaggagttcgctgacttctctaaagtgaatgtcaacaccgcctactcaaagaaagattttgatggacgaagcatttacatcccggataagactctaaagctttatctcgggtttctttcacgcgtcttatttgatcgtctgccagttgcgaaggaagttgtgttttcctatagaaagggcgttaacgtggtggacgccgtagagaagcacagtgagaacaaatacttcttccagagtgacatcgaaaattttttcgggtcgattaacagggagttaatttccaacacaattctggcagctgtagaactctgtccaatcgcagatatcgaagattggctggacagaattatggaattggtgactgttgacggtgtgctcccccccggttaccctacatctcctgcaattagcaatgcctgcctgtacgcctttgataagaaattcatagggtggtgcgatagcaactctcttacttacacccggtacgccgatgacataattgtaagcggcaaatcagaagagcaaatgcacctcctgatccccaagatcaccgagttactggatgcagaatttggaaaaggcatgaaactgaactccaataaaaccaagttcatcaggcctggcgagaaggtgcgaattcttggagtggctatactacccaatggcaaggtcagtgtggacgggcggctcaaaaaacattccgagacagcgatgcacctgctgttgaaggacaagaagatgtttgccagctttctgaaagaggaggacgtggaaaagtctctcaaaaaattcagcggtcagctgaattatatcaatacagtcgacccaagtttcttggacaagctgagaaagaaatatggcgccgcagctgttgacaagatcatccatatatccgtcgcctcatga

SEQ ID NO: 11967 - RNA, 957 nt, synthetic construct
  source 1..957: mol_type = other RNA
atgatcaaacgtcctctggagcagctctttttcgccacttttcgggggaaacaggatttccaggatttcatcaagttagatctggccgctagttctataaagaaaaactttgaaggccggagcgtgtacgcccctgaaccaaagctgaagttgtacctgggctttctgagccgcgtccttttcgatagacttccactcgcagaacaagttgtatattcataccgaaaaggcgtgaatgtcgttaatgccgttgagaaacattcatctagcaagtacttctttcagaccgatatagaaagcttcttcggttctatcaaccgcgagatgattcgaaggtcaattttgtggtcattggacttttgccccatcagcgacattgacatttggatagataggatcctagatatcgttactgtggacgggctgctgccacccggatttcccacgtctccggccatcagtaattgctgtctcgtgaagttcgacgaggagtttttatcttggtgtgatagtcagggattcatctacaccagatatgcggacgacttgatagtgtcctcgaaggtggaccctggtgtcgacctcctcatctccaaaatcacagagattctgaacaagatgttcgatggcgactttaaacttaacctgaataagaccagggtcgtcagacctggctccaaggtgaaactactcggtgtagtcattttgcccaatggaaaggtgagcattgacgggaatctgaagaaaaacgccgaaaccgcaatgtatcacctccttaaaaacaaggagaagttcgttagtttcctgaaagagcaggaacttgaccgcgcactgcaaaagttttccggacagctgaactatatcaatacagtggacccagattttctggataagttacggaggaaatacggggctacagctgtagataagattattcacgtgtccgtggctgtgtga

SEQ ID NO: 11968 - RNA, 954 nt, synthetic construct
  source 1..954: mol_type = other RNA
atgattaagcgccccctcgaacagctgttctttgctactttcaggggaaagcaggactttgcccacttttcttctttggatcttagtgagatgtatgaggcaaagaaattcgatggccggactgtttattcacccaacagaactctgaaatcctacctgacatttttaagtcgaatcctgttcgggcggctcccagtagcggaagatatcgtgtattcttaccggaagggcgtaaatgtggtgaatgccgtggagaaacacgctcataacaaatactttgtccagactgacataaagaacttcttccagtcaattaaccgtcaacagatcaaacagactattgaggatagcgagcatacatgtccaatatcagaccttaatgaaagcctggaaaggatactggacatcgtcaccattgatggcgtccttccccctggctatcctacgagccccgccatcagcaatgcgtgcttgtataaatttgaccaggaactagccagcgtttgcaaagaggaaaaaattatctactccaggtacgcagacgacttgattttttccgccaacgctatatcggtgacagagtccatcatcccaaaggccacaaagattttagatgaggtgttcatgggacacttgaagattaatgagtcaaagaccaaagtgaccctgcctggccaaaaaatcagaattctcggtgtcagtatactacctaatggtaaagtcaccatcgacgggaagctcaagaagaacatcgaaacctgtatctactatttcctccgcgataagtctgtgttcattaagctcatgaaagaagcagacaacgagaaaagcacaaaaaagatctccggacagctgaactatatcaatacggttgatccgagttttctggataagcttagaaagaagtacgggattgctaccatcgaccaactgctgcattactctgcagagtga

SEQ ID NO: 11969 - RNA, 975 nt, synthetic construct
  source 1..975: mol_type = other RNA
atgatcaaaagacccctggatgttctgttttctgctatgtaccggggtaaactgagcttcgataacatgaaggccgcatccgccgaccagatgtttgaatcttttacagtctccgggcgcgaggttgtccgaccaaacccagagctgaaaagttatctgggtttccttggccgtgtgttatttaacaagctgcctgtggacgtggagagcgtgttttcctacaggaagggagtaaatctcttaaatgcagttgagaagcacgcagcctcaaaattcttcctgcaagtggacatcgcggactttttcggtagtatcgatagttctcttatagagcagacagtgttgagaagcatggatgcttgccccatttcagacgtggaagaacatctcgagatgattgtgaaattggtcacggtgaattctagcctgcctgccggatatcctacctcacccgccatctcaaatgcgtgtctctacgaatttgacaggaaattcaaggatatctgcgggaatcggaacctcatatacactcggtacagtgacgacctgattgtctctggcacaaccagcgaatccattaacggggtgtacggactgcttcagaacaagctggcagatgagtttgggggaaaactgcaagtcaaccagtccaagactaaattcaccagaccaggccagaaggtcaagctgctaggcattaatattctgccgcatggggccgtctctgtggataagaaattcaagaaagatgctgaggtgaagcttttctattacctcaaggaccgcagcattttcatcaagatgagtggcagcacaaacttggataaagctgtaaaaaacttgtcaggcaccatcaattatatcaacaccgttgattccgtattccttgacaagctcaggaaaaagtatggatcgactttagttgacatgtttctacaccgatccgccaagctcgtggacgaaaataagatatga

SEQ ID NO: 11970 - RNA, 957 nt, synthetic construct
  source 1..957: mol_type = other RNA
atgaaaaaaagacccctggaggacctgtttttcgccatgtaccggggcaagcagtcctttgagcactttgcgaactgctccgttgagggtttatacgaaccggttatggttaacggacggttggtgtataaaactgataaggatctacgcgcataccatcgctttctgaataagttcctatttgaacgcttgcctgtggtagacgatgtcgtgttcagctatcgaaagggtgtaaacgctgtcgacgctgtagagaaacatgccggtagcaaattctactttcaaactgacctccgtgactttttcagttccctgactaaatcggatgtgcggaggaccctggagtgggctaaggacgtttgcgtgatttcagatcttgacgtctgggtggaaagaatcctgaaactggtgaccatcggggatagtctcccaatgggattctctaccagccctgcaatctctaatgcatgtttgtattctctggatgggatcctcaagacgcactgtcttagcaatggcgtcatttacacaagatatgccgatgaccttatttttagcagttcaaataagcaggccctggatccactgttcggagtggtctgcaggacactccagtccgagttctccggccggatgggcattaattcacagaagacaaagtatctcaggaagggagggaagatcaaactcctgggattgaacgtgcttcccaacggcagagttacagtagacatgcgacacaaaaaagagatagaggtgcgtcttttttactatgtgaaggacagggctagattcctcaagatcatgggcgaagtcgacgacgaaaaagccatcaagaagttctcagggttaattaactacgtgaataccgtcgatcccgcctacttagataaactgcgcaagaagtatgggctgaccatagtggacatgttcatacataaatctcctaagctgtga

SEQ ID NO: 11971 - RNA, 954 nt, synthetic construct
  source 1..954: mol_type = other RNA
atgaacgctaagccgctcaaaatcctctttgaggccatgtatcacgggaagtatgattttcaggatttcttacaaggggatatttgttccgacttcgacatgtttaccgtaggagaacggaccatttaccgtcccaataagaagcttaaaacgtaccacagtttcatcaacctgttcgtcctcgaaaagtttccagtgaatgcagaagtcgttttctcatacaggaagggcgtgaatgtgtatgacgcggtgtctaagcatgctttctcaaaacatttctttcagaccgacatttctaagttctttccctctataggggtggatctggttagagacactttcctccaaaataagaattgcactcctgtctctgactttgacacctgcatagaaaggatcgtagagctagtgatggtggatggattcctgccagttgggtttagcacaagtcctcttatcagcaatgtctgcctgttcggcttcgacaatctggtgcagaagtattgtagtgagaacggtatcatttatacacgctattcggatgacttaattttttcaagcctggagaagagcaaattaatcggtatattcgagttcctacagcgaacaatgctggatctctttggcggcctcatcagcttgaacatttccaaaaccaaatttactcacgccggctccaaaattaagctgctgggaatggtgatactgcctaatggtaaggtgagcgtagataagaaatttaaggacaacatcgaggttcttttgcatttctacgtgaagaaccggacaaagtttttcaacttggtcgaatcagatctgaaaggaggaatggagaaaatctccggctacctttcctacgtgaacaccgtcgataaggactatctgaacaaattgagaaagaaatacgggatgactgttgtggacatgtttctgcactacacgcccaaaaaatga

SEQ ID NO: 11972 - RNA, 954 nt, synthetic construct
  source 1..954: mol_type = other RNA
atgaacaaaagacccttgaaggagttgttagcagctatgcaccaggggaaatttgagttccctgagcttgacacaggcgatgtgagtgatctgtacgaaaagaagatttacaatgatcgcgagatatatatccctaacaaaaggctgaagaccttccattcgtttctcagcctgtttttactggagtatctgcacacaaataacgaggtcgttttctcctataggaagggcgtgaacgctgtggacgccgtctccaaacacacctcttcaaagtacttctttcagactgatataaccaacttcttcaattctatcgacgcagatttagtcactagtacgattctgaattctatcgaaacatgcccaatttccgacattcagtctcatattacgaacatcgtgaagattcttactatcaataactccgtacccgttggttttagcacaagtccattgctatcgaatgcctgtctgttcaattttgacaacgaacttcaaaagtactgcatagaaaacaaactgatcctatcacgttacagtgatgacataataatctccagcctggaaaaagctcccatcttggaggccgaaatctatgtagaacggctgctgtccaagcacaccaacaacaagctctctatcaataccaaaaaaagcaaacacacccaaacaggtaataagattaaactcctggggatggtgatcctgccaaatgggaaggttagcgtcgacattaaatttaagaaggacaccgaggtgaagctccatttctacctgactaataaggagaaattcaacgagatttcaggaccggaccttgattcagccatcgaaaaaatgagcggacagctcaactactacaatactattgatcctagctatcttgataagttgcgaaaaaagtatggcgcgacaatcgtggacatgtttctccataagtctgacaaactctga

SEQ ID NO: 11973 - RNA, 954 nt, synthetic construct
  source 1..954: mol_type = other RNA
atgaagaagaggtcactgaaagacctactggatgcaatgtaccagggcaagtttgagttccctgaactcgacactggcgacatttcaacactgtacgaaaccaaaaactataacgatcgagagctgcacattcctaacaaaaaactcaaaactttccacagctttcttaacttattcctcctggagtacttacagacaaataaggagattgtgttcagttaccgtaaaggtgtgaacgctgtagatgccgtgtcaaagcatgctcattccaaatacttctttcaaacggacatcacgaatttctttaactcaattgatgcggaccttgtcactagtactatcataaattccgccgatcgctgccccatctctgacattgataatcacatcaccaacatcgtaaagaccttgacagtgaatggcagcgtgccagttgggttttccacttctccaccgctgtccaacgcctgtctgtttaatttcgacaacaagctgcagaaatattgcctagacaattcgcttacattctccagatacagtgacgatatcatcattagctctctggataagacccctctcttggaggctgaaaagtacgttgcacagtgtctctctaagcatacagataacaagctgagtattaacaccacaaaaagcaaacacacccagacagggaacaagattaaattactggggatggtgatactgcccaatggaaaggtcagcatcgatatcaaatttaagaaggacactgaagtcaagttgcattattatctcaccaataaggagaagttcactgccataaccggacccgactttgataatgccatagaaaaaatcagcggacaactgaactattttaatacggtggaccaggactatctggacaagttgcggaaaaagtacggtgcaaccatcgttgatatgttccttcacaagtctgacaaactctga

SEQ ID NO: 11974 - RNA, 954 nt, synthetic construct
  source 1..954: mol_type = other RNA
atgaaaaagaggcccctgaaggaacttctgtccgccatgtaccaagggaaattcgatttcccagagcttgataccggggacatcagtgcactatacgagacaaagaattataatggacgcaagattcacattcccaacaaaaagcttaagattttccatagcttcctgaacctttttttgttagagtacctgcagacgaataacgatattgtgttttcatatcggaagggtgtgaacgccgtggatgctgtttccaaacatgcacattccaaatacttcttccagactgacatcaacaacttcttcaattctatcgacatcgagatggtaacctctactatctttaacaatatcggcttattccctataagtgatatcgagagatatatcccgaatattgtcaagattctgacagtgaacgattcggttcccgtcggcttttccactagtcctctcatttcaaatgcgtgcctgttgagctttgataacaagctccagaagtattgtttggccaactctctgatatacagtaggtattctgacgacattatcatatcctctagcgaaaaggcttcgctgctcgaagctgaacagcgagtcaccacatacctggccgaaaataccaacaacaaattaagcatcaacctgacaaagagcaagcacacacaaactggaaataaaatcaagctgttgggtatggttattctccctaatggcaaggtgagcgtcgatatccgttttaaaaaagaggctgaagtgaagtttcactactacctaaccaacaaggataaatttactgaggtgacgggcagcgacttcgactcagccatagagaagttctccgggcagctcaattacattaataccgtagacccatcatatctggacaaactgagaaagaaatatggagcaaccatcgtggacatgtttctccacaaatctgacaaactctga

SEQ ID NO: 11975 - RNA, 954 nt, synthetic construct
  source 1..954: mol_type = other RNA
atgaacaaaagacccctgattgatttgctgactgccatgcaccaagggaagtttaatttcccggaactgggcacaggaaacattaacgacttatacgaaaccaagatttacaacaatcgcgagatccacatcccaaataagaagctcaaaacattccatagcttcctcaagcttttcctcctggagcatctgtctacaaacgaagaagtggtgtttagctataggaaaggcgtcaatgcggtggacgccgtctcaaaacacagtaatagcaagtactttttccagacggacatcaacgactttttcaattctatagatgaggagctagttaaaaccactattatcagagacattgagaaatgccctattagcgatataaatctgcacattgacaacatcatcaaaaccctaacgattaaaaactccgtgcctgttggtttttctactagtcccttactgtccaactcgtgtctcttcatatttgacaacagcttgaaggagtattgcgacaaaaattcccttaccctctcacggtactctgatgatattatcgtgtcaggaaagaagaaggaacccatcttggaagctgagaggtatatagctcagctcttgagtgacactaccaagaataaactgagtctgaacatcaaaaagtccaagcatacccagacagggaacaaaattaaactccttggcatggtgatactgccaaatgggaaagtgaccatcgatattaagttcaagaaggatacagaggttaagctgcattactacctgacgaataaggagaagtttatcgagatcgtagattctgacatcgaaacagccatcgaaaagttaagcggacacctgaattattacaacactgtagatccttcctatcttgacaagctgcgaaagaaatatggtgcaaccactgtcgacatgttccttcacaaatcagatcgtttgtga

SEQ ID NO: 11976 - RNA, 954 nt, synthetic construct
  source 1..954: mol_type = other RNA
atgaacaagaggcctctgaaggaattgctggttgctatgcatcaaggtaaatttgagtttcccgaactcgatacaggggacataacgtcgctgtatgagacaaagaaatacaatgaccgtgaagtgcacgtcccaaataaaaaactacggacctttcatagcttcatcaagctcattttactggatcacctagacactaacgaggacgtggtgttttcttaccgaaaaggagtgaatgccgttgatgctgtgtctaagcactccagatcaaaatacttcttccagacggatataaagaacttcttcaacagcatcgatgaggacatggtcaaagagacaatccttaagaacatagaacagtgccccattagtgacatccaggaccacatcgagaagatcgtgaaaaccctgaccgtaaataattcagtccccgtcggattttcaacaagtcctaccctgtctaatgcctgtttattcaccttcgacaatacactccaggaatattgcaaaagcaatagcttggtattctcccgctattcagacgatatcatcatctccagcatggagaagaactccatttttgaggccgaaaaatacattagccagaaactctccgaaatcactaagaataagctgtctattaacgacgcaaagagcaaacatacccagacaggcaacaaaattaagctgctgggaatggttattcttccaaatggcaaggtgagtatagacatcaaatttaagcaagacactgagataaagctgcactactacttgaccaacaaggaaactttcaaaaagatcgtggggtctgatttcgatggtgcgattgagaaaatttcgggccatctcaactactataacaccgtcgatccgtcctatcttgataagctgcggaaaaagtatgggactaccactgtggatatgtttttgcacaagagtgacaagctttga

SEQ ID NO: 11977 - RNA, 954 nt, synthetic construct
  source 1..954: mol_type = other RNA
atgaataaacggcctctgaaggacctgctgaacgctatgtaccagggaaagttcgaattcccagagttagagacaggggaaatcagctcactctacgaaacaaaaaagatcaatgaccgagaaattcacatccccaataagcgcctgaaaacttttcattcctttctccggttcttcctgctggaacacctcaagacaaataatgatgtcgtattcagttaccgtaaaggcgtcaatacagtagacgcagtttcaaaacatgcgcactcaaagtattttttccagactgatatcaggaacttcttcaacagcattgatactgaactggtgatctctacaatcgagaacaatctaacgaacactccgattgaggatatccaactgtacatcgagaaaatcaccaagaccctgaccgtgaacaacttcgtgcctgtgggattttctacttcaccccctctttccaacgcctgtttatttgacttcgacaataagcttcagaagtactgcctggagcagaaactgatctatagcaggtacagcgacgatattataatcagttccagagagaaacaagccatactcgacattgacgaatacataagtcaaaccttgcagaccaccaccaagggtaagctcaccatcaatacgtccaaaaacaagcacactcagactgggaataagattaagttgctgggaatggtgattctaccaaacggcaaggtgagcattgatagaaaatttaagaaggacacagaggttaaactccactattacctgtccgacaaaaagaagttttatgagttgaccggcccagatacgaacaatgccattaccaaaatctctggtcagcttaactattataacaccattgatccctcgtacttagataagttgcgcaaaaaatatggggctacaatagtcgacatgtttcttcataaatctgataagctctga

SEQ ID NO: 11978 - RNA, 957 nt, synthetic construct
  source 1..957: mol_type = other RNA
atgaaaacgaagccttgcgctctgctgttcgaagctatgtatcacggtaagtatgactttcaggatttcatccaatccgacatttctaactactttgacgtgatctacgtcaaggaccggaagatccagaaaccaaacaggaaactgaaggcataccattcgttcctcaatctgttccttttcgagtacttgcgcaccaatgagcgcgtggtcttctcctacaggaaaggcgtcaatgcctacgatgccgtctcagctcacgctaacaacaaacatttctatcagaccgacatctcagattttttcagcagtatcgattcacagctcattaaagaaacaatcatcgcatctgccgaactgtctccaatagaggatttgaatgaacatcttgagcgggttctcagcctggtgacagttgatggccgtctacccatgggattttctactagcccccttatatccaacgcctgtctgtacaagttcgacgcagcgctcgaggagtatagtataagcagacacctcacttatacacgctacgccgacgatctgattataagtagcaaaaaccgagaagatctggaagggatccaagagaaaattagcgagttgctgcttaaaacctttaacgggagactgtccttgaatcacagtaagtccaaactgacgcacactggtcgaaaggtgaagattttgggaatggtgattcttccgaccgggaaggtgtctgtagacattaagtttaagaataaggtcgaagtgctgttacatttctacatgaaggacagagagaagtttttagacaaggttgatggcgatatgagggggggaatggagaaaatctccggctatctcaactatattaataccgtggacaagtcatacctggataaactacggaaaaagtttggaggcactatcgtagacatgtttctccacttacctacaaaaaagccctga

SEQ ID NO: 11979 - RNA, 954 nt, synthetic construct
  source 1..954: mol_type = other RNA
atgataaagaaaccactgaagactctttttgacgccatgtaccacggcaaatacgaattcgtggatttcgctcagtgtgacgtctctctgtgctacgaaagggtgaagtttaaaaaacgagaggtcatcagaccgaacaagcgtttgaaggtctaccattcattcctgatactgttcctactggagtacctcaaagtcgacgatgaggtggtgtatagctaccggaagggagtgaacacctatgacgcagtttctaagcacgcagcgagtagctatttctttcagaccgatctctccaacttctttaagagcatcgacgtagagatggtgcgcgctgttattaatgaaggtatctcaagagctcccattctggacggggaggactatatcgatcggatcattgagttagttactgttgatggctctctcccagtaggtttcccctccagtcctgtgattagcaattcctgcttgtatgccttcgatgagaaacttaaatcttattgcagacagaggggattgatctacactcggtattcagatgacataattgtatcgggtaaagacaaggacgaactactcggcgtgaaggaaagcatcacggcctttctcaatgactgtttccaaggcaagcttagtattaatcacgggaagtccaagtttacacatacaggaaataagatcaagctgttgggaatggtaatcctgcctaaccagaaggttacggtcgacatcaagtttaagaaagatctggaggtgatgctgcacttctacataaacgacagggagaaatttcttgataaggtggggggcgggtatcgagaaggagtggaaaaaattaccggctacatgaactacgtgaacacagtcgataaagactatctgaataagctccgcaaaaaatacggggccaccgtggtcgataccttaattcatcaccccacaaaaaagtga

SEQ ID NO: 11980 - RNA, 954 nt, synthetic construct
  source 1..954: mol_type = other RNA
atgaccaaaaagccactgaaagatcttttcgatgcaatgtatcatggcaaactggacttcaccgacttcgccgagtgtgatgtgtctctttgctatgagcgtaccagaataaaaaacagagaggtggtacgacccaataagaagttgaagacttatcacagctttctcaatctgttcctcttcgagtacctgaagatcgacgaggaagtggtttttagctatagaaagggggtcaacgcgtacgatgcagtggctaaacattccggttcgtcctgtttctttcagaccgacctcaccgatttttttaagtctattgatgccaggctggttaaggatgtgatcggagactcattacacttagctcctatcctggacgccgacaattacatcgataggattgtggaactggtcgtggtagacggcgctttgcccgtcggtttcccatcttcacccctcatatctaattcatgcctatatgggttcgacaagaagctcaagagttactgcgacaagcgcaatcttatatacacacgatacagtgacgatatcatcattagcggaggctcccgggatgccttgcttgggataaaagaatcagtcgcaggcctcctggatgaatgttttcaaggcaaactatccgtgaattgcgataagagtaagttcacacacagcgggaacaagattaagctgctcggtatggtgattttaccgaaccagaaagtgactgtcgacatcaaatttaagaaggaactggaggtcatgctgcacttttatatcaacgaccgggagaggttcgtggacaaagtcggaggagactttcgcgttggggttgagaaaattacgggctacatgaactacgtgaatactatcgacaaggattatctgaacaaattgcggaaaaaatacggaagcacagttgtagatacactgattcatcacccttccaagaaatga

SEQ ID NO: 11981 - RNA, 990 nt, synthetic construct
  source 1..990: mol_type = other RNA
atgagtacaacccaaactcacagtcttcctcgacgccagccagtcgaagtcctgtttaatgcaatgtaccacggcaagtggagatttgctgacttcgcaggtgccagcgtggaggccaacatcagtagcaaaacctttacccaagctgggaaaacacggaaccttcttgtgccctcagaaaagcttaagagtttccatgacttcctcaggttgttcctgttagactttctccccttgaataacaatgtggttttctcgtaccggaaggggctgagcgcatatgacgctgtggcccagcacgctgcatctaagagcttcttcgtttgcgatatagcagacttcttcccttccattcgtaggccacgtgtgaagtccactctgctgactgccaaagatctttgtccaatccaggacttggatacatggttagataggattgtcgacctcgtgtgcgtcggcaattcactacccgtgggatttagtacctcccccgctatctccaatgccgtactgatggcgtttgacaacgccctccaaacttactgtacgtctaaagagctcgtcctcacccgatattctgatgacattattgtgtccgcccaggattccgccagcctgaaaggcatccaggagcaggtagctgcctccctgcaggacgccatgaaaggggagttttcgctccatcctggaaaatcacgcttcctgcactctggaagcaagataaagttactgggaatggtgctgctgccgaacggcgcagtatctgttgatgcgagcgtgaagagcgagatcgaggttctgattcacttctatctcagagacagagataagtttgctgacagggtcgaaggtgaccagcggaaggcggaagctagactgtcaggcctactgaattacgtgaacacgatcgataaggcctacttggataagctacggaaaaaatttggggtgacagtcgttgattattttttgcatcgctcattctcttga

SEQ ID NO: 11982 - RNA, 993 nt, synthetic construct
  source 1..993: mol_type = other RNA
atgagtactcagcctactccccaattttccatcaaaaaacagcgaattgatgtcctctttgaggcaatgttccatggaaagtggagcttcggcgattttgtgagcgcctcagtgcagacaaataccatttcaaaatcattcacgcatggcggaagaacccgtaatctcctggtgccctcagaaaagctgaagtcttttcacgaatttctgaggctatttctactcgatttcttgccattcaacgaggatgttgtcttctcctataggaaaggaatgtccgcttacgacgccgtaatcaaacacgctgcttcaaaatccttcttcgtgtgcgacattgccaatttcttccctagcatcaaacgcgatagaattcggaccgcgttactgcgagctaaggagtgttgcccgattgaagacctcgagtccgtgattgaacgcatcctggaccttgtgtgtaccgacagcggactcccacaggggttttctacctctcctgtgatctctaatagtgtgctcctggattttgacaacgcatttcatgcatatgcccttggcgaaggtctggagtttacacggtacagcgacgacataataataagttccagaaacagcgaggctatccaaggcattgaggccatcgtaagtcactgcctgcacgatacgatgggaggggatttcagcctgcactacggcaagagtcggctgctgcatagcggggtcaagataaagctgttagggatggtactcttgcccaacggtaaagtttctgtggacgccaatgtgaaggacgaaatcgaggtcttaatccatttctacctgcacgaccgttccaagtttgcagataaggtcgatggggatactcgcaaggcggaggccagattgtccggtcttattaactacgtgaacacaatcgaccagtcgtatcttgacaaattgaggcggaagttcggcgttacagttgtggattatttcctgcacaggtctttttcgtga

SEQ ID NO: 11983 - RNA, 993 nt, synthetic construct
  source 1..993: mol_type = other RNA
atgagtaccccgatatcccccttacctgccagtcccaagcagccaatcgaagccctttttaatgcaatgtaccacggcaagaagtccttttccgattttgcaaacctgtccatagacgaaaatttcaccaggaaatccattaaccgaagcggcaaaactagggagctgctgaagccaagcgacaaactcaaaggatgccatgagttcctcaggcttttcctgcttgatttcctgcctctgaatgacgaaattgtcttttcatacaggaagggctctaacgcgtacgacgcagtggctagacatgcaaagtcgaagtctttttttgtgtgcgacattgaacacttcttcccgagcctcaaaagaacacgtgtgaagagtacaatcgctactgcccgcgactcttgtcccatagaggacatagatacttggctggagcgcatcgtagacctggtgtgtgtggacgatgccctgccaatgggcttcagcaccagtcctaacatcagcaatgccgcactgctacccttcgacaacgccttgcagtcctattgcgagtcaagaaacctgatcctcacacggtatagcgacgatttgatcatctctggagagaactttgccagcctcgatggcattgaggcgcaagtcgctacccatttacaggaaacaatgaacggggaactgaatctccacccaaagaaatccaagttcctgcatggaggggttaagattaaacttttgggtatggtcctcttgcctaatggtaccatctcagttgatgctggggtgaaagaggaaattgagatcctaattcacttttacctgcgggacaaatctaagttcgccgatcgagtcgagggtggccttcagaaagccgaagctagattatcgggactgctcaattatgtaaatacggtggatcaagcttatttggataagctacgcaagaaattcgggacgactgttgtggatttttttctgcaccggtctttctcatga

SEQ ID NO: 11984 - RNA, 987 nt, synthetic construct
  source 1..987: mol_type = other RNA
atgtctattgcggcctcaccaacaactgccaaaagacctatggccgacctctttcgagctgtatatcatgataagagggatttccgcgacttaattgaaatggatgtgctgctcaattgcaaacgtgaacagtataccaaggccgggcaagttcgagccatccttgtccccaatgacgtgcttgccgggtgtctggagtttgtgcggctgtttgtcgtggactatctgcctattaacgaggacgtcgtttactcttacaggcgtggtatgagcgcttttgacgctgttgcgaggcacagagatgggaaacacttcctggtgtgtgacatctcacattttttcccctcgttgaaccggggccgcgtaaggctaaccatcgatcagggaaatgacagaacccccatcgccgattttggccattggctcgaccgcttcgttgatctcgtctgccctgagtccagcctccctgtgggattttccaccagtccgggcatctccaatgcagcactgaagccctttgatgacgccatgtcaatagtgtgcgagtctaggggcttgactctgacaagatactccgatgatataatcgtcagcggccagagcaaggacgctctggacgggatagagcaaattgtggcgggaacactgcagcaggtcctgccaggggaattcacgctgaatcgggctaaaacaaagagaatgcacagaggtaccaaagtgaagcttctgggaatggttcttttaccagacggcggggtatcagtggacgcagctgtgaaggatgaaattgaggtgctcctccatttccacagtcggaaccggtctaggttcctagaacgcgtgggtaacgatttggccaagggagagcgccgtctgagcggcttaattaactacgtaaacactatcgacaaggcctatttggacaaacttcgacgcaaattcggtgcagcaagtgtcgattacttcctgcaccggtccttcagctga

SEQ ID NO: 11985 - RNA, 984 nt, synthetic construct
  source 1..984: mol_type = other RNA
atgagtacccccttgaagacggtcgctaaacgccccctggaagacctcttcaacgctgtctaccatgacaaatataggtttcaagatctggcccaactggatgttctgttaaactgtaagagggagcagtataccaaggccggacatactagagctattctggctcctaatgaaatcttagcagcctgcttggatttcacacggttatttgtcgtggacttcctgcctatcaatgaagacgtggtatacagttataggaaaggtatgtctgcccttgacgcagtggtgtgccataaggattccaaatattttttcgtgtgtgacatcagccactttttcccctctattacttgggagcgcgtcggacttacacttgcccaggcgaaggatagaacccctatctcagatttcgacctgtggctcgatcgtttcgttcacctcgtatgtcccgagactggcttgccagttggcttttctaccagcccgggaatttcaaatagtgccctcaaaccatttgatgacgcaatgaaacggaactgcgatgaccgatccctgagaataacgagatactcagatgacatcattgtcagcgcaaaaacaaaggagcctctgcatgagatcgagaaactgatagagggcaccctacaggagacttttagtaatgacttcacactaaaccagagcaaaagcaagcacctccaccgaggcacaaaggtcaagctactgggcatggtgcttctgccagatgggtctgtttccgtggacgcctcgataaaggacgaaatcgaggtattgctgcacttccacgcgacaaataggtcacggtttgttgaatatgtggggcatagcctcaccaaaggggaacgccggctgtctggactcattaactacgtgaacaccattgacaaggcttaccttgataagttgcgtaggaagtttggtgtggccactgtggactacttcctgcaccgctccttctcctga

SEQ ID NO: 11986 - RNA, 990 nt, synthetic construct
  source 1..990: mol_type = other RNA
atgggggcgaagaccgccttattgcctagcggaccaagatcactggaagaactgttcaccgccatgtatagaggcaagagaaaggtcagcgagttcgctagtctcaacgttgccgccagttgtactaggaagtctttcacacacaagggccgaacccgtggaattgtgattcccagtgataagctccgcgggtgccacgagtttatacggctgtttctgctggattttttaccagtcgagatcgatcttgtgtttagctaccgaaaaggagtaggcgcattcgacgctgtaaaacagcacgcttctagcagacacttcttcgttaccgatatcgcggacttcttccctagtataaaacgggacagagtgctgagcattatccaaactggccggggaatttccccaatttcagaccttgacgcatggatggaaaggattgtggagctggtttgtctcgacggagaactgcccgttggatttagcacatcacctgccatctctaatgcagcattgaggccgttcgaccaggccatgcggaaagaatgcggtgctttgggcttagtgtacacgaggtactccgatgatctagtgatctccgggggtgatgctggcgtggtggaaagggcgcaagccttctgtgaatgccatctgcgggaggctatgcacggcgagtttcagcttcgacccgagaaatccaagttcctgcatgtgggccgcaagatcaagttgcttggcatggtgctcctgcccaatgggcggatctcgattgacggtgccacaaaatccgagatcgaggtcttgctccacttttacctgcgcgacagggcaaagtttgccgcaatgggggagggagacgagagaaaggtcgaagcacgccttgctgggctcctgaactatgccaacactgtcgatcagtcatatctggacaaactccgtcataaatttggtgccgctcctatagatctattcatccatcgctcttttgggtga

SEQ ID NO: 11987 - RNA, 927 nt, synthetic construct
  source 1..927: mol_type = other RNA
atgtaccattctaaaagaagtttcgatgacttcgcacgtggccccgttgcccagaagtatgtgaggcaccgcttttgcaagcagggtaagacacgagaggtcttgtcacccgacgacaagctgcgggcgtaccatgaattcctgagactgtttttactagactttctcccgcagaatgaggaagtcgtattcagctataggaaaggggtgtcagcctacgatgccgttagcaggcacgcacagagcaagtttttcttcgtgtgtgacattgccgatttttttccttcactgaagcgacacagaattaggcagactattctgtctggcaaggattcctcgccagtcgctgacttggatcagtggctcgaacgcatcttagacttggtcagtgtagatgattgtctcccaatggggttctctactagcccaacaatttccaacgcagccctcctgccctttgacaacgctgtgcagtggtattgcgccagtcgggggctgatctacaccagatacagcgatgacatggtggtttccgctaaagagttcgcaagcctggacggaatagaggaaacgcttggggccttcttcgtggagtacatggacggcgaccttgctttgcatcctggtaaatctaagctcttgcgtacaggctctaaaatccgcctgctgggcatggtgctgcttcctaacggaaccatctccgtggatgcatcaatcaagtccgagatagaagttctcattcacttctacatcaaagatcgcgctaaattcgctgacagggcagacggagacgcgcaaaaggtagaggcccggttagccggtctgctaaattatgctaataccgtcgatcaaagttatcttcaaaaactccggaaaaagtttggcgcggccgtggtggatctgtttctgcacagatcctttggatga

SEQ ID NO: 11988 - RNA, 969 nt, synthetic construct
  source 1..969: mol_type = other RNA
atgcccatcgtgaaaaaaccattgaagaccctgttcgaagctatgtttcacgggaagcgctcctttgccgattttatgcgcgaagcaagcgaggatgacctgggcaggacacatattcggcagggggccaagagacgggaactagtgtcaccgagcgagcgtctgagagcttaccactcctttctcagattgtttctggtggacttccttccagtgcatgaaaagtccgtcttcagctacaggaaaggagtctcagcccgagctgccgtcgagcagcatgctcctagccggcattttttcgtgactgatatcgagtcattctttccttccctgaccaggggaatcgtacgtgagactatcactaacgcaatggcagaaatacccattgccgacctaagcgaccacttagaacacgtgctcgacctgctttgcgtcgacgacgccgtgcctatagggttctctacatctccaggcctgagcaacgccgctttgtaccccttcgatgccgctttccacgcacgctgtcaacagctgggggtgatttatacccgatacgcagatgacatcgtactctcctctggcgagaggagtgcagttcaggagggcgaagtcgctctgaacgagctcctcgatagaatgttccgtggtgaactgcgcttgcaccggggaaagagtaaatacctgcacgtcggcggtaaaattaagcttttaggaatggttctcctgcccaatcgaaccatcagtgttgacacctcggttaaggatgagattgagacaatgttacatctgtatctgcgggaccgggaacgcttcaataaaatgctggaggtggggagtgcgaaaacagaggcgaggcttgccggactcctcaattatgttaacacggtggatcaatcttatctagagaagcttagaaggaagtacggcgccgcggtggtagatatgtttttgcacagatcatttggttga

SEQ ID NO: 11989 - RNA, 942 nt, synthetic construct
  source 1..942: mol_type = other RNA
atgcttttcgaggccatgttccatggcaaaagggacttcacagactttatgcgaaaagtctcggaagacgacttcggtcgagcccatcttaggcaagggactaaacagagggtgttgatcaacccgtcagaacggctccgtgcataccacaactttctgcggctgtttctggtggacttcttgccagtgcacgaggaagcagtcttctcctacagaaagggcgtgagcgccagagctgctgtggagcagcatgcgctaagtcgctacttctttgtaacagatatcgagagcttctttcccagcattacaagggacattgtcagaaagaccataaccagcgccatggccgagattcctatcgccgacctatctgatcatctcgagcacgttttagatctcctttgtgtggacgacgccctgcccatcggattttccacatctccttctttgtctaatgcagtgctctatccatttgacatcgtcttccacgcacgctgccaggaactcggagcgatctacacccgatatgctgatgatattattctgtcctcaggcgagcgggccactgttgagagtggagaaggcagtcttaacgatcacctcgatcgtatgttcgaaggcgggctacgcctgcacaggggaaaatccaaataccttcaccggggtgagaagattaagttgctgggaatggcactgttacccaatgggaccataagcgtggatacgtcaatcaaggacaagatagagactatgctccacctgtacctgcgcgatagagagaagtttaataccatgctggatgcgggtacggctaagactgaagctcggttagccgggctgctgaattatgttaacaccgtcgaccagctctatttggaaaaactgcgcagaaagtatggggccgctgtggtagatatgttcctgcataggtcctttggctga

SEQ ID NO: 11990 - RNA, 936 nt, synthetic construct
  source 1..936: mol_type = other RNA
atgtttcacggtaaacagaagttcgccgattttatcggagccgacgtcacaagcctgtacaccaccactacaccaaggatcggtagtaaaaggcgtaccctgcacatgccgagcgataagctgagagcataccacgaatttctgaacctgtttgtgttcgagttcctgcccgtgaatactggggtcgcctttgcatatcgcaagggggtgagtgcggctgacgccgttagaatacacaagcatggccggcatttcctggtgagcgacctcgcggatttttttcctagcattgacgtgagcttggttagagcaacactggttggcggagccatggcatcccctgtcgaaggcttggagtccaatttagatcggattctgcagctggtgtgcatcgacgacgccctcccacttggcttctccacatcgcctgtgctcagtaacgctgtgttgttcgctttcgacaccgctctgcagaaggagtgtgagtcaaggtctttagtgtattcacggtactctgatgacttaatcatcagcggtagtgatcgcgatgaggtacacggcgctggacaaattgttgagggactccttcgcgaacatttcggcgaaaaactaaggttgaaccccttcaagtccaagtccctgcatgtaggatcaaaagttcgcctgctgggggtagtgcttctaccaaacggtaaagtcacggtggacgctaaacttcgtgcaaacattgaggtgttgctgcacttttatctcaaagatcgagcgaagtttgccgatttcgccaaaaaggtcactggcgaacccgacaaggcagaagcccggctctcagggtggataaattatatcaatgctgtcgatcaggagtaccttgacaagctcaggatgaaatacgggtctgccctagtcgacagatttgtgcatcgatctttcgggtga

SEQ ID NO: 11991 - RNA, 1047 nt, synthetic construct
  source 1..1047: mol_type = other RNA
atgcaatatagcccagtactttacgagagacagcacattctaactatgacaaagcaacctctgcagaagctctttgatgcaatgtaccacgggaaatacagtttcgaagattttctccagtctcccgtggagaagaattatgaagtgattgctcccacagagccaggcggtagaagactcttcaaacctaaggagaatttgaagacataccatcggtttcttaacctgttccttttcgagtttctccctgtgaacgatagggttgtgttttcttatcgtaaaggattttccgcgcttcatgccgttcagaaacacgctaaaagcaaattcttctaccaaaccgatatccaggcctttttcgattccatcgaccgagcattaactgaaaaggccatcttatctgggcaggccaattgtccgatatcggatctggacatccatctagacagaattgtcgatttagtgtgtatcgacaatagcctgccagtgggattgcctgcgtccgctccactctcaaacgcagttcttctggacttcgacaacgaactggaacgttcctgcttggaacgcgagttgtgctatagccgctatgctgacgatataatcatcagcggtcatcggcaggtggacgtccaggagattggccagagtgtccaagagaagctgcatcagttctcatcaaagaatttctccatacacgagggcaaaacgaggtactttcacgtcggaggcaagatcaaaattctgggaatgaccatcctgcccaatgggaagataagcattgactcaaaaaagaagaaggacctggaagtactgctgtttttctatttgaatgacaaagaacgcttccggaaaatcgtcaaccaggccaagaaccggaccgagacaagtagggagctctctgatgatgactacgtggcctacctgagcggtaccattaaccacgtggactccatcgatcccgactatacggataagctgcgaaggaaatttgggactgccaccattgacgcactcaagcactctggctttagtaaggagaaatga

SEQ ID NO: 11992 - RNA, 1002 nt, synthetic construct
  source 1..1002: mol_type = other RNA
atgactaaacagcctttgcagaaacttttcgatgctatgtatcacggcaagcattccttcgaggattttctacagtctcccgtggagaagaactacgaagtaatcggtaccagcgatttcggcggccgaaaactgttcaagccgaaggagaatctgaaattgtaccataggttcctgaatctgtttctgtttgagttattgcccattaatgagcgggtcgtgttctcgtatcgaaagggattctccgctgtgaatgccgttcagaggcacacacaatccaagtactttttccagactgacatccaaagctttttcgatagcatagaccaggccctgaccaaaagaactattctggccggggagccatactgccccatcgcagaccttacagcacatctcgacaggattgtagacctcgtctgtatagacgactccatacctgtcggactgccagcttctgccccactctcaaacgccgtgctcctcaattttgacaacgaaatggagcgcttgtgccaagaacgtgacctgtcttacagtaggtatgcagacgatattattatctcagggcaaaatcagggcgccgttcaggaagccggtaacgcggttcaagaaaaactgcaccagttttcttccgaaaaattctttattcaccagggaaaaacgcggttctttcaggtggggggtaagatcaagatcttaggcatgcttatcctccccaacggcagaattagtatcgacacaaagaagaagaacgaacttgaagtcctgctgttcttttatctgaacgaccgcgagaaattcaaaaacatcgtgaatcaggccaagcagcggacagatgcaaaaagagatctagtggaggatgattacattgcgtatctcagtggaaacataaattacgtggattcaatcgaccctgattacaccgacaaactgcgcagaaagtttggggctgcaaccatcgatgctttaaagtatagcgggtttagcaaggagaagtga

SEQ ID NO: 11993 - RNA, 1002 nt, synthetic construct
  source 1..1002: mol_type = other RNA
atgactaagcagcccctgcagaagctgttcgacgccatgtaccacggcaaattttccttccacgacttcttgcattctccagtggagcagaattatgaaattgtcggcgggtccacatctggtagccgcaccttgtttaaacctaaggaaaacctgaagacgtaccatagatttctgaacctgttcctgtttgagctcctcccaatcaacgagcgtgtcgtctttagttataggaaagggtttagtgctgtgaatgccgtgcagaaacacacccagagcaagtatttcttccaaactgacatcaaagcgttttttggctcgattgatcggttgctcacccagaaaaccatcctggctggacacgaatattgtcccatcgaagatttacacgagcatatcgaccggatagtggacttggtatgcgtgggagattcaatacctgtgggactgccggcaagcgctccactcagtaacgccgtgctggttaatttcgacaatgagattgaacggatttgcaaacaacagggactcatctactcacgctatgcagatgacattattatatctggccaaaaacacgagtctcttctcgggcttaagatgctggtccaggaaaaacttcatcaattcagctccgagaagttctttatccaccacggtaaaacaagattctttcaggtaggcgggaaggttaagatattaggcatcatgatcctacccacgggcatcattagcgtggacacaaagaagaagaatgacctagaggttctgatccatttctacctgaacgatcgagggaggttcaaggatatggtgaataaaacaaagaagcgatccggtgctgatgaagaattatccgaggatgactacattgcctatctcagtggtaacattaactacgtcgattcaattgaccctgcatacaccgacaagcttaggagaaaattcggaagcactactatcgatatcctgaagtactcagggtttgccaaggagaaatga

SEQ ID NO: 11994 - RNA, 1008 nt, synthetic construct
  source 1..1008: mol_type = other RNA
atgaacaaggagccgctgcagaagttgttcgacgctatgtaccacggaaaaatccgattcgaggacttcttgtatagcccaatggagcagaattacgaacagggactgccaaaccataatgggaggagacggattttaaaaccccgtgagaatctgaaaacattccacaagtttctgaatctgttcctgttcgaactgcttcccatcaacgaaagagttgtgtacagttatcgcaaagggtttagtgccgtcaacgccgtggaaaagcatcgcgacggaaagttcttttttcaaactgacataagtgcattcttcgaatcaatagatgtcagtctggcaaagcgggtgatcctgtccggggccgagtttactcctatttctgacgtggattcatatattgatcgtatcatagacctcgtgtttgtaaatgactctctccctgtaggctttcccgtgagcgcgcctctgtctaacgccgtgctcttcgacttcgataatgtgatggagagctattgtctaaacaaaggtttagtgtacacacggtatagcgacgacattgttatttccggcaacgagagagaatggtataacggcgtcgatgactttgtccaaaggtcactgcacgaatcagcatcggacagattctacattaaccggaaaaagacccgcttttttcaggtgggcaataggctttccatcctgggcgtcatgatacttccaaacgggaaagtatctcctgacacccgaaaaagaagggaaatcgaggtgcttttgcacttttacctcaccgataaggataaatttaagaagatgatcgctgagaagcgcgttaaatctggaaagatcagcaaaatcgacgacggtgtctccgatgatgagtgcttagatgtgttgtccggtaacctcaattacattgatagcattgatcccgattacacaaataagctccgaaggaagttcggggttgctacgatcgacatgctaaagcatcggggcttctccaaatga

SEQ ID NO: 11995 - RNA, 999 nt, synthetic construct
  source 1..999: mol_type = other RNA
atgatggaaaagcaacctctgagggcactttttaatgcaatgtaccacgagaagtttaactttgatgattttctgacgtactcagtgtctgatagctacgaaatatcatctaaggagaagctgttcgaacgcaaattcaagaagccaaaggatatggttaagaactatcatcggttcttgaacctgttcgtcttcgactatttagagactaacccccgagtagtgtttagctacaaaaaaggtttgtccgccctgaacgctgtagagaggcacagcctgagcaaattcttttttcagactgacatctcgtcattcttcgaatccatcgacaaaaagctgattcgcgaaacaattgttgccggctgtagtgcatgtccagtgtccgacatcgacctgtacatcgaccgaattgtcgacatagtgtgcattgataatgccctccctgttggattgccgtgcagcgctcctatcagtaatgcggtgctgctactcttcgataacgagatcgaaaagatctgcgctcagcgcaatcttatatataccaggtactccgacgacattataatcagcgggatggagcggagtagtttagacggcattgataaacaggtccgtggatccctcgaagtcatctataacaacaagttctcgatcaatatcgccaagacaaaattctttaaggtgggcaacaagatttccatccttggggtgaatatcttgcccaatgggaaagtgactccagacaagagcaaaaaggaagagctcgagattctgttacacttttatctgaccgacagggacaaatttatttctagagcctcagagatgaagagaggtaacaagaataccctatctgaggaggattgtctgaacctcctcgggggcaatctgaattacgttgattctatcgataaggactataccgataaacttagaagaaaattcggagtcgtgacaattgataaactcatacatcggggctttcccgtgaaaaaatga

SEQ ID NO: 11996 - RNA, 972 nt, synthetic construct
  source 1..972: mol_type = other RNA
atgaaaaaacacacactcgaaaggctgtttgacatgatcacccatggcaaatatgacttttccgactttctacactgcaatcttgatgacgaggtgaagatttttgagatcagcagcaagaagcttagcagccagtcgaggatcgtctattcagccagcgcaaagctcaaagattttcattccttcttgaatatggtggttttcgaacagctgtcctcgaacgaggatgttgtttattcctatagaaaaggtgtgaatgccctggacgccgtgattgatcacaggaatagcaagtacttcttccagacagacatcagaaaattcttcccgtctattgaccgagaattaatcgcaaagactatcaatcgcaataaagaacggatacccgtcagtgattttgacaattatttcgatcgagtccttgatatggtctgctatggaggatctctcacaactggcttctcaacgtcccctctaatttccaactctgtgctcatagaattcgacgactacttttacaagtattgtaagagtaaccacctcgtatacaccagatactctgacgaccttatcgtctcttccagtaaaccatttgagatcgatatagagtcaaccatcatcgagaagttagataagctctatcgtggcaattttgggattaacaagaacaaatctcgctacagtcatattgggcaaaaagtaaaactgttgggtatggtgattctgcccaacggagatattacaattgacaggaaacagaagaaagagattgaggtgctgctgcactactacaaagaagacaaaaagcgcttcgatgaactgatagacggcgattatttgaagggaatggctcggatcagcggcatcctgaactacattaagatgatcgacgaggagtacttgaacaagctgatgaagaagtacggggtgactctgatagataccctgatccggaaggctgcgtcaaagtga

SEQ ID NO: 11997 - RNA, 972 nt, synthetic construct
  source 1..972: mol_type = other RNA
atgaaaaaacacaccctggaaaggctctttgatatcattatgcacgggaagtataatttctctgacttcctcttctgtaaacttgacgacgaggtgcaggtgtttgaaataggttcaaagaaattgtcctcacaatcccgtattgtctacagcagctccacaaagctgaaggattttcacaactttttgaacatggtcgtttttgagcagctgccaagcaataataatgtggtctacagctatagaaagggtgtcaatatcctggacgccgtgatcgatcaccgaaacagtaaatatttcttccagaccgatatcagaaaattcttcccttcgatcgataagaagttagtaagcgagactataaagaagaataaggaaaagatcccggtttctgatttcgataaatattctgatagggtgctcgacatggtgtgccacggcgaccatctgaccactgggtttgcgacatcacccttgatttccaattcggtgctgatcgagtttgacgactacttttataactactgcaagaacaaccatcttgtctacacacgctacagcgacgacttgatcataagttccaacaatcctttcaaggaggacattgaattactgattacaaaatctctcgacgaaatctaccagggcagtttcagcataaataaatcaaagagtcggtattcccatattggccagaaagtgaagcttctaggcatggtaatcctgcccaacggagatattaccatcgatcgcaaacagaagaaagagatagaggtgctgcttcattattacaaagaagacaagaaccggttcaacgaactcattaatgacgactatcaaaaaggaatggctagaatttctgggatcctgaactacatcaagatgattgatgaggagtacctaaacaaactcatgaagaagtacggagttactctgatcgatacgctgattaggaaagcagcctctaagtga

SEQ ID NO: 11998 - RNA, 948 nt, synthetic construct
  source 1..948: mol_type = other RNA
atgaaaaagtcatccctggaacaattgttcactcttatcctgcacggtaagtacagcttttcggagtttctggaatgtgatctggagagcgaactaaccgagatgactgtaaggtcccggactctgtacagccctagtaataagctcaagagcttccactatttcattaacatggtgattggcgaacagctgaacatcaatggcaaagtcgtgttctcatatagaaaagggaagaacgcattagccgcggtccaggtgcacaggaaatccaagtacttttttcagacagacatcagagcttttttcagcagtatcaacaagcaattgattaaagaagcacttctcaggagccgtgacaatatacccgtcctagacctggatatctacctggaccggatcgtcgacatggtgagtgtggggaattccttggccactgggttttccacctctccactcatttctaacagcgtgctcgtggaattcgacgacgcccttgttaactactgcacgacaaataatctcatttacacacgctattctgatgatctgataatctcaagtcagaatacgatcgatcatagtattgagaacgtgatagagagcttcttatcacagtattactctgatacattctctctgaacgatcgcaaatcccgatattcacacatcggtcagcgcgttaaaatccttggcatggtaatcctgccgaatggcgacattaccattgacagaaaacagaagaaagagatagaggtcttgctccatttctacagagaggataaaaacaagtttcgggagctgcttaacgacgatatggataagggctttgcccggatctccggaatcttgaattatattaaggttgtggacgaaggatatctccataagctgatgcgaaagtacggagtgaccgttattgacaccctgatgaggaaggcttctttatga

SEQ ID NO: 11999 - RNA, 948 nt, synthetic construct
  source 1..948: mol_type = other RNA
atgaagaaatttcccctcgagtctctgtttgacattatcttacatggcaagtacaagttttctgaattcgagaactgccagctaaacgaagaggtcacacgcatccaggtgcgaagcaggactgtatattccccgtcctccaagctgaagagttttcattacttcttgaacatggttctatgtgaacagttagcgctcaacgagttcgctgttttctcttatcgtaaggggatttccacgttggacgccctgaaattccacgtgagcaataagtacttttttcagaccgacatcacctcattctatagttcaatcaccaggagcattatcgatagagtgattgaggtaaataagcccaatctgcctatttccgatatcgacaagtttcacaaacggatccttgactttatttcttacgatggtatactccctacaggcttttcaacatcaccactgatctccaattcagtgcttatcgatttcgacaatttgttcgcacagtattgcatgaataagggtctggtctatacccgatacagcgacgatataattgtctctagcaaaaacgaattcgatatcgatgtcgagaaggtcattagcggattccttaaagagctctatggagatactttcaatctcaatagcagtaaaagtcggtattctcacattggccaaagaatcaaagtgctcggcatggtggtgctgccaaacggggacattaccattgataagaagcaaaagaaagagatcgaagtgctgctgcacttttacagggaggactactcccgcttcagagacataataggagacgatttggataaagggatggcccggatttcgggcatacttaactatatcaagaacatcgacgaaagttactaccataaactgatgagcaaatacggggtgaccactgttgacatcctgacaaagaaagctggaaactga

SEQ ID NO: 12000 - RNA, 984 nt, synthetic construct
  source 1..984: mol_type = other RNA
atgactaatgccgtcacctcgggtcccaagatgcctctcgaatcattgtttagggccatgtatcacgacaagttcgatttccaggactttgtgaatggcgaaataagccgaaactatgagcgcactcagtatctcgaccgtgagaagacgcgcgagatccttaagcctaaccaaaagctgaaaaccttccacacttttctgaatctgttcctcttcgagcatttgccagtgaatagagatgtcgtgttcagctaccgcaagggggtatctacatatgacgctgtcatccctcacgctaagagtagacattttttccaggcagacattagttccttcttcaccaacattaacagggaaatggtaaataaaaccatctcctttggatacgactcagtccctatttccgatatcgacttctacaaggaacggattctcgatttagtctgcgttggcgatacactgccaacaggttttcccactagtccaactatcaccaatgcagtgcttagaccctttgatgaccagctacaggcgtactgcaacagcaactctgccatttacacccggtactcagacgatatcattatctccgcactcgatagggaattgccgtcagacataaaggattacgtgacccagactctaagcgtgattacggccggccgtctgcagcttaatgagagaaaatgtcgacatttccacattggagggaaggttaagatcctgggaatgctgatactgcccaacgggcaaatttctgtggatagcaaaatcaggagggagacggagacactgctctacttttatgtgcgggacaaagataaattcctgaacaagacaggcttggatttcgacaaaggaatgaaacgggtttctgggtttctgaattacataaacacaatcgaccaacgctatttagagaagcttagacgaaaatatggcgctaccgtgatcgacatgtttctgcaccggtcctttgactga

SEQ ID NO: 12001 - RNA, 951 nt, synthetic construct
  source 1..951: mol_type = other RNA
atgaagaaacagagctttgagcatatgtataatgctatgtttcacggaaagtatagtttttccgactttcttaactgcgatatagattccgaatacacaactatcaatctgagggaccgtgttatctacagctcctcaaagaaactcaaggatttccacaagttcttgaatctgttcatcttcgattttcttcatatcagcattgactctgttttttcttaccggaagggttataatgtggtggatgccgtgcagatgcacaaaaatggcaaatatttcttccagtctgacattgtagatttcttccctagtatacatgagaatctcgtgaaaagtaccctgaaacattcattggaatctactcccattctagatctcgataaatacctggacctgataattaagctgaccatgattaacaacaacttacctataggctttagcaccagcccactcatctctaacgccgttctactggactttgatgaagagattttatcgtactgtcgaaagaagaacattcagtatagtagatactccgacgacattatctttagcgccgagaacatcgaggagattattgaagtaccaatcgtggtcgagaaatgcttgatctcacactataacaatacgttcaagatcaacaagagcaaatcaaaaatcaagcacattggggggaaagtgaagatcctgggcatggtcattatgcccaacggttccctgacaattgactccaaactcaagaatatcatagagacactccttcacctgtataggaccgacaagcaaaaacttaaagaaatctccgagaatgacctcgaaaatggaatcaagaagatcactaattacctgaactacatcaacgcggtcgatgcaaactatctgctgaagttgaaaaagaagtacggaccggctatcatagactacttcattcataaaaagcgcaattga

SEQ ID NO: 12002 - RNA, 951 nt, synthetic construct
  source 1..951: mol_type = other RNA
atgaagaagccggatctggaatccgctttcaacagtatgtttcacgggaagtacaaattcagtgagtttatcaacctcaacaccattgatgagtacacaattattcagcacaataacaggatcgtgtactctacaactaagaagttaaaggactttcacaagtttctgaacctctttgtgtttgaatatctgcgcatcaatgaggaggtagtgttttcctatagaaaaggacataatgttgtggacgccgttaaaattcatgccaagggtaagtacttctaccaatctgatattatcgacttcttctcatgcattaatgaacagcatatcgatcatagcctgaagatatctctctcaagtattccagtaagcgatatcgaaaagtacgcaatgcaggtcaaaaatctcatcctaatcgacggcaaattacctatcggcttcagcacatcaccccctatttctaactcagtgctgttcgattttgacaagattatcaagcagcactgcacactgaacgatattaaatattcccgttatagtgacgacatcatattctccgcgaatagcttgaatctgttggacgacatcgagaaaataactgaagaaaccctgttgaaaaccagcggaaacgctttccacattaacaccaagaaatccaagataaagagcataggtgaacaagtgaaaatcctgggaatggttatcatgcccaacggcgaactcaccgtcgactcgaaaattaagaataagacggagatcttgctgcatcactaccggactgataaagagaaattcaaaaagatctccgagaatgagcttgagaagtctatccttaacctagggagccttcttaactatatcaatgcagtcgacaaaccatatctctacaaactgaagaaaaagtatggcgccacgactatagatttctttattcacaagacccgagggtga

SEQ ID NO: 12003 - RNA, 1002 nt, synthetic construct
  source 1..1002: mol_type = other RNA
atgttcgatgagaatcagaaaagatccctgcgggagatattcatctctactttccatgaaaagatgtcctttcaagactttatacagctggacgtgggttccgagttccagaaatttaacttgaaacgtaggaccctatatgcaccctcatcaaagcttaaaaggatccaccgctttctgaacaacactatattcgaatttgccgattacaacaccgacgtggtattttcttatagaaagggtgtcaacatccgagacgccgttgaaaagcacgcaggaaacaattttttctttcagaccgatctttccaacttttactccaatattcatgagtccgacgtccgacgcgctttaagtaatcagctcactaatactccagtgcttgacattgagaagtacattgataagatcatcgagctggtagtttttgataatcacattccagccggattttcgacatctcctatcctgagcaacatttgtttgtttgagttcgataaccagctcaacaaatactgcaatgaacaccacttaacctacaccagatactcagatgacctcataatttcaagcaagactgaccatttcagcgaggatatagagtctgttgtgagcaatctgctcagcgagtatatcaatgctgggatcaccatcaataagttgaagacaaagctgcacaagaaaggccataactttaagatgttgggattcaatgtgctgcctaacggggtggtgacaattcccagcgtcgacaagaaggaaatcgaaacactactctatttctaccttaccgacagcaacaagttcgaaaattatttccaatctacgttctgcaacaccgaggctgaactgggcgaaaaatctctgcgcgagctcgccatcggcacattaagtggcaagctgattgcgttcaacagtatggacaaacagtacgtctcgaaactgaggcggaaatatgggaatacgatgattgatatgttcatccggaaaagtgtgaaatga

SEQ ID NO: 12004 - RNA, 936 nt, synthetic construct
  source 1..936: mol_type = other RNA
atgtttaaagacttcatgcagatcgatgttaacggtgagttccagaagatcaatcttaagaagcgcacagtatacgccccaacacccaagttaaagctgctgcacaggtttatcaataacaccgtattggaattcgccgattataacgctgacgtggtgtttagctatcgcaagggagtgagcataaggaatgctgtcgaaaaacattcccacaacaatttcttctttcagactgatctttccaatttttacggaaatatccaccaatctgaggtccagaccgcattaatgaaccaattgaaaaatacccccgtgctcgatgtggagaaatacatccagcggatcgtcgaacttgtgattgttgacgaccatataccagcagggttcagcacttcgcctctgctctcaaatatttgtctctttagcttcgacaacgagctgctgaaatattgccaggcccacgatttaacttacacacgatactctgacgatttgattatatcaggtcagactaacgagtttgcaggagacatagagcctgtgatcaacaatctcctggcggaatacgtcaataccggcatctccatcaataaatccaaaacgaaactccacaaaaagggccacaagttcaagctgctaggctttagtatcctgccgaatggggtcgttacaattccctccgccgacaaaaaggaaattgagagtctgctgtacttctatctcacggataacaacaagtttgagaaccatttcaagaacacccaaaatcctaaagacatcgaaagttacgacaagtcattgcgggagcatgctcttggcacactgtcagggaagctgattgcctttaactctatggataaacagtatgtgtctaagctacgtagaaagtatggcaacaccgttattgatatgttcattagaaagagcgtgaaatga

SEQ ID NO: 12005 - RNA, 1002 nt, synthetic construct
  source 1..1002: mol_type = other RNA
atgaatgagaataatatcaataggaacctgaaggacatctttaatagcacctttcacgggaagatgtcctttgaagacttcctctctctggacgttcagtccgaatacggtacaatagcactcaagaagagattggtttatgtgcccagccctaaactgaggctcgttcatagattcatcaataagaccattctggaatttgcagactgcaataaaaacgtggtttacagttaccggaaaggagtatcaactagggatgctgtcgagaagcatagcggccacacttacatattccagaccgatttgacggatttcttcaataacattcgtaagagtaacgtggtgaactcgcttaaaaagcaactgtcaagcgtgccaatcaaggatatcaacacatttattgacgtgatagccgacctggtcgtcatcgatgatcacatccccgctggatttagcacatcaccacttctgagcaacatttgtctattcgactttgacaatgagctcgagaagtattgcctctctaataacctgaagtatactcgctattccgatgatttaattatctccggctcttccattgattttacaacaacaattgaggccatcattgagactttcctgaagaagaacgtaaataatgccctttctatcaacgaggctaaaaccaagatacacaagattgggcataacttcaaaatactcggcttcaatatcttaccgaacggcatagtcaccattcctagtgctgacaaaaaacaggtcgaaagtcttttgtactttttcctgactgacgaaaaaaagttcgaggacttcttcctggggtttaccaacaaaatcaagcagggtagcgacgataaaaccgtgcgggagaaggccatctcaatgctatctggaaaattgatcgcgtttaacgcaatggataagaaatatatcgccaagctgcgcagaaaatacggcaacaccgtgattgaaatgtttattcgaaaatccgtgacgtga

SEQ ID NO: 12006 - RNA, 1002 nt, synthetic construct
  source 1..1002: mol_type = other RNA
atgaataacgaaagcaccaagcgaagtctcaaggatattttctcttccacttttcacgataagatgagcttcgacgattttctgaggctggacgtcaatcgggagttcaagacaattaatcttagaaagagactggtctatgctccctccgccaaattaaaacaggtgcaccgcttcattaacaagaccattttagagtttgcagactgcaacaccaatgttgtgttttcttatcggaagggagtcagcacccgggatgcagtagagaggcattcgcatagcaactacatatttcagacagacctcagcaaattcttcaacaatatccaccgcgatgatgtgatgacggcattgaagagccagctatcaaacgcccctgtatctgacatcgacttgttcatcgaaaaaattgtcgatcttgtggttatcgacgaccatatccctgccgggttttccacttccccactgctcagtaacatttgcctctttagattcgataatgctctggaagcttattgtgaggccaatgaactgaagtacactcgttactcggacgacctgatagtttcagggagtttgaacgactttacagagagtatcgagacggtgatcgataacttgctgattgaacacgtgaataacagcctttgtatcaataaggcaaaaaccaaaactcacaaagtgggccattccttcaagatcctgggttttaatattctgccaaacggcgtggtgaccatcccgtcacccgacaaaaaggaagtggaatcacttctatacttctttctgacagacgaccagaaatttgaggattttttcaagaagtgcgcggattctaaaacccccgagacagatgataaaaccattagggagcgagccataggtatgctctccggaaaactgatcgctttcaatgccatggacaagcaatatgttgcgaagctccgcaggaaatacggcaacacagtaatagacatgttcatccggaagtctgtcacttga

SEQ ID NO: 12007 - RNA, 1002 nt, synthetic construct
  source 1..1002: mol_type = other RNA
atggacaataacgataaaaatagatcactggaagagattttcgtgagcaccttccacgacaagatgtccttcaaagaatttcttagcctggatatcaataacgagtaccatacgatcgacctcagaaaaagggtgatttatgcccctacccccaaactgaagcagatccaccggttcatcaataaaacaatactggagtttgctgactactcaaaagacgtcgtgtactcttatcgtaagggggtgagtgtcagagatgcagttgagaagcacagtaacaacaccatattttttcagaccgacttttctgacttctatagtagcattcacgccgaaaacgtcaaaacatccctgtataagcaactgtccaacacctacatctctgatattgagaagtatatcgataggatactggaattaacggtaatcgataatcatatccctgctgggttttctacttcaccactcctaagcaatatctgcctctttgacttcgatcaggagttgttgaagtgctgtaatgacataggattgacttacacaaggtactccgatgacatcataatttccggttccgataaaacttttactgacgacattctgtcaattatcaaggaccttctcgggaaacacgtgaactcagaaattagtatcaacgattccaagaccaagataaataagaagggacatgacttcaaactcctgggtttctcgatcctgccaaatggcattgtaacaatccccagtgagtacaagaaagaggtggaactgctgttatacttctaccttacagacaatgagaagtttgaggattatttcaagaagctgaatgagaacaagaagctagaacttgaggacaaaactttgcgcgaacatgcgattaactctttaagcggcaagatgatcgcctttaacagcatggataagaagtacatttctaaactccggcgaaaatatggcaacaccgttattgatatgttcatccgcaaaagcgttaaatga

SEQ ID NO: 12008 - RNA, 939 nt, synthetic construct
  source 1..939: mol_type = other RNA
atgtccttcgaagaatttctacggctggacgttaagaacgagtttcaccgcattgacctgaagaagagaatcatttacgccccgtcattgaagttaaagcagatccacaggtttatcaataagaccgttctggagtttgctgattataatagtgatgtggtgttcagttaccgaaagggagtctctatacgagatgccgtggagaaacatagctcgaataacattttcttccaaaccgatttttccaacttttacaggtcaatccacttgtcaaatgtagagtctagcctcaacaatcagttgagcgacactctcatttctgacatcgggttctatatcaaccgcatcattgagctcaccgtcgtagataatcatatccctgcggggtttgctacttcaccacttctgagcaatatctgcctgtttgacttcgacaaagaactcctgaaatattgcaacgacaacaacctcacttacacgcgttatagcgatgacattataatttccggcgtgaatgacgtgttcgtggaatccattaaagacttgattaagaatctgctggcaaaatatgtcaacaaggatatccatctgaatgatagcaaaacacggatcaataagaagggtcactccttcaagttactgggcttttctatccttcccaatggcatggtgacaattcccagtagagataaaaaggaggtggagctccttctgtatttctacctaaccgacaactcaaagttcgagaattatttctctaccatagccgataacaaaaaactcgggagcggagataagagtctgagagaatacgccatcaacagtctttccggaaaactgattgcattcaactccatggacaaatgttacatcagcaagttacggaggaaatacggtaacacagttatagacatgtttatacgcaagtctgtcaaatga

SEQ ID NO: 12009 - RNA, 1002 nt, synthetic construct
  source 1..1002: mol_type = other RNA
atggaagctaaccagaaaagacccttgatcgatatatttatcagcactttccacgacaagatgtcattcaatgagtttttgacacttaacgtgtcgaatgagtttaaacggatccaactgaacaagcgggaagtttatgcaccttcgccaaaactcaaaaccatccaccgcttcattaataagacaatcctcgagtatgccgattataacaccgaggtcgtattctcatatcgaaagggaatttctacaagggaagccatcgagaagcattcagcgagcaattactttttccagactgacatcagtaatttctacaataacgtcagactggaaaatatctatacgagcctgagaaaacagcttaacaatacacccgttctggacatcgagaattacatcgacaacattgtcaacctggtggtggtggatgagcagctacctaccggcttcagtacttcaccgcttttgtccaatatttgtcttctggatttcgataacgcactgttaaaatactgcaaagacaatttcctcatctacacaaggtacagcgatgatataattatctctgggtccgacgatgggtttgctgtggaaatagagtccattgtgagtaattacctgaataacttcgtcaacgagaagattaagatcaactctgccaagaccaagtttcacaaaaggggacatgacttcaaactcctgggtttttccatattacccaacggcatcgttaccattccaagctccgacaaaaaggaggtggagagcttgatctatttttacctgacggacaacgaaaagtttgaggacctatttaagaagatctccgtaaacaaaaagctcgaaaatactgaaggtaagcctattcgggatctggccatttctagtctgtctggcaagctgatatcctttaactctatggataaggactatattagcaaactccgtaaaaagtacgggaataccattatagacatgttcattcgcaaagctgtgaagtga

SEQ ID NO: 12010 - RNA, 987 nt, synthetic construct
  source 1..987: mol_type = other RNA
atggagaaaagatcactggataaagtttttctgagcatattccacgataaattctccttcaatgactttatcgtctttgacctgtccagcaattacaaaaagctcatggtgaataatcgggaggtgttctccgccagcaaagaactgaagtacattcataagttcatcaactcaagtatcctggcatacgccaagtataacaaggatgttgtgtactcttatactaagggagtgagcatccgtgacgcaatcgaaaaacactccggaagcaaattttttctgcagacagatattagcaacttttatggcagtctcaatagagacaacatcgaaatttcgctccgctatcagatagataatttcccaatctcagatatcgaggactacatcgacttaattgtgtacttaactgtggtagaagataagctgccagctggtttcagcacgagtcctctcctatcaaatttgtgtctgcttgactttgataccgccctcctgaagtacgcgaacgaaaataaactagtctatacccgatattccgacgacctgattatatcttctgttaatgaccggctcgataacgatatcgttctgaagatagagtctttgttgtgcgagcatgtcaatgatagtatctcactgaaccaatcgaagaccaaatttaaccacattgggaactctttcaaactgcttggccttaatatcttgcccaatgggaccgtgactatcccttcctccgagaagaagaagttagagacactcatatacctgtatttcacagataaggacaagtttattgacttcaccaacaacaacattaagtacaacaaagagagcaaagagaggacggtggtagaggtaggcactaggtacattacaaacaaattggtcgctttcaattctatggaccccgaatatgtgaacaagcttaggagaaagtacggtaacaccgtgattgaaatgtttcttcgccagagtgtcaattga

SEQ ID NO: 12011 - RNA, 1038 nt, synthetic construct
  source 1..1038: mol_type = other RNA
atgaaacactatgaagagaagcctcaggagtttgtgctgactagcattcaaaagaaacgttcactacaggaagtctttttatctaccttccacagccagctcacttttgatgatttcctcaatctcaatgtggctcacgaatataagaaggttgaaatacagaagcgggttatctacattccgtcctacaagttaaagcgcatccataaatttttgaacaacaccgtgttcaaccatgctaggttcaacacagatgtggtgttctcttaccgaaagggtatcagcgtcagagatgccgtaaccccacatgccaagaacaaatttttcttccagaccgacatagtctcattttaccagtccattaaaactaacgatgtcgagagggcccttaagaatcaactgagcgatgttccaatcagtgacattgataggtacatcgatcacattgtgaatctcgtggttgttgacgatcacattcctgctgggttcgcgacctctcccgtgctgtccaatatatgcctggtcaattttgacgatgcactgctggagtactgtaagacgcagcacctgacttacaccagatacagcgacgacatcattatctccggcgagtacgaactggaacataaggtcatcgagattttcgtaacagagctactgaaagccaatctgggcagggcagccgaacttaacatacaaaaaacgaaacggtacaagagaggacacgatttcaagttgttaggtcttaacattctccccaacggagtagtgacaattccccgggagagtaagaatgagatcgaggtgatgctctatctttatttgacagacgctaaaggatttgacgactatgtgaaacatacattcttttcatctgagacagacatcgacagttccaccctgagagagcgcgggatcgccaaactgtctggcaaaataattagtgcaaagagcatggacaacaattatatctcaaagttgcgacgcaaatatgggaacactatcatggaaatgtttatccggaagtcggtgaaatga

SEQ ID NO: 12012 - RNA, 993 nt, synthetic construct
  source 1..993: mol_type = other RNA
atgccagaaaaaaggcagttcatcgaagtgttcaggagtaccttccacgagaagatctcacaggaagagcttatcacattggagacggagaacgaatacaaaatcttccaacacaagtctagaaaaacctatgcccctacaccgaagcttaaaaacatccaccgcttcttgaataacacagtttttgagtatgcagattacaacaaggaagtcgtgttttcttatcggaaaggcaagtctgtgagagaggccgtcgagttacacgccggatctaagatttttttccagactgacatctccaatttttatggaagcatcactcgagaaaacgtagaacatagtctccgggaacagctgaacaatgtgccaatatctgacattaaagagtatatccctctcatcctgaaactggtcgtggtcgataaccacattcccgctggcttctcgactagccccgtgctgtcaaatatctgcctgtacgaattcgacaatgctctgcaagttcattgtgagaataacgggctgatatactcccgatattccgatgatattatcatttccggggagtcttcagagtttgtggatcgtgttaccaagacaaccgaagacctgttacataagtacatcaacactaacgttagcttgaatcccgataagactaaggtacataaaaagggccggtactttcgccttctgggttttaccattctaccagacggtaagattactattccttcgcaggacaagaaagaaatagagacgagcctgtacttttatctcaccgacagctcaaaatttgtggacctattcaccaagacaaatcaggtagcgctgaatgaggtggatagcgtgagtatccgcgagagagccattgcaagtctcagcggcaaactcataggggtgaactccatggacaaaaactacatttccaaacttaggggcaagtacggaaatacagtcatagatatgttcatcaggaaggcagctaagtga

SEQ ID NO: 12013 - RNA, 1002 nt, synthetic construct
  source 1..1002: mol_type = other RNA
atggaactgtcaaaggagaggcgatcactcgaagaggtttttataagcacatttcatgagaaggtgaatttcgacgatttcgtaaacttttcgatcaacaaagagtacaagacatttgaggtgaatagacggaaaatttatgcgccgtcaaagaagttaaaacaattccagcgcttcatcaatagctctattcttgaatatgccgattataatcgggacgttgtgtactcctatcgtaaaggggtcagcataagagacgccgttgagaagcacgcaagctcaaatttcttttaccagacggatatttccgacttctttggaagtattactggtgatgacattatgaaggtgattaacacctccctacttaatgtccctgtaagcgatgtgctcgagtataagcaactgctgtttgaactgatggtggtggataacaatctgccagccggctttgcaacttctcctttgttgagcaatattacgctggtcgactttgataatgctctcaagaaatattgcgataggtccaacatcatctatactcgctacagcgacgacttgatcatctcttctgtcaatgaaggattcgtagacaatatcaacgaggtgattaaaagcttcctccatgaacacatgggtgaaaggttcaaccttaattacaacaaaaccaaggttcgacgcaagggccagaaggtgaagatattaggctttaccatcctgcccaacggcattatcacaatatccaaatcatacaaggaggaggtggagtctctgttgtatttctacctgaacgatacagataagttttccgactacgtgaagaacaaaatcaatcccagagataaccagatcggggacagaactttcgaagaattcgggatcagtagtctcagtggaaaactgatcgctattagttctatggactcgctttacatctccaaactaaggaagaaatacggcaacaccataattgagatgttcctgcggaaaaccgtcaactga

SEQ ID NO: 12014 - RNA, 981 nt, synthetic construct
  source 1..981: mol_type = other RNA
atgaagcggtcctttgaggagatattcattagcacattccacaacaaggtgtcttttgatgaatttttgaccctggatattgaatcagagttcaaaaaaatccccctacagaagagaaccgtttatgcaccatcctccaaactcaaacaaattcacaggtttctgaatcatgcggtcttcgagtacgctgagtttaataaggacgtggttttctcataccgcaaaggagaaagtactagaacggctgtggagaagcacgccaacaatagggtgttttatcaggctgacattaaagacttcttcgggtctttgaagaaagagaacatcctccatacaatcgaagctcagttagagaataccccagtgctggatatcgtggattacagggaccgcctgttagatcttacagtcgtcgatgaccatattcctgcagggtttgccacctcgcccattttgtctaacctctgcctgtttgagtttgacaatgccctagacaacatatgtaagaaagaggaactgacttacacgcgatatgcagacgatatcatcatttcatcccagactgatgccttcctgcccgagatagaggagaaaattcagaagcttctcagcaaaaaggtgaacccagaaatcttcttaaatctggccaagcggaaagtccagctgcaaggtcagcgtatcaagatcctgggcttcaatattcttccgaatggcattgtgactatccctaataaggataagaagtctgtagaaaccatgcttcacttctttatcaacgacgaagaaaagtttaaggactacgtcagcaagaacataaagagtaatagtgacggggaaccttctctgcgggatatcggcatctcaagtttgtccggaaaactcataagcctgaacagcatggataaaaactatatctccaagctcaagaagaaatacggtaacacagtaattgacatgttcatcagaaaaagcgttaaatga

SEQ ID NO: 12015 - RNA, 1071 nt, synthetic construct
  source 1..1071: mol_type = other RNA
atgagttctaccggatacgcgttcaaaattgtgatccactttaacctgtctattaatatcgggttagcccttctgataaagatacagaagcaaagaactctgaaggaagtgtttaaatccacctttcacgataagattagctttaaggagttcattaacctgaacctggacgaggagtacactatcagcacattcaagaaaaagaagatctactctccatcggacaagctcaaaaaaattcacagattcatcaactccagtatactcgagcatgccgatttcaatcgtgaggttgtatactcttatctcaaaggcagtagtgtgcgagatgctgtggaactccactcccaaagccagtatttctttaagacagacattcacaacttctttggaatcattaccaccaggaatattaagaaatccttggaggaacagttcagcaatgtcccgatttccgatatcgacatgtacaaggagttcctttttaaactgatggtcattgacgacgtacttcctgttggcttttcaacgtcaccccttttgtccaatatttgcctgtttgagttcgacaatcatctgcaggcttattgtagctctaacaacttcaagtatactcggtattctgacgatatagtcatctcctcaaacaagtcctttgatatcgaggagatgtccgaaaacatccaggcattgctgagtaaacatgttaatgagggcgccaaattaaacaaaagcaagaccaaggtgcattcaaaaggtgaacggatcaacatcctgggttataatatcctccccaatgacgaaattactatatcgagcaaagacaaaaaggaaaccgaaatcctactgcacttttatttgaacgatctggataagttcgatgattacgtgacgaaaaatataatcaaccggttccgcaatagcgacaagaaatcaattagggacatcggacttagtagcctgtctgggagaatcattggcatcaatacaatggacaagaaatacctgataaagctccgcaagaaatacgggaacacactaatcgatatgttactcaggaagaccgtgtga

SEQ ID NO: 12016 - RNA, 999 nt, synthetic construct
  source 1..999: mol_type = other RNA
atgtcttacatcaaaaatcagagaactcttgaggaagtgtttaaatccacatttcacgacaagataaccttcgaagacttcatcaatattgacctgaattcagagtacaagatcacaatctttaagaacaaggagatctatagtccttcagataaactgaagaagatgcaacgcttcataaatggtagcattctggaatacgcggactttaataaggatgttgtctactcttatctcaaaggcaatagtgttagggacgccgtggaactccattcaaaaagccaatactactttcagaccgacattcataacttttttggaacgatcacagggtacaacgtaaaaaaatccttagaagagcagtttagcaacgtgcctattagcgatctggataactacaaagatttcctattcaacctgatggtcgtcgacgggaagctccccgtggggttctcaactagcccgttactttccaacatttgcttgtataacttcgacaatgccttgtacaagtactgtgagtctaatggcttcttatataccagatattccgacgatattgtggtttcttccgactcccatatatcaattgatgagatcagcgagaaaatccagagtcttttgctaatccacgtcaatgaaagtgctaagctcaacaagcggaagactaaggcacactccaagggcgagaagatcaatatcctgggttataacattttgcccaacgacgagatcacaatttcgtctaaagacaagaaagagacggaaattcttctgcacttctacctgaacgatctggatcgctttgataactatgtacgcaataacattagcccaagattcaggaatgtggatgataaaagtagccgggaaatcggcatctcttccctgtcgggccgaatcattggaataaatgctatggacaggaaatatctgactaagctccggaaaaagtatggaaacaccctcatagacatgttcctgcgtaagaccgtgtga

SEQ ID NO: 12017 - RNA, 1008 nt, synthetic construct
  source 1..1008: mol_type = other RNA
atgctactgctctcctacataaagcataggagaactttggaggaggtctttaaatccacctttcactcgaaacttgctttcgaagatttcatcgggatcaacatttgcgacgaatatagtgtgtctacgtataaaaaacgggaaatcttcagcccttcagacaagctgaagaagatccacaggttcattaacggaagcgtgctggagtacgcggacttcaatcgggatgtcgtctacagttatctgaagggacggtcagttcgtgatgccgtggaagtgcattcaaaatcacaattctactaccaaaccgacatctataacttctttggctcgatcagtccgagtaatgtaaagaagagcattgagaatcagttttctaacgttcccatcagcgacattaaggattaccagggctttctgttttcactcttcgttgtggacgggaaattaccaatcggtttttctacaagcccactgctgtctaacatctgcctccgcgactttgacaacgctttgaaccagtattgtattgagaactcctacagatacaccagatattctgacgatattatcatatccagcgataatcagttctgtatcgataagctgagcaagcacatacagaatttcctcttgcagtacgtcaacgaaaataccaaaatcaataagtccaagacgaaagtacatacaaaaggggacaagttcaacattcttggctataacattctccccaatgacgaggtgactataagttccaaggataaaaaggaagcagagattttactacacttttacctgaatgacctcgacaagtttgatgattatgtgcgaaagtctatctaccctcgcttcaaaacatcctcagacaagagcatgcgcgagattggaacttccagcctgtctggccgactgattggtatcaatgccatggataaaaagtatcttaccaaactgaggaagaaatacggcaacacacttatagatatgtttttgcggaaaactgtgtga

SEQ ID NO: 12018 - RNA, 1005 nt, synthetic construct
  source 1..1005: mol_type = other RNA
atggaaaacaatagaaactttagaaccttcgaggaagtattcaactcaacatttcataatcgggtcagctttgatgacttcgtcaatggctctataaacacggagtacagcatcgtcaagtttaagaataagagtatctactccccatcacttaatttaaagaagatccagcggtttctcaacaaaagtatcttggagtatgccctaactaatgaacgagttgtgttctcatacagaaaaggggcttcggtgagggatgcggtggaggtgcactccaaatccaaatacttcttccagacagacattaagaattttttcggccaaatcaagaaggacgtggtggaaaatattatcggcacccagttaggatgtgtgcccataattgacatagaggagtatcacgatgtgctcctccgctatctgatcgttgacgggcacgttccgatcgggttttctacgagccctattattagcaacctgtctctcttctattttgacaacgatttggaggagtactgccttaagaatgatttcaaatacactcgttacgcagatgacattattatttcctccacagactacgaaattgatctgcataagaccaaatctctgatcaagagctttctcctgcgcaacaatttcgtgggggaactgatcaatgacaaaaagactagaatccaggtgaggaacggggtcattaagctgctgggtttcaacatacttcttgatggaaccgtcactattccctccaaagataaaaaagaggtagagatcatgttgaacttctatctgaacgacaagtcaaagtttgacgattatgtgagtaaactcaaaacacgaagtggccgcttgaatgaaggaaagtctctgcgggaaaacggcattagctcgctgagcggtaggatcataggaataaatgctatggacaagaagtatatcggtaagctaaagtctaaatacggcaacgccgtaatcgagatgtttctgaggaaaaccgttaaatga

SEQ ID NO: 12019 - RNA, 1008 nt, synthetic construct
  source 1..1008: mol_type = other RNA
atggagaacatagagcagaaacgttccttagaggaagtatttaactccacctttcacagcaagctgcctttctccgctctgacagaactcactatcgacagtgagttcaagcataagatctttaacaacagagacatctacctcccgactgataagttgaagaagatacatagattcgtgaatggatctatcttagaatatgcggagattaataggaacgtggtctttagctaccgcaaaggtgtttctattcgcgacgcagtagagaagcacacctgcaacaaattcttcttccaaacagacatcaagaacttttatggcagcatttccaaaaagaacatctcagacattttcgaccaccggtttgacatggttccaatatctgatttggataactatcggaagaagcttctggacctgatggtgataaatgatcagctgcctgcagggttcagtacctcacccatgctttccaatatttgtctctttgacttcgacaatgaactggaacagtattgtaacgagagtcacttgacttacaccaggtatagcgatgatataattatctcttcgtcggagaaggagaatctgacagatctcagtgagtttatccagagtcttctgtacaaacatgtgaacaaggaaacactaatcaatgacaataagacgaagattgtcaaacacggatcaaatgtgaaaatcctagggtttagcattttgcccaatggtgaactcactatttcctctaaggataaaaaagagatcgagatccttctccacttttttctcaatgatgccgaaaagttcaacaactatatcgaaagcaagctgtcattcaaacatgacgattcttccgaccgaaacgcctacgattccgctttatcaagcctgtgcggccgaattgtcgccctgaatagcatggacaaaaaatacctggataaactgcggaggaaatacggcaatacgctgatcgagatgttccttagaaaaaccgtgttgaagaactga

SEQ ID NO: 12020 - RNA, 1002 nt, synthetic construct
  source 1..1002: mol_type = other RNA
atgaatatcgccaattacaatagaaccttagaagaggtcttcaagagtattttccatgacaagttgaagttcgaagagttcttaaagctggatgtgaagaacgagtaccaggtgtttgatatcaaagggcgcaaggtgtactctccttccaaaaagctcaaaaagatccatcggtttattaacgggagtattttcgagtatgcggactataacaaaaatgtggtgtattcgtatctcaaaggcgtctcagtaagggacgctatagagaagcacgcaaagaataactatttttacaggacggacattaaggattttttcggtagcattacaggcgaaaatgtcatacgatctttggaaaatcaactcggcaacgtgcctatctccgacattagcaattatgtcaaccacatcttcaatctggtggttgtaaatggtcggctacccgccggctttagcaccagtccaatcctcagcaatatctgtctcttctcttttgacaaagaactggaagtcacttgccagagagacgacatggtttacacacgttacagcgacgacatgatcatatcatccattaacgagattgatgaggaaaaaatcaccggacttattcaatctctgcttttccggtttgtgggagataacgttttcctgaacgataagaagaccaagatacataagaaagggactcagggcaccctcttaggttttaacattctgccaaacggggaggtgacaatcccgtctcgagataaaaaggagatcgagatccttttgcacttttacctgtccaacagtgactccttcgtaaattatgttagcaaaaacatccagcccaggtacgccaactcagataacaagacacttaatgaaatcggcgtgtcctatctatcaggaaaactgatagggattaacgctatggataaaaagtacctgactaaactgcgctgcaagtacggaaatactctgatcgagatgtttctgagaaaaaccgtgttgtga

SEQ ID NO: 12021 - RNA, 1002 nt, synthetic construct
  source 1..1002: mol_type = other RNA
atggacaggacaaataacaacagaaccttagaggaagtgtttacaagcatattccacgacaagctaaagttcaaggagtttctggagctcaacattacgaaagagtatgaagtattcgaggttaagggacgtcgcctgtattcccccaccaaaaagctcaaacaaatacaccgctttataaatgggagcatctttgagtacgcagagtacaacaaaaatgttgtattcagctatctcaagggggtcagtattagagatgccatcgaaaagcacgctttaaatcagtatttttaccagacggacattagggatttctttggctccataaacggcgaaaacattaatcattccttgagttctcagttggacaatactccaatttccgacatctcggattacatcaacctgatctacaacattgtggtgattgatcagaaacttccggttggtttcagcactagcccaatcttgagcaatatctgtctgttcaacttcgataatgagcttgagaagatctgcatctcaaataatatgacctacactcggtattccgacgatatcatcatctcatcagggaatgagattaacgagctggaaacaacctctatcatccaatcgctgctgtttaacttcgtgaacaacgagtttattgtgaatgataagaagaccaagacatacaagaaaggctctggcaatagtcttctgggtttcaatatactccctaatggctacgtcacaatcccttccaaagataaaaaagaagtcgagattctgctgcatttctatttgaccagtcccaagagcttcgaagactacatcattaagaacatcgtgaataggtacaaaaaccaggaaggcaagtcaatcgacgaaattggaaagtcttttctctctggaaaactgattggtattaacgccatggacaagaaatatctaactaagctgcggggaaaatatgggaacaccctgatagaaatgtttcttcgaaaaactgtgctctga

SEQ ID NO: 12022 - RNA, 987 nt, synthetic construct
  source 1..987: mol_type = other RNA
atgtctgagaaaaggtcccttgaggacatttttctgtctacgttccacaacaagtacagctttaaagagtttatcgaactcgatatcagcaaagagtacgagatctttaacataaacgaccgtacaatttactcaccctctgcaaaacttaaggcgtttcatcgatttatcatcagttgcattcttgaatatgccgaattcaataaagacgtggtgttctcgtatcgcaaaggaacaactattcgggatgccgtcgagcggcactcaaacaattcattcttctttcagaccgacatcaagagtttttttacttccatctcaaccaatgatgtgaagtctacactacttcatcagctggttgatatcccagttagcgacgtgaaccacttcatcgatctgctcatcaagtactgcgtcgtagataatatattaccgacaggtttcagtactagccccattctcagcaatctctgtctattcaagtttgacaatcagctggaaaagctggccaaggaaaagcacctgcactattctagatactccgacgatttgattctgtcctccaagtctcttgacacactgaacgagattgaactcaccatacagcggtatttgactcaatacataaactcaaccatcaaactcaatcaaagcaagactaagatcacgaaaaaagggcagaggattaaattgctcggcctggtgattctgcctaacggaatcgtcactatcgataaaaagacaaagaggcagatggaaaccttattccatctgtatctgaccgacgacgagaaattcgagaattacatttccacccatttcaagaacaaaaaggatcaacagacatccctgaaggaatacgggattagcatcttgagtggcaagctgatggctattaatagcatggacaagggctatttaaacaagctgagaaccaagtatggtaacacggtgatagagatgttcttgcgcaaaaccgtaaaatga

SEQ ID NO: 12023 - RNA, 1005 nt, synthetic construct
  source 1..1005: mol_type = other RNA
atgaaaaccaacactaacgagtcctatcgcactttccaagaagtttttgtgagcaacttccataacagcttgctattcgatgattttctgaatctgagcgtcgataacaatattgctgtgacccaggttaaagagagagaaatcgtacagccttcaaaacggctcaaacgcatcctgcatttcctcgctaagaatgtctttgattatggaaacatagcaaacgaagtcgtcttctcctaccgaaagggcgtgaacgtgagagatgcagtgctaccccactctaaaaaccggttcttttttcagaccgacattgccaacttcttcggatcaatcacaaagcctctggtgagcaaaagtataaggaatggtctgggatccgtgccaattgccgacatacacgagtacgccgacgtgatcctcaacatcgtttcatacaagaattgtttgccgcttggcttccccacttcgcccgccatttccaatatgtgcctactgaattttgacaaggagctgctcatccaggccaacgagttagatgtgtcttatacacgatacgccgacgacatcatacttagtgcaaacaatgatgaggtattgcgcatgctggcagccagggttgggggcttgctgcaagagttcctcggtgctgaaatcaaaattaatgaagcgaaaaccaggtatctgcagcaaggacagaagattaagctgttagggctggtggtcctgcctaacggtcaggtatctatcgacagggcagacaagattgaaattgagacactgttacatcactatctcaccaacgacgataagtttctcgggtacggcgttgtcctcaagaataaaaaggcgaaaaatgacaaggtgttgacgcgggaaaatgtgatctctatgctgagtggccgtctgattggggctaatgctatggccccagagtaccttctgaaacttagacagaagtacggcaatacaatcatcgagatgtttcttcacaagtccgctaagtga

SEQ ID NO: 12024 - RNA, 969 nt, synthetic construct
  source 1..969: mol_type = other RNA
atgccgtttggcatcgttcagatgaaaaagacatctattagcctgagagaagcatttgactcaacctttcaccaaaaattcaacttcgatgactttctgtcgctcaacatttctcaggaatacaagcagttaagtaatgagaaagtgaatcctagtctcaaactgaaaaagtatctgcgtttcttgaactcctttgtgttcgactacgccaaaataaacgagaatgtggttcactcctataggcacgaaaaatccacctacactgcggtagtcccccattgccactccaagttcttcttccaaaccgacatcaaggacttttttcataagatcagtaagcaggacgtggaaaaaatcgtggacactgctctcgacaaggccccaatttatgacatcaatcggtataagagcgagctgctgaatatcaccacgatcgatgatgtcttgcccgtgggatttccaacaagtcccaacattagcaactctttcctatcctcttttgatgatactctggaggggtactgtatcaagaacaacataatctatacccgatactctgatgatgtcatccttagttccgaatataagaacagcctcattaatatccaggatgtgattagcaactacctgaaagagatttacgatgggcgcattgagatcaacacatataagacaaagcatacgcacaagggttccaagataaaaatacttggcatggtggtactcccttcaggtaagattagcgttgacatcaagttcaaacagcacttggagattttattccacttctacattaacgacaagaataaattcgctgactatctgaagaatcattaccagggcgatttttcaaaaattagcggacagctgaatcatatcaatactatcgacaagtcataccttgataaactaaggaagaaatacgggaatttcatagtcgattcttttcatcaccaatcaatagactga

SEQ ID NO: 12025 - RNA, 948 nt, synthetic construct
  source 1..948: mol_type = other RNA
atgaagaagacctctctcagtctgcaggaagcgtttgactctacatttcaccacaagcttaatttcgatgacttcctgaacttgaacctacctcaggagtaccagaaaattagcaatgctaaggtaaacccatctcctaagctgaaaaagtatctccgatttctcaatagcttcgtgttcgactatgttaagataaacactaacgtggtgcattcgtatcgccatgagaaatctacttacactgcagtcgtgccacattgtcacagtaaattctttttccagaccgatatcaaggactttttccataaaatcaccaaacaggatgtagagaaaatcttagataccgccctcgacaatgtgccgatctatgatattcaccagtacaagagtgagctacttaacattaccaccattgacgacattctgcccgtgggcttccctacatcacccaatatcagcaacagttttttgtcagacttcgacgatgccttggaaggctactgcatcaagaatgagatcatatacacgagatattccgatgatatctttctgagctccaatgccaaagattccctgatgagcatccaaaacacaatatccgattatttgaacgaactgtatgaccggagggtcaaaattaacgcttacaagactaagcatacgcataaggggtccaagatcaaaatgctgggaatggttatccttccctcaggtaaaattagcgtcgacattaagcttaagcagcaaatcgaagtcctgtttcacttctacataaatgacaaagacaagttcgcagattacttaaagaaccactatcagggggacttttcgaaagtgtctggacagctgaaccacataaatacaattgacaaatcctacctcgacaaactgcgtaagaagtacggcaattttatcgttgattcattctaccaccaaagcattgattga

SEQ ID NO: 12026 - RNA, 951 nt, synthetic construct
  source 1..951: mol_type = other RNA
atgaagaagctgctgcttaaagaagctttcaatagcactttccacaaaaagctgaatttcgatgacctcctaaacctcgagattatcaatgagtatacaagcttcaacatccggaataaacagattctgaacccgtctgaaaaactcaagaagtaccacagatttcttaattcattcatcttcgactacgccaaaattaacacaagtgtcgtacattcctataggaaagagaagacagcctacacggctgttagcgtgcacgcaaattccaagtacttctttcagtctgatataaacgacttcttcaattctatcactgccaccgatatcaaaaatgttctgaatagcaatctggatgattcccctatttccgacatcgttaactacaaggatcaattgatcaacatagtaacggtcaacaacattttaccaatcggattttctacatctcccaacatcagtaacacttgcctgtataatttcgacaattccctggagacatactgtaatgagcgcgatataaattttaccagatatgcggacgatatcatcctatccagtaatactaaagagtcgatggtgggtattgaagagattgtgagtaagatcctgaacgaattttttaacgaccgatttgtccttaatcagcacaagaccaagcggctgaggaaagggaacaaagtgaaacttctcggaatggtcattttgccctcaggcaaagtgaccgtggacatgaagttaaagaagcagctggaaatattgctgcatttctacattaacgacaaggacaagtttagcgattatctcggtaaagtgtatagcggcaaattgagcaccatatcaggccaactcaactacatcaacactgtggataaaaactacttaaacaagctgcgcaagaagtatgggaattacattgtggacctcttttttcattcaaccgtcaagtga

SEQ ID NO: 12027 - RNA, 939 nt, synthetic construct
  source 1..939: mol_type = other RNA
atgccgctgcaagacgtgtttacaagcacattccaccagaaacttgacttcaatgacttcctgaacctcgacgtgaaatctgaatatgagccactcaagaatacgcagaaactcattctgaaacccagccccaaattgaaaaagtatctccgtttcctcaatagtttcatctttgagtacgctaagattaataccaacgtagtgttcagttacagaaaggataactctgcctacaccgccgtccgaaagcatgctaattccaagtatttctttcagacagacctttctagctttttctattcaatcactgcggaggatgttaagaacgttttagaaaactacatggggaacagtcctataaatgatctgagggagtatcaggagatcatcataaacatggtcacagtagacggggtgctgcccgttggcttcagcacttctcctaaaatttccaattcctgcctgtacgaatttgacaacgaactggaacagtattgtttagacgatgggattatctatactcggtactcagacgatattatactttcttcgaaggataacgacttgaagacagtggagaaagtgattagcggaatgcttaacaaatttttcggagcacgcttccagctaaatcctaataaaactaaacacacccacaccggtaaaaagattaagctgttgggcatggtgatcctgccaagcggcaaagtctcagtggatatcaagctaaagaagcagatcgagatcctgttttacttctacatcaatgacaagaccaagtttacggattacctggtcaataaataccagggcgacttaggcaagataagtggacaactgaactatattaacaccatcgataagtcctacttgaataagctcaggaaaaagtatggtaactttatcgtcgattcctttattcatcaaactgtgtcatga

SEQ ID NO: 12028 - RNA, 990 nt, synthetic construct
  source 1..990: mol_type = other RNA
atgaatgaaattacccataccaatttcaagaagaacacactccaaaccatttttgagtccaatttccatgacaagttttcttttcatgacttccttcactttaaccaagaaaaggaatatacgaaggttaacataggtcgtgagaaaataggcagtaaagagattctgaaggcttcggacaaattgcaaagctacttgaggttcctcaacaactacatttttcagtatgcggacattaacaaaaacgtagtgtactcctaccgcaaaggagcaaatacatatcaggccgtcaagaaacacagcgataacaatttcttctttcagacagacatcaagggcttttttaagaatgtgaaatccgccgatatcaagttcatattggaaaataacctgcacaatacccccatctcagacctgaaaaagtacgaggaacgaattctctctattgttacagtgaatgacaccctgcctgtggggtttgcctcaagcccgatcctaacgaactcattactgaaagatttcgacaatgagctagagaactattgcactcagaatgacatcgtctatacacggtattccgatgatctgatccttagctctaaggtgaaagacagtctgatagacatcgagaaaatgatttccaatatcctgaacaagttctttaacgacagctttcagctgaacaaagagaaaactaagctcactcataaaggaaacaagattaagatccttgggatggtgatcttaccaaccggcaaagtcactgtggacattaagattaagaagcagattgagtctctcttgcacttttacataaacgacaaggatatcttcatcgatctggtggggggaaattacgatgatggcctggctatggtcagtggcaaaatcaattatatcaataccatcgatcccgaatacctcataaaacttagaaagaagtacggtaactacgtagttgatctgttcttccaccagagtttcaagtga

SEQ ID NO: 12029 - RNA, 981 nt, synthetic construct
  source 1..981: mol_type = other RNA
atgaacgatattacgcatagtgaaaaaaagagccttcagagcatttttaagagccactaccatgagaagtactcatttgaggatttcctgaatttcgaccaggaaaaggagttttctaccatcgagatagacacaaaaaaaggggccaagaaagaaatctttaaacctagcgacaaactgcaagattacctgagatttcttaacaactacatcttccagtatgctgacactaatactaacgtcgtgtactcatataggaaaggtacaaatccctatcaggctgtggtaaagcattccgcaaataattttttcttccaggccgacataaaaggctttttttctagtgtaaagcgacaggatattgagtacgtgcttaataacaaactggcacaaagccctattagtgacctgaatatatatatcaaccgtatcctgaacctgatcatggtgaatgatagcctcccaattgggttcgcttcttccccgattctcactaactcgttgttaaacgattttgacaatgagctcgagaagtattgcctcgatcaggatgtcatttacaccaggtattccgacgacttgatactatcagccaaaaccaagaccccattaatcaatctggaagattacatctccgaaatgctggttaaattcttcaatgaacgcttgaagctaaacgaggagaagacaaagctcacccaaaagggcaataaaattaaaatcctcggcatggttatccttcccactggaaaagttacggtggacattaaggtcaagaagaacatcgagatcctgttccactacttcatcaacgataagaataagtttgtggacatttctggcggtaattatgaagccgcgttagacaagttgtcaggaaagatcaactacataaacacaattgaccccgattacctgatcaaactgcggaagaaatatgggaactatattgtggatatgttcttccacaagtcctactga

SEQ ID NO: 12030 - RNA, 951 nt, synthetic construct
  source 1..951: mol_type = other RNA
atggcgctcaccctgaaaaatgcttttgaagccaccttcaggagtaactacagattcgaagacttcctggcactaaagctggagcagactgccactcggaaaaagttgggcgggcgggagattgtgcagcctaatgcagagctaaaagcctatcttcgctttctcaataggttcattttctcttacgcggacgtagtcgatgaagctgtgttcagttacaagaaggatgcaagtcccaagcaatccctgataaaacattgtcaaagcaggtgcttctataagaccgacatcgccagatttttcgagtcaattacatttgatgacgtgcttcaggtttttacaaataagttgtcccaggccccaataaccgattggcctgattaccaagcccatctgcaatctctcgtcctcgtcgacggtcgtctccctattggctttccctctagcccagtaatttctaactcagtgctgtatgagtttgaccaggcagctcttgcgtgggctcaaagacacgatatcatctatactagatactctgacgatctgatcttcagcgcccagcacgatgaggtgctgaagtccctgccacagcgaattgaaaagtggctgaacgacttttatgatggacgcttcaagcccaacccgtataaaagtttctttacacatacgggcgagaaagtgaaattactgggattggtgatccagcccaacggtcatattagcgtgtcgaggtcattgaagaacaaaatcgagtcccttttgcactatttcatagaagaccaggcagtctttgaccgcctgctcgcccagcactttagcgggaatgctgtcgggctgatgagcatgctgtcctgggttcagtcaatcgatcagccttacatcgaaaagttacggaaaaagtacggaaattacacagttgacctcttcttacacggcgccgctcgactttga

SEQ ID NO: 12031 - RNA, 990 nt, synthetic construct
  source 1..990: mol_type = other RNA
atgaaacctctgagcctggagaaggcttttaacatagcctttttcgaaaaggattcatttcagaacttcttatccttcgagcccttccaacagaccaagtttataactttcgatgaacggcttattgcagaaccaacatctaagctaaaggagtaccataaattcatcaacgagttcgtcctctcatacctgaaagtcaataaggatgtcgtgttctcctaccgtaaaggatctagcacttatgacgcagtgaaactgcatgcctgcagcaagatcttttttaacaccgacatcaaatcgttctttccatccataacacgcgagtatgccaggtctgtattggtcgacaatctcagcaatgtgcccatttctgatcttaatatccacctcgataaaattctggactacataatcatcgacaactcactgcccgtcggctttccgacatcaccagcctttagcaacgcttgcttatacgatttcgatgtggagatgcagcagtattgtatcaaccacgaatatatcttcacgagatactccgacgatatcattatttcgagtgaaaatgatgagggatttgagaatatacacagtgtggtgtccgacctgcttggtgaattcggcaaagggcatttcaagttgaactcagcgaaaaccaagctgatcaaaaaaggaagtaagattaagcttctgggcatggttattctccctagccaaatcgtatctgtggatattaagatcaagaggaagctggagcacctcatacatttttatgttacagacaaggacaagttcatcgattccattatcaaggaccctaaagttaaaacttccggcctcaatgactctgagattttggaaaagggcgttaacaccgtgagtgggctgttaaatcacatcaacaccattgataagagctacttggacaagctgaagcgaaaatatgggaataccattgtggacatgctattttacaaaaatgtgaactga

SEQ ID NO: 12032 - RNA, 990 nt, synthetic construct
  source 1..990: mol_type = other RNA
atgaagccactgtctctcgaaaaagcattccacatcgccttcttcgataaggatagcttccataactttttgagttttcagcctttccagcagacgaaattttccacttttgaggaacgcctgatagccgaaccgtcctctaagttgaaggaataccacaagttcattaacgagtttgtgctgtcctacctcaaggtgaataaggacgtcgttttctcctataggaaaggaagtagtacatatgatgccgtgaaacttcacgcaaaaagcaaagtctttttcaacacggacattaagtccttttttccaagcataaccagagagtatgcccgtgctgtgctgttcaataacctaagcaacatccccatttctgacttaaacgtccatctggacaagatacttgattacatcatcattgatgactcactccccgtaggcttccccacctccccagcattcagcaatgcttgtctatacgactttgatgttgctttacaacagtattgcgcggaacatgactacatctacacacggtattcagacgatatcatcatctcttccgaaaatgatgagggcttcgacaatattaacagcgtggtaattgagttgctgggtgagttcgggaaaggtcactttagccttaatcctaccaaaacaaagctgattcgaaaaggctcaaagatcaaactcttgggaatggtcattcttccttctgaaatcgtgagtgtggacataaaaatcaaaaggaaactggagcacctgattcacttctatattaccgacaaggacaagtttctcgattcaatttcaaaagatcccaagatcaagactaccggactgaatgattctgagatcctcgagaaaggggttaactcggtcagtgggctgctgaaccatatcaacacaatcgacaagaagtacctcgataagttaaagaagaaatacggcaacactatagtggacatgctgtttttcaagaatgtgaattga

SEQ ID NO: 12033 - RNA, 987 nt, synthetic construct
  source 1..987: mol_type = other RNA
atgaaggctctcactctggaaaaagccttttccattgctttctttgagaaggatacattcgagaatttcctcacgttcgagccgctctcccaaattaagtttagtagcaaaaatgagcggctgattaccgagcccggatcgaaacttaaggagtatcacaaattcatcaacgagttcatattcagctaccttaaagtcaacaaagatgtggtcttttcgtacaggaagggagcatccacgtatgaagcagttaaattacatgccaaatcccgtgtgttcttcaatacagatatcaagtcctttttcccttctgtgtcccgcgaatacgccagatacgtgcttgacgataattcatctagtgttcccatcaccgatttctcctcttacatcgaaaagatcttggacttcataattatcgatgacgccctgccagtcgggttttcaacttctccaagttttagcaacgcttgtttgtaccactttgatttgggcatgcagtcttattgctttgaaaaagggtatctgtacaccagatattcagatgacatcatcatttcatccgagcatgagctggacgacgacatttatgcagtagtgagcggttttctgaacaaacttagcagcgcgaactttgaactcaatccttctaagaccaaactaatcaggaagggaagtaaaatcaagctgttgggcatggtgattctgcccaccggcgtggtgactgtagacataaaggttaaacgaaaactcgagcacttaatctacttctacctgaacgacaaggagaagttcgtggattctgtgaagaaggaatcagggaataagcagaaatacctgaatgaaggcgaggtgctggacaaaggcataagtatggtcagcgggctgctcaaccatgtaaatacagtcgacaagagctatctagacaagctcaagaagaagtatggtaacacaattgttgatctgttctttcacaagaacttaaactga

SEQ ID NO: 12034 - RNA, 1062 nt, synthetic construct
  source 1..1062: mol_type = other RNA
atgtctgatcagttcgttaatgtggatgataatatcctacctaccaattcatctagcccaataaaaccgaagaaatcacttcctttagagaaggtgtttaacatcgcatttttcgaaaaggatacgttcgagaacttcctgaattttgacgttgccagtggctacgaatgtgctgactttaaaggacggacgctgctcaaacccagtccaaagcttaaggactatcacaagttcatcaacgacttcatttttccgtacctcagtgtaaacgagactgtcgtgttcagttacaggaagggctctagaacatacgatgctgttagcaggcactccgagtcaaaagtcttctttaataccgacatccagaatttctttccctcgatcaccagagacttcgcgaagttggtcctccttgacaatctgaagaatattcccatctccgatatcaacaacttcataccaaaaatactggatttcgtggtagttgacaacgtgttgcctgtgggcttttctacttctccctccttctccaacgcctccttatatacctttgattgccggatgttcgactactgccaggaaatcaatgcagtttatacccggtattcagacgacattatcatttcgactaacaatgatagcgacctgaatgatatttataggattgtcgcccattttctgagccaagtaaatgatggtaagtttctcctgaacaaaagaaagacaaaaatcgtgcgccgtgggaataaaattaaattgcttgggatggtgatcctgccttctggtaagattagcgtcgacatcaaaacaaaaaacaaaatcgagcacctcatacatttctacctgacaaataaggagtccttcaaaaatgccgtcctaaagtacgataaggacggcaagataaagaacctcccagaaaatgagatcattataaagggagtgggaatggtgagcgggattttgaaccatattaacactattgaccaggaatacctgaacaagctgcgccgaaaatatggcaacgtggtgatcgatatgttttttcaccaaaacgctagctga

SEQ ID NO: 12035 - RNA, 987 nt, synthetic construct
  source 1..987: mol_type = other RNA
atgaatactcccgataatcctatcatccctaaaagcaagaagattctcaagttagaaaccattttcagcatcgcttttcacgaaaaaactaaacttgacgacttcttgtcatttaacatcaagtctgagtacaagaaactggaatataacgggaggatcatttatcatccatcaaccaaactcaagagttaccataagttcattaacgacttcattctgttctacctaaatatcaacaaggaggttgtgtattcctatagaaaaggcagctccacgtatgaagccgtgaaaaaacactcagataaaaagtggttcttcaacacagacataaataacttcttctcttccatcacgaaaaactttgcccgagaggtgttagaagataatacaagcgcaatccccattattgatatccaagaatactacgacaagattctggactttattatcgtggacgatatcctgccgataggatttagtacttctcccgctttttccaatgcgtgcttgtacaagttcgataataacatccagtattactcgtctgagaataacctcatatatacacggtatagcgacgatatcattatatcctcggacaacaaagagattattcatagcatctacactaccgtgagtaattttctgagtaaagagaacaacggaaatttttctctgaacaagtacaagaccaagatagttaataagggcaacaaggttaaactgcttgggatggtcgtcctgccatccggtaaggtaaccgtagatataaagatcaagaagaagatcgagtacctcatctacttttatatcacagacaaggacaagtttaaggatgccatcggcaaagacattgataaaggtattgagatgatctcagggaacttgaatcacatcaataccattgataagagctatctgaacaaacttcgcaagaaatacggaaatgtgattatagacatgttcttccacaaaaatgtcttttga

SEQ ID NO: 12036 - RNA, 984 nt, synthetic construct
  source 1..984: mol_type = other RNA
atgaacaagaagaagttagaagtcctgtttgaagctatgtaccacggcaaatacagtttcaaggactttattgagagcgatattagcgcggagtatgcttctttcaaggctaaggaaagaacaatttaccggacaacgaagaaactcaagaccttccactcttttatatcgctattcatcctcgagtacttgaatatcaaccccagggtggtgtattcatataggaaagggttcaactcattagatgcagtgtcaaaacacgcccagtctaaatatttcttccagaccgacatagaacacttttttgagaatctgacaacccctttaatacgcaagaccatcctaaataattctgataactccccggttcttgacattgagaatcatattgacagaattgttgagctgaccaccctcaataacagcctcccactggggttttccagcagccccgtaatgagcaatgcatgtttgtacgacttcgataacgaacttgagaagctgtgcatccaaaatgaacttatctacactaggtattcagacgacatcatcatatcctcccagaatcaggaaaagatcgaacctatagagagtacaatcgagttcatcttgaacaagcatcacaatggccagctcaacctgaataaacagaaaagtaagcacacaagaaagggtaataaggtgaaattgctcggtcttgccattctgccaaacggcaaggttactattgacatcaagatccgtaatgagatcgaagtcctgctgttccactatgtgaacgatcgggataagtttctggaccatgagaagattaaacaagacatgaccaagggggtggatctgctctttggatatctgaactacgtatccactattgacaaaaactacctggagaaacttcgaaagaaatttggagccactgtcatcgatatgttcctgcatcggaccaaaaaaaaagaggatcgccatgccaacaacttttga

SEQ ID NO: 12037 - RNA, 972 nt, synthetic construct
  source 1..972: mol_type = other RNA
atgaaggataacagtttagagagcgtctttaacgcgtatttcaacaacaagaaaaacttttccgacttctataccttgcgcacagaagaagaggcttctcttatcccgctctcgaagagcaaggtggaattataccggtgttcagagaaactcaaggtgatccatacctttctaagcctcttcatcttcaacgaaatgcccctccggaaagatattgtcttctcatatagaaaggacgtgaatatcacagatgccgttaggccccactgcaatagtgagttcattttcaagaccgatatctccaaattctttaattccatctctgccgaatgtgtttaccacagccttagtaagtattgcgagaacatcaggacagtgaatagtggcgagattcgggagaatatcgagaggattgtctacctgtgcaccattaacaatcatctgcctgttgggttttcgtgttcaccaagcatttccaacttctgtttctatgactatgacaacataatcgatgcctactgcaatgagaacggatacatttactcccgctacgcagatgacctgattatatcaagccaggacgaaatgaataaggacaagattaccgatgatttaacggccatcctgtcttctgacgcttttctgagactttccatcaatcacaagaagaccaagctcatcactaaaaagtttgagcgacagattctgggcatctcaatactgaatgatggaaaaatgacggtgtctaaagcaactaaaacagacattgaggtaaaactgcaccttctgaagactaatagagaaaagctcgtggattacactgggatggaagaaaaaagctccatactgagcatagctggtgtattgagtcaaattaacaatatcgacagcgactatttgtttcatctgcgtaaaaagtacggcaacgcaatcatatctaaactgctaaagggtaaagagttgctgaaatga

SEQ ID NO: 12038 - RNA, 972 nt, synthetic construct
  source 1..972: mol_type = other RNA
atgaaagataattcacttgagaacgtgttcaactcctacttcaataataagaaagacttcgctgatttccatacccttaggacggaagacgaggcctcgcttattcccctgagcaaatctaaggtcgagttatatcagtgctctgccaggttgaaagttattcacacatttctgtcccgctttgtattttcagagatgccagtacggaaggatatagttttcagctatcagaaagatgtcaacatagccgacgctgtgcgtcctcattgcaacagcgaatttatctttcggactgacattagtaagttcttttcatccatttcggccgaagctgtgtcacacatgctttccaagtattgtgaaaatatcagaacagtcgatgccaaagaggtgcgggaaaacatcgaccgcatcgtgtacctgtgcaccatcgataattgtctgccggtcggctttagctgctcccccagcatttctaacttctgtttctatgattacgacaacatcatcgaggcatactgtaatgagaagggctacatatacagtagatattctgatgacctcatcatatccagtcaggatgaaatggacaaggacactatcacaggggacttaactaccattctctctagtgacgtctttctgaaactgagcatcaaccataagaaaaccaaggtgattaccaagaaatacgagcgaaaaattctcggaattagcatattgaacgacgggaagatgaccgtttctaaggtgacgaagacagacattgaggtgaagctgcacctgctgaaaactgatcgaaagaaactaatggactatacaaagatggatgaaatggcaagtattctgtccatcgcaggagtgttgagccaaatcaacaatatcgataaagactacctcttccacctcagaaagaagtatggtaatgcgatcatctcaaaactaattaggggcaaagagctgttgaagtga

SEQ ID NO: 12039 - RNA, 972 nt, synthetic construct
  source 1..972: mol_type = other RNA
atgaaaaacaagtccttggagaacgtctttaacgcttacttcaataacaagaaggatttcagcgactttcacaaaattaggaccgaagaggaagcgcatctgatccccctgaaacgcaattccgcagaattgtatcagtgcagcgataaactaaaggctatccataactttctcgcacgattcgtgttctcagaaatgcctgttaggaaggatatcgtgttttcataccggaaagaagtgaacattaccgacgctgtacgaccccactgtgaatctgactacatttacaagacagacatttccaagttctttccatctattagcgctgatgcggtgagcgagaagttaaaaaaatattgcgcccacatctcaacggtcgacgccgaagatgttagagagaatatcggccgtattgtgtacctttgtacgctcaataatcagttacctgtcggatttgccagttccccaagtataagcaacttctgcttctatgattatgacaacctgatcgagagttactgtagagagaagaactatatatactccagatatgcagatgacctcattatatcgagccaatccgagatccataaagagtctatcacagccgacttgtcagtgatcctgacatcagatgcactattacgcctgagcctgaaccacaagaagactaaagtgatcaccaaaaagtatgagcggaaaattctgggcgtgtctatcctcaataatgggaagatgacagtaagcaaaaccactaagaaggatattgaggttaagcttcacctgctccggactgacagagtgaagcttgtcgactacaccggtatggacgagatgagttctatcctgagtatcgccggcgtcctgtcccagataaacaatatcgataaggactacctgtatcatctgaggaggaaatacgggaatgccataatttctaagcttctccgcggaaaagaactgttgaaatga

SEQ ID NO: 12040 - RNA, 972 nt, synthetic construct
  source 1..972: mol_type = other RNA
atgaaggataatagcctagagagcgtgtttaatagctacttcaacaacaagaagaacttcgctgacttccatactcttcgtactgaggatgaagtgagactgatacctctcagtagggctaaaacagagctctatcagtgttctgcccgcttgaaactgatccacacattcctttcacggtttgtttttagtgaaatgccagtgaggaaagacattgtcttctcttataggaaggaagtcaatatcaccgatgcagttcggccacactgcaattctgagtttatcttcaagacagacatttcgaactttttcccctcgatttccggagacgtggttagcgataaactgtctaagtactgcgcaacgatccgaacggtagacgctgaagaggtgcgcgacaatatcaaaagaatcgtgtttctgtgtaccattggtaacaggctgccgataggatttagttctagccccagtatctctaatttttgcttctacgactatgacaacttaatcgattcctattgtcacaacaacaactacatctatagcagatacgcggatgatctgatcattagttcccagcacgagattagcaaagatactattaccacagacctgaagtccattctctcatcagaccctctgctcaagctgagcattaatcacaagaaaactaaggtcattaccaagaagtacgagcgaaaaatactgggcatatcaatcttgaacgatggcaagatgaccgtgtcaaaggccaccaaaactgacatcgaggtcaagttgcatctgttaaaaacagaccggaataagctggtaaactacaccggtgccgatgaaatgtcttccatcttatccatcgccggcgtgttgtcccagatcaacaatattgaccaagattatctcttccatctacgcaaaaaatacgggaatagcataatttccaagcttcttaaagggaaagatctcctgaagtga

SEQ ID NO: 12041 - RNA, 972 nt, synthetic construct
  source 1..972: mol_type = other RNA
atgaagaataactctctcgagagcgtattcaatagttacttcaaccacaagaagaactttgacgattttcataacatccgcacagaggaagaagtgcgcctgatccctttatctcggaccaaagcagacctctacaagtgctcagacaggctgaaattgattcacaccttcttgtctcgcttcattttcagcgaaatgccggtccgggaggatatcgttttcagttaccgaaaagaggtgaatatatctgaggctgtgaaacctcattgtaattcagagttcatctttaagaccgatattagcaactttttcccatccatctcttccgaggctgtgtctaacaaactttccaaatactatgactacctgagcacaatcgatattgaagatgtgaagaagaacattgaacggatagtttacttatgtacgttcgataataggcttccaatcggctttagctcatccccctccatttcaaacttttgctttttcgactatgacaacattatcgagtcctactgcaaggacaaaaagtatatatacacgaggtatgccgacgacctcataatcagttcccaacacgaaatactcaaaaaggagatcaccaatgatctgataggtatcctgagttccgaccccctgctgaagctgtctatcaaccataagaagacaaaagtcatcaccaaaaagtatgagcgtaaggtgctgggaatcagtattctaaatgatggcaagatgactgttagcaaggccactaaaaccgatattgaagtcaaactacacttgctgagaactgacagagggaaactgatgaattatacagggatggacgagatgtcgtcaattctgagcattgccggtgtattgagccagatcaacaatatcgatcaggattacctctttcacctcaggaaacgatatggcaatgcgattatttcgaagctccttagaggaaaggaactgcttaaatga

SEQ ID NO: 12042 - RNA, 1008 nt, synthetic construct
  source 1..1008: mol_type = other RNA
atggacgcagatattgttcttccaattggaggttgtaatgacagaaaaaaaacactggaggccctgttcaacagctactttaactttaaaaaggagttctccgaattcaatagtattcagacaatcaatgaggtggagaagatcgccttgctcaagaacaacaagatcatctacaagtgttcagaccggttaaagtccattcaaagctttctgaacaagttcatattcaacgaaatgccaattcgaaaggacatagtcttttcttatcggaaagacgtgaatattgccgatgctgtgcgccctcatagtcactctaacttcatctataagacagacatatcgaactttttcccttccataaaaccccagattatcaagaataggctgctcaaacacagggataaaatcgaatttatagagcgggaagaaatcgaaaagtattgcgatcgaattatcgatatctgcaccattgatgaccacttacccatcggctttccctcttctccgtcaatcagcaatttttgtttctacgagtacgacagtatcatttccgacttctgcattaaaaactcactgatctacactcgctacgcggacgatctgatcataagcagtactgatgaactggacaaagacaatttgtcccaaaccctggaacagattctccattcggatgatcagcttaggctgaaaattaactacaagaagacgaagctcattacaaaaaagtatgagcgtcaccttttgggcatctctattctggagaacggaaaactgaccataagcaagaaaatgaaaagggatatcgagatcagactacatttgctgaaaaccaaccgcgacaagctggtagactataccaattctaatgagatggactccatactctcaatcgcagggactcttagccagatcaataacattgacaaggatttcctttaccagctcagaaagaagtatggcaatgctatcatcagcaagttactaaaagggaaggatctgctctga

SEQ ID NO: 12043 - RNA, 954 nt, synthetic construct
  source 1..954: mol_type = other RNA
atgaaaataaaggatgcctttgacttctattacaatggcaagtttaacttcgatctgttttccgatttggtcttctctgatcatgtcaaagaagtgatcctgaataagaagctgtttttcagtgcttctgacgatctcaaagtgatacataacttcctttcgaagttcattttcgacagcttaggagtaagggacgatatcgtgttttcctatagaaagggagtgaacgtctttaactgcatagaaccacacaagttctccaacttcatatataagacggacatcgagtcattttttcctacaattaccaaacccgctattgaagaggcaatcaaaaagtccgtgtgcaacattagctacatcgatcacgaggacatcattaataatctagaccgtatcctggaacttacaaccgtgagtgagcgattgcccgttggttttagctcctccccctcaattagcaacttcattatgtacgatttcgactgtgacatatataagtacactaccgatcacggacttgtttacacacggtactctgacgacattctgatcagctctgataaagaaattgacaagaatgagatgaccagaattatctcggacatcctgtctaagaagaaaggcctcaatttcaagatcaataacaagaagacgaagattatcactaagaaatacgaacgcatcatctttgggatttcaatctctcctgttggcactctgtccgtgtccagtaaactgaagaaagagatcgaggtcaaaatctactatctcctgaacaacagggagaaacttagcatgttttcaaacatggacgaaaaaaatgcgatcctaagcttaagtggcagtctgagctatgtattggggatagatccaggctacgtgaccaagctccgggggaaatatggtaatgccattattaccaagctcttgtcaaataaagaggatctgtga

SEQ ID NO: 12044 - RNA, 954 nt, synthetic construct
  source 1..954: mol_type = other RNA
atgaagctggaagaagtttttaatttctacttcaacggcaaagagagttttgaacaattctatacactgagcctcaatgaccatatcaaggagttcaatttcaacaacaagaaatgctactccatcagcgacgagttgaaaactatccagcttttcctcagtaagtttatcttcgagaatatcgagtttagaaaggacttagtgtacagttataggaaaggtgtgaatgttgtcgattgtatcagccctcacaggttcaacaattatatatacaagacggacatcgagaattttttccccagtatcggctacgatctgattaagaacaaaatcatcgagaaagtcaaggatatctcatttctggatacaaatgacgtgatggttcacttgtctcgtatcttagaactcgtaactattgacaagaaactgccaattggtttttcatcatcccccgcgataagcaatttcgtaatgtacgatatcgactgtaaaatcgattgcttcgctaagaataacgacctaatttatacccgatatgcagatgacattattctttccggaaaaaacaatctggataagaacagcatcaaccaggaaatcaataacattcttaactacaaccaggacaacatctttcatctcaacgacaagaaaaccaagataattaccaagaagttcgaacggaacattctgggcatctcgatatctcctgtggggacactgtccatatctcggcagcttaagaaagagattgaggtgaagatctttttcctgattaacaacaaggataagttcgtcaagttttcagaaatggatgagatgagcgccattttttctctggccggaaaactgtcttatgctttgggcgtggatccagtgtacataaataagttgcgcagaaaatatgggaactccattattaacaagctcataaagaacaagggggacctatga

SEQ ID NO: 12045 - RNA, 948 nt, synthetic construct
  source 1..948: mol_type = other RNA
atgaacaaaaatcgattcgaggatgtgtttaaggcatatttcaacgggaaattgaactttagcgatatgcttaacctgaatatcgatgagaatatagagatcctctccctggggaatagagaggttatcaagtgttccgaagacctgaaaaagatacactcgttcttcaacttgtttattttcgactacctagagattcaggcagactcagtgtttagctatagaaaaggagtaaatgttgtcgatgccatccgcccccacgcgaagaacaagttcatctttaaaacggatatcaagaggttctttccaagtatttcacatagtctcatccataactgtattttcagccaaattgagaacattccattcctggatttccccacctacctggatcgtgtgtgcgatctggtcacctataacggtaaactccccgtgggttttagtacttcccctaacatatctaatgccatatttaatccgctggacattaaaatcaaggaatactgctcctataacaagcttacatataccaggtatgctgacgatctcatgattagctcaaacaattacctggacaaagaggactacatcaagatcatctctaacataatcaagctggacgacggccatcacttcaccatcaacattgagaagactaagctgatcaaaaagagcaagaatatggacgtgatgggagtcaaaatacaccctgatggcactttgacaattggaaagaagcttaagaatgaaatcgaaaccaagctatatctcttttcgaaaaatcaggatgactttgtgaaattctctaagcaggaaaaagagtcttccaaggctaaattaacagggcagttaaactacatcaataccattgaccctgactacattgttaagttgaagacgaaatacggcaatagcctggtagaactttttttccggaaagccatttga

SEQ ID NO: 12046 - RNA, 948 nt, synthetic construct
  source 1..948: mol_type = other RNA
atgaataaatcaaagctggacgagatatttaacgcttactttaatggcaaactcgacttttctgaaatgctgactctcaacatcaccaacaacattaataccatatcggtcggttctcggcaggttgttaagtgttcttctaatctgaaaaggatccattcatttctcaacctgttcattttcgatttgttagagatccagactgattgcgtattctcctataggaaaaacgtcaatgtcgttgacgccattcgacctcactccaacaataaatttatcctgaagaccgacataaagaatttcttccctagtatcacccgcatgagcatatacgagtgtatcaacagacagatcgaagcactaccgttcagtgatctgtgcgattatctggacaaaatatgtgacttggtgacctataatggacacctccccatgggcttctccaccagcccacagatctccaacgccgtgtttaatctaatcgacatcgagattaagtccttttgcatcaagaacaatttgacctatacgagatacgctgatgacattctgatatcaagcaacaattaccttgataaggaagaatacatcgataagctgacaaagattcttagtttcgacgatcatcagtgctttacgatcaacacagaaaaaactaagctcattaagaaggggaaaaataccgacatcatgggtgtaaaaattcaaccagacggaacactgacaattagcaagaaactgaagaatgaggtggagactaagttgtatctgttcagcaaaaatcaggatgactttgtgaaattctctaagcaagataagaaccaaagcaaggcgaaactcactggccagcttaactacattaacacaatcgatcccgactatattgtgaagcttaaatcaaagtacgggaacagtttagtggagctgttctttcgtaaagccatttga

SEQ ID NO: 12047 - RNA, 948 nt, synthetic construct
  source 1..948: mol_type = other RNA
atggataaatactacctggaacacacttttaatgcttactgcgacggcaaaatcgattttaatgacttcctgaacatcgaactcaaaacaaatattgaggagattaaggtggaaaagcgcgaagtggtcaagtgttctgagaaactcaagcgtatacacagtttcttcaaccagtttatctttgacaacttggagattcaggaggattgtgtattctcctaccggaaaaatgttaatgtactggactgcatcgcgcctcattccaagaacaagttcatcttcaagactgatatacactcattcttccattcgattagcaagaaaaccatccataactgcatttttacccagatagataatcaaccactcagtgacattgaaagctatcttgatcggatttgcaatttagtcacctataaagataggctgcctcaggggttttccaccagtcccgtgctaagcaatgctgtctttaacaactttgacatcaagatcaagaagcattgcaatagaaacaacatgatctacagcaggtatgccgatgatctgctgatctctagcaataattatctcgataaggaggagtgtattcacgacatcgacaacattttaaatagttgtttcgagcagaagttcaaaatcaacacactgaagactaaactgatcaagaaaggaaaaaacatggaagtgatgggcgtgcaaatacacccagacggctccttgtcaataggaaagcgactaaagaatgaaattgagacgaagctgtacctgttcctgaaaaatcagaacgactttgtgtcatactcttctttggataaaaaccacgccatagccagacttagcggtcagttgaactatattaacacaatcgaccccaagtatatcgacaagctcaagtataaatacgggaattcccttgttgacctttttttccgcaaagcaatttga

SEQ ID NO: 12048 - RNA, 951 nt, synthetic construct
  source 1..951: mol_type = other RNA
atgatttcagagaacaagttcgaaagcatttttaacctctatttcgatggcaagctgaatttcagcgatatgctttcattgaacaaagaaaaagagctgaagcatttaacaatcgagaatcgtgaggttataaagtgttccgaaaaactgaagaagattcaccattttctgaacctatttatcttcgataacctgagcattcagtccgacgtggtgttttcttatcgaaagaatgttaacgtggtcgacgcgataataccacacgctcaaaacaagttcatttttaaaacggacctcaacaacttctttaagtcaatcaaacgctctgaaatctacaataacctaataagtcagactgaccagattcctatcattgacatcgtggattacatcgacttaatatgcgacctcgtcacctatcacgacgaactgccccttggattcagtacatcgccgaacattagtaatgcaattttcaaccagtacgacatcaaaatcaaagaatattgcctgtcgaagaagatcgcctacaccaggtacgctgatgatattctgctgtccagcgataactacatcgacaaaaacgagtatatagagctcctcaataatatcctgaccatcgatggcaaacggatcttttctttgaatagcaagaagacaaagttgatcaaaaagtctaagaacatggagataatgggggtaaaaattctgcccgatggaaagattacggtgtccaaaaagatcaagaatcaagtggagactaaactctatctgttcattaagaaccagtcagactttatcaaatacaccaagagcaacaagattagttctattaacaagcttagcggtcagctgaattatatcaatactatcgatcctgagtacatcgagaaacttaaatccaaatacgggaattccttggtcgaactcttctttagaaaagccatttga

SEQ ID NO: 12049 - RNA, 969 nt, synthetic construct
  source 1..969: mol_type = other RNA
atggcaggtaacaagagcttcgaaaaaattttcgatgcttacttccaccaaaagatatcgtttgaggagttcaacgaaattgagatagaaaaggagattaagcgaatcaacatcggctctaaaattgtgtatggctgctcgtccaagctgaaaaagattcacagtttcctctctgtctttgtattcgacagggtgtcaatacgggaagacgtcgtttttagctacaggaaaaacaataacgtgcttaacgccatctatccacatgctaaaaggcgcgccatttacaagaccgacattgaatccttcttcccgagcatcagaatggagaacgtcaaagagcagctgaaggagcattgtaaggaatccatcttctttgatctcgaagagcatctggactctatcatcaacgtcattagcgtgaatgatcgtatacccatagggtttcctacatccccaattatatctaacttcgctttcatccggtttgataacgagatttcctcttactgcaaaaaacggcgatatatttacacgagatatgccgacgatatcctgatctcaagcgacgattttttagacaaggaagagctcaccaaggatatcaatgagattttcaagaagcttcacagcgactataagctgaatatccctaagaccaaaatcctaacaaaaggaagacccagaatcatttttggggtgagcatttttcccgatggtaaactctctgtgagtcgcaagctgaaaaatgagatcgaggtaaagttatacttgtacctgaaagacaagaaggaattcctgtcctacagtaaagccaatactatggaaggcgcgatcgttaatttgagtgggatcctaaattatgtgaacactgttgacaagacctacttgaataaacttaagtcaaagtacggagcatcagtggtcggactgttttttcgcaaaacaatcgagaacgaatataggaattga

SEQ ID NO: 12050 - RNA, 951 nt, synthetic construct
  source 1..951: mol_type = other RNA
atgtctgttcaaatcaaggacatcttcgatatctatttcaataactccatggagttcaatgaattgatacacctcaacaaagacgactatctcgagcttaaaacatacaagggtaaggaaatcatagcgtataaaaagggattcaacaagctgaaacttctccaccgatttctgaatgaggctgtctttaataggatagagataatgaacgacgtggtgtttagttataggaaaggggtaaatgtcttgaattgtgtaatgccacataggaattcgaatttcatattcaagacggacattaacaacttctttcctagttttagctccaaattcattgaggtgaaactgatcaacaagttcaacaacttcattatcagtgacattaaccagtacttacccgaaatcgttgacatcgtgacttataacaatactctgccaattggcctgagcacatccccttcattaagcaatatccttttcagcgacattgatttcaagatcaaacttttcagcaacgaaaacgagtattattacacaagatacgccgacgatatcattatttcgtcgaatcgcgacattaataaaaacaccatcttcgatgacttgcagcagattctgacctccgagaatgataacttcattctcaacaagtcaaagaccaagctgctccgtaaggggaatctacggaagattatgggcgtgtgcatcatgcccgatggccatatcaccgtcgataagaagctgaagaataacattgagacgaaactgtactacatgagcaaactaaacaacattcactccaaagattctgaaacaaccgagataaagagatacctgtcaggaatcatcaattacgtttccactatcgataacagctacatcaataaactgaaacgcaaatacggttctaccatagtggaaatgtttatccggaagtctttgattaagtga

SEQ ID NO: 12051 - RNA, 951 nt, synthetic construct
  source 1..951: mol_type = other RNA
atgtccatcaagattaaggagatcttcgacatctacttcaacaactcaatggactttaacgatttcttcaacctcaataagatggagtatctcgagaagaagatttttagaggccgcgaaattgtggcatataagaaggggtttaataaacttcggcttctgcaccgatttctgaatgaagctatttttaacagggtggatattatggatgatgtggtgttttcttatcggaaaaaagtgaacgtctttgattgtgtctaccctcatagggccaatccgttcattttcaagaccgacattaagaacttctttccaagcttcaatcgtgattttatcgagtctaaactggagtctgttttcaaagagttcataataagcgacatcaatgagtacttgttcaaaatcgtagaactggtgagttacaatgatttcctgcccgtcggctttagtacatctccctccttatctaatatcctgtttagcgacgccgacaaaaagctaaaatcattctcgatctccaatgggtacatctacactaggtacagcgacgacattatcatttcgtccgaaagtgaaattcacaagaaggacattttcacaacagtgcaaggaatcataaattccgaatgcgattcatttgttctgaacttcgacaaaactaagttgttgaaaaagggaggagttcgcaaaataatgggtgtaagcattatgccagacggctatatcagcgtggataaaaccatcaaaaataacatcgagacgaagctacactatatttctaagctcaacaacgtcaatagccaggaacctgagttaatcgagataaaacggtatctttccggcatgatcaactacattagtaccatagatgacggttacatcaacaagctgaagagaaagtatgggtccaccatcgtggaaatgtttctgagaaagtcactcgtcaaatga

SEQ ID NO: 12052 - RNA, 957 nt, synthetic construct
  source 1..957: mol_type = other RNA
atgaaagatcgtaaacctaacttgaagttcttctttgagtcatacttcaataagaaggtaagctttgacgcctttgaaaacatctctattgagaagaactaccatattcagtgcattaacaagagggaaatatatgtgccatccaatgaactgaaactgatcttatccttcttcagtgactttattttcaagctcctgccaatcgaaggggatgtggcctttgcgtatcgaaaaggaatcaacgttaaagactgtctcctgcctcacgtgaattcgaaattcttctataagaccgacatcatcaattttttcccttctatctcaagctacctcattagggagaacatttacgaggacattctgaaactgtcctacttgaagaaggatgatgtcgacttttatctggacaagattcttagcctcgtcaccatcgatgacaaactacccataggctttccaacaagtccctttatctcaaattatgtgatgcgcaagtacgatcttatgttgaagtacttctgcaatatgaacggatttgtgtataccagatacagtgatgacatcatcatttctagcaatatgaacatctccaaagatttcataaccagaaacatcgatggcatatttaggaaggagaaaagccccttctacttgaataaaagcaagactaagatcttcacgaagaagcacaaagttaaaatactcgggcttactatcaataatggcgagatctctatagaccgggaaattaagaacaacattgagattgggatctatttcttcattaacaatcgggagaagttcatcaattatttcggactgaatgaactttcagccaagaagaaactagctggtaacctctcctatgctatcaacacagaaccggactacctgctgaaattagtgaagaaatacggtagttccacaataaaagagattctgcgcgcatctgtctga

SEQ ID NO: 12053 - RNA, 957 nt, synthetic construct
  source 1..957: mol_type = other RNA
atgaaggatagaaaacacaatctgaaattcctgtttgagagctacttcaataagaagatctcctttgacatattcgagaacatttccatagaagagtcatatgacaaactgtgcaagaacaaaagagagatttacattcccaactacgagttgaagctggttctttctttcctcagccacttcatttttaagtctcttcccattgaagatgacgtcgccttcgcatataggcggggtattaatgttaaagactgtcttctcccgcacgcgaattccaaatttttttacaagaccgacatcctcaatttttttccttcaatcagtagctctctgattaaggaaaacatctatcaggacattcataagttgtcttacctggaccaagaggatttagctttgtatctcgacaaaatccttagcttagtgaccgtggatgacaaactgcctgtgggctttccaaccagtccatttatctcaaactacatcatgcgtaagtatgatgtgtcgattaagtctttctgcagcaacaacaaatttatctatacaaggtactccgacgacatcataatcagtagcaatactgatatagacaaggactacatcactaataacattgagaaggtcttccaacagggcgaaaatctgttccatctgaacaactcaaaaacgaaggtcttcaccaaaaagaataagatcaaaatgctcggactaatcatcaataataaccagattagcgtggatcggaaggtgaaagatgaaattgaggtagggatccattttttcataaaggatcgcctgaagttcattaactttttcaacgattccgaactcagtgctaaacgaaaattggccggaaatatttcctatgccatcaatatagaacccgattacctgcagaaactggcaaagaaatacgggctgctcacaatcaaggagatcctaaaggtaaacttatga

SEQ ID NO: 12054 - RNA, 957 nt, synthetic construct
  source 1..957: mol_type = other RNA
atgaaagaccggaaaccgaatctgaaatttctgtttgagagctactttaacaagaaagtgtccttcgatatcttcgaaaatatcagcattgagaagtcgtactataaaatatgcaaggaccagaaggacatttatattcctaatgacgaactcaagttgatcttgtcttttctgagtcactttatctttaagagcctgcccatagagaatgatgtggcctttgcttatagaaaaggcatcaatgtaaaggactgtctactcccccatgttaatagcaactttttctacaagacggatattatcaacttctttcctagcatctctacctcattaatcaaagagaatttgcaccaggacattagtaaactgagttacctggatcaagaaaacctcatgttctatcttgataagattctctcactagtgaccatcgacgacaaactgcctattggttttccaactagcccattcatctccaattatatcatgaggaagtacgacataaacattaagtccttttgcaacaacaacaacttcatatataccagatactccgatgatatcataatttcctctaatgacgacattgataaggactatataacctccaacatcaaaagtatcctgcagcaggaatatagccccttctacttgaacaattcgaagactaagattttcacgaagaagaacaagatcaagattctcggactgacaattaacaatcaagaaatctctgtggatcgtaaaattaaagacgaaattgaggtcggcatctacttcttcacaaaggataggttaaagttcatcgattacttctctgacaacgagctttcagccaaacgaaaacttgctggaaatatatcttacgcaattaacatcgagccagattacctgcagaagctggcgcgcaaatatgggctgtcaacaatcaaggagatccttaaagtcaatctctga

SEQ ID NO: 12055 - RNA, 996 nt, synthetic construct
  source 1..996: mol_type = other RNA
atggccaacctgaacccccccatctatcgaaataatactcacagttcttctcgaaagttcagtgagctttttgattcctatttctacggaaagtactccttcgacgacttccttagcattgatatatcgaaagagacgaaaaagatccaacttaaggacaacaagataatctatagctgctccggaaagctgaagaatattcacaggttcattaacatcttcatcatcaacaagttgtgtatcaaagaggatattgtgttttcatacagagccgggaaaaacgttgtagacaccattctccctcattctgaaaacaagttttttctgcagaccgatatttacaactttttccctagcattagcatcaatctcatcaaagagactatcctgcggggtatctccaatttagaaatcacagacattgacgattacgtggattacattctgaagctgataaccatagataattcattgcccattggtttctcttcatccccgccaatgagtaattcttgtctgtacgatatcgacaacaagatatcaatttactgcgaacagaagcgtatgaaatatacccggtatgcggacgacctcatcatttcatctatgaacttgttcgacgttaaccatgtcaaaaattcgatcgctaaaatactgaatgagcagaaaaatgcatcctttatcttgaacgaacgcaaaacaaagttttttagcaaaagccagaagatcaaaatgctgggggtcgtaatcctgccaaccggcagagtgacagtcgatattaagatgaaaaagaaggtggaaagcatgatttatttctatctcaacgacaaagacaagctcctggatctaagtggcttaaattacgaggatactctcaagaacattagcggactactgaatcacatcaatacgatagataagaagtacctggacaaacttaggatgaagtatggcaacacagtggtggacatgtttttccataaatccgttaaatga

SEQ ID NO: 12056 - RNA, 936 nt, synthetic construct
  source 1..936: mol_type = other RNA
atgaagaaaaaggagctgaagttaatattcaacctcatgtaccacggaaaatacgacttcaatgacttgataaactgtaacatcgagaaagagtacatcaagattaagatcaagaagagggtcatctataaagcctcgaataagctaaaaaactaccactctttcctgaacttgataattttcaactaccttgatgtggacaaagacgtcgttttttcctatcgcagaggcgtgaatacagttgacgctgtgcgtccccatgttaattcctgctttttctaccagacggatatcaaaaatttctttcccagcctgaaaaaggatctcattaagaagacaatcatcaactgtaaggattcaatccctgtcatcgacattgaaaaatacatcgatcgaattgttgaccttgtgaccattgacggtgtgttatctaccggctattccacctccccaataattagcaatgcatgcctattcaactttgacaacgaaataaagaggaagctggcgaacaataacgtgatctattctagatatagcgacgatatcatcattagcagtaacgagaacattatcgtggacgatatgaataaaatcatccttctcgccctgaagaataatgtctctcctgacatcgagattaacaagaataagacaaaactgtccaagaaagggtgcaagatcaaaattctgggcatggtaataacttccgatagcgtcattactgtggacaataaatataaacgggaagtggaatacttgctctacctctacatccgcgataaaaaccggtttaagagcatcggaaaaagtataagtcaggtgtcaggtgtactgaattatattcaaaccattgatccagagtacattaagaagctgaaaaagaagtatgggtcaactattgtggatgtatttctgcatcagtcaatgaagtga

SEQ ID NO: 12057 - RNA, 984 nt, synthetic construct
  source 1..984: mol_type = other RNA
atgcacaaaaaagagctcgaaaacattttcaactcctatttccacaaccaatataacttccaggactttctgaacataatcccgaaacagaacattcactacaagttcaataagtacaagaactacaagttcatctcctacattaaagagaataacagcttcagtaaggacagcatgaaaatgagagaataccacactttcattaagaacatcttctgcaactacatgaaagttcacgctgccgtattttcctatcgaaagcatatcaacatctacgacctcgcgaaaatacacaatgaacaccagaacttctttactacagacattaagtccttcttctactctatttcaacccaaatgattcacgaggtcttgattcagaataaggtcaattttccctttgagctggatgtgaagtactacaaaaacatcgtaaacatcacgaccgtgaataattctttgcccgttggctacgtgaccagtccatcgatttcaaacgccatcttatataagtttgacgagctgatggataattatagccaggagcatagtattagctattcacgctattctgatgacctgatattcagcagtgatgactataatgctattaagtccttgcctgcagtgatcgagtcaacactgaattctctgtactcctctgcctttaaacttaatatcagcaagacacggttttttgataaaaccgaaaaggtcagctttctaggaatcagcatcctccctaatggacatataacggtggagaaatggacaaaggaaaacatatcgcaactgatctatttctacctgaacgataagaacaagtttaccgtgttacttcagaagcggtttaagaataatctttcccgtgcatatgggactctcaattatatcaacgacattgacaagcagtttatcctaaaactgaggaagaaatacggtaacttcatagtggataaattcctccatggcgttaaacattga

SEQ ID NO: 12058 - RNA, 954 nt, synthetic construct
  source 1..954: mol_type = other RNA
atgttccaggagaaacatagcttggaaatgctgttcaacgcaatgtaccacgggaagtatagctatcaggactttatctcctccaatattgagaactacatccaacacattaacaataagatcgtcaagaccaacaaaacttttcaggtctatcatagtttcctgaacctgttccttttcgactatcttccaattaatgagaacgttgtgttttcttacagaaaaggcgtgaacatttatgatttactcattgttcaccggaactcaaagttcttctttcagacagacttgaagtacttttttccgagcatcacatccgaggatatcaagaagctcattgaaaagaacatcgatatgtttcccgtcgtgaagaaggatatagagactcatatagacagaatcatcagtctgactacaatcaacaattatctggccgtgggatactcgacctctcccaatctgtcaaattccattctattcgacttcgacaattctctgagcgatttttgccagaagctgaatattaagtacactcgatattcagacgacctgatcttttcttccctcgacaaggaaaatctgcaaaaggtagaaatagagattcgcaggcttctcaaaatattatttggcgggcggatccagctcaacaccaaaaaatccaaatacaaccaccagggcaacaaagtgaagatactaggagccattatccttcctaatgggcagatcagtgtggataagaaaatcaagaccaagattgaaaccgctatctacttatatctcaatgatcgcaacaaattcgatgacttcttggagaagaattataggaaaggtgtaaaccagatttcaggaaccctgaattacattaaaacgatcgattacgactacctgaaaaagctgaagaaaaaatacggcagcacagttatcaacatgttcttgaatcaaagcataggttga

SEQ ID NO: 12059 - RNA, 975 nt, synthetic construct
  source 1..975: mol_type = other RNA
atgatccagcgaactttcaagcaggcattcaatgccgtgtttcacgaaaaggagaattttgaggaatttctggcgcttgatattgagaatgaggtggagaagatttccgtcgaaaacaagattaaaaagcagcaccgcttgttttttcgccaaagcgagaaattgaaaaaatacctgcgattcgttgaccgtgtgatcctgaggaatctggccaaagacaacgacgtcgttcatagtttcaccaaggataagtcaacccttaccgccgtgagcgctcactctaacaatgattacttcttccagaccgacatttcctccttctattcttccataactaaagacgacgtccttcggatattaaagagggacataaatctcatccctatcatcgacttgtcagattatatcgattttctcgtgagcataatgacttacgatggagttctgcccgtaggattttcaacgtctccccagatctcaaacgcttttctgtttgagttcgatggtgaactgaacgaaatttgccgcagacggaacatcatttatacaaggtacgcagacgacatcatcttgagtggcatggatttagaacatctcaaggacatgtcgagtgtgattgacagcttgatcctcaaactcttcagcgggcagataacacttaacaagggtaagactaagctgacctggaaggggaacaaagtaaaaattctaggccttacgatcctaccaaatggcgtcgtgactattgacaaaaagtacaaaaacaccatcgagacactgttacacctgtatacaaccgatatcgaccggtttgaaaaacacctctctgtgacagacggattcaacaagagatctctgttcggcctgctccattatgccaatagtattgatccgcaatacatttccaagctgcaaagaaagtatgggagcctggctgtctacaaactgatggaggattcccagaatgatgattga

SEQ ID NO: 12060 - RNA, 975 nt, synthetic construct
  source 1..975: mol_type = other RNA
atgaccaaacgaacatttaggcaggcttttaatgcagtcttccatgacaaggaggctttcgaggatttcctgagcatcgatatagggaacgagatagaaagagtggtgatacttaacaaactgaagaagcaacaacgcgtaatcttcaaacagagtgatagacttcgcaagtacttaagattcgtggatcgggtgattctgcggtccttggcccgcaatgatgatgttgttcactcttttacgaaagacaaaagtaccctgaccgccgtgattgcccacgcaaaaaatgacttcttctttcagacggatatttcctccttctattcatccatcactcgaaatgatgtcctcatgcttttgaaaagggatgttgatctggtcccaatctctgatctgtcagactatttggagtttctcgcgtccgtgatgacatacgataacaccctgccgattggtttttcaacatcgcctcagatcagcaacgcctttttatttgagttcgacaggcagctcaacgacatctgccgtgagagagaaattatctatactcggtacgctgacgacattattctgagtagcatgactctcaacgtgttggaagacatgtctcatgtcatcgattctctactgagcgaactatttctgggcaacatcagtctgaacagagacaagacaaaattgattcgcaagggaaataagatcaaaatactcggtctgaccattctgcccaatggggtggtgaccatcgaccgtaagcacaagaacactatagaaaccctgctctacctttacacaactgacatcgagaggtttcatgagcacctgtctattatggacggcttcaatcagaggtcacttttcggcctactccactatgcaaatagcgtagacccccactacatctccaagttacaacggaagtatggagccctggctgtccataagctcatggaagacagccagaacgacgattga

SEQ ID NO: 12061 - RNA, 957 nt, synthetic construct
  source 1..957: mol_type = other RNA
atgaaaaaacgcacacttgagcaggctttcaatgcagttttccacgagaaagagcagtttcaggatttcctgaaaatcgacctagaactggaagtcgagttgatcaatgtcaaggaccgggtggtcgttagacagagcgataaacttaaaaagtatctgcgatttgtggacagaactattttacgatcattagccaaggatgacgaagtcgtacactctttcattaaagagaagagtactctcactgccgtacaggcccatgtggaatcgaagtactactttctggctgacattaaggaattctatcagtctatcaagagaaaggacgtggtgaacattctagagcggaatcaggccgagatacctatagaggatatcgtcgaatacatcgactacctgtcatacgtgaccacctacaaagatacactgccaatcggtctgtccaccagcccgcaactgagtaacgcgtttctgttcgactttgaccgtgaggtgaaagcgtactgcattgaaaactcactgatatatacgcggtatgcagatgacatcattataagcggcgataacatggatgtgattgcaatgttgtccgataggatccaaggtatgttacaactttatggctctagctgtttcaccctgaaggaaagcaaaacacgcatcacatggaaaggaaacaaggttaagatcctggggcttgttatcctccccaatgggcgcatcaccatcgataagaagtacaagaagattattgaggctctcctctacttctattcttccgataagtctgagtaccagtcactgcttagtaaagtgatgcatggggatgaaaagtccctgtttggactcttgcactatgccaattccgtggaccccttgtatattaacaaattgcagaggaagtacggcgccctcagtctccatgctctgatggagagcgacagggacgacaattga

SEQ ID NO: 12062 - RNA, 987 nt, synthetic construct
  source 1..987: mol_type = other RNA
atgacccacgaagccgattctaaccaaaccaaaaaaaaaaccctggaacaggctttcaacaccatcttccatgataaggaggatttttccgaattctgtagcttagacgttataagtgaagtagaaccattcaccatttctgacagggaagtgttcaaaacatcagatcggctgaagaggtacctgagatttattgaccgcattatattgcggcacttgtccattgatactgacgtcgttcattctttctcccaagagaaaaacacatacacagcagtcaaagagcatgtcggcaatgactattttttcttgacggacattgagtcttttttcagcaaaatcaagacagaggacgtgaagaagatcctctaccgaaatatcaacaatattcccatctctgacattgagaactacatcgattttctgtcatcagtggtaagctttaataatcagctccctgttggcttctcaacgtccccacggcttagcaactccttcctgtatgattttgacatcgccctaaaaacttattgcagtcgcgaatccctcacttacacccgctatgcggatgatgtgattatcagcggagcttcattcgagaagctagagcggctgaaaacaaccatccaggacttcctgaagattcacgcaagcaatgagctccgattaaacaagagtaagactagaatcactcatcttgggaataaagtgaagatcttaggcctgatgatccttcccaaccgtacaattaccatagatgccaagtacaaaagcaggctcgagcttttgctgcacttttacagtaacaacaaagagaagtatcagtcgtatctggaagagaattttaatggttctgagaagtccgtgtttggaatgctgcactacgtgcagagcatagaccctgattacctggacaagctccagagaaagtatgggatctacgccgtcaggtttttcatggaaaagaagagtaacgacaatagatga

SEQ ID NO: 12063 - RNA, 960 nt, synthetic construct
  source 1..960: mol_type = other RNA
atgacaaaaagaacatttgaacaggcctttaatgcgatctttcacgactccaaggccttcgtggacttctgcggactggacgtcgccagcgaagtagaaacattcaccgtctctggccgcgagattttcaagacatcggacaaattcaagaagtacctccgctttattgatcgggtgatactgagacatctggcaaaagataagaacgtcgtgcattcctttaccaaagataaaaacacgttcactgcagtcagggctcatacggatagcaattatttctttctcacggacattcggaatttctactctaacatcaagatcaccgacgtgctccgaatcctggagagggataaagaacgaatccccatatccgatatcgactcctacatcaatctgctcgctagcctcatgactttcaacggctcagtgccggtcggatttagcacttcacctcagctgtctaatggttttttgttcgagttcgattgcgccgtgcgggagttctgtgagagcaatgttctgacatatacacggtacgcagacgacatcataatttcaggcaagtcttttgaggaacttagtgatttaaaggagatcatccagaccttcctgaacaagtatgctagtagtactctgctgcttaacgaggaaaaaacccgcattacccacctaggaaataaggttaaaatactgggtttgtccattctgccaaacaggaaggttaccattgatactaagtataagaagaagctcgaactcctgttgcacttctatgtaactgacgagagtaaatacaagagctttctagaagaggagttcaaagggagcgagaaatcactttttgggatgttacactacgtgcagtccattgatcccgactatttagagaagttgcaaaggaaatacggggtgtttgcccttcgtaccctgatggaagaaagatggaacgagtctagatga

SEQ ID NO: 12064 - RNA, 981 nt, synthetic construct
  source 1..981: mol_type = other RNA
atgaccggcaagagacgttggcaagtagggaagaggaattttgaacaggccttcaatgctgtgtttcatgacaaacaggccttcaacgatttttgcagtctggatgttcgctcggaaatcgaaacctttgttattaactctcgcaccatctacagaacgtcgaaaaagtttaagaaatacctccggttcattgataaggtcattttgagacacctagacaagaatgaacaagtggttcatagctatctcaaagaaaaatcagtcctgaccgccgtgaaagcgcactccagctcaaaatgcttctttctgacggacattaaagatttcttcacaagcgtgaagactcagaacgtgttgcaccttttaacacgcgataagcttcgaattcccatcacagacttcgagcggtatatcgagactattgtgaatctgaccactttcgctggtagtattcctgtcggattcccgaccagcccaagcctgagtaactcatttctgctcgagtttgatgcagtgctcgagaagtattgttgtgaacacggattcatatacacaaggtatagcgacgacatcataatctccggcaaatcttttgagggttttgacaacctggaaaacgatgttcagagcatgctgtataagtctgcatccgaggacttctttctcaatactaagaagacaaggttaacacagatcggaaataaagtcaagatccttggcctagtgataaccctggggggctccgtgactatagactccaagtataagaaaactcttgagtccctgctgcacttctacatcaacgacaaggagaaatataaagatttgctcgagcgaaccctccacggaaaagaacattcactgttcgggttagtccattacgtaaagtctatcgatcaggcttacctggagaagcttcagcggaagtacggcgcatacgccttgagtgccctgatggaggacaggtggtctgataaatga

SEQ ID NO: 12065 - RNA, 972 nt, synthetic construct
  source 1..972: mol_type = other RNA
atgcgctggcaggtatcaaaacggacatttgagcaggccttcaatgccgtgtttcatgataaagtcgcctttgaagatttctgtacaataaacgtgcaggaggaagtggaagagtttttctatgacgatcgaaaaatcttcaggacatctaagaagctcaagaagtatctcaggtttattgaccgggtgatcttgaggcacctcgctaacgacgacgaggttgtgcattccttcattaagggcaagtcaactttgacagcagtcaaggctcacacaagctcgaagtacttttttatcactgacatcaaggacttcttctccaatgtaaaaaccattgatgttctcagaatccttgagagggataagtacctggtccccatagatgatttcgagaactacattgacactattgttagcatgactactctggggggttccatcccaataggcttcccgacaagcccacaactgtctaacgcttttctgtttgagtttgatcgcaagaccaagtttttctgcgcggacaatagcctgatttatacccgttatgcagatgacattattatcagcggccaagaattcaatgatgtagccggtctaaagagtcagattcagttactgctgagtgaacacgtgagtcctaacctgtccctcaatcaggacaagacccatataacccagatcggaaacaaagtcaaactgctcggactggtgatcatgcctaatggccgagtgacgatcgacgttaaatacaaaaatcggttggagacgttactgcacttctacgtgaacgataaggacaagttcaacgacctgcttaaaaagaccatgaaggggaacgtcaaatctctcttcggacttttgcactatgcaaaatctatcgatcccgaatacctagagaaattacaacgcaaatacggggtgtataccatcagactgctgatggaagacaaactttcagacaatagatga

SEQ ID NO: 12066 - RNA, 954 nt, synthetic construct
  source 1..954: mol_type = other RNA
atgtcgaagaggacactcgagcaagcgttcaatgctgtgttccatgagaaagaaagttttaacgacttctgtgcaatgaatcatagccaggaagtactgagctttagcgccaacagtagagatttatttcatccttctcccaaactcaagaagtacctgcgtttcatcgataaggtgatcctgagatacctggaaagggacgatgtcgttgtacactcatacattaaagggaagtccgctctgaccgcagttgaagcacacgccgggtcatctcacttctttatgactgacatcaaggccttcttctccaacataactgacgtcgatgtgagggagatcctgacacgcaacgaaggaaatgtgcctattagtgacattaaagagcacatctccctactcgtcgagatgatgacctggcagggatccctaccggtgggctttccaacatccccccagctgtcaaatgcttttttactgcgttttgatcagaagctccaccgatactgcgagggccggggttatacctatacgcgctactcagacgatattgtcatttctgccaaatcgtttgacggatttgagcacctcagcgaaaccatacaactgctgctcaataccgctgtgtcccccttgcttagactttctgacgataaaacacggtatacccataccggcaacaaggtgaagatcctggggttagttgttactcaggggggcaaggtgacgatagacagcaagtacaagagacagcttgagacattgcttcatttctatgtgactgaccgggaacgattcggtcgcgtggtcgatgagactttggccggtaaagagcactctctgttcggcttgctgcactatgcgaggagcatcgacccaagttacctcgaaaagcttcagcggaaatatggagcctacgcactgcgcagcttgatggaggataaatggcatggctga

SEQ ID NO: 12067 - RNA, 1017 nt, synthetic construct
  source 1..1017: mol_type = other RNA
atgtggttcgtgatcttaacaagacaggactacttctatttctccggaaacctcaaagtcgataatcggacattgcagcaggccttcaatgccgtttttcacaataaggaatctttcagtgagttttgctcactggaacagaggaaacatatcgtcgagtttctatataggggaagaaaggtatacaaaacttccgcccagtataagcactaccttaggtttctcgaaaaggtggtgctgaggcacctcgccaccaatgccaatgtcgttcacagctacatcaaaggcaagagtgctttaacagccgtgaccacccactctgaaaacagcgcattcttcctgacggacatcaagtccttcttccccaatattacagagcttaacgtaaagcacgtcttgaatcgagataaaaatctggtgcccatttcggactttgaacacttcataccttatttggccaaaatcatgacctgggatgacagcattccagcgggctttcccacaagcccgcaactatctaacggctttctttttgactttgacaatgctctttacgatttctgcaaaactaatgaactgacctacactcgctattccgatgacataatcatatcaggaaagtacaaggacaagctgctgtgtctgaaggatactgttcaagatctgctgcataactacgctagcaagaacttcttcattaacaacgagaaaacacgaatcacccatgcagggaacaaggtgaagattctggggctgatcattactcctaagggtcgggtgacgattgatagtaagtacaaacggaccatcgagtccctgctccatttctacaccaatgatcggtcacgctataacgacctgctccagaacgagtttgatgggaaagagcattcactctttggtttgttgcactatgcaaaggcgactgacccagcatatctcgagaaacttcagcgtaaatacggcttactcgctctgcgccaactaatggaggacagatggaacggctctagatga

SEQ ID NO: 12068 - RNA, 1008 nt, synthetic construct
  source 1..1008: mol_type = other RNA
atgtccattaattccttgaagtcagaaggcgacgaggttagtgttaccgaccggtcgctggagcaggccttcaatgctgtctttcatgatcgcgagagctttaatgatttctgcactttgccgctcgctccagaggtttcagaaattcctctgcatttaaggaaagtgtataggccatccgacaagctgaagacttacctgcggtttatcgacaaggtggtgcttagacatttgaagtataacgcttccgtggtccactcatacataaaaggcagcagtgccttgacagcagttcaggcacacgcgaagaatcaggccttcttcctgtctgacattaaatcctttttccccaatatcggcgatcaggacgtaaggaaagtgttaatgcgtgattctcacagaattcccatccttgatttcgatcagcacatagaacgcgtaacaaagctgatgaccctggacggggtcctgcctgtcggatttcccactagtcctaaacttagcaatgggttcctgcatgagttcgacaacgccctagcagcctactgcgacagcaccggtctgacgtacacgaggtatagcgacgatatcatcatctctggaatggatcgagcgaagctgaccgtgctgcgagagaaagtgcagatgatgctcgaagaacacgcctccaagagtctgaggctcaacgatgaaaagactcgtgtgacccacagagggaacaaagtgaagattttggggttagtcataaccccagatggccaagtcaccatcgacgtgtctcgcaaacacgctctggagggcctcctacatttctacgccacagacactgagaaatacaagaacctcctagagaagacatttaaaggagaagacaaggaaagatctctttttggaatgctgcactatgcaaactcatgtgatagcgagtatctggtgaaactccaaaaaaagtacggtgtactcattctccggacacttatggaggatcggtggagcggtaaccgctga

SEQ ID NO: 12069 - RNA, 963 nt, synthetic construct
  source 1..963: mol_type = other RNA
atgcacctgaaatccttggagaaggcctttaacaccatgttccataacccgcagcttttcgaagagttcctgtgctccgatttgtccaacgaggttgaagagttttacatagggaaggaaaaaccacgcaaggttatccgagtgagtgacaagtttaagacgttcctgaggttcatagataaagtcatcctgcagcatctcaagatcaatgagggagtcgtgcactcatacatcaaagagaaatctgctatgtccgccgtgcagagccatgtaaacggcaaatattttcttgtgagtgacatcgtgtctttcttcagtaacgtgagctctgaagacgtgaaaaagatattagtggccaacgtgtctaatatacccatcgaggatatcgaagactatattccacgcatcgtcacactggtttgttggaatgattgccttcccgtaggcttcgtgacctcacccaaattgtcaaacgcggccctctttcagtttgattccgcaatggccgattattgtaagaaacagagtctgacctatacccggtattcggacgatctgattgtctctagccaggcaagagaacctctaattgaattacagacccagctccagtcactaatttcccagaatacgaatggtcaactggaagtcaatctggacaagacaaagatctacacaatcgggcagccttttacaatcctggggttggtgattactcagtaccaaactcttactattagcagaaagcataagaaccacctcgaggtagctctccactatttcgtcactgacaaactgaggttcaaggattatctggaggagcactttgctggcaaggagcaaagcttatttggattgctccactacgcaaaaagcgttgaacctcgttacattaataaactccaacggaagtacggtgcctacgctattaccgacctgctggagaataagtggaacgactga

SEQ ID NO: 12070 - RNA, 966 nt, synthetic construct
  source 1..966: mol_type = other RNA
atgactcagaccagcctgcagaatgcgtttgtgtcctattttcacacaaggtatcagtttgatgactttctgtctatactgactaacgaacattacacagagatcttttactcaaagaacaccttctctccctccaagaaactcaaggatttccagaagttccttaacttgtttctattcgagcttctgccgctgaatcaagatgtcgtttttagctaccgcaaaggcgtgaatgctcaggacgctatctcccctcacaagaactcaaaatacgtactaaatacggacattaagtcgtttttcgcaaacattaacacgagcaaacttaagaagttaatcttggacaacaagaacaatttcctcattttgccctccgatatcgagaaacacatcgacactataatgaacatcgttacctataactcgattctccctgtgggcgctcctacatctccagccatctctaatggttatctctttgacctcgattccgccctgcagtcctactgcttacggaatgagatcatctacacacggtatagtgacgacttcatttttagttctgaaactaaggagagcttgaccaaggtcctgcccattatcaacgatatgttcatacacttaggattcgagacttttaccctgaatgaatcaaaaacccgaattcagcaaagaggttctaagatcgccctcctgggcctgattataacaccacaaggatatgttaccgtagacaaaaatctgaagaaagaagtggagattcttcttcatttctacttgaccgacaaagaaaaattccgtgattacttcctgaagaaattcagcagtaatattgacaaggtgagtgggctcctgagccatatcaatgccgtggatagctactatatcgcaaagctgaaaaagaggtacgggtcatttatagtcaactccttcactcatagagatatccacaacgtgacattctga

SEQ ID NO: 12071 - RNA, 960 nt, synthetic construct
  source 1..960: mol_type = other RNA
atgaataaaacaagtctcgaaactgcctttaattcctatttccacaataagcattccttccaggattttctgaacataaacatcaacaacgagtacacacagatattctattccaaaaacaccttctccccaagtaagaagctgaagcagttccagcagtttcttaacctgtttatctttgatcatctgaacatcaacaaggatgtggtgttttcttataggaaaggggtgtctacgatcgatgcaataaagccccacaagaataagaaattcatctacactacggacattcaatcgttcttcacacacattgagactgaaaaaatcaagcacattatcctcgagaataagaacaactatatcattatcgaggaggacatagagaagtacatcgacaatattctcagcttagttacctacaagaatgtgttgcctattggagctcctacttctccaaaaatctctaatgcctatttgcttcggcttgacaatctggtccaggagtactgcgaaaaaaacgagatcattttcactaggtacagtgatgatttcatttttagctccgatagcaaagaaaagctgatcaatctggacgataccctcgaagactttctgaagcagagtgaatatctcaatctaaccatcaatcgcaagaaaaccaaactgcaacgtcagggctcaaacattacactgttaggactaacaataaccccccaagggcatatcaccgttaacaagaagattaaaaacgatctggagattcttctccacttttacctgacagacaagtcaaagtttaatgacgtattcgagtctaactatagcagcaaaatagaaaaggtgtcgggcatcattagccatatcaactcaattgacaaaacctacatctccaaattgcgaaaaaagtacggttcatacatcgtcaatagcttcatacacagagacatttcttatgaatga

SEQ ID NO: 12072 - RNA, 960 nt, synthetic construct
  source 1..960: mol_type = other RNA
atgatcaacaagaaaccctttcaggagatttttaatctgtactttcacggaaagtacagtttcgaagatttcattaacaccgatatcaaacgttgtgtgactccacatcagttcaatcaaaagacaatgttatccgtcaacaaaaaactggcagagtttcacaagtttatcaacgtgttcatcatcaacaaactggcttacaattcattcgtctgcttttcctatattgagaacacaactatcagaaattgcctcgaaccccacaaaaacaacaagtatttcctatccactgatatttctaacttcttcggtagtatccagagcgtggatgtgatgaacactatacaaagcaacattaacgaaggctcactgaatataagcgatatcgagaaatacaaggacagcattatcaaactgataacattcaacgactctctgcctattggattttcaaccagtgggcgcctttcgaattctatcttgtttaagttcgatcaggtggtgcttgactcctgtaatgcacaaaatattacttacagccggtacgccgacgacctgattttctcgagcaacgataagaacataaaacagacacagcttatggttgaaaatgcgttggccgcattattcaacaagaggctgaagatcaatatcgacaaaacgaagatttacagcaaacgggctaagattaagattctgggtatgacgatcaccccgaatgggtctatcaccatcgacaaaaagatcaaaagtgacatagaactcgccatgcatttctatgccaagaatacagagaagttctgctcaatcattgagaataagtttgacggcaatatacagaaagcctttggcaccgttgcttacatcaactccgtcgataaggcctatttgaataagctccgaaagaaatatgggaattataccgtagagtcttttctcaggaaatccgctaagcagtga

SEQ ID NO: 12073 - RNA, 954 nt, synthetic construct
  source 1..954: mol_type = other RNA
atgcagaaaaagagcttccaggaaaccttcaatttatactttcacgggaaatatagcttcgaagattttatcaacacgcccattaaagacaatatcacccagcatcagttcgatcagcgtacagtgctgtctgccaataaaaaattgaccgagttccataagttcatcaacgtcttcattgtgaacaagctcacatacgacgattctatttgcttttcctacgcaaaaaacactaccatcaggcattgcattgagccccacaaaaacaataagcactttctgtcaaccgacatttcaaacttctttgcatctatccagtccgttgatgttatcaatacgatacagcacaatattgatgaggggaatattggcatcgccgacatcgatcagtacaaggacagcatcataaagttgattacattcgagggagctctgccaattggtttctcaactagtggaagactttctaacgcaattctgttcgagtttgataaggtgatcctaacagagtgtcaaagtaagaacattacctactcccggtatgccgacgatctgatcttcagtagcaacaacaaaaatatcgtgcaggtcaaaccgattgtagaaactgctctctcaaacatatttgatgaacgactcaagatcaatgacaagaaaaccaaaacgtattcgaagaaaagcaagatcaagatcttaggcctgatcataactcctaatggtgacatcactatcgacaagaagattaagagtgacatacaaatagccatgcacttttatgcgaatgataccaacaaatttgactcctttcttcgcaagagatttgacggcaacatccaaaaaatcttcggaattgtgggctacattaatagcgtcaacaaggactttctgaataagctccggaagaagtacgggaactatatagtggattccttcctgaggaaatctgctaaatga

SEQ ID NO: 12074 - RNA, 963 nt, synthetic construct
  source 1..963: mol_type = other RNA
atgacgaaaactaagatacggcctttccaagagatctttaacctgtactttcacggtaagtactgttttgaggatttcatcgcaaccgacgtgaaaaagcacaccaagaagcatgacatcaacaacaaaatcatcctgtccgctgacaagaaactgaaagaattccaccagttcattaacgttttcatcgttaaccagctggaattcaacgacagtgtgtgcttttcctatgccaagaataccaccacacatacgtgtctggaaccccataaaaataacacttacttccttagcatggacatagtgaattttttcggatctatctgcaataccgatataacacgtgtaattgagcacaacatcaaacagaagaagatcaatatctcggacattgagaaatatacagctagcatcgtcaaattgataacatttgaaggcgtgttaccaataggttttacaacttccggcagaattagtaatgcgattctctttgagttcgataagaagattttggattactgcagtcccaagaatattacctactcacgatacgccgacgatctgatcttttcaggaaacgatacaaatattggccaggtaaaatcaaccgtgaaaaacattctcaccgatctttttgatacaaggctgaacatcaacaatgacaaaacgaaaacctacttcaagaacactagaataaagatcctgggcatggtgatcactccgaatgggaaaatcactattgacaagaagatcaagtccgacattgaaattgccatgtatttctatgtctctgatagcgtcaaatttgaggcaatcctagagaagaaattcaatgggaacatgcacaagatattcgggatcattgcttacattaatagcgtggacaaagattatcttaacaagctcaggaagaagtatggaaattatactgtggagagctttctccgcaagtctgccaaatga

SEQ ID NO: 12075 - RNA, 1659 nt, synthetic construct
  source 1..1659: mol_type = other RNA
atgaaaaagaagctttataacgtcgtcgggcacctgcccaaaatctggtttgtgtgcggcgcgaaattcgaaggcaaaaactctattcgcaagctcttcataaaatacattcagaagaaccaccaggagatttgtacagctaggaatagaaactctaacagtcttagctttagcccaaaaaagatcattttggccgaggatgtcctggagcagtcaaagaccaaagacaccaagattctggattacgaggagcacatttcagagttttcaaccaatgtgatcttctttctagaatctccttcagtttttatggaaattggacgatttaccaagactataacagaccctctgaaattcctcttctgtgtggatcagaagcacaaaaaaaagaagaatctgatcaacaagctgctatctgaccccaagtacacagttctgcattacaccaccaataatgacatcatcattaactccgatgatttctttaagaaggtgctgaattgcttgaataaaactacgcccactattagctactatgaagacaacattcattccttctatagcttcctaatctcctttttgcaaaaggaagcttctctagagcagatcattaggaaagttgaactcgagcggaagaagacaggattcttctccaatttcctcaataagatcaaattccacttgaagctgctcatcaaaagcggtcttatccttaagcaggactgtttctactttagtgtgatcagaggagatattttgaagggtgtaaaatttcaagccctgaccgagaggcagaaagaactgctgtttgacgttgagatgaactatagctacgaacacatcaaagatttagtgtatgagcccaatagtacccttaaaaactatcaagccttcattaagactcgcgtctttgaccctctggaggaagaacataaagtgatccataagaggtgctttagctacaagaaaaaacatagcatctccaatcttgtggagttacatattggtaacaattacctgctcaatatggacctgaaaaacttcttcaattccataaagagagaggactttatcaaatgcatggtaacactggggctgttcgaggagcgttttcggacaaaaattactgacatatgcttcaagacgaagagtaatgaaataaacggcttacctataggcgcacggacctccccattcatatctaatcttgtgatgcgggaatttgataatctcgtatacaacctctgcgagaagaaagaagtcgtgtatacgcgctactccgatgacttgtcattttcgtgtaagaaaaaaggcgtcctgcaagatatcgagaaggagatctataaagtgataaagaagctgccatacccgcagaacctgaaaattaacgaaaagaagaccaagcacatgtcaaaaaaaggccgtcgaaaaatttgtggattgtatatcacaccagagagccacatctctattgggagaaaaaataagaacaaggtcaagaacatcctcaagaactttaacaagactgaaaagatctaccacaataaggagatgattaaaatcatccaggaaagtttcctcgattcggaggaaaaggggtatctctattacgttaactccgtggagaaggagttcttaaagagtcagatatacctgtga

SEQ ID NO: 12076 - RNA, 921 nt, synthetic construct
  source 1..921: mol_type = other RNA
atgaaggaaaaggactttaaggtcttttacattccaaagaagaacggttatcgaaagattattacgtataacgacgagaatcgtaaactcagagaatttcatcagcgcgttggagacatcctctacaagaggattcttccctccaaattcgctaaagcatacatcaaaaaacgcagcatcataaagaacgccaaaactcacatgtataatgactcctttctcctgttcgatattaaggacttctttcagtcaatcaatcacaattggttgatagagaagctgtactacgagattaacctcaaccacaagaagaagattagtaaaatcacctgtgctaagattgtcgacagctgcagtgtaagtaaccggggcttagcagtggggctgatcccttctccctttctggccaatatctacttaaaggatttcgacaacatcctgtacgggaacttaaaaaaattgggaatcaagaggatcatctacaccagatacgctgatgacctcgtcatctcctataatgggatagaaccgaaaaatatcgatgatatcaagaagatcgtgtgtgagaatctaaaaaagttcggactgaagctaaatgataaaaagacccgaattatcgacttcaaacagtcaaaccatgttaagatcaccggcataaatattacgaaaactgaggacgatgggcgcaagttgtctgtgggccggaaaagaaaagatgatctttacgtgctggccgtggagctggccaaacggaaacctgatgagaggaagaataacgaaattctcacacttaaaggactgcaaagcttcatactgtcggtggaaggtgtaaagtatgaagagtgctattccaagaacatgattagcgttattaacggcctgggctataacgcgcttaaagacctgatagactctttgtga

SEQ ID NO: 12077 - RNA, 933 nt, synthetic construct
  source 1..933: mol_type = other RNA
atgcggaaaattaaaggcaagattttctttatccccaaaaagcacggctaccgaaaaatcattacatataaccaatccgacagtgacattgaattgaggaagtttcatgtgaagattgcttccctcctgtacaaaagagttttaccgagtaagtttgccaaagcctacatcaagaataggtccattataaagaacgcgaaaacccatatgtataacgacattttcatcatgttcgacattaaggactttttccagtccattaatcacaatcgccttataaagaaactgtactacgagataaacctgaacaatagaaagaagttgtctatggtgtcctgcagcgatataatcaagagttgctcaataagcaatcgaggacttgcagtcgggctgataccatcaccttttttggccaatatttatctcaaggacttcgacaatatcttgtacggaaatctgaagaagctcaatctgaaaaacatcatgtatactcgctacgctgatgatctcaccatatcatacaaatcggatacgcccctcaagatcgaaaagatcgaaaagattgtttgtgagaacctgaagaagttcggtctgaaactgaactgccggaaaacaaggagcatcaatctgaataaatccaatcatgtgaaggtaactggtatcaacatcatcaaaatgttcgacaactatcggcagctgagcgtcgggcgtaaaagaaaagatgacctctacaacctggccattaagatctcaaagaagaacttcaaagagcacaaagaaaatgagatcaacaaaatcaaggtcaaaggccttcaaagctttatcctatctgtggagggagaaaaatacgagcagtgttattctgagaacatgatgtctgtgatccacgatcttgggtataagagcttaaagcagctaattgataacatttga

SEQ ID NO: 12078 - RNA, 924 nt, synthetic construct
  source 1..924: mol_type = other RNA
atgattaaagaagcagacctgaaagagttttacatccccaaaaagaacgggtacagaaagatagtcacctataaggacggtgataataaaagaagggaattccatcaacgagtggcccggttgctctataaacgcattctgccgtctaagttcgccaaggcatacatcaagaagcggtcaatcattattaacgccaaatgccacatgtacaatgacatctttctcacttttgatgtgaaagactttttccagtccatcaatcataattggatgattgagaaactgttctacgagatcaatttaaaccacaagaagaaggtcaacaaagtcatttgctcacagatagtgaagagctgttcggtgagtcgtaagggactagctatcggcttgataccatctcctgtgctggctaacatctatctgaagaacttcgataacatactctacggaaatcttagggcgatgggtatgaatcatgtgatttatacccggtacgcagatgatttagtgatctcctacagaggcacagacatcaaaaacatcgacaagataaagaagatcgtttgtgagaacctgaagaagtttggcctcaagatcaatgacaataaatgccgagttattgacctgaataagagcaaccacgttaagattacaggcatcaacattaccaaagagatcgataacaatcgcaaactttctgtggggcgcaaaagaaaagatgacctttataggctggctattgaactagcccagaagtcacccgaggagcggagtgaatatgaaatagggaaaattaggggactgcagagcttcgtactgtccgtagaagggaaagagtacgagaagtgttactccaagaacatgatgacgattgtcaataagctcggctatagtactctgaaagatttgatcgacagcatgtga

SEQ ID NO: 12079 - RNA, 918 nt, synthetic construct
  source 1..918: mol_type = other RNA
atggacaataatttcaaggttttctacatccccaagaaaaaaggatttagaaagattgtgacgtacggcaaaagtaatattaagctgagggaaacccataagaatatcaatattctgctgtacaggagggtccttgtgagtaaatttgccaaggcttatactaaaaaccgcagcattatcaagaatgccaaaacccacatgtataacgatattttcatcatgttcgacatcaaggattttttccaatctatcaaccataactggctcatcgacaaactctattacgagatcaatcttaaccacaagaaaaaagtgtctaagaagaactgcgaaaagatcgtaaagtcctgttccatatcgaataaagggttagctgttggatttataccttcaccatttctggcgaacatctatatgaaggacttcgacaatattctgtacggcaatctcaagcagctggaattgaaaaatattctctacacacgctatgccgatgatatcgttattagctataagtccaacaagactgaaaagttcctagaaataaagtccctgatagacaaaaacctgtctaagtttgggctcaaaatcaataacgagaagacaaccatcattaacttgaacaaaagcaatcacgtcagaatcacaggcatcaacgtgataaaagacacctttaacaaccgatcaattagcgtaggtcggaaacgtaaggatgatttctacaatttagcactgaagattgcaaaggagaagaaagaggaagtgaatatatatgagcggaagaaaatcattggactataccacttcattgtctcagtggagggcaaaggtttcgagaaatgctacagtgagaagatgaatcatgccattaacaaccttgggtacaaaaactttgaagagttgatcaagaacatctga

SEQ ID NO: 12080 - RNA, 933 nt, synthetic construct
  source 1..933: mol_type = other RNA
atgaataacgacttgagcacattctatattccaaaggcaaaagggtatcgaaagattacaacctataaggaccgtaatggagatctgataaagtaccacgacaaagtaaacatctctctccagaaacggctcaagcaatccattttcgccaaagcgtatataaagaaacgcagcatcgtgacgaacgccaagacacacatgtacaatgacatctttattagcatggacataaaggatttcttccagtctattactcatgataggctcatcaataccctgtattacgagatcaacaagaatagtgtgggacattttacgcttgagcagtgtcgcgatttagtcaagtcttgcagcacaggacagcgaggtatcgccattgggctcaagccttcacccatcctggcaaacatataccttaaagattttgatggcgtgttgtacggctggctgaagaaactagaccttgacaatgtcatatacactaggtacgccgatgacatgatggtatcctacagatccaattcaaaggataccgtgccgatcaacaaagagattattagtaaagtctccgaactgttgaagctctcgtatctgagactgaatgctagtaagaccagaattatcaacctaaacatctcaaaccacgttcgcattaccggcatcaacattatcaagaatgacgacaactttcggatgctgactgtgggtcggaaacagaaagatgacttatattacaggtctatagggcttttcattaaagaaaccaaggatgacaagtggtatctggaggctaagaaaattcaaggcatgcagtcattcatcttatccgtggagggcgaaaggtacctcaatacttacagcaaaaagatgaacatcgttatcaatgacttggggtttaagaacctgaaagacctgatcgataatctgatctga

SEQ ID NO: 12081 - RNA, 921 nt, synthetic construct
  source 1..921: mol_type = other RNA
atgtataaagagaagttcaacatcaagtacatcccgaaaaataagggttatcgcaagatagtgacttacaagaattccgactgtgatttgaaaaagttccatatcaagatcagccgaaccatttataataacaccctcccaagcaaatttgccaaagcatacatcagaaaacgtagcattatcactaatgctaaggcccacaagtacaatgacatatacatcttcttcgacattaaggacttcttccaaaacataaatcacaacaagctgattgagaagctgtactttgagatcaacattaagcggaaaaaaaagatctccaaactggattgctatcgcattgttaaatcatgtagtctgtcaaacaagggactcggggtgggacttataccctctcctatcctaagcaatatttacttgaaagagcttgacaacatcctgtacggccgactgaagaagtttggcctacccaatgtgatatacacccggtatgctgacgatatggtcatttccttcaagaaatgcgacaagtataatcttgacgagattgaactcttggttaaaaatctccttacaaggtacggcctgaagatgaacaacaacaagacgaaagtgattaatctggaaaagtctaaccacgtgcggattacaggtatcaatatctctaaagatagccagaacaaaagatatctcaccgtcgggaggaaaagaaagaaccagttatatcatgatgtcatcaagttactgaacatcaagaaagaggatagggacaaaaaagagattaaccgcgtaaaagggatgcagagttttattctctctgtggaaggcatctcatatgaagattcctactcgttgggcatgattaagatcatcgaggaatttggatttacaaatctgaaggaagcgataaatagtctgtga

SEQ ID NO: 12082 - RNA, 921 nt, synthetic construct
  source 1..921: mol_type = other RNA
atgaagaacaacaactttaagatcatgtacatcccaaaaagcaaaggatacagaaagatcataacctacaaagacaatgatgtggaaatccggaggtatcacatcgatatctccaagttcatttacaataacactctgccttctaagttctcgaaagcatacataaagaaacgatccatcataaccaatgccaaagcccatatgtacaatgacgtctttttatacttcgacataaaggacttcttccaaaatatcaatcacaacaagctgattgacttgctgtaccatgagattaataagggcagcaaaatcaaaacttccaagatagactgcaacaatatcgtgaaatcttgtgctgttagtggcaagggacttggtgttgggctgattcccagccctttgctgtctaatatgtaccttaaagagttcgacaacattctatacggaaaacttaagaagatggacctgccaaatgtaatttatacgaggtatgccgatgatatggtgatatcattcaagtatatcgagtcctacgatatgtcagaggtgaagaacttaatcggtattctgctgcgtagatatggcctcaaactgaacgacaaaaaggtgaagatcattaatctgaacaagagtaaccacgtcaggataacaggcattaacctatgcaaagacgaaaacaacaatcggcgcctgaccgtgggcagaaagcgcaaaaatgagctctactataaagcgattgagacaatttccaagcccgctaaagatcgggaagatattcagattaagaagatcaaaggacttcagtcatttgtcttgtctatcgagggggaaatgtatgaaaatacctatagccagaacatgatcagcattatcaacaactatgggtttaagaatctcaagagtctcatcgataatctctga

SEQ ID NO: 12083 - RNA, 921 nt, synthetic construct
  source 1..921: mol_type = other RNA
atgaaagatgagctcctgatcaaatacatccccaaaaaaaaaggttaccggaagatagtgtcttataacgtcgcaaaccaaaagttgcggcaggaacataagcacatcaataagtttatctgtgacgagactatcccgagtaagttcgctaaggcctatatcaagaacaggtccatcatattaaacgccaagatgcatatgtacaatgacattttcatctacatggacattaagaagttctttgcctccattaaccacactatgatggtgaacctgctttttaaggaaatcaataagaggaagcccaagatcattattaccaaagatacctgctacaagatagtgaaatcttgcgcaattagctccaaaggccttgcggaaggcgtaatcccaagccctactctatctaacatttacctaaaggagttcgacaatatcctgtatgggtatctgaacaaaatgcacttggagaatatcagatatacccggtacgccgatgacatgatcattagcttcaaggatacagagaattacaacgtggtcgatattgttaacgctgtgacgacacttttaaaacgatacaaactggagctgaacaaagagaaaaccaagattattagcctcaaccgctctaatcatgtgagactgacagggatcattatatcaaaggattccgacaataacaggagcttgacagtgggacgtaaacgaaagaacgaactgtataataaagccatttcactggctaagaagaataaggatatccgcctccagggagagattaataaagtcaagggtatgcagtcatttatcctgtcggtagagggcataaaatatgaggaaatctacagtgacaagatgataagtatagttagagaactcggctatgaaaaacttaaacagctcatcgacaatctgtga

SEQ ID NO: 12084 - RNA, 915 nt, synthetic construct
  source 1..915: mol_type = other RNA
atgattaaggaggacctcgtcgtcaaatatataccaaagcataacgggtacaggaaaatagtcacttacaaggaaaattcggagttgaagaagtttcatacaaaagccaagaatgtcctcgacaaaaaaatcattccgagcaaattcgccaaagcttacatcaagaagaggagcattatttccaacgcgaacgttcacagatataatgacatattcatcgcgctggatatcaaggattttttcgctaacatcaaacacaagaagctaatcgatttgctacagtttgagctggcacggaacggacggagggtttacaagaaggactgcattaagattgtgaagtcctgctctaatactgatcgcggcctcctggtgggccttaagctgtcacccattctggccaacatctatctgaaagagttcgataatatcctgtacgggaaactcaaaaaaatgaacttacccgatgtgaagtatacccgctacgccgacgatcttgttatcagctttaagaactgtgaggcaaatcttcatgacatcatcagtctgattcagaaactgctgaaaagatatggtctgagaatcaatgaaaagaagacccgcatcataaacttcaatgtaagtaaccacgtacggattaccggcataaatatcgtgaaggacgaaaagaacttccgaacattgtctgtgggtcgacagaggaagaacgagctctactatttagctaaggaaatactggatgggcaattaaacgaccctgtgaaaatcagaaaagtgaaaggactgcagtcatttattctttccgtcgaaggcgtgaattatcaaaaaacgtactcttacgccatgatcaatgagtttacacgtcggggatatattgacctcaaggacttcattgataagttggactacaaatga

SEQ ID NO: 12085 - RNA, 981 nt, synthetic construct
  source 1..981: mol_type = other RNA
atgtatcgcaaggaacaaataaaacggatcttgttttctcgcaaggtcaacgcaatggatgagaagctgtttcagatcaagtacattcccaaaaaaaacgcattcaggaaaattgtgacgtatcgagaagacaataatatcagagtgatgcacgagaagatcacaagctttatcgttaagaatactctaccttctaagttctcaaaagcttacatcaagaataggagtatagtgaccaacgctaaagcgcatatgtacaacgatatcttcctcatgatggatatccagagattcttctccaacatcaatcacaacaaactgatcaatgtgctctattacgagttgaacaaaaaggaaaacatcatatccaaggtcgattgcactaaaattgtagactactgtagtgtcggaaataagggactgccgattggctttgtgacctccccagtgctttcaaatctgtatctcaaggagttcgataatattctgtacgggaaactcaaaaagtacaacctggaaaacgttatttacacaaggtatgccgacgacttgaccatatcattcaaaaaaaactccagctatgccaatgacattattgtaaatatccagaacacgatagccaaccttctgaagcgttacagtttgaagattaatgagcggaagactaagatcattgaccttaataaaagcaaccatgtccgaatcacaggtatcaatattatcaaggacgacaacaactttaggagactttctgttggtaaaaagcggaagaacgagctatattggtccgccatcaattactttttaaccgacaaagacaaccgcaatgatgctgaactggataaaattaaagggatgcagtcgttcatattaagcgtggagaagaccggctacgaaaatagcttttcaaaggcaatgaagtctaagatcaacgagctgggctataacagcctgaaggaactcattgataaactggagtga

SEQ ID NO: 12086 - RNA, 939 nt, synthetic construct
  source 1..939: mol_type = other RNA
atgaacgaacaactgaccgtaaaatacatcaaaaccaagaacaaggtccgtaaaattgtgacatataccgaaaatggggagttgaggaagtaccacgaaaatgtggtgaaatacttagagaagtacgcgacaaacagcatttttgccaaggcctatgtccccaaatcaagcattttcaaaaacgccgaggcccacatgtacaacgacatctttatcaaaatggatgtcaagaacttcttcccaaacatcaatcataaatacatggcagagtgtctgttcttcgagctcaataagaatacccagattagtcgaaaagaatgctattctatcgtgaagaagtgttcagtcggcgagaaaggactcccgcttgggctcgttagcagccctgcactagcaaacctttatatgaaagaattcgatggactgttgtatggatctcttaaaactatggacctgaataatcccatctacacaagatatgctgacgatcttgtgatatcgtttaagtctggcactaacgacattgataagattgatgccatcaagcaagaggtaaggcgcctcttgaaaaaagtgcacctgaatttaaacgagaagaagactaagtcctatatactgaataagaccaatcacgttcggatcacgggcgtgtctatcacaaaggatgaaaaaaactacagacacatctccgttgggcgcaaactgaaaaaccagatattctggaatgctattaacatgcatgaccaggaaatcaaggattacgtgcagatcgagcatctaaagggcatatttagttttgctctgtccattgagaagaaggactttgaagcctgctattccaaaaatatgaagcagctgatcaaggagaggggttacgactcactccgggatctgattaaggacctgggtaacgacaataagagtatgattacgaactga

SEQ ID NO: 12087 - RNA, 954 nt, synthetic construct
  source 1..954: mol_type = other RNA
atgaaagaacagctggtcgtgaaatacattaaaacgaagaacaaagtgcgcaaaatagttacatatactgagaatggggagctgcgtaggtaccatgaggaggtagtgaaatacctggaaaagtacacaaccaattctatctttgcaaaagcttatgtgcccagaagcagtatttacaagaacgcgaaagcccatatgtacaacgatatcttcgtgaaaatggatatcaagaactttttccccaacatcaatcacaaatatctcgccgaatgcctgttctttgagctcaacaagaacacacagatctcacgaaaggaatgttatgacatcgtccgcaagtgctccgtgggagaaaaaggcctcccacttgggttggtgtctagtcctgccctggcaaatctctatatgaaagagtttgatggcttactgtacggtaagctaaaaaagatggagctgaataatccgatttatacgcggtatgccgatgatattgttatcagtttcaagaccggtaaggacgatttcgaaaagatcgacaacatcaaagcagaggtccaatccttgcttaaaaaagtgcatctcactcttaacgagaagaagacaaagtcatacaccttaaacaagtccaaccacgtaagaataactggaatctcgatcaccaaggacgaaaataattaccggcacatctcagtgggcaagaagctaaagaaccagatcttctgggatgctattaacatgtacgaccagaaggttaaagactatactaaaattgagcacctgaaggggattttttcttttgctctgtccattgagaagaaggatattgagaacttctacagcgaaaatatgaagcacctgataaaaattaggggatatgacagccttaaggaattgataaaagacctgggcagcgacgtcgataaaaatgacaataaggccgtcataaccaattga

SEQ ID NO: 12088 - RNA, 957 nt, synthetic construct
  source 1..957: mol_type = other RNA
atggatgaggagctggttgtgaagtacatcaaaactaagaacaaggtccgaaaaatcgtgacctacaaggaacgcggagaactgcgtaagtaccatgaaaaggttgtagaatacctcgacaagcatgtcattgtctcaaaattcgcgaaggcctatgcacccaagacctccatttataaaaatgcctacgctcacatgtataacgacattttccttaagatggacattaaggatttctttccaagcattaaccataactatctggcagagtgtctctatcacgagataaataagaatacgtccattagcagacgcgaatgctacgatattgtgaagaaatgctccgtagggaaaaagggcctgcctcttggctttgtgacatctccggctctggccaatctatatttgaaagaattcgacggcttactgtatggcaaactcaaaaagatggacatcaagaggcccatctacactcggtacgctgatgatatggtgatcagctttcagtcacaggaggactacttggagaaaatcgagcttataaggagcgagatagacaacctgttaaagagggttcatttgagcatcaaccacaaaaagactaagatcatcaatctggagaagaccaatcacgtcagaattacaggagtgtctattaccaaggataaaaacaactaccggcacctgagtgtcgggagaaaacttaagaaccacattttttggtcagccataaatcagtatgacaaagaggagaaagattataacgaaatcgcacacatcaaggggctgtattctttcgtgctcagtatcgaaaagaatggagtggaaaatggttactccgacaaaatgaagagtctgctcgtggagcggggctacgagacattaaaacaactcctgtcgtctctgggtaatgatgaactaaacaaaaacgagatcgacgatttgggatcccattga

SEQ ID NO: 12089 - RNA, 912 nt, synthetic construct
  source 1..912: mol_type = other RNA
atggatgagcaactggtcgtgaaatacatcaggacaaaaaaaaaagtgcgtaagatcgtaacctacagagagcataatgacttaaggaaataccatgaagcggtggctaagtatctccagaaaaatacgtttaacagtatctttgccaaggcctatgtgcccaaaagctcaattttttccaatgccaaggcacacatgtacaacgacatcttcatcaagatggacatccgcgactttttccctaacatcaaccatgagtatatggctaagtccctctatcacgagataaataagattgcacagatttccaacaaggaatgccacgatatagtccgaaaatgctctattggggaaaagggcctcccattagggctcgtctctagccccgggctggccaatctgtacctgaaggaatttgatggcctgttctatggccagttgaagaagatgtgccttaaaaacgtgatttacacccgctatgctgatgatctggttgtttcattcaaatactgtgatgactatgagaagtacgcagaaaagatcgtcgctcaggccgagcacctgcttcagagattttgtttgaaactcaatatggagaagctgcagatcgtgaatctaaagaagagcaatcatgttcggattactggtgtgagtataaccagaaactctcaaaattaccggcacattagcgtaggcaagaagctgaaaaacgagatcttttggaaagccattgagctgtacgacaacccggagggacacaacatgatagagagggaacagttgaaaggactgttctcattcgtgctgtcgatcgagaagcgaggagtcgaagaatccttcagtgagggcatgataaatcttctaaagattcggggtttcaactctctcaaagaacttatcaacacattgtga

SEQ ID NO: 12090 - RNA, 924 nt, synthetic construct
  source 1..924: mol_type = other RNA
atgaataaagagctctttctggaagaaaagtacatcaagaccaagaagaaatatcgcaagatcgtaacgtatgtggacggagaaaacttgctgagagaaaagcacgaacggatcgtctcactcctgaaacaagaatgtagcgattcgatttttgccaaggcatacattgagcactcttctatcgtcaagaatgcgaaagcccatatgtataacgatatattcctgttcttcgacgtgaaagacttctttccgagcataaatcacaactacttaatccagcgtctgtataaggagctaaataacaatggcaatgctagcatcaatagttgttccaaacttgtggagctgtgctccgtgaacgacaaaggtctgccattagggctagtgacatcccctatccttagcaacatttacatgaaggaattcgacaacatcatctatgggaagctgaaaaagctctctctggataacataatttacacacgatatgccgatgatatcgtgatcagctttaaggccgagaaaattgaccccgacataaatgtcaacattaaggagtgcgttataaggtgcttgaagcaggtccaccttaaatccaatgagaataaggaaagagtgtacgatatccgcaaaggtggacatgtgagaattactggcattaacgttattgtcgagaatgacaattaccggaagctcaccgttggaaggaaaaggaaagataggttgtacaacgatgtaatgagttactatatgcgacgcatcaaggaccgggaaaaggctctgtcaattaagggcaacgaatcttttattctctcagtggagggcaaagagtatgagaaatgttacagtgagaacatgaaaaaggttatcaaagagtacgggtatgactccctgcatgatatgatcaaggcaattaagtactga

SEQ ID NO: 12091 - RNA, 930 nt, synthetic construct
  source 1..930: mol_type = other RNA
atgaacgtgcagcatcccgacatcaaaattcgatacatacggaccaaaaataagacaaggaagctagtgacctatagtagcgatgactgtgaacttcgtgtgcgacataagagaatcaacgacttcattgaggcaaggtttatcccgtccatcttcagcaagggctacgtcaagaatcggagtatttatcacaatgctctggcgcatctctacaatgactacttcatcatgctcgatatcaaggatttcttccctcacatttgccacaaacagcttgccgacaaactcttctacgagatgaatttgctgagtagagagcaaatatccatgaaggagtgtaaaaacgtgatagagctgtgctcagttagctcaaggggcctcccccttggttttattacatctccactgctgtccaatgtgtacatgaaggagtttgacggaatcttcttcggtcaactgaaaaagttgggcctggaaaatcccatctatactcggtatgtcgatgacataaccgtaagctttaagtattctaacagaatcccacctattgaagtggagaatcaggttgttgacttggcccagtctctcctgtctaagtatggactgcaactgaacaaccgtaagaagcgcagttacaacttaaacatttcaaaccacgtcagaatcactgggattaacatcacaaaacagcccgataataaacgcctgcttaccgtaggacgcgccacgaaaaacgaactctactggggcgccatagactgcctaaaaagcagggatcctgaaaagatcgcacacattaagggcatgcagtcctttatcttgtcaattgagaagaatgggtacgagaagtgttatagcaaagctatgattcagcagatccggaacttagggtttttttccctgaaagaattaatcgattcgctggattga

SEQ ID NO: 12092 - RNA, 933 nt, synthetic construct
  source 1..933: mol_type = other RNA
atgaacgttcagaaccccgatattaagatcaggtacatcaagactaagaacaaaactagacggatcaccacttatgtgtccgacgactgcaatcttagattgagccacacacgaatcaacgtgttcctcaaggaaaactttattccttccgtctttacaaaagcgtacgtttcaggttgttcaatatatcacaatgcacttagtcacctgtacaacgattgttttgtgatgatggatataaaggacttcttcccaagcattagccaccggcagctcgaaaagaagctgtacttcgagattaatgctaaggccccaaatcagatctctatgctagagtgcagggaactgatcaatctgtgctctgtagggaatgtaggactccctctgggctttatcacctccccggtcctgagcaacatttatctgaaagaattcgatggcatcttttacgggaaactgaaaagcctctccttgaagaacattatctacacgcgctatgcagacgatatcgtggtgtctttcaaacccgaggacgtcaaaaatattgatgacgctaagagttccatcattaacatcgccaagcaaatcttgagccgctataatctccatttgaatgagagaaagaccaggttctattcccttgaaatttcaaatcatgtgcgtatcacaggcgtcaacattaccaaaaacgacgacggaaagcgactggtgacagtgggtcggtctttaaaaaataaactgtactgggacaccataaactatatggagtcagataacaaggatgccgagacggttaatcacattaaagggctacagagttttgtcctctcgatagagaaaaatggatacgagaagtgttacagtaagcaaatgatcgaaaacgtgcgcaaacatggcttcaggactctgaaggaccttatagattctttatga

SEQ ID NO: 12093 - RNA, 927 nt, synthetic construct
  source 1..927: mol_type = other RNA
atgaatatcaacaatcccgacatcgtagtgcggcacattaagacaaagaataaaactcgcaagatcatcacctatcgtagcgaagattgtgagcttaagactaaacacaggaggataaacacatttctgcaggagagatttatcccttcgatttttaccaaaggatacgtaaaaggtcgaagcatttatgataatgctctcccacacatgtacaacgactattttatccttctagacattaaggacttctttcctcacatctgccacaagcagctggctgcgaaaatcttccatgaaatcaatctggtgaaggagaatcagatcaacaagaaagaatgcaattacatcgtcgactgttgctcaattggctctagaggacttcccctagggttcataactagtccaatattgtctaacatgtacctcaaggagtttgactgcatactgtatggctacctcaagaaaatggaattgaacaacgtgatttacacgaggtatgccgacgacattattatctcctttaagaccgattcattcgtcgagttcaaggagattgaaaacgatatagtggatacctctaagttgctgctcagcaaatatggcctgcaaatcaataatcggaaaacacgcgcctacaatctggatgtttctaatcatgtccggatcaccggtatcaacattactaaatccgaagacggctatcgacatcttacggttggaagaaaactgaagaacgagctgttttggaacgcaatagaatgtttcgaaaccaagaaccaggagaatatccagacaattaaggggttacaatcattcgtgctgtccattgagaagcagggatacgagagttgtttcagcgagggcatgttaaaaaaggtgaacgatttggggttcgaaagtctgaaagagctcattgattccctctga

SEQ ID NO: 12094 - RNA, 927 nt, synthetic construct
  source 1..927: mol_type = other RNA
atgaacagcaccaatcccgacgttcgcattagctacatcaaaaccaagaataagttgaggaaaatcgtgtcatatcgctctaatgactgcgaattgaggacgtatcatcaacaaatcaatgacttcctggaacagcgattcatccctagcattttctctaaggggtatgtgaaaggcaggagcatttacgataacgcccaggcacatatgtacaacgattactttatcatgctggacattaaggacttctttcacaacatttgccacaagcagctgagttctactctattctacgaaatcaatcttgcgcaggccaatcagatatctcagaaagagtgtaatgacatcgtgtctgcttgttccgtctccaaacgtggcatcccgctgggctttattacctctccactcctgtccaacatttacctcaaagaatttgacgggatattctatggaaagctcaagcagatggcattatcaaacataatctacacaaggtacgcagatgacttaacaatctcgtttaagactgattgcacagccaaactgcccgatgtcgagagtctgatcgcctcaacagccgattccatactgaagagatacggactacacctcaacggccataagacccgatcgtattccctgtatgtgagtaatcacgtgagaattactggtattaacgtgatcaaggaccaatcaggttaccggagccttaccatcgggcgctcagtaaaaaaacagctctactgggatgctctccggtgccttgagtccaaggatggagagctgataagacacgtcaagggcattcagagctttatcttaagtgttgagaagcaaggatatgaggactgttattccagcgctatgaaacggagacttagtgatctggggtataaaagcctgaaggacttgattgatgctttgtga

SEQ ID NO: 12095 - RNA, 930 nt, synthetic construct
  source 1..930: mol_type = other RNA
atgaacgaacagcatcctgatattacgacatattacatacggacaaagaacaagacgaggaagatagtctcttacatatccgacgattgtgagctgcgcaatacccacttgaaaatcaacaatttcctcgagaggagatttatcccgtcaattttcagtaaaggatacatcaagaaccgttccatatatcataacgctcagagtcacatgtataacgactactttatcctgatggatattaaggacttcttccactcaatctgtcacaaacaactggcacagaagatcttttacgagatcaatctcactaaaagcaaccagatcaatctgttggaatgctacaagctcatctccctgtgcagcattgattcacgggggcttccattaggattcataaccagccccatcctgtcgaatatctacctaaaagacttcgataacatcttctatggcaagcttaaggagttaaacctcgacaacatcatttacaccagatatgctgacgacttaaccgtgagctataaaacaaagagcaccgtcaaagatgtgaatatggaggccaaaattgcggaaacagcctctaatattctcaaacgatatggcctgaagctgaataatcgcaagactcgctctattaacctgaatgtctccaatcatgttcggattactggtgtgaatatcaccaagaacaactacaactttaggcacctaacagtggggagaagcataaaaaatcaactgtactgggatgcccttaaatgcatcgactccgacaacgacctgttgaagaataaagtgaaaggcatgcttagctttgtactgtctattgaaaaggccggattcgagacttgttactccgatctgatgatggctaaggtttatagtttgggtttttcaagtctcgcagaactcattatgtctattaagtga

SEQ ID NO: 12096 - RNA, 927 nt, synthetic construct
  source 1..927: mol_type = other RNA
atgaccgagctgcaccccgatatcatcattcgctatatccgaacgaagaataagacacggaaattggccacctaccggtccgtggattgcgaccttagaaaaaagcacgaacaaatcgaacagtttcttaccgcctggttcgtgcccagcatttttgctaaggggtacgtcaagaatcgaagcattttccataacgcccagtcgcacatgtataacgaccacttcgtaatgctggacattaaggacttctttcctcacatttgtcacaagcaattgagtgagaagctgtattacgagctgaaccgttccgggaaaaatgtcgtcgcaaagtctgaatgcaacgatattgtagacatttgcagtataggatccaggggcctgccactgggatttgtgacatccccaaccctgtcaaacctttaccttaaagagttcgacggtatcttttatggaaagctcaagaagctcggcctcaataatgtgatctatactaggtacgccgatgacctgactatctccttcaagactgtgaccgcacctgaactcagtaaaatcgaggaaagcatagttcagatagctcagcaattgttaaaacgctacggactacagttaaacatgcataagactagatcttacgacctgagagtgtcaaatcatgtgcgcattacgggcgttaacgttatcgtctctgaaggtaaccgcaggagactgtctgctgggaggtcactcaaaaataaactgttttgggatgcgatagaatgtgctgagacacgggatccggtcaagaccgcccatgtgaaaggcatgcagagcttcattttatcagtggagaaagaagggtatgagacatgttttagcaaagcaatgatccagaaggttgagtctctaggcttcagtagcctgaaagagctcatcgattccttgtga

SEQ ID NO: 12097 - RNA, 975 nt, synthetic construct
  source 1..975: mol_type = other RNA
atgaagaaatccgaagacgtcataatcaagcacattaagaccaagaataagatccgcaagatagcgacatacgtttcagaaggctgcaaactgcgaaaagagcatgaaaatatactgaagtacctgaacaagaacttcattaatagcaaattcgccaaagcttatgtaaaaaaccgtagcatttacagcaatgccaaagtgcatttatataacgactgctttatcatgttggacgttaaggactttttcaattccatcaaccataagaacctgattgagaaattgtactacgagatcaacaaaccaaacaaaaagatctactaccagatcgatgaatcaaacagaaagctgatatcaaagattgagtgcgctaatatcattagtaagtgctcgctgtataataaaggtatccctttgggctttatcactagtcccatcctttccaacatttatatgaaggatttcgacggcatcctctatggtcagctgaagaagttcaaggactacaatatcatatactcccggtatgccgacgatatgacgatttctttcaaggataaccaggataaaaaggagattgagaacgagattatcaatattactgaggatctcctgaaaaggtatgggctcaaactgaacaataagaagacccggagttatgatcttaccatttctaaccacgtcaaaattacaggcataaatattgtgaaggaggaagacaattacagacgcatgaccgtgggaaaaaaggtgaaaaacaagctattttgggatgcactaaagtgttatagggatgggaatcacgactacaaatgtatcgaaggattaaaaggaatgcaatcctttatcctctctatcgagaagaaaggctatgaagaatgttacagcgaaaacatgaagaacatcataaatgagcttgggtttagcagtctgaaagagctcatcgactctctgttctacattgagaaaaattga

SEQ ID NO: 12098 - RNA, 951 nt, synthetic construct
  source 1..951: mol_type = other RNA
atgtccgaacagaacgtgttctaccaggtgaagtatatcaagaccaaaaataagctgagaaagatcgtcacttacaaagacgaactgccggatataaagttaaagcatgaggaaattgcggccttcataaacaagaacttcattccctctatcttctctaaggcatatgtgaagaatcgcagtatatatcacaatgccattactcacatgtacaacgatgtctttattgctctcgacatcaaaaactacttcaatagtatcgaccacaagctgctcttgagcgctttgtattacgagcttaataaacggaacaagtctacaattagcaagcttgaatgtggcaaaataatctccatctgcagcatctttaagaagggcttacccctgggcttggtgactagtccaattcttaccaatgtgtacatgaaagagttcgataacatactctacgggaaactcaagaaaatgaaactgaaagacgtcatgtacacgagatatgccgacgatctggtcatctcatttaagcgtgacgtgtatctcgattccaatcagattcggaagaatacagacgttatagtacatcaagtgtcctccctgctctccaggtttaaactgaaactgaaccctgccaagaccaaaattacatcattcgagaaaagcaaccatgttaaaatcaccggtgttaacatcatccgagatagttctaaccacagaaaactaagcattggaaggaagattaagaacaatctgttccatgacgcaatcaagtgctttgaggagaagaacaaaaataagtcggatgtgatgaagatcaaagggcttgagtcatttgtattgtctatcgagaaacgcggttatgaggaaatttactcacggaatatgaagaagaagattaaagacctaggatttgacagcctgcacgatctgatcaatagcctgtattacgaatga

SEQ ID NO: 12099 - RNA, 936 nt, synthetic construct
  source 1..936: mol_type = other RNA
atggatgtgcagaccaattactaccagattaaatacatcaagaccaagaagaagaccagaaagatcgtcacttatacagagaattatccggaaatccgagttcaacatgaaaaaattgctgacttcatcaacaagcagttcatccccagcctgtttagcaaagcctacataaaaaagacaagcatctaccacaatgtgcttccacacatgtacaatgacatattcatcttactcgacatcaaggacttctttaacagtatcaaccacaaaattctgatcgatttgatgtactacgaactcaacaaaaagaagaagaacaccattaacaagctggagtgtgccaaaattatttcacgctgctcaattacaaagaaggggttacccttgggattcattacaagtcctacgctctcgaacatctacatgaaacagtttgataacatcctgtatgggaagttgaagaaactcgagctgactaacgtgatctatactaggtatgcggatgaccttgtgatctcctttaaaagggatgtactatcttcttcaaacatatgcgtggagaaaattatcaatcaagtcaagtcactcctgttgagatacaaactgcagctaaataccagcaagactaaggttattaacttcgaggaaactaatcatgtgaaaatcaccggcgtaaatattattcgggactcctctacaaatcgcaaattatccattggccgtaaaattaagaacgacctgtttcacaaggctatcaagtgttatgagaacgagaatacgaataaatacgatatactgcgggtgaaaggcctggagtcctttatactctctatcgagaagaagggttatgaagaaacctatagcaaaaatatgcgagcaaaggtcaaaagtcttggattcaattccctgcatgaacttataaacaacctgctgtga

SEQ ID NO: 12100 - RNA, 948 nt, synthetic construct
  source 1..948: mol_type = other RNA
atgaatgaacagaacacttcgtttaggatcaagtatataaagaccaagaagaagctgcgaaagatcgttacttacaagagcgacaatccagaactgagaataagacatgagaaaattgcagcttttctgaactcaaatttcaccccctctaaatttacaaaggcctacgtcaagaataagtccatctatcataatgccaggacacacatgtataatgacattttcatcagtctcgacatcaaggacttttttgggaatattaaccacaagctcttaattaacctgctttactacgaactcaacaagaaagataaagatacgatcaacaagctggagtgtggaaaagttgtctctcattgcagcgtgagtgaaaagggaattcccttggggtttatcaccagcccgattctgagcaacatttacctcaaagagttcgataatatcctgtatgggaaactgaaaaagctaaacctcaaaaatgtgatgtacactaggtatgcggatgacctggttatctcctttaagaactcattcaatggcgacagcaaactcaaatctgacaacgatgaaaacatcatctccatcgtacagaaattgttgtcccggttcaacctgaaattaaacccttcaaagacacgcagagtctctttcgagaaatccaatcatgtgaaaattaccggcgtgaacattattcgggatgtatataatcaacgccgtcttagtgtgggccgaaaactgaagaatgatctgtttcacatggctattaagtgccacgaacaggaaataaaggacatgtatgaggtgatgaagatcaaaggacttgagagcttcataatttcaatcgaaaagaaaggctacgaggagatcttcagtataaatatgaaggacaagatcggtgagttgggtttcgagtctcttcacgatctaataaaaaacatgcggtactga

SEQ ID NO: 12101 - RNA, 942 nt, synthetic construct
  source 1..942: mol_type = other RNA
atggactaccaggagactaaaaagggctatatcgtgaagtacataaagacgaaaaacaaaatccggaagatcgttacctacggcgataatgctcaagagattaagaaaatccacaccgaaatagcagagttcattaacgagaatttcatgccctctaagttttctaaagcctatattaggcacaaaagcatttaccagaacgctctcgcccatatgtacaacgatatctttatctccctggatataaaggactttttccggaatatcaaccatcagaaactgattaatgcactcttcttggaactgaacaaacattcgaataacaccatcaataagcttgagtgtagtaaaatcgtctctaattgcactgtgtccaaaaaggggttgcctttggggctgattacgtcaccaacattatcaaacgtctatcttaaggagttcgacaatattctgtatggcaagctgaagcgcatgaaagtcgaaaacattatttatacccgttacgccgatgatctggtgatctcctttaaggacatagaaagcaaaacaaagatcatcgatgacatcatcatgctagttaaaaagctgctgagcaaatacaacctccgactaaattcctcaaagaccagaataatttcccttgacaaatctaaccacgtgaagataaccggaatcaacatcatcaaaagcccgagcaattacaggaaactcactgtggggagagaactgaaaaatgacttatttcacacagcggtgaagtattatgaggacggcaatactaacaagtacgagttactgaagatcaaaggattggaaagtttcattctgtcgattgaaaagaacggttatgaggaggtatacagtaagaacatgaagctcaagattaaggatctgggttttaagagcctcaatgaactcattaagggacttacatccaaatga

SEQ ID NO: 12102 - RNA, 951 nt, synthetic construct
  source 1..951: mol_type = other RNA
atggagaaagacgattggtatgtggagaagtttatcaagcgaaaaaacaagctgcggaaaatcgttacatacaataactccgacattcgcaatcgccataccataattaataacttcctcaacgggaatttgctgttttccaagttcagcaaagcatacattaaaggtaagtcaatctacgacaatgcctacgctcacctgtacaatgactatttcataagcctagatatcgagaagtactttaacaacatcgaccacaatattctgatcgaaacgttgtattatgagttgaacaagacttctgagaagaagatggttatgaataagattgagtgcacaaaactcgtgaatctgtgttccaccagcaaaaaagggctgccactagggttaataacttcccctacactctcaaacatctatttgaaagagttcgacaacatattgtacggcaaactcaagcggctgggcctggaatcgataatctatacaagatacgccgatgatatcaccatcagttttaaatacagcgaggaggaccttaacatcgtccagaataacatctatgacatcgtcagtagccttcttaagcgttacaagctcaagctgaattacagcaagtctaggttcattgatctgggaaaaagtaaccatgtgaggatcactggcatttccattgtgaaagacgagaacaactatagaaaactgtcagtaggccgcaaatcaaaaaaggagcttttttatagagcgatcgattgctatcggacctttttagaagatccctccaatgtggattacctggaagtcctgaagattaagggaatggagtctttcttcctttctattgaaaagaggggttacgaaaacttttattctaagggcatgcaaaaggaactgaaggaactcggattcgataatttaaatgacctgattcgaagtctcccgcacgaatga

SEQ ID NO: 12103 - RNA, 951 nt, synthetic construct
  source 1..951: mol_type = other RNA
atgaaaatgcaaaacgaatggtacaaggagaagtacattaagaggaaaaataaggtccgaaagatcattacctataacgatgaatctgtacgagaaaagcattcccagatcaacagaatcctcaatgagaagctgatgttctccaagtttagcaaggcatatataaagggcactagcattttctacaacgcgaaaagccacatgtacaatgatattttcatctgcattgacatcaagaagttcttcaacaacatagaccacaaaattctgttgcaaaccttgtactatgagttgaataagacggaagagaatgtcatcaaatatggcagggtggagttaaagaaacttatagaggtttgcagcataagttctaaaggtttgccgttagggctcattacatctcctgcccttgctaacatctacctcaaagaattcgataacatcctgtatggaaagctaaagaagttacagctgaataacgtgatctacacccgctatgctgacgatctcacaatctcatttaagtatatcgaggattacctgtcgatcaaagacgtgattataaacgaagtgtccaaacttctgaaaagatatagactggagatgaatgataagaaggagcgcattataaacctgaataagtcaaaccacgttcgcattactggagtgagtatcgtgaaaaatgtcgacaattatcgtcagattagtgttgggcggaaagtaaaaaaagagcttttttacaaggccatcaacgcctacctaaccttccaggagaatccctcccggatggactttctcgaaatgaaacggatcaaaggcatggagtcttttattctgagcatcgaaaaaaacggttacgaatcctgttactcagtgggcatgatgaggcagctggaagagctcaattttaacaatctgcacgacctgattaatagcctgccaatcaagtga

SEQ ID NO: 12104 - RNA, 957 nt, synthetic construct
  source 1..957: mol_type = other RNA
atgaatacagattataaagtccgctacataaacacaaacggtaagaagcgaaaaatcgttacctatgctaatgaggctaaaaggaaagagcacatcgagattaagaaatttctcgagaagaagctgatcttttcaaagtttaccaaggcctacataagcaaatcctccatttacaagaatgcaagggcccacatgtacaatgatatctttgtgaagtatgacatcgagaaattcttcaacaacattaaccacaagatcctggtagaaatactgcacgagcaactcaacttaaacagcgaaaagaatgagaattcaatgttggaggtggcagagctcgtctcaagctgcatcgtagacaaaaaaggacttcccttaggaattattactagtccaatattggcgaacatctatcttaagaagttcgacaacatcctatacggcaagctcaaaaagctgggcctggataacattatttatacccggtacgccgatgacctgacgatttctttcaaaaaccctgatgaatgggagattgagagattcaatgatgagctgacttatatagaagaggtgattaccaaacagctcaaaaagttccggctgaagcttaatctgaagaagaagagtatcatcaatctgaaggtgagcaaccatgttcgcgtgactgggatctctattacaaaaatcacagacgacaagcgtagactaagcgtggggaagaaaaagatcaataaactgtacgacgacgccttagaactgtatatcaagacccagaataaagagtacgtcctgactgacgaagatttctaccatatttccaggataaaaggcatggaatcttttattttgtccgttcataagaccggttacaaccacttctttagtggaatgatgcagaaaaagctcgaagaactggggttttcgtctctcggcgaattgatcaaaaatcttaactga

SEQ ID NO: 12105 - RNA, 957 nt, synthetic construct
  source 1..957: mol_type = other RNA
atgaatattgactataaggtccggtatattgatacgaatggaaaaaagcgtaagatcgtgacctatgccaatgaggaaaaacgcaaagaacacattgagattaaagagttcctcgagagagagctgatcttttctaagtttaccaaagcctacatatctaaaagcagcatctacaagaatgctagagctcacatgtacaatgacattttcatcaagtatgacatcgagaagttcttcaacaacataaaccacaagattctcgtggagatattgcatgagcaattgaatctgaagaatgaacaggatgaaaactctatcctggaagtggcagaattggtttcatcctgcattgtcggcaagaagggtctgcccttaggcctgatcaccagccctatcctagcaaacatctaccttaagaagttcgacaacatactttacgggaaactgaagaagttgggcttagagaatattatatacactaggtatgccgatgatctgaccatctcatttaaaaacccgaacgagtggggagttgcgtcctttaatgaggaactgacttacattgaggaggtgattacgaaacaactcaaaaaatatcggctcaaactgaacctgaagaagaagagtatcatcaatctgaaggtgagtaaccatgttagagtaactggaatctcgatcacaaaagtgaccgacgataagcgacggctctccgtggggaaaaaaaggattaacaagctctacgatgacgccctgcagttatatattaagcagcagaacaaggattacgtacttacagatgaagacttttaccacataaatcgcatcaagggtatggagagtttcattctatcagtccacaaaacaggctataaccattttttctccgggatgatgcagaggaaactggaagaattcggatttgacagcctcggcgagcttatcaaagacctgaattga

SEQ ID NO: 12106 - RNA, 969 nt, synthetic construct
  source 1..969: mol_type = other RNA
atggaaaaaaagataaacatggccgactatatggttagatacattgtaaccaaaggcaagaggcggagaatagtcacctatggaaatgaagaaaagaggcaggagcacaacgaaattaaactctttcttgaggagaagctgattttcagtaaattcactaaagcctacatcgcctattcatctatatacaagaatgctaaggcacacatgtacaatgacatcttcatcaaatacgatatcgagaagtacttcgatagcataaatcacaaaatccttgtgcgaatcctgcacgaacagctgaatctggggcaggaaaaggaaatatacacaatctttgagacgtcagaactggtgggcaattgcatttttggaaagaaaggcctgcccttgggcctgatcacttcacctgtcctcagcaacatttatctgaaaaccttcgacaacattctctacggcaaactaaagaagatgaagttggagaatgtcatttatacacgttatgcggatgacctcaccatctcctttaagaactcgtccaggaagagcctggaggacttggatcatgtattcagtgaaatcgagtctctcattaatctccagctaaagaactacaagctaaaactgaacgctaacaagaaatccattatcagccttgatgtgagcaaccatgtcagaattacagggatctctattactaagctggtgacagggaagcggcgcttatccgttggaaaaaagaaggtgattaaactgtttgacgatgccctgcaactgtactataaaaagatcgtggacgcagatgagttgagtaatgaggacttgtataatatccagcgcgttaaggggatggagagtttcgtgctgtctatacataaaaccggttacaaccatatgtttagcgagaaaatgcaagacaaattacttaacctcggtttcaagtcccttcacgagctcatcgaatcattatga

SEQ ID NO: 12107 - RNA, 957 nt, synthetic construct
  source 1..957: mol_type = other RNA
atgaataaagattacaagatcaagtacgtggagatcaatggcaaactaaggaaggtagtgacgtataataatgaagctaaacggttagagcatatcgaaattaagagattcttggagcgcaatcttatcttttccaagttcacaaaagcgtacataccacggagttcaatctacaataatgcaagagctcatatgtacaacgatatcttcatcaagtatgacatcgagaagttcttcaatcacataaatcacaagatcctggtggaaattctgtacgagcaactgaacctaaagagtgagaaggagatatatagcatgttagaggtcagtgagcttattggtcgctgcattctgggcaataaagggctgcccttcggtttgataaccagccctatccttgccaacatttacctgaaggagtttgataacatcttttacgggaaactgaagaagatggaactcaataacataatctacacacgttatgccgacgacctcactatctctttcaaaaatccgaacaactatggccttgttgaatttaacgagaaactgacagtcatcgaaaacgtcatcacgaagttgttgaaaaagtatcgactgcggctcaactccaacaagaagtctattattaacctgaaagtgagcaatcatgtgcgcattactgggatctcaataaccaagatttccaatgacaagagaaggctctctgttggaaagaaaaagatcaacaggttgtttgacgacgccctgcagctgtatctgaaaaagcagcgaaccgattacactcttaccgacgaggatttttacaacattcggagggtaaaaggaatggaaagcttcattctctcagtgcacaaaacaggctattcccactttttttcggaaatgatgctcgaaaaactgaagaaaattggattcaactctctccacgatttaattaaaaccctggactga

SEQ ID NO: 12108 - RNA, 975 nt, synthetic construct
  source 1..975: mol_type = other RNA
atgaacaaagtcgatgctacgtggtacaagattaagtttattaggagaaagggaaagatcagaaaaataatcacctataccgatcagtcagtgatagagaaacatacacggattaaagagtttctggaggagcgtttaatattcagcaagttcactaaggcctacgtgaagaactcaagtatctttaataacgcaaaggcgcacatgtataatgacattttcatcaaactggacatcaaggacttctttatatcgattaaccacaaaatcctgctcgatctgcttttttcacagcttaatgttaacccagatcaaaccaaagtgtccaagatggagatctctcggcttattagcatttgctctatcgagaagaaaggcctgccgttgggcctaattacaagccctattctgtccaacatctatcttaaggagtttgacaatatcctctatgggaaactgaagaaaatgaacttcaagaacatcatctacactagatatgccgatgacataacaatcagttttaagtctgaggacacaaatgaattcatccaaggcttaaaggtggaaattctgaacctcgtggaagtcttactcaaaaggtacaagcttaaactcaatagggacaaaatctccctcatcaacttgaacatttccaatcatgtccgcatcaccggggttagcgtaactaaggatagtaataactaccgccgcatcagcataggtagaaagaggatcaataaactgtaccatgatgctttgaacctattcattaagatcaaggtgcgaaatatgagcctcgataatcacgactttctgaaaattcgacagattaagggaatggaatccttcatcttttctattgagaaaaacggatacgacaccatttatagtgaaaagatgaagctgcggataaatgaactgggtttcgaatcattgtcccagctgataaaaaacctgcccgagaaaaatttctga

SEQ ID NO: 12109 - RNA, 963 nt, synthetic construct
  source 1..963: mol_type = other RNA
atgaatgagaagaaaatgtggtacgaggtgaaatacatccggaaaaaggggaaaatcaggaagattatcacctataaggatgagagcatccgaagactccatgttcagattaaggagtatcttgaagaacgcctcatcttttctaagtttaccaaagcctatgtttctaattcctccattttctacaacgcaaaggctcatatgtacaacgatatcttcctgaagatcgacatcaaagacttcttcaactctattaaccacaaaatcctgctggaggtactttatagccagctgaacctggatagcaagcagaaggagacaacaaaaattgaaatcagcaagcttatcgacgtctgcagtctagacaaaagaggaattcccttgggcttggtaacctctccgattctgagtaacatctatctcaaggagttcgataatattctttacgggaaactgaagagactcgggctggagaatctgatatacaccagatacgctgacgatctgactatatctttcaaatccattagcaacatcccagacactctgctcaaagtgattctggaattagtctcaggtttgctaaaacgttacaagctgaagatcaaccctaataaggtgtcgctggtggacttaaatatcagcaatcacgtgcggattactggcgttagcgtgacgaaagatgccaacaattaccggaaaatttcaatcggaaggaaaaggataaacaatttgtatcacgacgccatcaatatgtatattaagtgtcgcacaggcagtctgtcagatgcagactatcttaggatcaagcaaataaagggaatggagtcctttgtctacagtgtggaaaagcacggctatgatcgcgtctactccctcaagatgcatgaacagataaagaatatgggtttcgactcattgtccgagttaattaaaaacctccccgaaaacatacgagcgtga

SEQ ID NO: 12110 - RNA, 960 nt, synthetic construct
  source 1..960: mol_type = other RNA
atgaactctgactacaaaaagatagtaatcgtgaagaatggaaagaaaaggtttttggtgacctacaataatccagaggttagactgaaacacgaggctatcaaacgtttcttagaggacaatatctactactctatctttaccaaagcatatcgcaaaaagagcagcatttacataaacgcgaaagctcatatgtacaacgatattttcctgaagtacgacatcaagaacttctttgactccatcgatcataaaattctcgtgcaattgttacacatggagctaaacaagttgaacaaaaatagcttcagcctcctggacgtggccacactggttgaggaatgcattattgataagaaagggctgccccttgggctgattacttctcctaccttatccaatatctacctgaaggaattcgataatatcctctatggtaagctgaagaagatggatcttagcaatgtcatctatacccgatatgcagacgatctgactattagtttcaagggtaatctcactagtgaggaattgtcggaattcaatcagcagcttataattgaactccagaaactgctcaagaaatacaagcttacactcaacaagaataagatttccatcatcaacttgaacatctcaaaccatgtcaaagtgacaggcatcaacatcataaaaaagaacgacaactaccgggaactaagtgtaggaaagaaaagagtcgccattctttttgacctggccctgaatatttattccaggatcatgaatgatgactacacactgaacaaggatgattattatgagatatccaaggtgaagggactgaactcctttatcctgtcaattcacaaaaaaggctatgagaatatgctgtctcaggaaatgcggaacaagatttttgagaaaggctattcaagcctaacggacctcataagtaatctgccgaactctaacaattga

SEQ ID NO: 12111 - RNA, 969 nt, synthetic construct
  source 1..969: mol_type = other RNA
atgaataaaagctggtacaagattaagtacatccgcaaaaagaggaagatccggcgtattgtgacatacagcgacaactccaccgaaataaaaaataagcacattgggatcaaggagtttctggaaaagaatatctacatgagcaaattcaccaaggcatataagaaggacagctcaattttcaagaatgccaaagctcacatgtacaacgatgtgtttattaaactggacatcaaggacttctttcagaacattgatcataaaatcctgctcgagatcctttattttgagctcaacaagagtaagtctttaagcactatcaagtactctaagaaacaactcttatcactcatcgagctgtgctctgtaagcaaaagaggtttaccccttggcctggtgacttcgcctatccttgccaacatctatctgaaagagtttgataacctactctacggaaatctgaaaaagttcggcctgaacaacattatatatacacgatacgccgatgacttgacaatctcattcaaaaaaaccagtcagatcaacatagttaacgagaagaagaacattgaattgctggtcagttcacttctgaaaaaaaacagactgaaactcaacttctccaaatctaagatgatagatttcgaaatctccaatcacgtccgcattacaggtttgaacatagttaaggacacgaacaattttagacggattactgtgggccgaaagaggattaatgacctgtttcatcagagtatgaatcttcatctcaaactgaaggaatattccctaaccgactctgataaactggagattctgcggattaaaggaatggagtctttcatatattccatcgagaagaagggatacgaatatgtgttctccaataacatgaaggagagcatctacaatgaggggttttcgaatctaaccgaactcatcgatgcgttgggggctaggttggaatga

SEQ ID NO: 12112 - RNA, 927 nt, synthetic construct
  source 1..927: mol_type = other RNA
atggtgaacaattccggctttgccatcttcaaactcaagaagaacaagaagatccgaaaaatcgtggcgtacactagcaacagcgagctgaaaaacatacacaagctgatcaacgaccacctcaaggagagggtcatatactccaaattcacaaaaggttacagagaaggggtgtccatatttgataatgctaaagcacatctgtacaacgacatctttatacaattcgacatcaagaacttcttccctagtattaatcaccacaaactgattaacctgttgtacaaggaggtaaaacataatgggtataacatcagcaagagtcagtcctacgaaatcgtcaaaaaagccagccagggtctaaaaggcctgccacttgggttcatcacctcacccctgctgtcgaacatttatctcaagaaatttgacaccatcttgtaccacaggttgaaaaagcagggcttagacaatgtgatctatacacggtatgccgatgatattaccatatcctttaggtgtattcccgataagactgattacagtgacatccggagcaccatcgagaagatcatttcaaatttgctcaagcggtattctctgaagctgaataataagaagacccgcgtcacaaaccttctcaaatcaggaaatgtgaaggttacgggcgtctatattgttaataagagggacgactatcgacatctgactgtgggacgtaaattcaagaaagagctactttgggatgctattcagacattagataatatcgagagagacgaatctttagtgaagcaaataaagggacgctactctttcgttctctctattgaaaaagagggcattgaaaacatgctgtcaccgtgcatgcgcagaattctcaacgaaaagaacatcagttctattaatgagctgtttagcgtactttga

SEQ ID NO: 12113 - RNA, 927 nt, synthetic construct
  source 1..927: mol_type = other RNA
atgaggccaaataaagaattcaaggtgtttaagctcaccaagaacaaaaaagttcgcaagatagtcgcatacactactgattcaaatctcagaagggaacacgtgcttatcaataattacctgagagaacgggtgcgctattctaaattcaccaaaggctacagaaagggaatctcaatctttgataacgtgaaagcccatatgtacaacgacattttcatccagtttgacatacaaaggttttttcctagcattaaccaccgaaaactgactaaacttctgtaccaagaggtcaagtataataactataacctgagcaagtcccagagctatgagatagtgaagaaatcatcccagggcctcgagggattacccctgggatttgtgacctctcctctcctgtccaacatttacttgaaacggttcgacaacatactatacgggcatctgaagaaggaggaattagataacgtcatctatacaaggtacgccgatgacattacaatcagctttcgcggcattcccgataagttagattacagtgacatcaagagcagaattgagaagattatcttcgatttgctgaaagagtacggcctgaagctgaataataagaagacgcgtctgaccaatcttctggagtccggaaacgtaaaggtgacaggggtttatatagtgaacaaacagaattcggtccggcggttgacagttggccgccgattcaaaaaaaagttgctatgggacgctatccagagcctcgacaatattgaaagtgacgacttcctcattaaacagatcaagggtaagtatagtttcgtactctccatcgaaaaagaaggtatcgagaacatgctttctccatgcatgaggcgtatccttaaggggaagaatatttcatctattgatgagctgttcagtatcctgtga

SEQ ID NO: 12114 - RNA, 2028 nt, synthetic construct
  source 1..2028: mol_type = other RNA
atgaaggaagtatatatgctgttcttcaagaataaccaggagaaattcaagccatcatttttcattgccttcctatgtggggttaagtacaaaagcaattctcctgaggataaacgaaatgtgctttatgattacctcaaacagaacagaaagattaaaccagtcattctcgagaaatcatttgacatcgactcctttgacaacattaacaccttaaactacaaggacattggtttgaataacctgcgtgatatcgagatcctgactagcttgtattctcatctgatttttgtcatccacgagtccatgtcaaccgcgagcgagattggcatgtttagctatgatgatcatactgccaaaaaaatatgcgtgatatatcctgacgaattctctatcaacaagaatgtcatcggtgattttttcacttacgcatttttctcagatcgaaacccgattatcaacaacaagtttcctttttatcccagaacgaagactgtgcatcacgcatcaaataacgtggaggcgtacacgtacttcatcaataaccaaataacaaaggacctcgaaaacaagattaatacctacatcgagaacaatagcaaaaggacttacgacctgaaacttcataaaaaattccaacgtttccagagttactacctactgaagaacaagaacaaggacaagatagatatgaacctgacagctgagttctttttttaccacatgcttgcccttctaaacactaatgaggtcaaagagatcttcgaggaaaataatcatgatttccacaagtgtgtgaccaaaattggtaatctctttctagagacattgaaaatgacaatcctctacaatcgcaagaacatcacagcaaacaaaataacgtgccacgtgaataactacccattcaaacaagccttgttttatctgttctatgtgttccacgatattggggtagtagaaatcaaagagaacaagatcgtgaagattgagaataagcagtatgacggctatatttctaaactgcacaagctgctcatctcgtacaaagaggaacgcaccttcgaaaaaatcaatgtgggaaaaaatgcctacaagcagttctacattaaaaagaagacaggcctttatcggaagatcaccacctataatgacaacgaggaaggatataaacttaaagaataccacgacaggataaatgattttctgaacgaaaacatcaccttttcccagttcacgaaggcttatctcaaagacacaagcatagttaagaacgctaggtgtcacctgtacaataacaccttcatccagatagatatcaaagacttcttcccaagtattaatcaccataagctgctcaataggctctactttgaaatcaaccgcggcaataacatgcggtacattatatccaagaaggactgtttagatgtcctgaagacttgctatttttccaagaagggcattcccattggactggtgctgtcccccacactcgccaatatctacatgaaatcctttgacaacgagttatatggcaagctaaagaagctgaatctcaacaatatcatctatacccggtatgcagatgatatggtgattagttgtaaggataagcttgaccaggagaaaattctgaagatcaaggaactggtttctgaacaactgtcgtatttgggtttgaagatcaatgagaagaaattccggaatgtaagcctttatacctctaatcatgttaagatcacagggattaacatttgcaaggtgaaaatgaaggggaacaacaattacagatatctgactgtgggacggtccaaaagggaattgctgtacaaactggcctttgagttattagaactcaacaaggacagttttatctaccagtacaaactcaaaaagcttaaagggtactatgcttacgtgtattctgtcgagaagggaaaggttgacagactgtgccctcccaagtacgtcgataaactgagaaaatacggctacagcagctttagtgacctgatacgcgaattgtga

SEQ ID NO: 12115 - RNA, 1989 nt, synthetic construct
  source 1..1989: mol_type = other RNA
atggagtataccttactcgagaatattaagatcactaggcctatcctgtttctttgcggtccatactacaacaaaaataacaaatccgatcgccgcctgattctgcaggaaaagatctacgaaatccacaagaataagtttctcccgctggttattgacgactttctgacagagaagaacataaaggacaacactatcgatattcagttgatggaggagatttgtgctgcggtgtctgcgcaaacgtatatttttctcgataccatgagttcagccgcagaactaggcatatttgcaaattctgccttcttcaacaaaatcaaggtgtacattcccaaaaaatctgacatctacaacaaaagcaacgtcgggtattttgtgcgggatgtggtcctgatgaaacacagcgacaaaatagagtgtctggaataccgacctgctgtggaacgcaatgctattgccacagattacatcttagaatactacaagttcgtgaacaaccagctccccaaaaatatagaagacgacatacgaaatgacgaaatattcaacgaaagcgatgagcatttcattgaatacctagatagcaacatgatgcctgacaacccataccagatctgttatcagattcgcaataataagatcgatgtgaatatcagcatcaagatcttgttttacatcaccatctccgtgatcagcatcgaatacaagaatgacattaaggagaagaacttctctgtcttcgatatcaacaaaatcatagagcaagtgaagagtatcattatcaattccctatctgaaaagaccaacaaagatctcaatacgatagatgagatcaatatcaacacagtgagcaagcataaaatcgagaaaattatccagcacatcgtaaaattcgcccatatttattacctgtactcacagtttcactcagtgtatttgatggagaagcccattggtaagattatcagaaagattgaggtcggcaaccatccatacactcttcttcagctgtccgactctcagcttgatcttctccaggacatcaacaacgacaaagataagtactacgaaaagatcgtaatcgagaaaaacaagaagaaaagggagatcatcaagtacattaacaataacgatggggataatgccaaaaagattcatgagtatatcctgaagaagatctattcatactaccggtttaatgacaacagttacgcatatcagaaaggcaaatctataaaggagtgtgtgaataaacacattgaaggcaaatcgttcattaagtacgacatcaagaagtttttcgagtcaattaaagaggagaacctctataagtgcttggtcgacattttcggaattgataaacggtttataggggctctgaaacgtatctttaactcatgcttctatgagaataccttacccctgggattaactctgtcccctgttctgtcggacatgtatctaaagaagtttgatgacaccatttccaggcaacttgaggaaaagggcattacttattcaagatatgcagacgacataatgatttcttccaaagagattatcgacgagaagctgtatcacgaaataaacaagatggttacagatgaactggttaaggtgaacctgatcctcaatgtgaaaaaatccgtcttcgttacattcaatagcaagtgcaacttcatcaggtatgtgggggtcaatattgtccagggtataaatggaaattacctcagtgtcgggaagaaatacatttattccatagccaaggagtatctcaaatacatggacaaggtgaatgtacttaattccgaattgagcagtgagagtgatgaagaactggaagagttgaaaaagaacgtattctatcggagaatggccatcattggaaaggtgagctttttgaagcaaatagagggagacaagggctgcaaaagactgaaaaagcgtctggagaaatatgttgatatcgacctggagaaaatttga

SEQ ID NO: 12116 - RNA, 1989 nt, synthetic construct
  source 1..1989: mol_type = other RNA
atggagtatactctgctggacaagatcactataacccggcccatactcttcctgtgcggcccctattacgaaaaaagcaacaaatccgaccgtcgagtgatcttacagaatatgctgtacgatacgtataagaataagtatctgcctctcgtaattgatgacttccttaccgaaaaaaacataagggacgacaatatatccattcagattatggaagagatctgtgcggcggtttcgtacaaaacgtacatctttcttgacacaatgtcaagcgccaccgaacttgggatctttgcaaatagcgcttacgtgaatgagatttctgtcttcgtgcccaaagtctctgacatttataatcgcaaaaacgtggggtactttgtgcatgatgtcgttctgaaaaagcacgaggatagagtcaagtgcctggagtacagaccgggacttgaacggaaagcccttgcaactgattacgtcgtggaacactataaattcgtgaatgattcccttccaagcaacctcgctcggcacatcaaagaagaccccatctttggacaagaagacagtcatccaattaacctgcgcgaggacgacgtcgtcattccgcagactccatatcagatctgctgtcagcggaagggcaataacttaaccgtgagtatctccctgagattgctcttttacgttaccgtttccatcattagccatgagtacaaaactttcttacagtcgggagacgaggatttcagtaagttcgacatcgatgatatagttgacaaggtgaaccagtgtatcaagaattttatcagcggcaagacagggaaagatctgtccgcctgtgttatcgccaaactgaacacagtattgcaagaagaagagaggacactggtgtaccatatcgccaaatttgttcacgtttactacctgtattcacagttccatcgattctacttggtagagaaaccactcggtaatgtcgtggacaagattgccgtcgggaaccacccttacaccctctgcggactgaaggaaaaggacattactctccttgaaaagatacaagctgaccaggagaagtactttgagcagataatcgtacgaaaaaacaagaagaagcgggaaattatcaagtatcgcgaggataagaacggagatcaggcccgcgaattacataatcgaatgctacagggtatcctcgagtattatacggctaaccaggcaagttatgcatacagacgaggccgtggcattaaacagtgcgtccaacaacacttggatggggtggatttcatgaagtatgacattaggaagttcttcaattcaatcggcttggaaaaactgacaaagtgttttggggctgctctaaagattgacgagcgcttcttcaaagaattgtatagaatgctcggatcttgcttttatcacggcacactacctctgggcctggtgctgtcccctatcctttctgatatctatatgaacgagtttgacagaagggcagagggttttttttcaagtttgggatttacctacacaaggtacgccgatgatatcctcgtgagcgctaaggaggtgatggaggaagaagcaaaggagaaggccgaggagttcgtcgagagggagctgaaacggctgtcactgtctataaaccgtgagaaggtgagaaaagcgcggctggaaaaacagggggaccaaatccggtacgtaggtctgtatatagtgcgcggcgagaaggagaattttattaccgtgggtaagagctacgcatatgaaaccgcccgcgagtgtttggattacttccacaaagtgagaaggctcttagtggaggaactccccgccgcggagaaagaaaagctagagaaggatactttctttgaaaggcgcatcctactgggcaagctcggtttcatggagcagatggaggggcagaggggaattgaccgggtggaggctagacttaaagcccacggcctgtctattctggaaatttga

SEQ ID NO: 12117 - RNA, 2001 nt, synthetic construct
  source 1..2001: mol_type = other RNA
atggattatatcctggctgataaactgaagattactcgacctttcgtgtttctctgtggccctaactacgagaggaacaagatcgcagaccggaggaatatcctaagagagaacatccaccgaatttataagatgcagggccaagaagtccttccattgattgtggacccttttcttgccgggaaatacatcgacttcaataagtacagtgtacaactgctggaggaaatctgtgccgctgtcagctgccagacccacattctactggatactatgtccgttgccactgagctcggaattttcgctaacagtacgtatagtaatgagttatgcgtgtatattcccaaaaattctgacgtgttcaatcagggaaatgtggggaccttcgtgcgcgaagtcgtactgaagaatccagccgctaacataagatattttgagtaccgcccgcgaatcatcaggagagcgtattcttccgtgtttaccgcagaacactatgcgttcaacaacgaccgcattcccaaaaatatcaaggaggttttgaaagaagacgccaagggcaacaaactgatttgcgatctgccgattatctatgatgattccaccagtataccctccgaggtaaatcatattgcttacacctacaagaactcaaagctggatatcaacattagcattaagctgctgttctacattgtgacctcaatctttcagcaggagtaccctgaaatcacaaagggcaagatcgacgacttaacacaggcacaattacacaatatatgcacgtatacggaaaatgcaataatcaacagcgtctcttttttcttgggaatcgataggaaaagcctgacagaaacccatataagcaccatcttgaagatcgataacaaggacgccattcagcatatagcaaagttcatcctgatttactacacaaagagccagttcaagtttatggaacttatcacatcctctgagtatacggctataaaaatgaagattggggaacatcccgacgtgatctttaacttaagcaaagaccagatgcaggtggtcaactttgtagttaagaacccagagctctgttacgaatgtgtgaatctgaagttaggcaaaaaggttagggagataattaaatacgccaaatccgaagagggcgataatgccaagaaactgcaccagagcatgaatgagatgttccgtgaggagtataagcacagtatctactcatatgcctatcaccaagggtcctcaattcgtaaatgtgtggattgccatataaattcaaggtcctttgttaagatggacatcaagaactttttcaactgtatctcgaaggacatcctcctgaagaagatcgagaacgaccaaaacattgataagcgctacgagcatttgctaaacgacattatcagctcgatttactataacgaaaagctgcccctgggactcgtcatgtctcctatcatcagtgattactacttgtttgagtttgacggccaagtgggaaaatattgcgagagcaaggctctaatatacactcggtatgcagacgacataatgatttcctcatctagcaccattgaggagcagctctacatggagattatggattttgtgtccaatcttcttaacagacttaacctgaagctgaataaggataagtgcgagtccgtccacttcgataaaaaccagtcattcatccgctacattggtatcaatatcgtgaaaggcgaaaatggagccctcaattacctctctgtcgggaaaaaatacatttacgccttggcaaaagactacctcaaatacgacaatttctgttctgcgcttgaaaatatcacgagcgaagaaaaagagaaaatgcagactaacgttttctatatgagaactgaactgatcggtaaaataagtttcatccggcagatcgagggtgagagagggattgaacggctcaaagtgcggctgtgcaagtattatccagacatagatctgaaagctctctga

SEQ ID NO: 12118 - RNA, 1974 nt, synthetic construct
  source 1..1974: mol_type = other RNA
atgaaagagtacatgctcctagaccagatatctattgagcgccccatcgtcttcctgtgcggaccttattacaataagaaagacgacggagacaggagaaaaatccttaaacaaaccatctccaatcagtatagcaacagaatccttccgctgattattgatgattttcttacggaggaaaacattgacgacaagactatttctatccaactgatggaggaaatatgtgctgcggtcagtgtgaagacttatatctttctggataccctgagcagcagtgcagaactgggcatctttgccaattctactttcatgaacaagatacaggtctatattcccaagaaaaacgatatctacaacaaatccaacgtaggttacttcgtccgtgagatttcactgaagtctaggcccgatacaatcaaagtgctcgagtaccgtccaggagtgaaacgaaatgctatagcatcggactatattgttgagttttacagctttgtgggaaataaactaccattgaacatccatcaaagcataatcaatgacgaagatctcaaggagagcaagggcaaaaccaacattgaaataatagaaagcgctgatatgccacagtcacattatcagatctgctattccataactaatcaggaattgcaggtcaatacaagcattaagcttatgttttacgtgaccctcgctattgtttcatgcgagtataaagagctgtttgacaacaaagagtcagacttcagtaaaatatctctcgaggaagtggaacagcaggttaaggacgccctgtataatctgatcgaatcgaagaccctcatcaacaaaaacgacttgaaaaagatctcagtgaaaacagtactgaagcaagagcaaaatgacaatctcatccggcacatagtaaagttcttgcacgtgttcaataacaacagcgattacggagtgctgagactctttaagaacccaattaacaagatcatcaagcaggttatcaaagggaaaacagtgtttgacgtaattaaactcacccaggagcagattgagctgctgatgaagattaattccaaccccgatctgtactatgaaacgatcgagattagaaccggcaataaagtgagggaaattgtcaaataccgcaatgataaaaacggggacagtgcccggaagatccacgaagcaattaaccagtctcttaagaacgagtatatgtattcgagtaactcttacgcctacaaaaagggtgagaacatcaaaaaatgcgttatcaaccatcttgatggtatggggtttctaaaatacgatatccgcaagttcttcaattctatctccatcgagttactggccaagaagatgataatcgaattcgatatcgatccgaactacgtctaccagttgaagtccgtgttgatggcgtgctcatataacaatcaaattcctctgggcttcgtgacgagccctattttcagcgatattttcatgaaggacgttgacaacaaaatctgttcagtagccgagaaaaatgactgtatttatactaggtacgctgatgatatcctgatcagttccaagcagatgattggcgacgacatgtataagaatattgatctgaccgtcaaagccacaatgctcgaaaatgggctggtgaccaatgagaagaagaatcagtttatcaacttcgacagctcccactccttcctgaggtacatcggcgtgaatataatccaccaacagacaggaaatatcattacagtggggaagacttatatcaacgatgttgccaaggactatatcgagtacgatcaaaagaagaataactgtcagcagcagttgaatgaagaattattctactcccgcttacggattataggcaagattgcatttattaagcagatagagggcgacgtgggggtggagcgattaaagagacggctttacaagtacgaccctaacattgactttgatgcagtctga

SEQ ID NO: 12119 - RNA, 1992 nt, synthetic construct
  source 1..1992: mol_type = other RNA
atggggtacattttgcgcgacgaaattattatcaggcgccctatcgtctttctgtgtgggccctattgtcagaaaactaacaaaagtgaccggcgcaacattctgcgcaagtgcttcaaagataattttaaggatggagtgctcccccttattatagatgactttctgaccgaagagaatataaaggatcctcagatcaacattcagctaatggaggagattttcgcaagcatcagccaaaaaacatacatcttcctcgatacgctgtccgccgcttccgagcttggcctttttatgaaccatgcctttctgaataaagtggttgcatatattccgaaggaaagtgacatcctgaacaaaaagaacgttggctacttcgtcaaagatgtcattctcaagatgaacagccgacaggctaagtacatagagtatagacctgcaatcacacgaagcgtaatcgcgaccgactatgccgtcgaacactatggcttcatcgatgacattgtgccagaaaatataaggcgtgacttgctcgacgatatcgctctgaagaccaagaaggtgcacctgatttgcctcgacgaaaaggagactaccccgatggacgattacagaatttgttaccggagaaaagaaaataggatcttccttaacgtatctatctcactggtcttctacattgtcgccagtctgatgtatgagaagtactctgccaaactagtgacgaatcccaacgcctctataaaggactttgatgtcgatgacattcttagaatgaccacagatacgttcgataactacctgctgcgcaaaggactacctactaacgaggacattgaaatcaacaccatcctgaagtgtagctttcgcgacttaatctaccatatcgtgacattttgttacatctaccactgcttttccacatacatgggtctgaggttggttgatagacacatggatactatcctcgagccctacgccgacaagaagatggggaatccactggagatatttgacatatccgtgcaggattatgacttccttattcaatgccagaagaatccagaggagttctactctaaattctacctgttgaagaatggcaagcgcagggaattcattaaatatagcgagacagaaactggaaagaagttacggaaaattcacgaacggatcaacgatgccctcaggaaaaactatgtgagctccgagaaatcatacgcatataaaaagggtagctcaataaagaagtgcgtggagttgcatcagaacaataacgggtttatcaagtatgacatctctagtttcttcaattccatagacatggatatcctgcttgacgcggtgatgaatatcttctccattaactttgcctataagaaagttatgcggaacattatctcgtctttctattacgagggcatgttaccactgggtttagtgatctcacccgtactcagtgacatctatatgctgaagttcgatcagcagataattgaatattgcgagaagaagaactacaaatacacccgttatgcagacgacatcctcatttcaaaagaaaccgagttcgaaacagtggagtacgacgaaattgatgatctggtgattaagtggttgcgacagctcaagctcaagctcaatagcaaaaagaaaaaacggttgttcctgcagaaagacgggcaacacataaaatacataggggtcaatatcgtacattttgccaaggggaataagctttcggtgggaaggcagtacatctatgatgttgtgaaggagtactacaattatagagagcaagctcgtaagctgagagaatatggcatcggagatgagactcatctattttatgaggaacgaaggatctctggaaaaatcgcttttatcaaagccattgaaggcgctgacggttgggagaaagttcggaaaagaattggcgacaaggagggcttatatatcgacgagaaactgaagttttaccacatatcctga

SEQ ID NO: 12120 - RNA, 2007 nt, synthetic construct
  source 1..2007: mol_type = other RNA
atggggtatgtgctgagagatgaggtgttgatcaagaggccaattatctttttgtgtggcccttactttaaaaagggcaataaaagcgatcgcagatatctgttacgtaaatgcttcagaaagcactacggggacggggtgctcccgcttatcattgacgatttcctgactgaggataatattaaggaccccaacattaacatacagctcctagaggaaatatttgccgctatctcctgcaaaacctacattttcttagacacattgtctgctgctagcgaacttggcctctttatgaatcacgcctttaccaactcggtggtggcgtatgtgcctaaaaaatccgacattctcaataagtccaacataggatatttcgtcaaggatgtgattctcaaaatgaattctgaacaggctaagtatatcgagtacagacccgcaattactcgaaatgtgattagtagcgactatgccgtcgagcactacggatttatcgctgatatcgttccagagaatatcgaaaaggagatcgcctcagatatcatcttcaaagacaagaaggagaagttactgtatacggaggagaacgaacagtatcccgacgacgactttcatatattctacaaaaagcgtgatggcaagatgattttgcatatcagcatcgggatgctatttaacgtggttatgtcccttatgtacgagttaaatcagtcaaagttggtcacgaataaagaagcaaccattgccgattttaacgtggacgtcatacaacggatcaccaaagaagttttcctgaactatctcatcaagaaaggcattccatgtgggaaggagatagaactttacaccaaattgagctattccttcgacagcatcgtttaccacatggtcactttctgttatatataccattgctacagcacatatagggggctccgcttagtagatagacatatggatacagttctggatgcatgtgaggaaatcagcgggaataaccccctgcaagtattcggaataagtgaggaggattacagtcttgtggaatgctgtgccagggaacagcaaaagttctacacttctttcaccattactaaaggcggcaaaaaaagggagctggtcaagtatgtggataccgaaatgggagacgctatgcgcaagatacacgagaaaatggcgtcatccctgcagggaaagtatacatcctctgaactgtctttcgcatataaaaagggtgggagtatcaagaaatgcgtcgagctccacaaaaataacgacgcctacatcaagtacgatatcagtaagtttttcaactctatcgagttcgagaagctgtttgagaagattaagaaggtgttcaacatagattccgcgtacgatgtcataaccaagaagattatcgcctcattttacttccaaaagaaactgcctttgggtctggtgatctcacctctgatgtctgacatttatatgcttgactttgacgagatcattgcagaattctgttccatgcgcaattgcatttatacacggtacgctgatgacatcctgatcagcaaaaaaaccatgtttattgagtcagagtaccaggaaattaatcaaaaggtcgagctgtttctgaacgatctgaagctgaagatcaactctaagaaaactaagagggtgtttctagaaaaagacggtcagcacatcaagtacatcggaatcaacatagtgcattttgacacaggaaacaaactgagtgttggtcggaaatacatttacgacgtggttaatgaatactatcagtacctggaagatcttgagatgctgaaagtaaacgactacgaagacgaacgggaaagactgttctatcaggagcggattatcgccggcaagctagcattcattcagtcgattgagggttccgatggatggcagcgaatccgagcccgcttcggcaagaatgcctatctctgcgagaataaccggctcagcctcaacaatctcagggacaaagtaggctga

SEQ ID NO: 12121 - RNA, 2718 nt, synthetic construct
  source 1..2718: mol_type = other RNA
atgtccaagaccaaaatcgctgacatttatgccggcttacctgatgcaaaggaagcaatccaatacgaaggcatccgagacttcatggatgccttcgtgattcccccggaatttcccctcgacgaggggctggccagaggtaacaagatgtttattacgggtaataaaggcatgggaaagaccgccgcactgcgatacctgaacgactacttaagtcggatgaacaagtctaccaaaagttcatttatgctctttgaacaggactacaacgacagacgcaaggccgagatgttaaatcaggcgcgctccagtctgtgtctcctgggaatagagcctgatgaaaagatcaatcaggacgacttcagttatatttggcgatggcatatcttcatgaccatcctcaggcagaacggcgagaatatgagggaagccattttcctacaggatgacacatggaaacgcttcaacaagttgctgtttagcgtcatcaagccagactttacaccaaccctgtccggcagtctgagcgttgggctgccctttttcggccccatccagcctgagattacactgaatctacccgagatccgcctcggtaagggcaagggaacttttgaagagataatggaggaggccactgattgtttcaaggagctgatccgctttaactcaccatattatctattcatcgacgaactggacgtctacaggggccaacgggaggagtatttgagagatctcagaatggtgcgggacttaattcgtgaggtcaagtttttgaatcgcctgatgcaaactgctgggtggaacaacactaaactcttctgtaccataaggcctgaagtgattcacgctatagatagagagcttagcggaaatattggtcggcagataacaggctttgactgcccgcttacctggtttcgcaatacccgcgagacatacacgcagccaatcatgcacttactgatgcgaaggattgagctggccgaagagaagaacggggagcggatcggaagcgaggaagaaagatataaaaggtggttccctcaaggtgagacgggcgaggagcctagcgacatttttcggcggataacatggtcaagacctagggacatcgttagatttctgatctgcgcagggaaccggtgcggtggacaaaaagcttttagcgagactgtgttccaggccgtgaaaaaggattacagtttcggatctctggaagaggtgaaaaccgagttgctagccctgtacactgtggaggaggtcgaagctatgtttgactgcttaagagggttgcccgcatgtattaccctcgctgacgtggcacggcggaccgaatctatgaagtgcaagcccgtttccgtttatggccttcagcgtgtgctgggcgacctgtatcgcgtgggggtcataggccagaaaaaaggaaatatccttcggtggcagcacgagggagatgatgggctgttctactctggtgactgggagattgtgattcatccagggctgtgcgatgcactttatatccaggaagtggaaactagcgcgcaggaacaggcccaactcgagacgcagcagcacacctcagggaccaaaagcactaatcaggaactgcaggtcaaggattctgctacaaaacctaaagatcccgtgatgtcatccgaactttcccacgaaatgaaggcccaccaagaagaagcgcgtgaggccccaatttttggtctgtccgaggagcagtatcaattacttctcgatagtcgcaagacaccaagcctctattttcaggcgtttactctcaagacaaacggaaaaacccgtgaactgatcaggtacaaggataatgagtacggagagaagattaggcaggtccatgagactgccgctaacgacctacaaaagcagtaccgccagcatgaggcctcgtacgcatatcgggctgggggatctatcgaaaaatgcgtttccgcacacgtgggcagcacatgcttccttaagttcgacatacatcacttcttcaactctattgacgctgcacttctggcctcagaaatccgagcccagctgcatctgacggcactcagtaaggagagcgtcgaggaatttgtgcagtgcttcttcatagacggcattcttcctctagggcttgttatctcaccactgctcagcgatatctacttgcactctctggacgagaacatggagactttctgtaggcagcagcgatgtatctattcaagatacgccgatgatatcatgatctccggagtagggctccagatggatcagatggaaaccgtcttctctggcaggctctccaatcttttgaaggagaagaaactcgagatcaatcccttgaagacccagaaaatgttcctgaaggagtctggccagtatattagatacgtagggatcaacattgtaagggctgccgaaggaaatgttctgacagtgggcaggtcgtacattcaccagttggcaaaggatttcctcgactttgcgcggagaaaagatgacgcgagaacaaaaaatggggaggctctgtccgaagccgatcagcaatatttgttttaccagggtagaaggttggctggcaaagtacaattcgtgaaacaagtagaaggcgatgctggagtcgaaaaaatactgcgccgaattcaaccgcattggatcgtggaagacgaggccgatctgatgcgtttctgtctgggtaaatga

SEQ ID NO: 12122 - RNA, 2001 nt, synthetic construct
  source 1..2001: mol_type = other RNA
atgtgtaaaatcatgatcctcgtgttgaaaaagaagatcaagatagaccgtccgataatcttcctttgcgggcctttttacaaagcctcagacaaaaatgatcgtcggaacatactgaaagactttctcttaaccgagtccgacaagaaatgcatccccctgatcattgatgatttcgtaacagaggagaacattaaggacactacgatatccattcaactacttgaggagattttcgcagcgattgcacttaaaacttatgtgttcttggataccatgtccgcagctacggaactaggattgttcaccaataatgccttcattaacaaggtacaagcctacatcccagtggagaacgacattatttacaagaacatcggatactttgtcaaagacgtggttctggacaataaatctggcagagtggcctatatggagtaccatcctcgaatcaaaagggtacccattgctacagattatgtggtcgagcactatgaattcatcaacaatatcctgcctttaaacattcaggagggagttcgcaaggacttacacagctcactctggaacgaaaaagaagttgagatcaatgaatctgcagagctgccctcagatcactacaagatcaattataagtacgatgtggaggataacattttacgggttaacctgagcgtccagtatctattttacatagtcggcggtcttatttattctgaatacagcgatgagcttgtcaaaaatgagactattgactttgatgacagttgcatagaaatcctggaggagaagattaaactgatgctgcggatgttcattcagatgaatatcttctgcggaattaatcagaggacatacgtgcaggtgaacaccgtaataaaggataagatgagcaatatcatccggcatatggtgaaattcatatttctctaccatcagaagtctcgcctgaatgggtatttcctggttaacaaaaaatcgatcttgaaagaggtcatcgtggggaaatccccaatcgatttctttcattttaccgagaacgacattagctacatcaaggacatcaattctaataagggcaaatactacgagtgtctaaatctgaaactcaagggaaagaagagagagctggtgacatactccgagaatgatagggaaggtaaggctaactacgccaaatatatccacaagaaagtggtcagcatcattctggagaactaccagtattctaattcctcgtatgcttacagaaaagggtatagtattaaggattgtgttgcgatgcataagaactccacctttttcctgaagttcgacatttccaagttctttaattcaatcgacctcgacatcctggtgatgacaatcatggaagaattttctatcggcaagagctttaagatgcacgttgaagaaatagtcagtacttgcttcatagataacgaaatgcaactcgggctgatcctctcccccattctgtcagatatctatatgaagaagttcgaccaggtgctcgagaggatgggcaaggaatgtgggttcatatatactagatatgccgatgacatcctgattagcagttcaaacatcatcgccgatcaagacattcagattattaagaacgctatacagtctgaattgaagctgctgaaacttaaagagaacagtaagaagtacaagaagatttacctcaaaagcatcggacaacacatcaagttcttggggttgaatattgtcagaatgatggacgagaataagatcaccgtaggcaaggaatacaaaaactatattgccaaagagtaccttcagtttatcgatatgaaggtgaacgacgaggaagacaaaaaatgtaagttttactggggaaagcgcatcataggttatctgagttttgtgaaaatgatcgagggtgagaaaggcgaaaacgaagtgtatattcgaatactcaagagcacaggcggcaggattgcatttgaacgggagcgcctgcagggcgaatga

SEQ ID NO: 12123 - RNA, 2046 nt, synthetic construct
  source 1..2046: mol_type = other RNA
atgtatgttattgacgataagatccgaatcgataaaccgattgtgtttctgtgtggcccctattatgatccaaaagacaaatgtgacagacggacgattctgaaaaagtacctgatcgataaggggaactttttaccacttatcatcgacgattttctgatcgacgacaatatcaaggacaagaacattaacattcagctcctagaggagatcttttcaaatatttccgttaagaccctgattttccttgatactttttctacctctgcagaactcggcctgttcgcaaacaatagcttttccaataagataaccgtgtttctgcctcagaagagtgatatcctgggggtagataacatcggattctttgtgagcgacataattcttaaacaagatcccaataggatcaattacttaagttatcgccccaaaatactcagggtgcctgtcgcctctgactacgtgaaagaatttttcggcttcatcaacaatgaagttccgaagaatatcaagaacgaattggacaaaaacttgattagtaagcgggagaattattacatcaatatagagttcgacgacctgaaccttagaaacaactcctcgaacataaacatcgagaaaatatccgtgaatgacaatgggcgtgatatcaccttctacatatcaatacacatgttgttctaccttgtggtcgccatcgtgtataagaattattacgagaagttggacggcgacaagaaactatcgaaaggcaaaaacatttccaacaaaaaggacaacacgaagataaagaacaataagaacttcaccgttaaccaagtgaagaatgtagaaagactggtgcgagagtatattttcaacacctattgcaaccataagggctcctataacaaaaacactaacgtggtcattgaaactaaactggagaggaagttatttgagatcattaagcacatgatgaagttcatttacgtgtatcacgcccatgcgaaatatatgtccaacaacttcattagcgaccccaataatatcattaaagacgtaagcgaggaaaatccagtgaaaatgtttaacatcagcaaagaggacttcggtttgatcaacgatataaagaataaccctgatcgctactatgagaagcggattattataacaaacaagaagaagcgcgagatcgtcaaataccgcaacaatgattttgggatgcagattaggaaactgcacacgaagatagctaacgtcctcgagaaaatctacatttttcacgaatctagctacgcttacagaaaacgaaaatcaattgtggactgcatcaatacccatcggatcaataattacttcctgaagtacgatatcaagagcttcttcaatagcatcaataagaagatcctgctcgctggcgtgtgccatgaacttaagattgatatcaaagcatacggcaaagagattgagagcatctttagtacatgcttttacaacaacaagctccctctggggttgataacttcaccaatcctgtccgatatctatatgaaagtcttcgacgttaaactcacaaattacctgaccgagaagtataacacttgtgtttatacacgctatgccgacgatatcctgatttctaatggtgagatgctagagaaagaaaaggaagatgagatcgacaattacatcatcaatgagctcaaaggtattagtctaaagctgaacgacaagaagatcaggaaagtcaagatttcagaaacaggagatcatttcaaattcctgggtgtcaatatcgttaagggagaggaagacaattacctcacagtgggacgtgaaagaattaacgatgtggccaaactctacttaaagtacaggcacattaaagacacctacttgaatgataagaccaacgataaatggatcttttacacacagaagagaatagtaggacagatcgcttttattaaccaggtagaaggaattattggctataaaaagctggaaaatcggatccttaagtgttctaaggggaatgtcatactcactaacaatattcagtga

SEQ ID NO: 12124 - RNA, 1980 nt, synthetic construct
  source 1..1980: mol_type = other RNA
atgggtgaaaataaaatggcctacatcttgaaagacgagatcaagattaacaaacccatcatcttcctgtgcgggccatattataacgacctggacaaatccgacagacggaagatcttgcaagattttctgcttgagaactttcccaagaagtgtctgcccttaatcattgatgattttctgactaaggagaatatcggtgacaatgagatatctatccaactgttcatcaagattttcgccgggatctcgttcaagacctatatttttctggataccatgtcctcagccgtcgaactcgggctctttacaaacagtgcctataacaatagcctgtacatcatgttgccttatgagaaggagcggaattgtggcaacattggcgtgtttaccagcaacgtggtattggaggacaatgcagatcggataactgtgaggtattatcatccgaaaattgaacgaattgcattctcgaccgataatgtgggagagttttacaaattcatcaacgattgtctaccagagaagattcggaaggatatcttacaagattacgcggaaaatatcaaccttgagcacgagattcagattgctcataaagaggattatccacagaacgattactgtgtgaattaccagtacaataacactgagaatagcctgattgtgtttataagcgttaagctgctgttctacatcatttgtggcattgtttactctgagtatacagaaaatctgcgcaaaaaggagaaactggatttcgacagctataatatttacacaactgtagcgcatctaaaatcactcatcatggccttccttatgaagcacacttttgtaggaattaactctaagaccaaagtcgacatacagacagttctcacaagaaacattgaggatattgtgaagcacatcatcagtttcatcttcacataccataaaaactccaggcttaagggttactttctcgtcggaaagaacgagatcattaaagaactggaactgcagatttcccctgttgatttttttgacctgacagtgaaggacatcgaaattctcaatctgttcaaaaacaagcctgacgactttttctctacgttcgaaattaagacgggatataagaaacgcaaaatcactacctacaagaacaacatatacggcaatgccatgcgcgagttacatcaaaaaatctgcctcgttcttaacaagcagtatgtgtttgatatccacagttatgcctaccagaagaacaaatcagtgaagaaatgcatagagtgccacaaaaagagtaaaagcttccttaagttcgacatccacaagttctttaattccatcgacaaacgaaaattgagtcagaaactcctgtacgaattcgaactggacgaaatttacgaagagcagttgctgaatgtgctggacatatgctttgacgaggaaaaaatgcccattggactgataacctcacctatcctgtccgacatctatatgaaaaaattcgacgtggaattcagcaacgaattgggtgagaactacatctataccaggtatgctgatgatatacttgtctcatccgccaataatatctctctcgaggaggaaattcgtatcacccgcctcctcgtgtctaagcttaaagttctcgggctgaagatgaacaacaagaagtacatgaagagaaacttaaaggctatcggggactatgtcaaatacttgggaataaacatagtcgtggcaaagaatgggaatatcatcaccgtagggaagacatataaaaactacatagcgaagacttacctcaggtacattgaaattgatgatgagaatcgtgaagagaaattctacttaggcaagaaaattgctggctatctgtcctttgtcaatatgatagagggcgaagacggcctaaagaagatctacaccagaattgagaagagcactaagggagaaatcaaaattgagggcaagatcacggacctatga

SEQ ID NO: 12125 - RNA, 1764 nt, synthetic construct
  source 1..1764: mol_type = other RNA
atggtgtatgccctgaacgataaaatcaaaattgaacggcctatcgtcttcctgtgcgggccctactacaagagtggtgatgtctctgatagacgaaggatactgaataaagttctacttgacgaatacaagtgtttgccattgatcattgataactttcttaccccagataacattggcgatgacacaatttctattcagctccttgaggaaatcttcgctggaatctcgttcaaaacatacatctttctggatactatgagctcagccgttgaactgggcctgtttacaaacaacgtttacaacaacagcatttcagttttcgtgccgcacctggaagaccgaaattgtggtacaatcggagtattcgtcaatgataatgtactgaccaacaataagaacgtgaagaagatatgctatcatcccaaaatcgaacgggtcgcatttagcacggactatgtgggagagtactacaaatttgtgaacaatcagcttccaacagtgatcaaaaactctatcgaccaagactttgaggagataggcgatcgagagtttaaaatcaaactgaagtgcttcaatgactatcctaaggatgattttgtgatcaactatcgtttcaatgagaaagagaatactctcattgtgttcatctccgtgaagctcttgttctacatcgtgggcgacatcatctatgctgagtactccaacaatttggccagcaaaaagaatcttagaataacctctgaccacataagactggttatggcgcagctcaattctctaattcgcattctattcctcaaaaacagcctcgtagccattaacggaaagactaacatcgtaatacagaccgtgttgaagcggaatatcgatgaagtcgtgaagcatattgtgagtttcatctttacttaccacattaacaggcgtgtcaaagggtactatttaacccaccacggtgacatcctcaaagagctaaacctgaagctctccccccaagacattttcaagtttaacgatatcgacatcgatttaatccgcaagattgacaagagcttttataaggagtttgagataaagagttcgcggaaaaagagaaaaatcgtgacctacaatgatgatgagaatggcaagaaactgagggaattgcataaaaagatggcactcaatctgcaaaagaagtataaattcagtgagtactcctacgcctaccagaaggggaagtcagttgtgaactgcattgagcggcacataaactctgtgcactttcttaaattcgacatccacaagttctttaactcaatcgacattcatagactctccaaacagattagcaatttataccagctggataagttctacgagaagcagctgttagaaatacttaaaacgtgtttcaacgacgagaaaatgcccattggcttgataactagccctatcatatccgacgtatttatgcatgattttgacgtcgaattcgccagtaagctcaataaagattatgtgtataccaggtatgctgacgacatcctgatttcctgttcccatgctatttctcaggatgagctggacaatattatcctcatcctgaagattatgctgaataggaagggattatcattgaacgaaaagaagacagcaaatgtcctgctgaaggacaaaggcgactatataaagtatctggggcttaacatcgttaaatgcgaaaaaagcaatcgcattaccgtcgggaaaaatattaagatgatcctgctgcgcattatctga

SEQ ID NO: 12126 - RNA, 987 nt, synthetic construct
  source 1..987: mol_type = other RNA
atgttcggctacctcaccctctacttcaaagatatggagcgggccctcagtgttgcaaatggttatttagcggaccccgataagtacacaaaggtacacgttgtgcctatgaacgggaaagtgagaaaactcagagcttatgcagacaataaagagggtaagaggttacgtgaactacatgaggcagtagcgagatttgtgtgggacgcttttcaaagctctaacatgtcgtacgcctacaagaagggcaggagcattgtggattgcgtgagggcccatataaacggaaaggtctttctcaagacggatatccacgcttttttcgacagtacaaagctgagcactttcctgcagatgtttcttcggagcccaaagtttatggcggacaaacccaagctgaccactatactgtcagcctgcttttacgacggaacccttcctcttgggttcgtaagcagtccggctatctcagacttcttcctccacgaggtggaccgacgaatgcagatgttgtccggaattgtttatacccgttatgcagatgatttcctgatctcctccattaatgtcggcgctcagttcgtgctggagaacgccctgaaggtgctgaaaggggaaattcagaaactggggctggaactgaatgaacgcaagacgttctaccgcccattaaaaaacattggagactctatccacttcttgggcttgaacttggtcagaacttcttaccctttcaaccgggtcaccgtttcaaattcatatatcagggagacatctatcgatttggccgccgctctacagaaatccgatcagaaggcctatgaggccgcccggggcaagatttcctttgtgtctatgtgtagtcccgagtcctttgaaaaactcaagaagcttgtcatgatcaaatttcaccttgatctggaggaaatgctggacagcaagacagtgcaagaagctaaactggcaatacatctgaatcgcaaatga

SEQ ID NO: 12127 - RNA, 927 nt, synthetic construct
  source 1..927: mol_type = other RNA
atgaaaatgccagagaaatgcttctccaccgcgaaggagtaccagtgcaatcctgccgagtttgtccgcgagcatgttgtgaccattaacggaaagaaacggacactgcgagcatacgcctacggatccggtggggaagagttacgtgcccttcacactgccgtggctcagatcatatcctcgggttatatgcctagtaatgcaagcgtggcgtacaagaagggagataacatagtcaaatgtgttagccgccacctctccggctgcgttttctttaagagcgacatcgtcagctttttcgaatcaattaccctcgagaagtttatggaccgcctgaaggactccctactggataaaaactcagacctaaagaagcttctccccgcttgtttctacgagaacatgctgcccttgggattctgttgcagtccaattctgagtgacttttacctcagcgacatagataagaaatatgaaaatgggcaagggtatgtgtatactaggtacgccgacgatttcattgtatcatctcgagtggagtccggcgaggaaatcttggaggaattgagggaaaagttgtgggacgatatggaatctgtcggactggaccttaacgagaaaaaaacgtatatccggagactggaccatgatggggatcacttccatgccctgggcctcaatatcgtgagacgtgagaaagggaagaatatcatcacagtgggcgatgcttatctgagggagacatgcaaacagcttacagccatcgtcggcggcgaaactaataacgaagaagacatttgtgcagtgaggggtaaaatcgaatttattcggatggcttctcaagatagttaccggaagttcgagagactggtgaaggtaaagaccggcagctctttacaggcaatttctgagagactgtcagattga

SEQ ID NO: 12128 - RNA, 960 nt, synthetic construct
  source 1..960: mol_type = other RNA
atgaaaaagatcgacaagctaatccgtgttgctgaggggtacattgccaatgaagacgcctacatcagacactttgttgtggtgattaacggaaaaagacgtaagttggctacctacgcaaacagcgaaaatgggaacgctctccgggagctgcatacttatatggcctctttcatacgccgactataccaacaatctaatgcttcctttgcatatgccaagggtaagaacatcatagactgcataaaagtacacatccggtcagacgtgttcctcaaaactgacattcatagctatttcaactccattacgttcgaaggcgccgagcgggtcctgaacagacacaagacgtaccagaaaaactccgattctatgggcatacttctcaaagcttgtttttataatggccggttacccctgggattcgtctcatcccctgtgatcagcgatatttttctggtggcgctggatcgcaagtacagcaagagaaaggatattctctacacacgctatgcagacgattttatcatcagcgcaaggggagaaaattcagtcagcgtgctggacgaagtgcgagagactctgtctgatgatcttggcaaacaggggttgttcctgaacaccaagaagacatacatccgcactctgaaacaggccggtgatgccatccatctgctgggtgtgaacctcgtgaaaaccgaaaatgaggagaataggatcaccgtaagtgacaggtatatcagggagacatcgaagggattctccgacttgatgaattttaatggggacattgaagagaagaccgagctttgtaacacagtttgtggacagatatcattcattcagatgtgtagtcaggatagtttgaacaaactccaaaaaatggtcagggtcaagtgcggctatagtgggtctttacaggcgaaagcaatttgcagagcctgcggccttgagaagtga

SEQ ID NO: 12129 - RNA, 996 nt, synthetic construct
  source 1..996: mol_type = other RNA
atgcggggcaaatattctaaatcttggtctatcgacaccatgtatacagatgcaagaagtaccgtcgagcagtacaacgaagatcctgagaagtatgtacgttcctttaccgtgcggataaacgggaagaagcgcaacattatcacatataccccggatcggaatggagctgcactgagaaatatccactcacgatttgccttcacaatctcccattgctatcagagcatgcctgactccttcgcttacaaaaaggggtctggaattctgacttgcctgtcccagcacctccagtctgacacttttttcaaaacggacatccatgactacttcaactccataaaattcgaaacactcctgagcatgtttcaagaggataaaacgtgtaagaggagaatgaaaaagatcaaggcattactctcactttgtttctacaatgaccacatgcccataggcttcattacttcacccgtgctttcggatctgtatctgcacaaggtggacgaatcgtttctgggaaggtacgacgtcatttacaccagatacgccgacgactttatcatctccggcaagaacaatatgagtagcctagaaaaggccaaaaatgaactagaggaaagcctgagtgagtacggtctttcattgaacgcgaaaaaaacctacttcaggaccctccatcgcccaggcgatgctattcacgtactgggggttaacttagtcaacaacgaccccgatcctaacaggattacagtgagtgaccggtacatccgagagactagcaaagatatttgccgctttcttagcgaatatcaagatcagactaaggaagagaatgagattgccctgtcttccgccatcggcaaaattgagtttatccgcttcgtgagcccatccagctatagtaagctggagaagatggttcgtatcaagcatggggaggccgtggatttgtcaagggctatgctcgagggtttgataaagaagaataattcttga

SEQ ID NO: 12130 - RNA, 2103 nt, synthetic construct
  source 1..2103: mol_type = other RNA
atggcactgtccttcttcctgttcatgtacattaccaacttcatatgcagtctggattccaggcggcctttggtgttcctgtgcggaccagcttactctcctaatccacaagaccgcagatggatcctatctcattatattcagtccaaatggtccgaaaaagaaaaggataagtatgtccatgccttcccaattgttgtcgatgagttatttaagccggacgaaattaaagagaaaaaactcgatatccggttgaacatactggaggagattgtctcgaagatctcatacaaaacttacatcttccttgacaccatgtctacatcatacgagatgggtcagtttactaactttgcctataacaacgatagtgtgacaatattcgtcgacaagaaatatcgtggccgcaagaacaacgcaatcggggaatatatcaggctgtctattgacaagtcattcgtggagtataccgcgtcttatgataataacggcctgatttactttcctgagaaagacggtaaaggcaaaacacgaatccccaaggagattctgaaggtgctcgaggatgacaatcctgtgaaaaaaggctgtttcctgaataaaatccttttcagcacctatatcaacgatctgaataagccgggctacatagtgtaccatcgatccaaagatcttctgagcttcaacttctgcattcgcaacttgttctattacatatcctcggtatataagttgctgtctaagagcagtcaagccctccttaatgagattcctcaaagccccagagattatcggtttaaagagttcgttaagttcttcaaacaggaacttcttaagactttcgtgtgtgtcaacaatagttctaatatctcctttctcctgactgccgatttcagcatcgaagtcaatgtagagaatctggactgtgatgagttaatctatcacatgctgtacatttcgtacaaactctttaacatcaagagctcatctagtaggtatctaattcccgaagcctcagaccaatcatcattcgattccatttacttcgtggacggactcgaaatgtttggactctttgataatgagacaatgtgtgctctggacaaaaatcgttacctcccacacaagcagtgtatctcctttagaaccctgaagataaagaataagaccaggaatatcctagcgtatcggaacaatttttttggggaaaggttgcgtgggcttcatcagaccatcctggacagctttttaagcaagctacccacgagcaaatccagttacgcttacaagaaggggaaaaacacgctcgtatgtctgaagcagcacgaaggtaactactactttgccaagtttgatattcacaagtactttgagtctatccggctgaaaatgctcgggaacaaaatacagaactacttctacaagaagatcaatgctttgcttagcaacctttctctgtcttatagcaacaagaagaggattaattccaagctcacgtccatcctgaaacccttattctacaaatatcagcttcctatcggattcgtgtcaagtcccaaaattagcgacttttacttgtttgaatgcgatgagcgcatgaacaagcagaaagggataatatacacacgctatgcagacgacatcctcatctccagtaagagtaaaggagaattggatgagggcatacggctcctgaagagcctgctcagggaagaagagctagtgctgaatgagaaaaaaactagatttgccgttttgaaccacgaaaatgactcatttaagtttctgggtatcaacattgtgagaagaaaaggcgacttgttcgactataccattagcaatacctacctcgtgcagacatgcaagatgttctttaaagttttcgaggagtgggagtggaagaaggacattaatgaggttattaaggtgaatggaagaatctcctacattaagaacatcagcaacaattcattcaagcgatttctgcacctgttaaaggtcaagtttaaggacggcacaactatctctgacctgtattggcgcttaatctggatggattgcccactgtatctcgaactgccaaaagacattatcatgagctga

SEQ ID NO: 12131 - RNA, 1833 nt, synthetic construct
  source 1..1833: mol_type = other RNA
atggaagaaatcctagccaaggtaagcgcgtctaccttcgtctttttggacaccttatctacagctgccgagtatggtatgtttaccaatgcacaggctaataactttacgtatacactgctcccttacgaagaagacataattaatgatgccgtgggatactacgtgaaaaagtcaatcagggaaaatagggatatcagagaaattgtcgatctggttcgctaccacccaaaagtcaacagatacgctaagtcgtccgacgtggttgatgaattttttggatttatcaaggacgagttgcctatttcaattgaagagtctgtgaagaagtccctcctgaggaacaaggagaaatatgagatcgacttctcgattacaaacgagagctcatccgatttctttattaagcttacgagcgacgttctggaacctcagcgttacaatatactgtgctcaactaagctgctgttttatatcatcgagggcttcctgaaggacgaatacggtaataaatccgagatcctcatcaaccagttcaagtataaccttgatgattatgtgagtagtgtaattggcaacgtgaacagcctggtgattaattctttggtgacacacaataccatcactcccctggaggcagtaaatagtaagtttgacattgacgtggatctcagcgagtctatattcgatgtcgttaagcacatgattgagttcctgattctgttccggaacggagggaataaatactccaagaggcggtctttgatttcaaatcccaacgagatttttactcggttcaaatcaaagatctccaaaaacgatagctcgtttacaaatatgatcacaaatgacaagcagctgataaatttcacaaaaatcgccctgcaaaaaccttcctatgagtataacaagttagcctacagcagtttcatagtctcttctccgaaaaagaaaagacggatagtaacttatagcaaaaccgagtacggccagaatgctcgagtgctgcacaagaatatcgtggcattcttaaataaccacgtgctcagtgatagcaattcttacgcatataagacaggcagaagcacttacgattgtgttttgccccatctgaatagtcaatacttctttaaagccgacatatcatcctttttcaacagcatcaactctgacatactcgtcagcaaaatagtgaatcatatcgaggactttaacgttcaacagagcactattcgagacatccttcatactcagattgaaaacatggtcaacaattgttactacctgaacaagctcccaattggatttgtgagctccccaaaactaagtgacatttatctcttcgagttcgacaaggaaataggggaatactgcaaaaaccgcaacaggatctattcccgctacgccgatgacatcatgatttctagcgaaaacgagatcgacatcgagtcaattaaaaagtcagtgatcgattccctttcgaaggtaaagttgacgattaactctaaaaagctcgaaaacaagaagcttctgagcattggggataatgtgaaattcctgggtctgaacattgtgaagaaagagttaggcaacaccatctccgtggggaaatcctatgtctctgaagcgaccatcgagttctgcgatatcgttcttaataaagacatcaaccaacgtgtcaagaaggtcattggcaagcttaagtacataatctaccaggaccccaccaagagtaaacagatcgagcgcatcatcaaaagtaaactcctaagtagctataacttcacctcctccaatgattttatgaccttgtataaacagctgtcagagtga

SEQ ID NO: 12132 - RNA, 2073 nt, synthetic construct
  source 1..2073: mol_type = other RNA
atgcttgtcccatcatttcctatcagcatcgccctgccagtaagccagtcttcatttatcaaatggctgtttttcgtttgggagaaaatgatgaatcgtaccccagaggaggtgatcaatctaagacccttggtcttcttgtgtgggccgctgtatgacccttccgacaaaaaagaccgacggaaaatacttcgccagtatcttacacggtacaaaactacgttaagttacaacggtaaagactatgtcattgagccttttgccctgatcatcgacaaggtgtttaatacagaggatctggagaataaccagaatattgcactcatcgaagaggtgatagcggcatgtgcttacaagaactatattttcatcgacaccatgagtactgccctggagctcggactgtttgctaactcatattcacagaatagaaccaccgcattactacccaaagactttagaagcttcaagccctccattggatatttcgttcagcagactatcaagaagtcggataatatcgccttatgcatttatggcaataaacgcattaacaagttcatcgacggaggcagacaggtgatcgaaaacctggtcgcctttaaatcgcaccagatcccaagggagatcgagagggatatcaagaaagatttttccaaggggattgaaagctttattctccgcatagagttcacaacaaatattaaagacgcggagaagatactctatcaagtgaacaccgaagggattcggatggttatccccccacgcatactcttttacttggtggaaacctttggctccatcaacaatatcaaaaatgctctgctggattacttcgaatattacgagtgtgagaaagataaggagctagtgatcatgtctattttgattcgaaagggactctgcattctcgagctcgattctcccttcgagtattctataattgacgtgattggtagcatgagctacttcattgagaaactgaaaactcgcgtcgcctttcaccagaactatgaaaggcttcggtacgcccctatcaaacggtggaggagccgcaaaaggtttagtgcttgtgagctgctggggctggacattatcgaaatgcggcaaatgcaatcactgttcgggtataacaagaagaagagtgtgatctctaagaacctgcttatcaacgggaaaaagaggaagatcaaaatgtactcttgcacatctgaaggtttcgctctgaggaatttccatcttcggctgatgaaacagctccagaagcttttcgaactccagccatattcctatgcttacagaaaagatcgctctattctgatgtgtatgaaccagcacatcgacagcaagttctttttgaaaattgatatccgagacttcttcaactcaatctccaagggcaagatgaataagattatcaagtgccatctttgttacgatccgaaacaggcatatgaagacaacgtaatatggagaaagagccgttacttaggagagtacgtgaaggagtggttaggcattaaggagatcactgacatatgctttgtaaatggccgtctggcacttggaatggtgacatcccccatcctgagtaacatatacatggatttcttcgacgccagattccatgataactaccctgaactcgtctacaccagatacagtgacgatattttgatttcaagcggaaaatggttcgattacaagtccattctgaatttcatcgccaaagagctctgctacctggggctggaaatgaatgaacacaaggttgggttttataagctaaaacaggccggcgatcacatcaaatttttgggcctaaacatagtgcatggccctgcggaggaaaactacataacggtaggaaagcaatatatcaaggatgtgtgctccaatatcagtcagtacgaaaagaagattggcttgttcaagaaaagccagataattggtcagatagagtacatcaagtttatttccacccgagactatctgcaactgcaaaagatctacaggattaagaatcacaaggacctcaacgttgaagaattgaaccgggtcggtctgtga

SEQ ID NO: 12133 - RNA, 5223 nt, synthetic construct
  source 1..5223: mol_type = other RNA
atggccaagttcagttatgagcagtataaaaaggtggtcggaaaagccactgtcaagcccgagatcaacgttgagagcgtcaaagggtatctggataacccaaatcagtatgtgtttccgtttgcgattaatgaaaaaaacgggaaaacacggaccattattacatacaatgagagttcagacgggaaaaacctgcgcaaagttcatgagctccttgcaaaagacttcgaagataattttgccgagaggaaccaatacagttacgcataccataaaggcattagatgttacaatgcgctggaggctcacctgaagagcaactacttcataaaactcgacatccatcatttcttcgagagtataacgctggagaatttcttggatatctatggtgagtacttcaacaaaaactggcgggaaatccttcagtacctgttctactttggctcactttcaattggttttgtaacctcgcccttgttatcggatttctacatgaagaagtttgacaatgccatcgaagaatatctcaaagattacccagagctccacttttcacggtattccgacgacatcatgatctcttccgagtccaaggataatgataccagtctggaagccttgttcatttttatcaaggagcaactcaagcagttaaggctcgaaacaaacgaatccaagaccaaaaagattaaactgaacttagagaagcacaactctttttcattcctgggcctgaatctatcgaagattgatgaggagaacaacaaggtgactatctctaagaggtacattttgttcatcctgtttctgatcgcaaaacagaaacggtataagaataattgcaccccactcgacaacgagatcaagtccagagtcgcatacttggcctataatagcgaaatttcgttcgagcgatttcaaaagaagcacattaacatctacggtgaaccttacaatttcattcctaaggtcttagagaagcgcgaggttggacagaccaccgacaccataaaagattactcagaatataaggacgagtttgagttcaatatccactccaaagccgatggtgcaaacacgagcggctaccagatcaagaatggcatcactctgactaagtatctggggaagaaggaggaagtgattataccagactttgtggacattatcggtgactatgtgttcatgggacacaagatcaaaaaggttatcctcgggaacaacgttaaaatcatcgggaatgacgcttttcgcaactcaaccatcgaggagatagtgatgaacgattccctgcgccatatcggaaatggagccttccagaactgcaagaatatcaaaaaagtcgtgattccttcttacattaagtatgtgtccaacaatacctttgcggagagtgggctggaggagattaccctgccagaaggccttataaaaattaagatgggggccttcgctcagtccaatatacaaaatattaacttccccaccactttggaagccatcgaatacaatgcatttacagaatgcactaaactcagcagggtggatctgagcaaaacaaacatcaccagccttggagtaggggctttcagcaattgcgtgcagctgaaggaggctatcttgcctgaagggttgtctactatcgagaacaacctgttttctaactgctctcttctgaaagagatcaacatacccgcgaaagtgggctacataaataactcagccttctccaattgctattctctatctagcattaaagtctctgacggagtggccttcttgagtcgaaaagataatgcctccatagtcaagaagaaccacgaactcctgtttacactcaaggacaagattgatgaagacatccagattataggacgtggcctcttcgctggagtggctataaagaacatcgtaatccccgagggagtgaagatcataaaagaggatgcctttaaagggtgtctttggcttaagtctattactttaccagaaagtctggaagaaatcggcaataatgcatttgagaagtgtatttcccttgaagagatcgttattccctccaaggtaaaggcactccctaacggcctgtttgctaactgctccaatctcgtgaaggtggttatgggcgaagaagtcacctcgattggcgacaattgtttcgctaatgacaagaagctctcaatcaaacttccgaaagaactaatgctcatcggcgagggtgcctttaaaaactgttacaacattaaggacctctacataccttacaaggtgaaagaaatcaagaaaaacgctttcatcggaatgagtaaacacctgaacagcattaaggtggataacaaaaatcttgtgtactcaagcggagaagacaataatattctcttccttcagaagaagggcagcttgatcttggggaccaaccacagcactatccccggaggcataaagtctatcggcaattacgcatttgcctataattctgaactagaggagatagatctgcccgagacagttaccactatcggagaaagcgctttcaaagggtgtacaaacctgaggaaagtgaacctccactatgtgagtaagattgaaaagcatgccttcgaaaatacacctaacctgaaggacatctttctgccaaacagcctgactcatattgaggaatgcgcttttctgaactctggcctgacgtcgatcacactgcccaactctctcgtcaaattagacaagaaagccttccggggttgccgcaatgtgaaagatattcatattcccgcatcctatactagaagcctcagcgcactgttgaccactggttccgaggagatcaactacatcgaaattgacccagataattccatgtaccgctgtgtagataacaaggtgatcatcattaaggcaataaacaatgaccccgaaaagatcctgttcgtttgcaacggcgtgaaggaaatacctaatgtgcctgtaattatggacatggcttttaagggtgtgaaggggctgaaagagatagtcattcccaacaaagtttgcgtgattggctcaaacgcttttgagagctgcccggatcttgagaaggtcacatttaagtacgacgacgatatcgagattaaggacaatgcatttaagaactgtcctaacctgaaagaagtggtattaccgaaacttctcacaattatctcagccaacctcttttataactgcccgaatctgaagaaggttaagattccagaaggagtgaaagtcatcggtgatcgagctttcagctacacgggcctcgaaaaggtaaccattcgtaaggacctggtaaatattggcaatgacgctttcgcatccacaaacctgaaagacgtgattattgaggaaggggtaaaaaaactcagctatggtctgttcacagagacaaaaatctccaatatcacacttcccaattcactggaggcggttcctgggaatctgttcgctggttgtaaagaactgacatccatcgtgattcccgacaaggttgcttccattggctctagctccttttccaattgtacctcattaaaagaggtgaagctcccagacaatctggagatcattgaggagagcacattctataagtgtgtcaacctggagaatattaatttcccaaccaagctaaaagagattaaaagtttcgctttctaccactgccacaagctgaacgttccagctttcaacgagggtctggagtcaatcttttccaattccttcaattctgtggagacattgaaagatctggcactacctagtaccttgaaatacttcaacaattctgccttcgcctattgtccaattgagagtatcaaggtcagccctggggggatgtatcaatccaataacaatgcccttacttatcacaacaaaaacgcgttcaatgagctaatactcggctgtaaaaatacgacacttgacgactcaataaacttcatcgccccttatgcttttaacaatatcgactctctcctcgaggtggtcttaccgaagaacgttaccaccattagttctaatgcgttttctgattgccacaacataaaacgtatcatcctgaacgacaaattggaatcggtccagagcggagcctttgattccaacttgtgcatcgacgaactgaaaattcctgccaataccaagtactttggctatctgccaaaggaagttaataagatcgccattgataagaacaacattttatacagcgactttggaattggagtgtttgcaactaaggacgggaagattctaatgaccactcccaccagtagcctgcctgtggaaggaatcacaagtatcaatcgggactgctacaacaatcgcaagttcacaaaggtcgagttgccaagtaccctgatctctcttggcggctttaataattgcgagattgatgagctctttatcccagatagcgtgaagaccatatccctgttcgccataaacagcatcatcaaaaagatcacagtgtccgagaacaacccctattatatcgcctctgaagatgggaccatgatcttaacgaggtcaaagaaacaaatcgtgtatctgggcgaaaataccgtcatccccgagggcattacggtcgcgacgacaaatgatttgatcacctcaatccattacccttctactatatcagacagagccttgagcttggaaccgagaggcataaaacagatcgatatcgccaaagatcacccaactgtagccgctaacaataataccctatacaggaagctggatggaggcttaatctatgccgtgaatggagaagagattgcggacgaggtcactaaaatcactaacctcaatctgggaaagttcgacaacgtgattatccccaagaacgtgaatctgatactgcccagggcactaggcgggcttatcattgataacatcgccgcacataaagacaacaagatgttcgatagccgggataactgtaacgctataatacatacctctacgaacacggtactttttatcgcaagaaatgggagagttcctgacgggtgtgttgtcacacccacaactattgaccagagagtgaaagatgtgacaagtattgagattgagaacaattacagtggttatgaaactctgtcatacaacgtcatacagcgactaaataataacccacagaccactactaaaagcagtttctccaccatagcctttgacagcgatgatgatctgcccttctga

SEQ ID NO: 12134 - RNA, 999 nt, synthetic construct
  source 1..999: mol_type = other RNA
atgatcgaagtagtcgcctactcactgagctttagcccacagtttgtagctgagtgtgctgggagctctccctggtcccgatcattctaccgcagagtgtccatacctaagaaaaataaacccaacgaacgtcgtattatctatctcccatctccagagatcaaacttatgcaacactttcttgttgagcgctacatttctaaactgcctgtccatggctctgccaccgcctataggcggggaagcagtgtcgtcaagaacgctaaggcacacaccggtaattcccatttcctccttatggatatagaaagcttctttgacagtattcagaggggtagagtgaagagaatgttgctaaacaatggggtgtttgtgaacccggcagatgccgagatgctcatctcattgtgtacttacgacggacatttcgtgcagggttgtgtgtccagccccagcgtggccaatgcgtacctctatgagtttgataacaaaatggatatgctggctaggggcctgccaaatggcgtgtatactcggtactcagatgacatagtgctgtccagtagtgagaggattccggggcagatcgcagcagaagttgcggccgctttggctgagttcggattgcggatcaatcacaagaaaacacacttcatctcgaatcgacaacgcatccatataacggggattagattgaaggacaacaagaagctaggcctgaacaccctgttcaagaaggagttaaaaaacgacgtttatcagttctggaagaagtgctccttatccggcgcagatctgaaagacaaaaatagattatacggcaaactggcctatcttaagatggccgacccctcttactacaacacaattatcaccaagtataggttcggatgccgcactctcctcgactttctgcactgcctggtcctggaaaatgatcacctgatgctccctcctgacaaacggtttacagattgctctagtaaccggattgaatga

SEQ ID NO: 12135 - RNA, 960 nt, synthetic construct
  source 1..960: mol_type = other RNA
atggggatcgtgagggaggatatttctgacacctttaacatggacatgaaacgggtttccatttatgtgaacaaatccaatcagttctacaagaagatagcgatacccaaaagaaagggaggcacaagagaagtctatctgcctagctccgacattaagatgttgcagcactacatttctgagaaatacttcagcaaaatccagctgagctcaaatgccaccgcctatattaaaagcaagtctatcatcgacaacgccaggccccacatcaaaaataagcattttctgtttaccgacatcagcaacttcttcgataacattaaacgaaatctgttcagtgagatactgttgaaagaactgccttttctgtctccctatgatgtcgaggacatattatccatctgcacatacaaaaatcgctttgtgcaaggagcagtgacctcaccaattatttccaacatctacctgaagtcatttgacgagtttctccaaggcgttgtcaagaacatcccgaatggtgtgtacactagatactcagatgatatcacaattagtagtagcgaattcctaaacgagaatatcacgaaaatcatcgctgacgagcttagcaagttaggcctgttcgtaaataataccaagacgtatttctcctctttcgtggatgaaatcgagattactgggctcaaaatctcaggtaaccgtatcagtctctctaacaaaaaaaagcgcgagattaagaacatgatctaccacaagtttaacaaaaagtcgaatagttccgaaactgctgaacagattattgggcatatgttttatctgaggcaaatcgaaccacagtactataatacccttaacttgaagtacaagaagaaaaagaagctcctcattgatcggcttttcctgctaaagaatgaggaaaacatacagaagtgtactgcaacatccaatatacagacatga

SEQ ID NO: 12136 - RNA, 969 nt, synthetic construct
  source 1..969: mol_type = other RNA
atgatccctgtgagcacggcaattgctcgtggagtgggtgtctccaccgactacgtgctgggtcttccagaacgggtagattccctatatagatcccgcatcatcgccaaagataggagtgggcagggaaaggccagggtgattagtgtgcccgatcccagtctgcagctggttcaggagtggatagccgactttgtgcgagagaacacctctgaacttcccccatatgtggcggcctacgagactgggcgaagcattgttcaaaatgctctgatacatgcaagccacaggcacctgctgactttggatatccaccacttcttcccgagctgcacccgggaaatggtcgtggtgaaagtgttctcaggcatgtctgctcgcgatggagagacaggccagcggcatcagctgggcgcagatgacgtcgacctgcttgcctctctctcttgctacaagggggcactggccgttggctcgccatgtagccctttcattgctaaccgcattatgttacccgtagatggcgaaattatagctgccttgcctgacggctacgcatactctagatatagcgacgacatttcaatctcctccgacagtagaatcaatacaggacttatcacccagatcgtcgagaagatcctgagcgatcacggcttttcactcaaccgatcaaagactcattgtaggggaacggggaatgccagacgggtgacaggcgtatttctcacatccgatggttctctctcaatagggagggaccgcaaaaaggagttgtgccggcaactgtacgcgctgttgaaaaagcaggagggctccccgagtagagttctgggtatgctctttttttgtaaacaagtcgaaccagagtacttcaacaccttagtggccaagtatgctacttatggactagcgaatgactatggaggggtcatccctgctctccaggccttacgccgtaaaatgtga

SEQ ID NO: 12137 - RNA, 942 nt, synthetic construct
  source 1..942: mol_type = other RNA
atgtctatcgtggaagagatagcctccgatctgggctttagcaagagctatattaaggaaattgccgaaggagctggcggaaggtacaggaaagtcctcctgaacggtcggcgaatcgacgttccttcaagcgatctgaagctcgtgcaagggtggatagcgtgcctgctacaggagtgtatgccctgtgatgcgggctacatcaccgcctacgagcctggtcgctcagtgatcagcaacgccctcctgcacagtgagaatgcccatttaatcactcttgatatcactggcttttttcgctcttgtacaaccgaaatggttaagtccgtgtttagtcagctcagattcgtaagtcatggaagtaacaataagacggctgtaagtaaaaaggacattgagctcctgacacagctttcgtgctacagagggtccttaccaatgggctctccttgttcaccggggatcgccaacagaataatggtgcccgtcgaccaggagattatccgtgttctcccacccgattgctcatatagcaggtattcagacgacatcgccatcagcagctctcagtggctggacatccagggaattgtaggcttgctggaggtcgttctggcagaatatggcttcaatgtcaatcacaagaaagtgcactgctacgggaaaggcgacgcccgaaaaattaccggaatttacattcaccccgatgggacactagggataggcaagtcccggaaagcattactttcccggagcttgtacctgctgcttactagacagaccggatccgcttctgaattgctgggacatttgaacttctgcaaacaagtggaccctgatctgttcgtgaggctcattgctaagtactcctcttatggtgtggcagtcgaatatgggggcgtgatgccagctctggtggagatggcaaatcgcgagggttga

SEQ ID NO: 12138 - RNA, 912 nt, synthetic construct
  source 1..912: mol_type = other RNA
atgtccataattaagatgattagcagtgacctcagcatgggccagaatgagatactaagtatcgccaacagcgctgactcttcccattatcataagttcatctctggcgggagaaggatagacgcaccagatcagatgctgaagttgttacagttctgggtggcggactttgtgtgcatggagacaccagagctgcctgattacgtaactgcctacgaacagggtcgatctatcaagaataatgcttctatgcacgcccaaaatgcacacgtcattaatctcgatatccaccacttttttcagtcatgcactaaggacatggttaaaaacctgttcgcctcaattgagggatacaatctgacctctgaagatctcaaactgttggtgagtattagcacgtataagggacacttgaccatagggtccccgtgctcaccctttattgcaaaccggatcgctctgcccattgactacgacattaagctgaagctgcctaacgacatggagtattctcgctatagcgatgatatctccatctcctccaataactacatcgactatgaagttatcgtggacatcattggcaacgtcctttcatcccatgggttcgaaattaaccgcaaaaagactcattgtttcggaaaaggtgggcgacggcatgtgaccggcatcttcatcaatccagatggcacattatcgctcgggcacaggagaaaaaaacagcttgaaagcatgctttacaagtatctaatgcgtagtaaaggaaaccctaacgagatcctgggcttcataaacttctgtaattacgtggagcccgattttacaagaaggaccctgctgaaatacagcaagtacggatttgcccggaactacagttcagtcgtagattatctccgccaaatcaaaggttga

SEQ ID NO: 12139 - RNA, 939 nt, synthetic construct
  source 1..939: mol_type = other RNA
atgacaaagactagcataagcgcgctcatccagagtgacttagggcttgagacgggttatatagagtctcttgccgaacgggcatcagcactttactccaggattaagctgaagggtcgacgaatcgacgctccctctccagaactcaaactggtgcagtgctggtccagtgatttcctacattcagccgacggagacttgccttcctttgtggccgcatatgaaccgtcctgttccgtgatcagaaacgcctctatgcatgctgaccacgcccacattgcgagactcgacatttccgacttcttccattcgtgcaagcacgcaatggtcgagactgtatttcgtggcattcgatttcagccactcccagatggagagtggttaaaactggaggaggcagatgtaacactgttggctaggctgagctgctataaaggcgctctgagcgtgggctccccttgttcccctgctctggccaacaggattatgctccccttcgatagagatatcgaggcaaatatccccagctcatgtcggtactctaggtactctgacgacatggttttcagcagcaattgctggatcgacatcgcggctctggagtcaactgtggatgagatcctatcgacatcagggtttagattgaatcggcgcaaaacccgctgtagcggaaaaggcgatcgccgcagagtcaccggcgttttcgtcacccccgaaggggaactgagtattgggagtaaaaggaagcacgaaattaagcggctgctgtacgattatttgaccaaggggcaaggcgatgccgacgtgatcctgggccttatacaatttgccatccaggttgaacctaagtgggctagtgtcttactggcaaagtacgccaaatatggagaagcccgtcagtacggtgtgataggagctctccggaacgcctctgagtga

SEQ ID NO: 12140 - RNA, 957 nt, synthetic construct
  source 1..957: mol_type = other RNA
atggaggccctgcctgtgtccattgccgaccggatctgcttcgacctcggaatgactaatcgccagcttttggggctggtcagctccacagccgatagatatcattgtttctctgcaggaggccgaaagatagtcgctccaagacccgacctgaagttggttcaatgctggatttcagactatatcaacaccgaattcgacatagatctgccttacgctacggcgtacaagaaaggttcttcagtgtgtcgcaacgcaggactgcacgccaagtctagccactttctgctgcttgacatttgccatttctttgagagttgcacccagcagatggtcaggaatctgttctcgggggggacctacaggcccacaaatgccgagttccgctcaagactgaccgcggatgatgtggacctactggtagccctctcttgctatcgcggctccttagcgaccggaagcccatgttccccatttattgcaaaccggatcatggcatcattcgaccacgaaattgctgcacgactgggcgagcgttttgtgtatagtaggtacagcgacgatatttgcatctctagtacagaatggatagattctgctgagatcagcacttttgttgggtcccgattgaggcaaaaagggttcgacctcaacagtgataagactcggtgtttcggccgcggccacctcagaaagatcacaggcatctatctggattgcgatggggtcttacggctgggccctcagagaaaagctgaactaaagaggtccttgtatcaggtactcatgagggaatgtgaccgggagtgtgctcttcgtgtgctgggtcatctttcgttttgtaaacaggtggagccggatttttgcaatgccctcttggccaaatacgcctcctacggaaaagcagtgagcagcggtggagtgatgcccgctctcgttgagttagcctacggctga

SEQ ID NO: 12141 - RNA, 909 nt, synthetic construct
  source 1..909: mol_type = other RNA
atggctgacgacttactgctggatgaggaatatgttaccaagctggtgaacagcagcgccaggtactacctcactcacctcctagagatcaagggtaaaaaaagaaaagtacacaagcctttgccagacatttgtctgctgcagtactgggtcatcgagaatattctgtctcaagctcctacaccagcccgttgtgccactgcctatgagaagggatcctgtatcctggccaacgccgcagtgcacaaggacaatagccatatcatgcaactcgacatcaaacatttcttcgactctatcacctctgatatggtgttcgattactatatcggcctagatgcgagactctctgacgctgatgcccgcgcccttcagcgaatatccacctatcgggggactcttacagttggctcgcccattagcccctttttagcaaatcggattatgatccctgtggacatagagatccaggaatgcctgccatccggaataacgtacacaaggtacagtgatgatatgtgctttagttcaccggaattcattgaacctcagctcattgacgcgattcaggaggttttgtctaggtactccctgcgcttaaacacggcaaaaacccatttttccggtcgcggtgaccgacagaaggtgacaggggtggtgttgattgcaggcggcaagctgtcattgggaagcatgcggaagtctgctctgaagaaaatgctttatgagttcgtccgttacggaaaaggcaatccctccaagatactggggcacatcaacttttgcaaatcaatagatccagaaagcgtcgaaagcatcctcatgaaatattcgaccagggggcccgctgtagagcttctgaaggccgctatcgcaagaagtgaatcagagagaattagtgagggctga

SEQ ID NO: 12142 - RNA, 921 nt, synthetic construct
  source 1..921: mol_type = other RNA
atgtcagtgctggatctcatggcgtttgacctgttgttagatcgagactatcttgagagcattctacacaataaaagggggcagtatcggaggattagactgcagaacgatagagtcgtttggcagccctctgctaccctcgcattgatgcaatattggctcgtcgactggatctctgagatggacaaaagggagcttccctttgctaccgcctacgaacccggaatgggcattgtcgtgaatgccaagcgccacatcggtgctaaacatgccctggcgatggacatccataagtttttccctagtataggggcacacatgctgggaggctatttcgccagcactattgaggagagcggggcctccgctggaattgaggatagagacataggcctgcttctggacatagcattatttaatggcgggctcgttatgggttccccttgcgccccatacctggccaaccgagtgatggcccccgtagatgaacgtatctggctggaggtagctaacacgagagggctgacatatacccgctactcagacgatctcttcttcagctccccggagtggatcgaaccttcaatcgtgggcgaaatcgcaattctgctacaggagtgcggcctccaggtgaatagttccaagacccgcttcatgtcagaaggcacaggaatcaatattgccggcgtgtatgttgggcaaaagcggatcactctgggccagaagaggaaacgggagttgaaggaacgtttgtaccagttctgtactaacgataaccctaccccagatagtgcacggtctttacttggattcctctcgttttgtaagagcgtcgaaccatcttacgtgggatttatgctgacaaaatacagcacatacggtggtgacataatgctgcgcatcaaagacgcttgctcctga

SEQ ID NO: 12143 - RNA, 966 nt, synthetic construct
  source 1..966: mol_type = other RNA
atgtcgctcatcgaaaggatctcccgttccctggacattgacgagaacctcataaaaacaatcgcgagaacctctaataagtactatcgcgttttcagcatctccaaaaagtttggtggggtcaggtccatttaccaccctagccctatacttaaagtgtttcagtactggctggtccaaaatctgatttctcacctacccgtcagtgagcatgctaccgcttatggattaggatgttcaattaagcgaaatgctcagctgcacgccgccgccaagcatatagtccggatggacgttaaaaacttctttccaagcatcaggtttcagctgttggctgacagaatcaatgcttttcgggacaccattccaggaggcgccagtcttacggaagaggatctccaactcattaatggaatctgtttcgtgcgagggcgcctggtgatcggctcagtatgcgcacccgccattagcaacgccgtaatgtatccgttcgattgcgaagtgtcacagcaggccagggcactgcacttgacatacagtaggtacgcggatgacatcgtgttctctagcaatgaatggatccatccaagcattgtggaggatatagacgggcgcttagggaaattcggcatgaaactaaatagggagaagacgatcttcatgggcggatcagaccggaagatggttactggtatactgttgaatacaggccgactgtccattggccgggccagaaaagagagtatcaagaagatgctctaccagaagttgagaactggggccggtgataaccggaagatcctgggttatcttaactatctgagagacatcgaacccgatactttcaaccgcatggtggtcaagtacaactctttttttggcagaaacattatgcgtgtgcttacagaggcccctgcagatacccgcaaagcacaggcggaggcagctcctaccaaaaagccctga

SEQ ID NO: 12144 - RNA, 912 nt, synthetic construct
  source 1..912: mol_type = other RNA
atgggcatcgaaaatcgtattgccaataacctgggacttgacccacagtacatcatcaatatatctaagcggaacgatctgtatcgcaagttctatattaagaaacgaaacgggaaattgagagagattcttcaccccagcaaagagttgaaaatcatccagatctggttagtgaagaacatttttgatgagttcccggtgagcgagtatagttatgcatacagcaagggaaattccataaagaataacgccaaagagcattgctacagtaattatatcttccaggcagatatctctaactttttccctagtattgatcgggctaaactggagacatactttgatgagaacaaattcatagtcgacaaactgggattgaccgacgaagacatagacttcattctggatgtgtgtctctacaaaggtgagtatctggtagtcgggtcatgcgcttcaccctgtatctccaacttaatcatgtacaaattcgacaacgaactgaacaagaaactcctaaaagaaggtaagtacatctataccagatatgcggacgacatcgccatttcatccaaaaattatatctccgtcacaattagggatattgtggaatcggaactcaagaagatgggtttttctatcaataatcagaagacccacttttctaacaagaagagccggagaaggattacaggggtggttctcgacaataattcctgcaaaatgacgattggcaacaaaaagtacaaaggatttcaacgcaagctatataattacctggttaaaggcgagggcgacgaggggtatattaagggctacctgagcttcatcaaggaccttaacatagaacaatacaaacagctcaagaagacttacaagaggtacgataagaagaagaagtttttcactgattga

SEQ ID NO: 12145 - RNA, 924 nt, synthetic construct
  source 1..924: mol_type = other RNA
atgcgcctaagcgagcgcattgcaaaagggatcggaattgacgaaagctacgtgatcatcattgctagccggaataatctctacgccaagtactacattccaaagaagaatggaaggtacaggttgatattacagccctctaaggagttaaaagtattacaacattggctgctgagaaacatctttgcatatttccctgtctctgaatattcttcggcatattccaagggaaactcagtgagaaaaaacgctgccgtgcataaggaaggtaggtatttgctccacacagacatcactaattttttccccaccatctcaaggaccatgctcaagcaatactttcagtctaacgaaagtctgacccggaaactcgggatggccgacgaggacatcgaacttatcctggatatctgcctgtacagaggcgagaatttggtcgtgggctccgtggcatccccgcagattgcgaacatgctgatgtatgcgttcgatctggaactcaaacagatgctagatgggttcggcagttttcgatacacacgttatgccgatgatatcgttattagcagtatgtcattcattgacgaacaggttctgaaacagaccgagcagcttatgattaaatacggcttcaaaatgaaccatgagaagacttactacatgggtaagaacggcaaacgacaggtgacgggaatcgtacttgacaataaccgcaatgctctgacaattggaaacaagaagtacaagaagtttcagagaatgctttatgactacctggtcaagggtcacggggatctgggctacatcaaagggtatctggcctatatacaagaggtttcccgtcagcaatatgaccagctcgctgagatatataaacggtacgatatagagaatgtgttgtttcacaatgccaacggccggtga

SEQ ID NO: 12146 - RNA, 903 nt, synthetic construct
  source 1..903: mol_type = other RNA
atgaacctgttggaacagatgaaccgtgacctgggaattgacaaacaatacatccgaaattgtgccaaaaggaacaatctgtacgccaggtactatataaaaaagaagaatggcgggagacgggaaattctgcaaccgagtaaggagctgaaggtcttacagtactggcttatcaacaatttctttaaccagttccctattagcccctacagttccgcctatcagaagggctgttccatccgcaaaaacgctgactgccacaaatatggcaagtatatcctccacacagatattgtgcattttttcgagtccataaccagcaaatctatgaatagctttttcctccgcaacaaagacatcctaggtgatatgcacttaacttttgatgagactagactgatcttgaatctggttctatacaagggcgcatacttggtagtgggctcagttgcttcaccaatgatttccaactgttttatgtacgagttcgatatgaaactgggagagatcattaccaagcggaatatgaaatacaccaggtatgccgacgatatcgtcatctcatctgataactacattgataactctatccttgatgaaatcgacattctcctcaatgagtatggtttcaaacgaaacattgacaagacgtatttcatgtgcaagcgcaaaaagagagaagtgacaggactcgtgatagacaataatgataactcgctgagtatagggcataaaaagtacaatcagcttaagcgggacatctacaattatctgataaagaaacaggggaactgcaatcagatcaagggaaagcttgcacatctgaaaaacgtgaacatcgacaagtatattgcgattaagaagatctactccaagtatgacaaaagccacgaaattttttga

SEQ ID NO: 12147 - RNA, 924 nt, synthetic construct
  source 1..924: mol_type = other RNA
atgagtctgttacagaggatgtcctctgaactccgtctagatcctgattttattatgtccacggtcaattccaccaaaaagtacaggatctacaaaaagggctccaaattcatctataatagcagtggtgagctgaaaactctgcagtattggttgaattcaaagatcttcagcatactcgagtattctaaatttacagccgcctatcaaaagggctgctcaattaagaaaaacgctagcattcatagcaagagcaactacatcctgcacaccgacatagaaaacttcttcaataatatcaccgagtaccacatcaatattctgcttgaggagattaaccagctcggtaagtctgataaggaactgatcaaaaagatcatcttgtacaaggggcaccttgttattgggagcgtctctgcaccccacatttccaactgcgtcatgtacaaattcgacattgagttatatgacacaatcatcaacaacacaaacatgaaatacacccggtatgctgatgatattacgatctccagtaaagagtacataactcatgacgtgattaaaaaagtggaagcactgctcgttaagtacaagttctcaatcaacaacaacaagacttacttttcgtcaagagcgacccgaagacgcgtaactggaattacaatagacaattccaccaatgagctaagtctgggacacaagaaatacaagttcatcaagaaggagatctacaattttctggtgaaagagcaggggtgtaaagataagatacttggaaatttggccttcataaaggacatcaactctaagaagtatgacgaactcaagtctgtgtatctgaagtatgacaaggaaggcatcgtgtttagtaaagaagagaaagacattgaactgaaagatgaacatgagatttcaagctattga

SEQ ID NO: 12148 - RNA, 939 nt, synthetic construct
  source 1..939: mol_type = other RNA
atgtcaatgctcgaacgcatttcgaatgatcttaacttgaaagtgagctttatcgagaatgtcctgaaacaccccaagaagcaataccggatatattacataaggaaacgaaatggcggacagcgcaaaatctatcacccaagtcccgtgctaaaaaccttacagtattggctcgtcaacaatgtgttcaatgagtttaacgtgtctatctatgccactggatacattaagggaaagtctattaaggacaatgctgaggcccataaagatagcaactttattctgaacatggacatcgagaactttttcgagtctatcaacaagaaacacgtcaacgagctggtgaatgcaaacggtgaatattcctcactagatatctatcacctgaacaagatctgcttctacggcgactttctccccgtcggctcagtatgcagcccgcatatctccaactgtataatgtacaagttcgacaatgaagtcgttgagaagctgcctaacaattttcggtatacaagatacgctgatgacattactgttagctccagtagctacataaatgataacgtgcaggtgattttagaagaattgctggagaaatacgagttcagggttaatcacaataagaccagatacatgtccaaaaaacagagtcaaatgattacgggcctgaacgttaatgatggcaaggtgacaatcggtactgacatcaagaaacagttgaagaaagacctgtataataacctgaccaaagggaccggggatagcgaagtaattcttgggaagctcaacttcctgaaatctatcgaaccagactacttcaacaagctgatcattaagtactccaagtatgcgaatgtgcttaataaactcaagaacgacgtgaaggagcagaagaatatccctatcgagattaacaagtcaatagaacatacatga

SEQ ID NO: 12149 - RNA, 915 nt, synthetic construct
  source 1..915: mol_type = other RNA
atgaacattatagacattatggctgatgatttgaagctggacagttcctatatcctgaaaattgccaatcggtctgacttttattacaaggactacacaatcaagaagaaaaatggaggattccgacatatttcacagcctagcccagaattgaaaacacttcaatattggatcgtgaagaacattctatgcaaactccccatttccaatatcgcttctgcctacaataaagggaacagcattaagaaacatgctcagatacatagcggtgcaaaacacattctccacaccgatatcaataattttttcccaagcatccactttagtcacctctccagtatcctattcaagcacaaatacatattcgagaacctgtccattgatatcaatgacagccttccgtacatctccaaaatttgctttaggggggacggtctgtccataggcgccgtctctagccccatcatttctaacatcattatgaactcgttcgatgaaaggctgtacgattattgcaaggcaaataattacctgtgttcacgctacgccgatgatatctatatcagcagcaactcttatatcaacgactcagtggttgtgttcatatcaaacctcttagacgacctggacatgtcgatcaatagtagtaagacccgtttttattctactaagtaccgcatgtctgtaactggcttaataatcacaaacgattcccggattacgataggcagcaagagaagatcagagatagagaagatggtgtacaataaaattgtcaacggaattggcgacaaatattcaattatgggctacctggcgtttctgaaggatatcgagcctaacacctataacaaccttatcatcaagtattccaagtactgtgacggggatgttatcaataaaatcttggaatga

SEQ ID NO: 12150 - RNA, 924 nt, synthetic construct
  source 1..924: mol_type = other RNA
atgactttgatagaaaagatttctctagacctcaacttagataaactttatctggcccggattatttccagatccggcttttactacaaggactttataatcccaaagaagaatgggggatttcgccgtataagccaacccagcgccgaactcaaaacgctccagtattggatcaccaagaatatcctgtgcaagatccctataagcaaagcagcgtgtgcatacaagaaaggcgactctattaagaaacacgcccttctacattgtaaatcacgacacatcttgcatactgatatcaaggatttcttcgaatctgtagattcatccaagctgataaagattctcgaaaaaaaccacagcgtgtttgaggatattaacctggactacaacagcagtatcgatgacattaggaagatttgcttcaggaagaataaactctgtattggatccgtttcttcgccgatcatctcaaacatcgtgatgtacgatttcgataatgctctgaccggatattgcaaagagaatgggctgatttatagtcgctatgctgacgacatctatgtctcttcagacaagttcattaaccacgacatcttggagtttatttctaacgagttgaataagtgcggcctgagtatcaataggtccaagactagattttattcctccaaatacaagcggagcgtgaccggtatagtgatcaccaacgatagccatatttcagtcggtaccaaacggcgaacgatgatcaagaacatgatttacaacaaactggtgaattccgaaggggacagtaacgagatcttaggctacctgagtttccttaaggacatcgagcccgatacttaccagagatatctgatcaaatactcgaaattctgtacaacagacgttcttacagccctgagcgataaaaatacatga

SEQ ID NO: 12151 - RNA, 918 nt, synthetic construct
  source 1..918: mol_type = other RNA
atgaatatcctcgagaaaatttcccttgatctcaagctcgatctgacttacatctcccgaatagcggacaggtccagtttttactataggaaatacaccatcgagaagaaaagcggcgggtttcgggagatctatcagccatctgcagagctcaaaacactgcagtactgggtggtgcataacgtgctgtgcgccttgcctatctcagaggaagcttgcgcatataataaaggcaattcgatcaagaagcatgctgaaaaacaccagaagtctaagttcttattccacacagacattagaaacttctttccgtcaattcatatgtcccacctggcccctatcctgagagctaacaagggaatttttgacaagctgggcctggatcttgaacagtctatccagaatattgggaagatatgtttcaagagtgactcactttgtataggaacggtatccagtcccatcatatccaacatcattatgtacgctttcgatgtgcagatggccgagtactgcaaagccaaaaactacatttatacccggtatgccgatgacatatacatcagcagcaacaatttcatccccatcgatatagtttcgtttatcgcctctaacttaagccaaaatggtttcaccataaactctggaaagacaaagttctattctaccaaatatcgccgcaagattactggactgattatcactcacgatgggaaagtcagcgttggtctgcaaaaacgtaacgaaatcaagaaaatggtctatgacaaactgattcacaataagggcgacagtctaaaaattctagggtacttggcgtttctcaatgacgtggatccaaaggcctataatgacatcatcattaagtacagccagtactgttccggcgacattatttcagcattgaacaagagctga

SEQ ID NO: 12152 - RNA, 915 nt, synthetic construct
  source 1..915: mol_type = other RNA
atgaatataattgctagaatggcacaggacttcaagattgatcattcatatttgagcaagatcgtgtaccggtctgccttctactacaaggactactacattaacaaaagggatgggaagacccggcgcatatctcaggcaagtccccaattgaaagccatgcagtattggatagtggaaaatatcctggccaagattccagtcagtaaaggggcttatgcctataagaaaggtgattcgatcaagcgccatgctgatatacaccgactcagcaagcacattttccacacagacataaaagactttttcttcaacatccacttcgaaatgctgagatgcgcattaagcaatcatagccatatattcgatgaaatcggtatcgattcttctgaggccttttcagacattaagaagatctgttttcgcaatgacgagctttgtatcggaactgtatcatctcccatcatttcaaacatcgtgatgtacaatttcgatgagaagatgatcgactattgtaaccgtaacgggtggatttattccaggtacgctgacgacatttatatttcgtccaactactacatacctaaggaggtcaagaattttgtgtccgccgagctgtccgacaatggatttaagatcaacacgaaaaagaccagctttatttccaacaagtattgccggaaagttacaggcgtcgttctgagcaatgatggcagagtaagtgtgggcacaaaacagcgaaatgcgattaggaaaatggtgtacgacaaaattatccacaaaaagggcagtccagaaactatcctaggatatatcgcgtttctcaaagatatcgaacctcaaacctacaacaacatcatcatcaagtactccaaatattgcgcaggcgatgtgattgacgagattagcaaatga

SEQ ID NO: 12153 - RNA, 912 nt, synthetic construct
  source 1..912: mol_type = other RNA
atgaaaatggtggacaaaattgccgccgacctgtgtcttgatcctgattacatcgcctcagtcattaagagatcaaggttttactatcgcgattactacatagacaaacgagacggtggccggcgaaaaatttcccagcccagtcccgagctcaaaactcttcagtattgggtggtgaacaatattctgaataagtttcccatcagcaatagtgctcacgcataccagaagggctcctcaataaaaaggcatgcacaattccaccagaacagcaagcatatattccacaccgatatctgcaaattctttcctagcataacttacgaacacttgcagccaattctgctttctaaccctaaactattcgaagacctggagattgatttagactccgttgaaaccattcgggacatctgctttcgggaaaattctttatgtattggcacagtttccagccccatcatctccaatatcatcatgtaccagttcgatgtaatcatgctcggatactgcaagaaaaatcatctgaagtattctcgctatgcggatgacatttatttgtcctcgaactcttatatcgatctggcccatgtttcatttgtgagtgacaccctccgtaagtttgggttcagcataaacgagagtaagacctacttcagctcaccgaaatatagaaggaaagtaacaggactggtcatcggcacggactcttccgtgactattgggagtgaaaagagagcattcatcaagaaactggtctatgacaagctcgtgcacaacaagggggacggtaacagcattctaggatacctcgcttttctgaaggatatcgagccacagacatataacaatatcatcgctaagtactctcaatactgtaaggaggatattatagaggccttgaagaagtga

SEQ ID NO: 12154 - RNA, 963 nt, synthetic construct
  source 1..963: mol_type = other RNA
atgtctagcctgatcacaagaatttcatcgaatctccagttaaaagacgactacatttcaagcatcattagacgctccaactattactacaaggactactacattcctaaacggaacggaggacgtcggaagatttcccaggcctccccagagctgaagaccttacagtattgggtgaagacaaatatactctcacttctgccaatctctaaggctgcgtttgcctataaccgaggtaacagcattaaaaaacacgcgacatttcataaggaaagctacttcatcttccataccgacataaaggattttttcccgtccatcaccagtgagcacctggtggcagagttggcagctaaccgtggcatcatcgaggctgccaatctgtgggatgatgatattttggatgtagtgagctctatctgtttccggaggaatcatctgtgcattgggaccgtatccagcccaattatctgcaacatagtcatgtacgccttcgacgagcattttacgaactattgcaataggcggaattggaaatattctagatacgcagacgacatctatattagtgctcaagaatatctcccctcaagtctgcagtctgaggtcaatgagaagcttcacgaaattggcttcagttccaacgcctataaatcatggttttgcagtaagaagtgtcgcagagagattacggggctaatactgactgaaactggcaaagttagcgtgggtcttgaaaagcgcctagctatcaaaaaaatggtttacgagaggatcatgcacggcaggggggatcccgataccatccttgggaacttggcctttctgaaggacgtcgaacctaactcctataattctctcctgatcaagtacgccgcctactgtgacggagacgtgatagatgcaatcaagacaggccctaaaccccaccgagtgataactctggatctccccgacatctga

SEQ ID NO: 12155 - RNA, 924 nt, synthetic construct
  source 1..924: mol_type = other RNA
atgaattccattatagacaggattgctcgggatctgagcctcgaccgcgattatatcgcaagtatcattcggaggtcatccttctattacaaacgtttcactattcccaagcgcaatggagatcctagggtcatctatcaggcctctccggaactgaagtcgctccaatattgggtcagggagaaaatcctgaaatttctgcctgtgagtaacgctgcgtttgcctatcaggccggcaattctatcaaaaaacatgcggatttccataaggaggcccgctttattttccacacggacattaagaactacttcccttccattcacgagaaaatgtttacagatatcctaatcgcccaccaggataagcttcaagcacagggaatgtggttcgatgacatgtgcgacgtgattgcaaaaatttgcttctatcgaggcaggctcagcattggtactgtgagctcccccatgatctccaatatagtagcttatcgatttgacgaactcataattgcctattgtagagagcgcgggtacagatacagtagatatgctgacgacatatacatcagttcaaatcggtacataagccagtctaccaagaagtttgtagaggttagcttatacgagtgcaatttcaagatgaacattagcaagacatggtttcgttcaaaaaaatctcgaagaaaagtgacagggttgatcataaccgatacaggccgcgtgtcagttggattggaaacccggaaaaagatcaagaacatgatctacaataggcttgtgaacggcaacggatctccagaatctattctgggttacctggcctacctgaaggacgtcgaaccacccacctacaacaagtacatcatcaagtattccacttactgtgacggcgatgttatctcggcaatcagacgggggagctga

SEQ ID NO: 12156 - RNA, 930 nt, synthetic construct
  source 1..930: mol_type = other RNA
atgtctaagagcttggtggaggaaatatccgcgtcgctcaggattagcacggaacgcacccaagagatcattattaacgcggacaaactgtacaagatctactccatacccaagcatagtggggggaatagactgatctatcagccttcctcgcagctcaaagccatccagtactggactttggacaacattatctctttatttcccgtctctgatagggcattcgcttatgtgaaaggacggtcaattgccagcaatgccaaagcacaccgccaatccaaataccttttccataccgatattcacaacttcttccccagtatcacctctagtctcttcgataagcagtgccttaatcgtttctctagcatattggaggaaacaggattttcctttggcgacacaaactcagtcctgcataaaattctgtttcggaaggataagctaactatcggcgccgtttcctctccagcaattagcaatgccgtgatgcacgacttcgaccagtcactgacaaactactgtcttatctcagggtatgtttacactagatatgctgatgacatatacatcagttcaaaaagcctccttcctaaacagatcaaggaggacatctttgccgaaatgcacaagtttggattcagccctaactacaagaaaacatccttttggaatggctcctctcatctgaaagtgactggtgtgaacgtattagctggttcaggccgactgaccatcggcaccagaaacaagaagatgattaaggggatgctgtatgagtatctaatgcacggtaagggcgatccgacgaaaatcctgggatacctggcttacgtcaaagaaattgagccaagcttctataataccctcatcataaagtatagcgagtacaggaatgagcacatcattaagtatctgaaggacagttga

SEQ ID NO: 12157 - RNA, 933 nt, synthetic construct
  source 1..933: mol_type = other RNA
atgaattttttgaattatctccaggccactggctatcataataacctgctcattgaagtcataaacaatctcgataggtacgtctataagttcaagtttaaaggtaagtggcagatagcaccaaaatgggagctgaagatactgcagaaaatcttgaaagagtacctcaccaagtattacggctcaattatcagcgagaatgctaccgcttacattgtggggaaaaatctgtcttacaatgtgtccaaacatcaaggtaatagctacttcttcgtgacagattttaaaaacttcttcccctctattgagtttgaaaaggtcaagtacatccttaaatccaatcttaacaaggaaacagaggactccatagatctcatcctgaagatcgttttctatgataataagctgcagtatggattccctacttcaccaattatttcgaatcttatcctgatcgactttgacaagaaaattgagcaatatctgctgaactacttcaaagggaacaatattaagtacagtcgctatagcgatgatattacaatctccgcgaaatacaagattaacaagaacgacattctcagcataatcgaaaacctgatcaattcagagtatacgtatctcaagttaaacttgcagaaaaccagattctttgagaaatacagtcactctccctatattactggacttgtgcctctgaaccaacgtatctctatcggcaagaagaagtttaacatcatcaagctaaacacctatctgatcctgaataataaggccatagaaaacgacaacttttttcggaaagaaaatcagctacagtcctatttaaactacttatacctggtagacaagcacaactacatcaaattgaagaactacttcagcaaaaactacatcaatagcgacattttcaacagtttgtttcgaaaatga

SEQ ID NO: 12158 - RNA, 930 nt, synthetic construct
  source 1..930: mol_type = other RNA
atgtctttcttggagtatctggaagagaaaggatatcctaatactctcctgaggaaaatctttgacaaacacgaagactatgtgtaccattttcggattaaggggaaactgcaaatagctcccaaatgggagttaaagattctgcagaagatcctgaaagattacattactgacaattacgcctcgtatatatctaatttcgcaaccgcttacatcaagaaggaaaacatctcctataatgtgtccaaacactttggacgcaattatttctacgttacagatttcagcaacttttttccctccataaagttaaccaatatcaaggactatctctcaagtatctttaaagatgaggacagttcatcgcttgatatcatctttaacatcggcttttactccgactccttgcagttcgggttccctagcagcccaatcatctctaacatcgtgatgacaaaattcgacaatcttctgttcgaagaactgaagaccaaatttccaaagaacaacatagcctatagtagatactgcgacgacctcacgattagttcaaaatacgaaatctccccgaagattattaacaacattatcaacagcctgctgataaaggagtacacatacctctcaattaacaagaggaaaacacgaagcttcgagaaatactctcagtacccatatataacgggcctgattcccttaaaggataggactaccattggtaagaaacggttcaacattctcaaactaaatatctacctgagcctgaagaataaaaagatcaagaacaccgacttgttcgatactgatattgcgctctccagctatctgtcttacgtctatcttgtagatcctcataattacaaccgtttgaaggagtatttctctaaacgctttaagcccctagagattaagaacctttttaagaagtga

SEQ ID NO: 12159 - RNA, 915 nt, synthetic construct
  source 1..915: mol_type = other RNA
atggggaacaaatcagacattatagagctcatcagcattaggacaggcatatcttccaaaaaaatagaagagacgatcagtagttcaaagtgtgagtatagcgtggtgcatgcaaaaatcaagaagaagaagcggatcttctacatcccctctccgcagctgaaaattatccagctgcacctgattaaaatagttttggaaggatttgaggtgtccagtcatgctcacgcctacattaagaacaagtccataaaaaccaacgtcaactgccatatcggtaatacttttttcttccaaaccgacatcaaatccttcttcccttccatcaaggccaatcacattaaaaacgtgctgtcgaaggacgactccataagcaaggacgatattggcctaattctgagcgccgtggtgccttttgagtcactggatctgggatcgcccacctcacccattatctctaatatcatcatgctcgagttcgatcagaagattgaaagcttgatccaggagaattataagggcgctatttatacccgttatagtgacgatatcactatctcttctaagcagccaatacttggcattgacaagatcgttgacaaaactcttgaggagttcggctttgaaatcaacaagagcaagacaaaatacacccagctgatcgacaaggtaaaaattactgggatctttttgcacgcggataaaagaatgaccgtcggaacaaattttaagcgcaatctcaaacagcaactctatcttctatccaatggtttagatcctcagatagataacattcagattatggggatgttatcttacatccgagacatcgaaccagaatactacctgtccctcgtccaaaaatacagttcaagcacaaagagcattatcgatattatcaagtctgggatgtga

SEQ ID NO: 12160 - RNA, 1554 nt, synthetic construct
  source 1..1554: mol_type = other RNA
atgtataggttcaaagaaatccagggcaaagataactttgaacgtctggaactcgttaatgtgatggacatcttctaccttcaacacaaaaaaccatttttcaaggacattgtgaagttcgactttggctatacacttgtgtttaccgacggcgtgaatgattttgtgagtatagatcatccctctcgcctgtgggggaaaaatttcatcccaatcaagaacaatgaggaaatcagttacattcataacgacaaagtcaaaatgtcactcgacatatttaacaacaacgagaacgtgattgacaacttaaatgacctggaagagaaaatagagaactacttgtgctctaattactataacaagatcagttaccgaacagtatacaacaagtttaccataaaggagtttgataacacattcaccgtcttcaagctactgagtgaaaccaagagcattcgcaatacagttaagattcagaacttgatcaagatcgacaaagatctgattaacaagaaagaccttaacttgatcgtggacatcatcaacaacttcactaaccaaaaaacgagcgatgccgagaagaataacagctatctcaagaatatcatcaagctgttacttaagagcttcgaattgaagtactccaacaaaaacaaattcgagacgttctacattccgaaaaccgatggtactaagcgagaaattaatagccctattgaagaaatcagacccattctgaagtcgcagtcaaaaaagctgaatgcaatactcgagtataggattagcaagtataatatcgaggacaacattatagcgtatcgggatgggaaaagcatcaagaacaatgctgattaccacaaagaaaatgacaccatcatcaagtttgacgtatccaagttctttgataattgtcacttcgactattggaaagagaacctgtttttcatcctcaacgataacaaaaatctgatgaaacggtttgagaaggaaatggagggatttctttttcgcaaggataataagggattgtatatggggtcacccctgagtcctgctgcctctaatctcattgtggtgcctgtgatgagatacatcaagaacgtcatatcaaagttcaagtccgatattaaggtttctatatactccgacgatattactttctcttccaaagagataaacgatgagttcaatccatcgagactgaaaaatctcgtcaatcacgccttcgagatctataatctggactttaagatcaaggaagagaaatcactggtaatgaagaatcggaagagaaaagttactggactgagcatcaatcagcataatcaggtcactatctcccagaggcggtatcgtgagctgaggaccattcttcacctcttgtctaacggcatggagtttaaagatattaagggctttgacaatgagattgagttaacaagcctaattaactactacctcgatgtggacatgaccgggaaaatttcccgcctaatcaacaaatacgagaagacattcaatgaactgaagtccttcgaatctggtgaaaaatga

SEQ ID NO: 12161 - RNA, 1506 nt, synthetic construct
  source 1..1506: mol_type = other RNA
atgtttaagtttaacaaggtaaacaacctgaagatgatcggtgagaacgaaatccataacgaccttatgctggagagaatgatgttcgtgatgaaacccgtcttcagacgcctcgagaagaacaataaggggaaactcgtcatgctgtttagcgatggccgaaagaactacttactgtctacaagcgataagcggtactattcctctcccctcctatcctatgagggagacgagtataaggaactagagtccgcctcctacattgagagtaatatcgatagtctgaaattgctgaaagtgaagatatccgatatattgagcgacaatcaaaatattcgcatcaggaaaaacctgatgtttacagtctacgaagacgtggatgatatcaagctggttcagctgctaacccgaggcgacaagaagattcaatctgcattcaatatagagaacgttatctcgatttcaaaggacaaaatcaaactggacgatttcaaccttattaaggacctcctgaaccactacataattaagggcatcaaagatgtgtatatctctaataccatcaagctcttgatcgaagctcttgaacttaagtattcgggcaagaaggcatttgacacgttttatattcccaaaagtgatggtaccaagagggagattaattcaccaatcgaggagattagaccaattctcaaagaacagtctaaaatcctgaacgctatactcaaattcaggatcgacaaatacaaactggacgaaaatattatcgcctaccgcgaggggaagtccattaaagataacgcaagcctgcataaggaaaataaggtgatcatcaagttcgacatctcaaagttcttcgacaattgccacatcgattattggaaggaaaatctgttcttccacttcaaggaggacgaagatctcatggacaggctcatgaaagagtttgaggggtttctgttcaggaaggacaataaagggctctacatgggttctccgctgagtccttccgctagcaatttaatcatggttcctgtgatgcgctacattagcaatatcctgaagaagttcaaaaccgatataaaggtcagtatttacgccgatgatctgacattcagctccaaagtaatcaacgatgagtttaatgcgaaacggttaaaaaacatggtcaatcacgcctttaaggccaacggactggactttaaattgaaggaggaaaaatcactggttatggtgaacaataaacgaaagatcactggcttgacagtgaaccacagggacgaggttaccatatcacagaaacgttatagacagttgcggactgtaattcatctgttgagcaatggagtggagtttaaaaacattaagggattcaacactgagcttgaactcgtgagcctaattaactattacttagatgtcgacaccactggcaaagtgcggcggcttatatctcgcaatgaacgtgcttttaacgaacttaaaagaaagtccgaagtgaagtga

SEQ ID NO: 12162 - RNA, 1503 nt, synthetic construct
  source 1..1503: mol_type = other RNA
atgttcaaattcaataacgtggagaggataaatctgatcggaaataggaagatgaattacattgagcttcaggaaagcttatatacactgaagcccaagttcaagaagatcgtcaaaaacgataaaggagatttcgtgcttattttcagtgacgggaggaaagagtacattggcaatacaaatgcaggatcaatgtttaggccaaaaatgatggtggtgaactccatcgacgattataatctgttttccggcgatggccaaccttatcgcgtcgagatatcaagcatgagctcacttaataaacatctccgaaggattatcgatcagaactacacttttaacatcatcaccaagaagtttcgcatttacgaggaggacaagattattaaccttatcaagctcaagtctacaaccgaaaacgataaagacatcttcaaaatcgaggctatcctgaaaatcaagaaagaccttatcagcattgaggaactagaactgatcaaagacatcctgaatgattgtttaacttcccaagggaagtatgaatatattctcaactctctggagctcctgataaaatctatagacttgaagaaccggaacgtaaacactttttacacattctacatccccaagtcggatgggactaagagagaaataaatagccctatcgaggagatccggccgatcttgaaaaagcaggccagcatcttgaacgccatactagacttgagaatagacaaatacaacctcgacgaaaacattattgcttatcgggacggtaaatctatcaaagataatgcggattaccacaaagaaaacaagacgatcataaagttcgacattagcaagttctttgataattgccatttcgactattggaaggagaacctgttcttttcctttaaggacgaggactacgtgatggaacgtttcgaggagtatatgaaggacctgttatttcgagaagacaacaagggcctatatatgggaagttctttgtcaccagccgccagcaacctgattatggtgcccgttatgcgctacattaacaacattctgtctaagttcaagaccgacattaaggtcacggtttacgcagatgatatcaccttttcgtccaacgagattaatgatgagtttaattccaagagactcaaatccatggtgaatcatgcatttaaagttaatggcctgaagttcaaactcaaagaagaaaaaagcctggtaatgaagaatcacaaacgtaagatcaccggtctgtcagtgaatcacaacgatgaacctacaattagtcagaagcgctatcggcagctccggactatcatacacctgctgagtaatggcgtggagtttaaggatatcaaggggttcgagacaccattgcagcttgtgagtctgattaattactacttagacgttgataccaccgagaaagtcaagagactcatggacaataacgaaaagattttcaacgagctgaaaaaagaagctggtgtcaattga

SEQ ID NO: 12163 - RNA, 1530 nt, synthetic construct
  source 1..1530: mol_type = other RNA
atgcttagcttgatactgattgacaatgttcttatcgacattaacggcgaaattgtatctgagattgacatccggatgaaaaaaaacatcattagcgacaagaaggttcttgccaaactggtgaagtataacatccgcaataaactgattcagtccatcaaagatatcagttatctcgaggaaaacaataagttcgagaataatgaggagttcaatgatatacacctggagaatatcgagaagatcataaagacttacgatctgctgtctaacgatgagatttgcattaacgagggctaccccgacctgcctgttgtgacatatgacaaaaccctcattacggaattcataaacaacatttccatcaagctgagttatcgcaatctaaacatctctcatcgatatatcgaaatgaatgacggatatctctacattatcacgaataccaatgacatctacaataagtacaacatctacaagatcacagacgacaaggaaatgatcaaaatgattaagtacctcctggatatttccattagtcctgatcaacccaataacaaaccactgctcttggagctcttgctgactaggatcctgattcagaataacaatgaaaaactctaccagcactttaaaatcaaccagggcactaaaattagagacatttatgccccacataatgacataaaagatatctcccgtaagtttaacaacatattcaacgggatgctagaaactcagttaagcaataaaggagtcgaaaagcatctgtttgcataccaaaagaaaaaagggatcttagacaatgcgcttgtccacaagaacaacaagtacataatcaaaatggacatcgcaagtttctttgataattgtcgctatgaggatatctcgaaatatttcaagctactggtgctcggtaaggagaacttcaagaagaagaataacaaggatagcgtgatggatacattgttcaaggagattttcatcaatccggaaactggcgggttgtaccaaggtaatcccgcttctggatccctgagcaatcttctgatgagcaatgtcgccaaataccttaagaacgtgttaatcgattcaggcattacattttcaatctatgccgacgatatcaccttctcatctaacgaaaaatccgaatttttcaaccgaaaatacctgaagttcattctaaataaggcttttgaggtgtacaattacagtaatctgtcaattaaggacgagaaaaccataaagatgagcaacaataagagacggatcaccgggattaggattaaccacaatgatcagtgcacacttgatagaaagatgtacaggttactgaaaaccatattcttcaagttgtcaaagaacaagaacaacatcaacaatatctctatgacctttaacgagctgaaaggaaggatatcctactatcggtatattgacaacacgaacaaaatggaaaacctcgtgaatgaatatcagaacaccctcatcaagctgaaattgataaacgagcctaaagtagactga

SEQ ID NO: 12164 - RNA, 1365 nt, synthetic construct
  source 1..1365: mol_type = other RNA
atgaacgacttgttaatcatttccaaaaaccctttgcggatacttacaaataaaggaatcttttacccgtacgataaagacatcaagattatctctcggtttgataattctgagaaaaagctggttcaactgaacaatattctctttaaggacagctatgacctgctgatcaagatcatgaattactacaagacatccaattctatcgacttcaattactctaagaagtatcttctggagaattccattgaattaagagaatacagcgagttcttttctatgtacagatctttttccagcactccattggtgagtgtgagtaaaggctatatcctgctctaccccaattcgaagattagtaactccaagtatcttatctacaagctaaagagcaaatacgcctcagatattaagctattactcaaacgccgtatgagcctcgaaataattcagctctactgcatcataaaggacctggaggataacaacattgagctgtttaagaagatcaagatagagaaaaacggaaaggagagggaagtgattgatccaaacattaagatcaagaacactctgaaagagatttccaaaatccttgacaaacggctggaccgaaaaatcagcaacttgaaatatcccaacatcatggcctaccgaaagaatgtcagtataaaggacaatgcactcatgcacctgaacaacaagtacataattaaagtcgacatctctaactacttcccctccattgattggaaactgatcaattcaagattcatactcctgctctttcatggggtgacggataaatatatggatacgatcaagaaaggctttgtcgacgagaatgacaaaatgttcctgggcaatcctgtaagcggggttatatcaaacattatcatggtggacatcataaaccatatacagacgatttttcacaagtacgggattatctgttcgtcctattccgacgatattacctttagcaccaatattgacaacaacaagttgttcaacaagaagttcatcatcaaaatctgtaaccaggctttcaagatctataacgacaagttcaagatcaatgacagtaaaaccgtgtacctgaaaggaaatatgcgcaatatcaccggcattaccattaatcataaaaatcagctgaccctttcttcagaaaaatacgatgatatgaggaacaatctctatagttacatgaaaactggttcatgctattatgatgactatgagctgttggggaagatgtcatattatctacacattgatgagacaggtaagttcaggaagctttatgataagtacatcaacatcttcgagagcataaaacgcggcgatgaaaaaattgaagaatga

SEQ ID NO: 12165 - RNA, 990 nt, synthetic construct
  source 1..990: mol_type = other RNA
atgaatcgcgccaatcagtataacctgcccctcatacaagatgggcaaaagttcttgtcagtagcagacgatcagctgattcgacggttcaaggtgaaggacaaaggaaagctccgcgacgtaaacgatccaattccggaattgaaaaatgtgctccgggcttggaacgcggttattactgaccactacgcaaagaaactgaaagactccgacacttcccaggtggctcatgcttacctcccccataaaagtattcagacaaatgccagagcacatttacacagcccggtcatccagttcgacttcaaaggtttttatgacagctgtaagtttgagtacttcaaaaaggagctccgggaacttgatcccaggctagacgaccaaaacgagcacatcgtgaaaagattgctgatcgatcctcagactgggggcgtcacacaggggctaccagtgtctggcgcactggctggactgagtttaatccctttctgggtggaattagggaagaacctgccagacaacatccgttttacccaatattcagatgacctgaccttttcatatgtcggtcggatgccccctggctttaccatccctagcctcacccagaaaatctatgaggcgctgaagaaaacaggactggacttcaaactgaatcccgataagaccaggaggcagaaagaccagtacagaaaggttacaggcattagaatcaaccaccacaatcagacgactccatcgcgcaatgattacaggttccttcgacatgccctgtatgtccttagcaagtctgataaccttgataaggagttgacgaaatggggatttacatctaaatccgcctttgttggcaaggtgtcttacatgagaagcatagattccaccaacaagataaatcgcctgattatgaagtaccgtatgacctgcaggaagcacgacatttttacaacctggatcgatcagacttacaagcggagtgccttcgcctga

SEQ ID NO: 12166 - RNA, 990 nt, synthetic construct
  source 1..990: mol_type = other RNA
atgaacaataacaatccatactcattaccccttctacaggatggaagacagctgctgcacctcgccgatgataggctgattcgtaggttcaagataaagaacaaaggaaagctgcgggacgttaatgatccggtcccagagcttaaaactatcctcaaagcctggaatggacccctgacggactactatgtgcgccagctccagttaaacggtgtctctcacgtagcccatgcatatctgcccaatagaagtattcagacaaacgctcaggctcacttgtattcaccaatcattcaattcgacttcaagggcttctacgatagttgcaagtttgactattttcgggaatctctgcgggatttggacccaaccttggatgaccaaaatgagtacgtgatcaagcgtttgctgatcgatcctaatacaggcggcgtgacacagggactccctgtttctggcgctcttgcgggcctttcgctcattccgttttgggtggaattggcaaagtccctgcccgataatatccgcttcacccagtactccgacgacctgaccttttcctacaccgggcagacccctcctggttttacagtccctgccttaactcagaagatttacgaagtgctgaagaagacggatcttagcttcaaactgaacgccgacaaaacaagaactcagaaagagcaatataggaaggtgactgggatccggattaaccatcacaaccagaccactccctccagagacgactatcgattcctaagacatgctctgtatatcctcagcaagagtgacgatctggacaaagagctcgcagagtgggggttcgcaagcaagtctgcctttgtagggaaagtttcctacatgaggtcaattgacagcaccggtaaaatagatcgcctgatcatgaagtacaggactgcgtgtcgcaaacacgacatatttacaacctggatcgatcaagcttacaaacgaagcgccttcgcctga

SEQ ID NO: 12167 - RNA, 1146 nt, synthetic construct
  source 1..1146: mol_type = other RNA
atgatatatataacggtgaagcaaccacccatgtatcatcagatgacattagaagagtttctattccagaccgaaacaagaccggctgtgatcaacgagaacctcacaaatactaggacctacgagatggagtacgtttcccagcggtttatggataagtttaggttcaacatacccgctctgattcgtaaacttgatgcctttaacgattcaactgccgagttgcgagtgaagcctcggcactctctttaccgcgagtttcacattcccaaaaagtccgggggtcttaggaagatcgacgctcctgagcctgaactgatggacgccctccgtagactgaagaccatctttgaagaggactttcatgtgctgtatcacacctccgcatttgcatatgtaaagcatcgcagcacccttgactcagtaaaacgccatcaggcgaatgagtctaaatggtttgccaaatacgatctaagcaactttttcggaaacaccacactggacttcgttatcaagatgttctcgatgatctttccaatcagcgaggtcgtgaaagatgaacatggcaaagaagcactggtgacagccctggaactggcatttctggatggcgggctcccacaaggtactccgattagtccattgattaccaatgtgatgatgattcccgtcgaccacaaactcgccaattctttcagggatttcaacaggcagcgatatatctacacccgctacgcggatgatttcctcatcagttcccgctatgatttctcattcagagaagtcgagcagcacattgtggacgtgttgaaaagtttcgatgctcctttcacgatcaagtctgaaaagacacgatatgggtctagcagcggctccaattggaatttgggagtgatgctgaacaaggacaaccagataactgtcggctacaagaaaaaacggcagttccaagctatgctcgccagctatgtgatggactcaaagaatggaattttatgggacaagaatgacatccaggttatggagggataccggaattactacagaatggttgagggtgaagccattgacagaatcgtcgaacacgtaggcgagaaatacggggtcaacatcgtgaagatgattaagagtgacctgcggacttga

SEQ ID NO: 12168 - RNA, 1101 nt, synthetic construct
  source 1..1101: mol_type = other RNA
atgaccctggaagaattcctcttcgaagtcgacactaagcctcaggcaatgataaatccaaacttgaccaacacgagaacctatgaggtggagagaatttcagagaaattcctagagagattcgacgtggccaaattggttacgaaattgtcccagttcaatgcttccactgaagagcttagagcgaaaccgcggcacgacctttaccgaacctttcacatccccaagaaatcaggggggctccgaaagatcgatgcccctgagcccgagctaatggatgcgctgaggagactgaagacgatcttcgaagaagactttaaggccctgtatcatacatccgcctttgcatacgtgaaacaccggtctactgttgatgccgttaagcgccaccaggccaacgagagcaaatggtttggcaaatacgacctgtcagactttttcggatcgacaactattgacttcgccattaaaatgctcggcatggtatttcccttctctgaagtgatcaagagcacagtaggcgaacgcgaattaaggaaagctatcgagcttgcatttttagacggtggactgccacagggcacccctatctctccactgataactaacatcatgatgattcctgtcgattacaaactggccaatggattccgggatttcaatcaccagcgttttgtgtacacacgctatgccgatgattttctggtcagctctaagtatacttttagttttcgtgaggtggagaagttcattgtagatacacttaagagtttcggtgcaccctttacaataaagtcagaaaaaacccgctacgggagttccgctggcagcaattggaatctgggtgtcatgctgaacaaggacaacgaaataaccgtcgggcataaaaagaagcggcagttccaagctatgctcgcaagctatattatggacaaaaagaatggcaaggactgggataaatccgacgtgcagaccatggagggatataggaactactacaggatgatcgagggagatacaattgataagatggtggctcatatcggcgagaagttcggggtggacgttgtgcaattgatcaaggatgacctcagggcttga

SEQ ID NO: 12169 - RNA, 1140 nt, synthetic construct
  source 1..1140: mol_type = other RNA
atggtctacattaccgtgaaacaacccccgatgtataggcagatgactctggaagagttcttgttcgccactgaagccaagcaagagatcataaatccaaatatgaccaacacccggacttatgaagtggagagggtggggaataagttcctggaaaagttggacgtagccgaactaatcacaaagcttagccagtttaacgcttctacggacgaactcagatcaaagcctagaaaaagcctgtatcgggagtttcacatacccaagaagtctggcggtcttcgcaaaatcgacgcacctgaaccagaattaatggatgccctgcgaagattgaagaccatctttgaggaagatttccatgccctctaccacacctcagccttcgcttacgtgaagaaacgttccaccattgatgctgttaagaggcaccaggcgaatgagagcaaatggtttgggaagtacgacctgagcaattttttcggaagcactacgcttgatttcgtgatgaagatgttctctatgatttaccccttcagtgaagtggtccgctatgacaccggccgcgaggagttaagaaaggcactcgagctgtcttttctcgacggcgggctgccgcaaggaactccaatttcgccactgattacgaacgttatgatgatccccgttgactacaaattagcaaatggtctgcgagaatttaatcatcagcggttcgtatatacccgctacgctgacgactttttggtcagttccaagtacacattctcctttaaagagatcgagaactatatagtcgataccctcaagagtttcgatgcaccttttacaatcaagcctcagaaaacaaggtatggcagctccgccggctccaactggaatctcggtgtaatgctgaacaaagataacgagatcacaattgggcataagaagaagagacagttccaggccatgcttgcttcatacgtgatggataaacagcacgggacagagtgggacaaatcagatattcaaactatggagggatacaggaactactatcgtatggtcgagggagaggcaatagacaaactggttgaacacgtgggcaacaaatttaacgtgaatatcgtgcagctgatcaaagcggatctacggacatga

SEQ ID NO: 12170 - RNA, 1140 nt, synthetic construct
  source 1..1140: mol_type = other RNA
atgtattacataaccgtaaagcaaccacccagctatcaccagatgaccctggaagagtttctgtttggaggaaacacccagacgagactgatcaacgaaaacttaaccaatacccgcacctatgaagtggagaacatcagtgagagattcctgcagctggttaacgtcgataagctcatagaaaaactcatctggtttaatgaacgcactgactaccttagagagaagcctcgacgggattggtactacgagttccatattccaaagaaatctggtgggctgaggaagatcgacgcccctgaacccgaacttaaagaggctctttccaccctgaagacaatctttgaagtcgacttccaggctttataccacactagtgcttttgcctatattcacaagcgatgcatcatcgacctattgaagagacatcaagctaatgagagcaaatggttcgagaaattggacctgtcaaattttttcggctctacaactatggagtgggtgctgcagatgttcagcatggtcttccctttttctgaagtactgaaagatgagagggggcgggcagagtttgccaaggctattgaactgggcttccttgacggcggcctacctcagggaacgccattgtcgcccattattactaatatcatgatgatccccgtggacttcgaaatagcccggacactcagagagtataaccaccagcggttcgtttacacaaggtatgcagacgattttcagatttcctccaaatacagcttctcattcactgaaatccaaaatgtgattgtcagtatcctgaagaactttaaagcgccgtttacgataaattcaacaaagactaggtacggcagctccgcgggacagaactggaatctcggtttgatgctcaacaaggataacgagatcaccgtcgggcacaaaaagaagcgccagtttcaggccatgctcagctcctacgttatggataggaaaaacggcattgcatgggataaatcagacattcaaacaatggagggttaccgtaattattatcgtatggtggagcgcgagaagatagatggaattgtgaaacatctctctgacaagttcggggtggatatcgtgaaagccatcaaggaggacctggccgcatga

SEQ ID NO: 12171 - RNA, 1179 nt, synthetic construct
  source 1..1179: mol_type = other RNA
atggtgtatcagaccgtggagcggggcggattcgtatactacatcaccgccaaacagtcacctagataccatcagatgacactggaagaattcttgttcggggagagggagtcctctaagcactactctctcgagttcgaccctactggaacgaagacatacgaggtagagcacatcagtgacaggtttttatcaactgttaacgtggattggctgatatctaagttaagcatgttcaacgagcaaaccaaggatctgaggcagaagcccaggagaagtctgtattccgagttctatattcccaagaagagtggcggcttgagacggattgatgccccagaacctgagctaatgacagctcttagcgtcctgaagacgatttttgaacaggatttccgagccctctaccataccagcgcctttgcatatgttaaaggacgcggaacagttgactgcatgaaaaagcatcagaagaatgattccaggtggtacggaaaatatgacctcagtaactttttcgggtccaccaccccagaatttgtgctgcacatgttttcaatgatctttcctttctcagaagtcttgaaaaatgagagagggcgtgaagagttcaaaaaggcaatagacttggcgtttctgaatgggggcctgccccagggtactccgatatctccactgattactaacgtcatgatgatccccgtggacttcgagctcacacgccgacttcgcaacttcaacgaccaggcatttgtgtatacccggtacgctgatgatttccaggtgtccagcaaatatacctttagcttcaggcaagtagaaaatcttattgctgaagttctcagaggttttggcgccccatttcagataaaatcgtctaaaacacgctatgggtcctcagctggcagtaattggaatctgggcgttatgatcaacaaggacaatgaacttactgtgggatacaaaaagaagaaacagtttcgtgcgatgctaagctcctatatcatggatcaccgcaacggtgtcctgtgggaccggcacgatattcaagtgatggagggtcatcgaagctactacaaaatggtcgagggggaagcaatcgaccggatcgtcgaccacattaatcaaaagttcggcgtgaacgtggtgtctatgatcaagcaggatctcgccatgtga

SEQ ID NO: 12172 - RNA, 1143 nt, synthetic construct
  source 1..1143: mol_type = other RNA
atgtactatgtgactgttcgacagtctcccatgtataaacagatgtctttggaagatttcctctttaataccactgcttcaaccgctacaatcaatgctaacactgctaatacaaggacgtacgccgtacagtcaattagcgggaagttcttgaagaccgttgacgtggacgtgctggtcaccaagttggcttggtttaatagtattaccaaagagctgcactctaaggatcgccaggacttgtaccattccttctgcatacctaaaaagagcggcggactaagacaaatagatgaaccaaacgaagaacttatgtcggccctccgtatgctgaaggatatcttcgagaacgacttcggagcgctgtatcacacaagcgcctttgcatatgtgcgcgacaggtgtacaattgacgccgtgaaaaaacaccaggataatgagtccaaatggttcggtaaatacgacctttccaacttcttcggtagtactacaaaggagttcgttatgcaccagctagaaatgatctttcctttttgcgaggtactcaaacgagaggacgggaggcgggagctagagactgccatcgacctggccttccttaatggggggctgccccaaggcaccccattaagccccacattaacgaatataatcatgatcccggtggattacaagctgtataacaccctccggaattacaataaccagacatttgtctacaccagatacgcggatgactttatcatttctagccggtatagctttagtttcaaggagatagagaacctgatcaagtcaactcttgaggagtttggcgcaggcttttccattaattcgaaaaagacgaggtatggatcatctgcaggaagcaactggaatctgggggtgatgctgaataaggacaacgaaattaccattggacacaagaagaaaaaacagttccaggcaatggtcgcctcctatattatggattctaagaacggcaaaagttgggatatcaacgatgtgcaaagactggagggcctccggaactactaccattccgtcgagcctgaacgcatcgatgaaatcatcgaacatgcaaacgaaaagttcggtgtgaattttagaaaactgattgccgacaacctcaaggtcgcttga

SEQ ID NO: 12173 - RNA, 1149 nt, synthetic construct
  source 1..1149: mol_type = other RNA
atgactacttacatcaccgtgaagcaactcccccagtaccgacagatgaccattgaggaactgctgttcggaaccgaaccagctgatacctgtgtcaatgatggaataggcaacacgcgcacttttgtaactgagaactacgccaccgtcgacgaatatatgaaattcatagaccctgcccatctcattgaagtgcttaggaattttaatgacaaggtggactgcctaagacaggttcctcggtctagcctgtatcattccttctcgatccccaagagaactggagggttacgccggattgatgcccccaatgaacagctgatggaagctctgagagagttaaaaaccatcctggagacagagttccacgcactttatcacacatcagcattcgcatatgtcaaggagcgctccaccatcagtgccgtgaagaggcatcagatgaatgaatccaaatggtttgccaagtacgacctcacaaatttttttggctcaattaccctgccattcaccatgcaaattctggctaaaatctttcctttcagcgtgatcctccggagcagagatggtaagatcgaactcgagaaagcattggagctcggctttctgaacggcggattgccacaaggtacaccattatctcccatgctgacaaacctcataatgattcctatcgatcacactctggcgaatgcccttcgagactataacgggcagaggttcgtgtacacgaggtatgccgatgactttcagatctccagtcgcttcacattccagttccgggagattgagtctcttattgtccgggttttgcatgatttcaacgctcccttcagactgaaaccggagaagactagatacgggagcgcaaatggtgccaattggaacttgggcgtcatgttgaacaaggacaatgagatcacagtggggcaccgaaacaagaaaatctttcaggcgatgcttcacaattacatacatgatcgcgctaacggaattttttgggaactgaacgacgtgcaaacgctagaaggctaccgtaactattactcaatggttgagaaagacaccatcaacaagataatcgagcacacagacaggaaatttaacgtgaatgtacggcgtatgattgctgaagatctgaggcgttga

SEQ ID NO: 12174 - RNA, 1167 nt, synthetic construct
  source 1..1167: mol_type = other RNA
atgtatgagcaaatctcaattgaggaattccttttcaacgataacatcactaacaaagtgatcacccagaattcaagtaatacccacacatacaagctgaagtacataaacgagaaattgcaggatctgtgtagggttgaggatctgatcctagaattggacaagttcaactctgactataagtcactgagaggaattagcagggagaacctgtacaacacgttctttattcctaagcatagcggcggtctaagaagaattgatgccccaaatgcagagttgatgaatgccttacggcgcctgaaggcaattttcgaagaagacttccatgccctgtatcatacctccgctttcgcctatgtaaagaaacgatctaccatcgatgctgtgaagcggcaccagcaaaatggcagcaactggtacggtaaattcgatctgtccaacttttttggcagtacaactatcgagtttgtcatgaatatgctctccatgatatttccctttagcgaggtggtgaagacaaagcatgggaaagacgcgctcgagcacgccctcgaccttgcattcctgaatggcggcttaccccaggggacgccaatatcacctcttatcacaaacgttatgatgattccgatcgactttaaactctcgaatacacttcgttcttttccttgctcccaaccaaacaatttgggcgagactgagaattaccagaggttcatttacactagatatgctgacgatttcctgataagttctaagtacgagttcgacatcaaagagatcgaaaagtttatagtggacacccttagcgaattcgatgccccctttaccctgaactccaagaagtctcggtatggatcccgcgcgggccgtaattggaatctcggaattatggtaaacaaagacaacaatctcactgtcggatacaagaagaagaagcagttccagaatatgctggcaagctatattatggataaacacaacggaaaagagtgggataaaaatgatgtgcaggtcatggaagggtacaggaactattaccgcatgatcgaaggggaagtcattgaccgaatggttgagcacatcgctaaaaaatttggtgaagaaatcatccaccggtgcaatgggagtaacctgaaactcgtgctggaggacttacgctga

SEQ ID NO: 12175 - RNA, 1137 nt, synthetic construct
  source 1..1137: mol_type = other RNA
atggtctatattaccgttagacagtcaccaatttatcaccaaatgactctcgaggagtacctgtttcagtcttatcagacccccccagtggtaaatgctaacatagccaacactcggacgtatgaagtggagaatgtgagcgagcatttctctagcaagataggggtggaggccctgatcgggaagctggtccgcttcaataacgataccgctgaactgcgtgctaaagagaggagcgagctttacgaaacgttctacattccgaaaaaaagtggcgggcttcgacgtatcgacgcgccaaaggctgagttgatggatgcgctgaggcggcttaagactattttcgaagacgactttcatgcactataccacacagcagcctttgcatacgttaaaaagcgctctaccgtcgatgccgtaaagcggcatcagaagaactctagtaaatggttcgccaagctggatttacacgatttttttggctcgaccacattggactacgccatttccatgttttctatggtgttccctttttccgagatcgtcaaagaacctcagggtgaagccgcgctcagaaccgcaatgagtctggcattcctgaatggaggtcttccccagggtactcccattagtcctttaatcacaaatgtcatgatgatacctgttgacttcaaactctcaaatactctgagaaacttcgaaaagcaatcattcatctacacgcggtacgcagacgacttcatcataagctccaagtatgacttcgatgtgaggagcgtcgaagaactagtggtgtccactctgaacagctttggggctccctttaccatcaatgcttccaagacaaggtatggatccagcgctggcagaaattggaatttgggagtgatgctcaacaaagataatgagattaccgtgggccacaagaagaaaaaacagtttcagtcgatgctgtacaactacatcacagataagaacaacggagttgcctgggagcgcaatgatgtgcaagtgatgtatggcctccactcatattataggatggtggagaaggagacaattgacgccatcgtcgcctacatcaacaagaaaatgaacgtagatgttatccgcatgatgaaagacgacttgcgatga

SEQ ID NO: 12176 - RNA, 1137 nt, synthetic construct
  source 1..1137: mol_type = other RNA
atggtctatataactgtgatgcagagtccgatctatcatcagatgacgcttgaggaatttttatttcaaaacttccaggcgcctaccatcctgaatacaaacgtgagcaatacccgtacttatgcatatgagacagtttcggagcactttacatcacgcatagacactgatgctttgatttgtaagttggtcagatttaacgaacagaccgaggcccttagagcacaagagagaagcacactctacgagacattccatattccaaaaaaatccggaggtctaaggcgaattgatgcacccaagcctgaactgatgaacgctctacgcaacctgaaaactatctttgaggaagacttccacgcattgtatcacacctctgcctttgcctacgttaaaaaccggtgcaccgttgacgcggtcaaaaggcaccagaagaacaattctaagtggttcggcaaactggacctgcatgatttttttgggtcaaccactctggactacgtaataaaaatgctgtccatggtgttcccattctctgagatagtcaaattcccaaatggtgaggccgaactcagaaaggcccttgacctggctttcctcaatggcggattaccccaagggacaccactgtcccctctgatcaccaatgtaatgatgatccctgtcgactataagctcgctaacgcttttcgggactttgataagcagaggttcatttacaccagatacgccgatgacttcattatctcttccaaggtggatttcgacgtacatcgcgtcgagaagcttgtggtggacaccttacacgaattcggagccccgtttaccattaatgaaagcaagacgcgatacgggagtagtgccggacggaattggaatctcggggtgatgctcaacaaggataacgagattacggtgggccataaaaaaaaacggcaattccagtcaatgctctacaattacatcacagacaagcgcaagggcatcagctggcccagggaggatgtgcagactatgcagggcctgcacagctactataggatggtggaacccgaaaccattgatgcaatcgtgaagcacacaaacgaaaaaatggagactgacgttttgcgtctgatcaaggatgatctgcggtga

SEQ ID NO: 12177 - RNA, 1218 nt, synthetic construct
  source 1..1218: mol_type = other RNA
atggaaagttcccatcagtgggccctcacgtctatcatctatgtgggatataattcccgactgcgtaagggtggatttaccctagtctacattacagtaaaacagagccccatttatcaccagatgactctagaggaatttttattccagactttccaggggcctgctgtcattaatgagaatatgacaaacactcgaacctatgagttcgagtccgcctctgcacattttaccaagagtattgatgttgacgctctcgcttggacactcgccagatttaatcagtcaacagaagaacttcgggagaaggagcgtatttcactgtacaataccttctacatcccgaagaagtctggaggattgcggaaaatcaatgcccccaaccccgagttgatgaatgccctccgcaggttaaagaccatatttgaagaggatttcaaggccctgtatcacacatcggctttcgcgtacgtgaagaaaagatgcactgttaacgcagtggaacgacatcaacaaaacaacagcaagtggttcgggaagcttgatctccacgacttcttcgggagtactaccctcgattttgttatggacatgttctctatgatctttccattcagcgaggttgtaaaaactgtgaacgggaaaacggaactgagaaaggcattagaacttgctttcttggatggcggcttgccacagggcactcccatttcccctacaataaccaacatcatgatgatccctgtagacttcaaactgtctaatgccctgcgcaactttgacaaccagaggtacgtgtacaccagatacgcagatgattttatcatctcatcacgctacgagttcgacgtccacaaagtggaggagctggtggtctttaccctgcaaaattttcacgcgccttttagcataaacgccagcaagacccggtacggtagcagcgctggcaggaattggaatctgggactgatgctgaacaaagacaacgagatcaccgtgggtcacaagaaaaagcgccagttccaatccatgctgtacaactatattacggataagaagagggggatcgaatggtcccgcgaagacgtgcagacaatgcagggcctgtacagttattataggatggtcgaagagaagccaatcgacgcaatcattaaacatatagatgatcggatgggcgtggacgtgattagaatgattaaaaaagaccttcggtga

SEQ ID NO: 12178 - RNA, 1137 nt, synthetic construct
  source 1..1137: mol_type = other RNA
atggtctacatcactgtgaagcagtcaccaatgtaccaccagatgactctggaagagttcctcttcaagacattcgagaacgacaagctgatatctaaaaacaccggaaatacccgaacctacgagttcgaacggatttctgacaggtttatgagtagaatcgacgttaacgagctggttggctatcttgcccattttaatgaatcaacggcacaacttcgagaaaaaaataggcaggatctgtattccacattttacatcccgaagaagagcggaggtttaaggaggatcgacgcccccaaacctgaattgatggatgccctccgtcgcctgaaaactatctttgaagagcacttccacgtgctttaccacactgccgctttcgcctacgtgccaggccgatctactattgatgccgtgaagcgccatcagaaaaatgagagcaaatggtttggcaaatacgacttgagtaacttctttgggagcaccaccttagatttcgttatgcagcagtttagtatgatttttcctttctcggagatagttaaatacgagctgggaaaaaacgaactcgagcgggcactcgagctggcgtttcttaatggcggtctaccacaggggacccctatctcccccttgatcaccaatgtaatgatgattcccatcgattataagctcgctaataagttccgggacttcgagagacagtcatacgtgtataccagatatgcagatgactttatcgtgtccagcaagtatggtttcaacgtgcgcactgtcgagcgtgtgatgatcgagacactcgctgagtttaacgccccctttacgatcaacgaagctaagacaagatacggatcttccgctggcaggaattggaatctgggcctgatgctgaacaaggacaacgaaattacagtagggaagagaaataaaagacaattcatgggaatgctacacaactatgtcatggataggaaaaaagggattgcatgggacaagcatgacgtgcaaacgatggacgggtactataattattaccgcatggtcgaaaaggaaacaatagatcggattgtggagtatattaacaaggagacaaatgcgaacgtcttgcagtacatacgcgaagatctgcggtga
